United States Patent Application Publication US 2024/0009291 A1 - sequence listing, part 2

SEQ ID NO: 2303 - DNA, 10176 bp, synthetic construct
  source 1..10176: mol_type = other DNA
atgaagattaaaaatattaaatacctcctgatctcgctcgtgcttctcatgttcctaataggtgccgccagtgcagcagacgatgccgtgaccctggaaggggatgcggcagcggtggattcaatcagtgaggacgcgagcgctcccataactacgacggttagtgaagatgccagcattgggaccacctttagtgacagcgccatcgaaagcgactctattcagagcaatgatgacctggagctaaagaacgtgactgacgttaaacagaaggattcctctgacgctcttaaagacggagaatccactactattttcgtgtccactgggggtaatgacaataacgacggcctgagtctggaaacggcggtggccaccgtggagaaagcaatcaatataacaaaaactggtggaacggacttcaccctcctgatttcaaacggtgactataacattgaacagatcaccatccctgtcggcaaatacatctctattatcggggagagcaaggagggcacaatcctccacgcctccggcgattacgggtttgacatttcatacgggtgtaattttgaaaacctgaccatatcggacctcaacagcacctcctctacaagtgccgccattaggatcattatggataattatgatatcaatataaacaactgcatatttaagaacattgggtctgcgtatggggcggtgcacgtttactccaatggcaaaacctccatttccaatgtgctgatcgaggactgctttgctaccaaatcagatgactcgtccatcatccatgtttctggaaaaggtccggttagtttggataacgtggagataagaggctcgtacatgctgccccccgcttttccatggagtaccccctatctgggggccatcatctttttgagcagcgccgatcctgatgtgactctcatgaacagtcgtatccacgacaataatgggtctatttactccatcatcacatcgaaagggaaaattaaaattatcaacactacaatttccgacaactgcttgaacgcttcatatgcaagcatcttttccagtggagtcaactccaacacggcaaccgacataactgtcactcagtcagtcatcgccgacaatatcctggcgaataacgccgtgggtctcctggacgcccgattcggtgtctttaaggtggaccacaatataatcatcaacaataagaacgcaaacggcaacgacctgtcagtaggcgacctttcgggcgcctcgtcattctccatcgacgataactattgggggacgaatgtcaggcctaacgataaaacaagcgagtgggtcatcttaactggagatgttgctgaatgcgcctttgtcggggtttgcgagaacatcaagattttcctcaacagctatgtgactgagagcggcgagatcggggtgattgatggcatgcccaccgtggagctggccgtggggtatgctctcaaccaggagaatccatctgccgtgaccattaaagatggagtgggaaccatcagttaccttgcttctatcgccggagaggaaactttgatcctgtccaccggagatgtcttcgaatttaatgtaagctctgagattggttctctgatttttgtcgatggctctgtggaaacatctggggacgggacacaggagaatccggtaaagaccatcgctgaggctttaaatatagccgcagacgggaaaatcattctcatcaaaaatggcacttataaggaaagcaatttgctcgtggataaggacattaccatcaagccatacgatggcgccgatgttatcatagatggagacaatcaagacaggatcttcacagtcacctccactgctaccatcagtgacttaagcctgaccggcgggaacgccactggtgatggaggtgccatctatctgaacggcggcaacctgactctgtccttcctgaatatctctaactgtattgccagtgacaatgggggtgccatcgcaactgctgccggatctgacctgtatctgtccaactcaatcttcacggacaacttcgccagcaagggccaatccatcttcattggaggggaagctgaaattttgatgaacgacttcgtcgctcatatggatgtgctcagtcccgatgcatctttcaacgccattagtataaacacagactctcctgtgagcatcgtgtcaaataacttcaacgacaatggcgcaattaagggccaggcagtgtacattaaggatgcgcctgtaagtctctctggaaacattatggacgatgaaatcatttacctggagtccggcagcgttaattccaatctcatctttatggatggcaaaaccctgaccgtggaaccgggggcggatgtgaacctgactgccactctaaccgacgataaggggaatctcatccggggcggcgagctcacgttcactgcaaatggtgtggctgtgggcgaccccattgacataagcggcgacaacgagctgagaatcccttatacccttccgtctgactcagagggcgacattattatttccgggtcatacagcttcgacaatggcggaacaatcgtaaacgggacaatcgagcccgatatcccatattggttcattgaaggcggacgaggatataaaaccttaaatgagaccgtggagaacgcagttgctggagacgtcatctacggcagtcccggcacttacatcgccaatggcattttcatcacaaaagacctgaccatcaaggccaacgaaacgggagacatcatactggatggtaacggatctcgcgtgttcaccataaagaaccaggccactctcagcttagttaacttggacctgagcaacggaggatctgagggcggcggatttgtgtacatttatgcggagggtggaaacctgaacgtcatcaactccacgctgcgggacctgaacatcgttggctatcccgagtcgttcgaaggaggagcgataaaaacgtacgcctcctccacaattaatattgagtcttcccatttcgagaacatcaactcttcagcctttgctccaattctttctgggttggggggtgtgaagctgagcctgaccataaaggattccagcttcactgatattaagggcacggccatgtatggcctcatgaatgctccagggaaagtgaacattgagaggtctaattttacaggtatcatcgggaacaccacgaagcagacggggctgatctttgcagactccacttcgaactatctgatcaacgaatgtctcttctcgaatatttcaacagactcggtgatccgatttaagaataatggaaatatcactgtgaccaagtcagttttccagaacatccaggacacagggggagccctctatatatataatccagggtctgccaaggtgaactacaatctcttcatcgataacaccaacctgaacgccgattccaatagggacatctattcctacggctccaatgtcgatctgtcctataacttctggggaaataacagcaagcccacagaaagccagatctatgatgtgtcaaaagcgccgtactggaccatcgaggagctatccatgaatagtgactatatctttacagacgagacggcagacattgctgtacagtttgtgggaaccgatggggaagaaaatctcacgctggatgacgtgatgcccgaatatagcttcaacctggaagccactaatggaacgcttgatgcaaacacggtaacgctcgtggataatgaggctattgtcacattcacccccccctctcttacaggcactgtgaccgtgacagccaccccaggcccggctgaattgacatttgacgtgattgagacctcaaaattgctggtcgtgtccactgccggtagcgatgagaatgcagggagctttgaaagcccgtacagaaccattgcatacgccctgactaaggcaaacgaaacacggaacattatctatctgatctataccggtgaggactacaaagagcacgacctcactctggcggggaatctgacgattatgggtgaaaatgatgaagtgaccattaatgcaactatcggcaggatattccttgtaaccggcaatgtcagcattaaatctctcactctgtctaatgggtttgaccaggactatgggggcgccatctacgtggatggaggtaatctgactctcgattacgtgaattttaattcgaaccgggcgtacggcttagggggtgctattgctaccagttcagagtcgaatctctacatttccaattcgatcttcaccgacaatttcgcctccttcttcggcggtgccattggcaccgcgtcgggctctaacctgagcattgacaactgcatattcagtgataataaggctagttacggcggtgccatctaccttgctggagagtccctgatcttaaccagcacctttgatggcaatcacatcctgctggatgatgggagaggaggcgccatttatgtaaacaccacagactctgtagtgatctcttcgaacgaatttgagaacaattttgcatacaccggcgaagtgatctacattgaaaacggtattgtcacactctctgaaaacacaatcgacggtgacaccatttacttggcgggagggagcgtaaactccaatctcgttttcatggataactccaccctgaaggtggagttgggcgagacagttaacttgactgcaagccttagtgacgactgtggaaaccccataagaggcggaagcataatatttacagtcaatggcgaagccatcggcgaccccattgacattagcggagacaacgagctgaagaccacttacacagttcccatcgatgcaagtgaagacatgatcatctccggttcgtacagcctggacaacgggggcatcgtgaaggcgggttccctgcacccttccgtgccgcactggtttattgaagggggaatcggatatgagtacctctctgaggccatcgatggggctgaagctggcgacgtaatctactacgaccttccagaggactacactgacgtgattagcagcaagaccatcaacaaggcactgaccattaaaaacaatggtacgaatatcgtgaccctggatggggatggcaacaatgtcttcacagtcagcgctgacctggacctgattaacttaaacttcgtcaacgggggaaataccaaaggcggcttcatatcacagagttccaataacctgaatattatcaactccagcttcaaaaatagtgcctccagttcctccgccgctgccatcctaagctccaatgggaatctaaacattgaatcctgtctatttgagaatatcagttccagcgcttcaagcaatggggggatcatctgttactctggaagcagcggaaacctgaacattaacaactcagccttcaacaacctctcaggtaagtatgacgggttcatcatctattccagcacttttacaaatattgccaactccaacttcacaaacctcctcggtccaacgagctctggctactggggcggcatctataacagcaaatccctcaatctcacaaattgtcagttcataaacgtgacaggccccaaaggggcagccatctattcaacaggatcactcaatgtgacaaggtctgtcttcgagaacattattacaaccaattcagtaatttattcatacagttccgattcctttatcaactacaacatcttcgcagacaacaacaaggccattgactcaacgcgcgccaatgccgactacaacttctgggggtctaatgatcgcccaagttcagatatcgtgagctcgagcatataccacgactgggtcattgtagagctgtcttcatccaatgataccattttcctgggatcaaccgaggatatctcgatcggatttttggcaactgacggagaggaaaactccaccctagaggatgccatgccatcctacggctttgagttgaccgtcacagatgggaccatcgaaccctccctggtcatccttgaggataatgaggcaaaggccgtttatactccctcggccgttggcactgtcaccattacagccagccctgggtctgctgagctcgagctgaatgtgatggacaaatccaccatgcttatcgtgtctgctgagggttctgatgaaggggacggcagttttgaaagtccatatgcaactattgcccacgccttaagtcaggtgaccgagacccggaacattatctatatcctatcctctgataaggcttacaaggaaagcgggttggtcctgtctggcaacgtgattatcatgggggaggacaactcagtgaccatcaacggtggcaatgaaagccgcatattcctggtgaccggcaatgcaagcatcagtgacctgatcctatctgaaggcatggctgatgattacgggggagcaatctacgtggatggaggcagcctggccctgaataacgtgattatttcacagtccaaagcatctctcggcggagccatctatatcaacaccagctctgatgtcagcataagctcaaatgtctttgaagataacgaggctgagaagggagaggcgatatacatcgagaacggcgctcttaccctcacggagaacgctatgggtaatgaaacagtgtaccttgctggggggagcgtaaactccaacctggttttcttggccaacagcacgctaaacgcagagtttggaaagaacatgaccataacggccaccctaaccgacgattgtggaaatgtgatccgcggaggtgccgtggtcttaacagttgacggcgagacgattgggaccgtggacctgagtggcagcgacccactcgagattgacttctacgtgccgcaggacgcaagtgaagacatgctggtgtccggttcatacagctttgacaacgggggaacagtctccacaggagcgatccacccttgcatcttctactggataatagaggaggggagatacggctttgagaccttggatgaggccatagacgcgtcccgtgacaatgatgtaatctactacgaccttccagacgactacgaggaaatactgaacgacaaggtcattagccataacttggtgattaaaaacaacggtaccggcattgtgactttagacgcggaccggcgacggatgtttgacctgagtggagacttggagctgaataatctcgtcttcataaatggggctacgaacaaggatggcggattcatctaccaaaattcaggaagcctgaacattatcagttccatatttaaagactctctttcatcatactccggtgtggtagtcttctcgaacgggggtgacatcagcatcgacggctcccggtttgaaaatctgacgtcacggaagggacctattgacttcgagtccaacagcggaagagtagacatccgaaattcagtcttcgaccatataaccggcaactacgatggatttgtgatctattgcaagtctgatctgaacatcgaggattgcaatttcactaatctcaacagtacacgcgctacaagtacaaactactatggagctatctgtcacgagagcggcagcggggacctgaatataagtggctcttacttcagtaacatctatggccctactggaactgctgtctactacaaaggttccgggacatataacataagtaaaaacatctttgaaaacatcagctccggcgccaatacttgcataatctatggcggcagctctggcaacatcaactataatgtgttcctggacattaactgtggcattaccacaagcggcggaaatattgactataattactggggcaccaacgattatgccggcctcggcatcaatggaaccgtccctaataattggatcattatgaatgtggtggccaatgattccgacgtgattgctgaaaacgaggtgccaatcaccgttgacttcaatcattacatcgagaacggcgagatcaaggagctggaggacagtctggccaaggaatttacggttcagttcacctcctctacaagtgagttagacgttgacgaggtgaatacaaccgaccaagtggcgattgccttctgcaccgctgtggtcggagagaacaacatcacagtcaagtcagataacgccgtagtcgagatcaccttcaatgcaagcgagccccttgaatctcatatgtctgtggatatggatgatgacaacaatctcattgtcacaatcacagatggcgaaggcaacggaattgagggcaagacagtgtgtctattcattggtgacgaggtcttaaatgccacgaccgattcagaggggaatgccgtcatcgctctcgacgaggtggacgacggtgcgtacaccgcaaaaataagctttaaggacccagagtataaggatatcaacgaaaacacttttgttgtgatacgcactaacgagttgattgaacctgtcgccgccaatattagcattgaattgtctattgaggatggcaaggtcattgctaatgtcaccgaccttgatggagtgcccctggccgaaaagcttctgacagtgagcatcgacggcgtgcctgttctgggggccaagacggatgagaacgggatctattcaattgatgtcagtcctaacgcaactgtgactgtgtcctgcagtgacgttaacggggccgtggccagtgcgtctatcacttacgtggaaaacaacaacactgaagaggtggtggttatcgagccggtgagcgctaacatcactatcgtgttgttagttgctgaggggaacgtcgtggcctatgtgaccgaccttgatgacgtgcccctggttgagaaactgctcagcgtaagtatcaacgacatccctatcttgggcgctaagaccgacgagaagggtatttggtctcttcctatagaggccaactcaacgatcgtggtctcgtgcagtgatgtgaacggggcggtcgccagtgcctcgatcacgtatgtggagaacaacaacaccgaagtggttgttgagcctgtcagcgccaatatcgtgatcggactgtccatagttgatggcaaggtcattgctaatgtcacggatcttgacggcaatacgttggcagacaagctgctgagcgtcagcattgacggcgttcctgtgctgggtgctaagaccgatgagaacgggatctggtccatcgatgcagaggctaattccaccgttgccgtctcttgcagtgatgcaaacggggctgtagcgagtgcgtcgatcgcctacatcgaaaacaacaagacagaggagataattgtccccgttcccgtgcccgtgcctgtggttgccaatgccacaatatccctcagcaccgaggatggcaaatcaatcatcgccaacctgaaggacctggacgggaaggccatagccaacgcgacccttaacgctaaagtcaacggtattgaacaaaacctgactacagatgcaaatgggatcgccactatcccagtatctgcaaacaccactgtggaagtgtcatacacagactccaacatggcgactgtgacaagctcaatgagcctgactgtgatcgaaaccatcgtggagataaacaagacaatcgtagtgcctcccattagaaatgcctcccaaatagtctgcagtgacatgaacacaatttcggtggctcaggaagacggaagggtcggcgaatacttcaacgtaaaacttgtggatgcaaacggcaagcccctggccaacaagttcatccagatcggatttaacggacgcgtctacgaccgtacaaccgatgaaaacggcagcaccaaattgcagatcaaccttgcatacaaaggaacctacacattcgctatagcctaccttggcgatgataactacaatggttcctttgtggtgtcaaaaatcaaggtgactcaacagacgccaagcttgaagaccagctccaaaacctataagactagcgcaaaaacaaaggccctgaccgctaccttcaagacagttgggggcaagccaataagcggtaagacagtgaagttcaccgtgaacggcaagacatacagcggcaaaaccaatgctaagggtgttgcaacggtaaatgtcagcctaaacaagaaaggcacgtacagctttacagttaaatacgccggagacgatatctttaaggcagttagtgctagcgggaagctcaccctgaagtga

SEQ ID NO: 2304 - DNA, 1323 bp, synthetic construct
  source 1..1323: mol_type = other DNA
atggaaagtcagtcaatcctgatcaaaaacgctagcatcctcaatccaatcggggatggcaaaacagaggagtttaggaaggatctgctgattgttgatgacaagatatctcaaatcgatgaggatatcgatgaatccaatgccgataagattatcgacgccagtgataagatactcatgcccggattcgtcaacacacacactcacatctccatgagcctgctgcggggcatagctgacgacctcgaactggacacatggttgaatgaccatatctggccgatggaagcacatctgagtgaagagtactgctatatcggagccctgctgggggcctgcgagatgattaagtctggaaccaccaccttctcagacatgtacttctacatggacggcgtggcccgggcggtggatgagattggcatgcgcggggtcctttcctatggcatgattgatttcggcattgaggagaaacgagagaacgaatttaaagaaaacatatccctcatcaagaagcacaacaacactgcagatggtaggataaccgcgcgattcggtccccatagcatctacaccgcgtcagtggaccttctggagcgggtccgcaaggaagctgacaagtacaacgtaggcattcacattcacatgaacgagaccctcaaggaaatcaatgacagcaaggaaaaccacgatggaaaaaggccctttgagctattggacagcatcggtttcctggccgatgatgtggtagccgcacactgcgtttggcttgacgatgctgagatcaaattgattaaggacaacggagtgtatgcttcccataacccatgtagtaacatgaagctcgcaagcggggccgcccctgtggctgagctattgagccagggcatctgcgttggcctgggaacggacggggccagcagcaacaacaatcttgacatgttcgacgagatgaagtttgctgccctccttggaaaggcctccaccctaaatcccaaggtactcactgctgaagaggtggtgaacatggccacaatcaatggtgcaaaggccctcaacattgacgcggggaccattgaagtgggcaaaaaggcagacatcattctggtcgacgccaatagtcctaacatgacgccaatgagcaacacactgtcatcgaatttagtctactctgccaatggctcgaatgtcgatacaactatctgtaatgggcgcatcctgatggagaacagaaaaatggtgacggtggacgaggagctgatactgtccgaagcaaaaagagcgattaaagagatgaaagagttaagagaggctgacgaatga

SEQ ID NO: 2305 - DNA, 1656 bp, synthetic construct
  source 1..1656: mol_type = other DNA
atggaaagtaagattatcaaatccgatgttttgattataggttcaggcggggccgggtgcagggcagctatcgaagtgtccaatgagggcaaagaagcgttaatagtaagtaaaggactgtccttccgctcggggtgtacaggcatggcggaagggggatacaacgcggccctgggccttgtggaccccgaggacactatcgaagcccatataaaagacaccctgaaggggggagcttacttgaacgaccccaagctcgtagacatcttggtcaacgagagtccaaaacgcttgagcgatctcgaggagtatggtgcattgttcgaccggcaggagagcggcgaattaaaccagcgaccttttgggggccagacctatcgccggacatgcttccagggcgacagaactggccatgagattatgacggcccttaaggaggagatcctaaagcgtaacatcaaaactatggatgaagtgatgattacgcagctgatactggacccggctgaatcctttatgccgaaggtcatcggagccgtggggcttgacctgaagaccagtgaaacgatcttcttccaggcgaaggctgtgattctggccagtggcggtgctggtcagctctaccctgtcagctcaaacaccacccagaagaacggtgacggccttgccatagcctggaatgccggcgccgacctaatcgacatggaggaggttcagttccaccctacagggatggtctaccccgattcacgtaagggagtcctggtaaccgaggctgtgcgggcagaagggggtaagctcatcaacagcgaaggggagaggttcatgggccgctatgatgatagaatggagctggcaacccgggatgtggtggccaggtccatttataatgagatcatggagggacggggcaccgagcatggaggcgtatacctggatgtgacccacctagacggcgaactcattgaggaaaagctggagacaatgctcgagcagttccttgatgtgggagtggatatcaggaaggagccaatggaagttgccccaaccgcccaccaccacatggggggcctgcgcatcaacccagacgccagcacaaatgtggaaaacctctttggagctggtgaagtgtgtggaggcgtccatggggccaacagactcggagggaacgcacttgcagacactcaagtgtttggtaagattgccggcagctctgcagcctctgccacagacattgctgagtttagatacaataatgaggcagtggaggatgaagagaaccgcattaaaagcttaatcaaggaaggctcaatcaaccccttggatatgaaaaaggaaatccagaacctgatgtgggagaaagtgtccattgtccgaaatgagcaaaacctgaagtccgccctggagcggctgctcgagatgaaaaatgagctgaatgacctgaatgtggatgatcggacccaatttaatgagtctctcatcacagctctggaagtcactaacatggttgagatatgcatcctgattgttaaatcggcaattctgagaagggagagccgaggagctcacttcagagaagacttccccgagacgaatgacacttggaagaagagcatcgtcatgagcaaaagcaagatcaggtttgcgaaacgatga

SEQ ID NO: 2306 - DNA, 642 bp, synthetic construct
  source 1..642: mol_type = other DNA
atgaatcaggaggaacgcttaaagggaagcccaatagagcgggttgagacggcactcgaggccatcaaagccgggaacggcgttatcgtcacagataacgaggaccgcgaaaacgagggcgacatgatcttctccagcgaacatctgactgaggaacagatggccctcctcattagagagggaagcggcatcgtgtgcctgtgcctaacccaagataaggctgatgctctggaactgcccctgatggtggagaacaatacaagtacctacggtacaggcttcacaataacgattgaagctgccgagggtgtgaccaccggagtatccgcagctgaccgagtgactaccgtgaaggccgcctcggccttggatgcgaaacccagcgatctccaccaccccgggcacgtattcccacttagggcccggcctggcggggtcctggaaagggacgggcatacagaggcaactattgacctgatgcgtctggcagggctgaacccatgtggcgtcttgtgcgagatcacccttcccaacggaacgatggcgagaatgcctgatgtcatcgagttttcagccgagcacgacatgccggtggtgaccattgaagacattatcgcttatcggaaggaaaatgacatctga

SEQ ID NO: 2307 - DNA, 2064 bp, synthetic construct
  source 1..2064: mol_type = other DNA
atgaagattaaaaagagttttgtcattctgtgcctgattatctgtttattcacgattgctagtgttgccgctagtgatatcaatgacaccaccataagtgatggtgacaatctcatcaaagaggcggatggggacctgttaagtctggaagatgacaacaatctcaaagagctcaatgaggagagcgacaaaaacctgctggtccaagaatctgataatgataataacaatcccgagtccgataaagatctccttgtgcaggaatctgacaatgacaataataatctcgaatctgatgagggcctgctcgtgcaggaatctgacgacgacctgaacaaaaaagcagacggtagtttgttcagctcaaagtacggagataacgctgctccaataaaaattaacacttcctacctcatcaaagagatcaacagctacctcgagaaagacaactacacggcccttaaggaggaaataaacaactacctgaagaaaagtaacaacaacgccatcaaggaggaaattagcaagtatatcttgaaaaatagctacaaggccttacagaaggagatcaacaactaccttgaggaaaacaatttcagcaccctaatcaaagaaattaacaactatctagaggaaaacaactacccgtccatcgaggatggaattaaaagttatctgcagtcaaacaactacagctctctgcaggatgtccttagcgacgtaatctcgaagatcataaactcctctaaaaaggagtcagagcccattgacgatggaactttcaccgctttgcagtataagatcaattctgccccaaatggcgctacaatatctctagataaggattattcctatgacgaagggttcagcacacggggcattgagatcaagaagagcattaccatcaacgggaacggccacaccatcaacgggctgtccgcatcaaggatctttctcattcacttcgggttgacgggcaacaataaggtcacactgaacaatatcgtattcgccaatggcaagacagacctctacggcggggccatcttcaactacggcaacctgaccgtgaacaagtgcacattcaagaacaactacgccaaaacctgcgggggagccatcaattctgtgggcgagatgattctgaaaaattccaatttcaagaacaacactgcaggaggtgacgccggggcggtgttctccttcaagatagggaacagcacaaacatcttcaaggacatctataaagacaaggtcattgatggaaacatggactttattatcgactacattttgaacatcaacataaactacggatgggacagcataaacaactgcagcttctcgtcaaatgtggccaagggccgaggaggcggagcgatctatgcatttacccacataaagattaacggctgtacattcaattccaataaggctggcgagcatggtggcgcagtgtttgccaataaaaacctgaatatttcgaagtccaagtttacaaacaataaggcccctaagtacggaggcgccgtgtacttccgctgccatgaactgagcggaagttacgtcaataagacttgggtttccaaaatgaagtattacaccgcgacaatcaaggactcaatctttaccaaaaacactgccagcaaagggggggcgatctatgagtttaatcacaccgtctctgacaagaagcggctgaaggtgtcgaagtgtaattttacagacaacaaggcatcccttggcagagatgtgttttccggcagctgttcaaactgcatctacttctacgtgaaaatcagcactaaatccgttacagttaaaaagactgctaagtcctttactctgacggccacgattaccaatggtactaaaaagctgaaaaacaaaaaggtcacatttaagttcaatggtaaaacctataccacgaaaaccaattcgaatggggtggctaaagtaaagatcggtaaggcagttattaagaagctgaagaagggaaaaacctattcagtgcaaatcacgtatcttaagaaaagtgcaaagaccactgtgaaggtgaaatga

SEQ ID NO: 2308 - DNA, 384 bp, synthetic construct
  source 1..384: mol_type = other DNA
atgagtctgaaatcaaaggcaaaaaagatcgggaaagcagtaatcttcgtgaagctcttcgaagatctgatggccaataaggacaaacgggaagaggacattgccaagttgcgcatccacatcgaagaatggaaggcggaggctcccgatgaccttaacgctattctggccgccatactaatgaaggcacccgatagctccccggacgagatcaaggcagagttcgagcaggctaaagccgaataccatgctgaggacgaagatatcctcccatggtttgaaagccagatagagaacattaccaaggagggcgaggaggcggaggaggaggccgaagaagaagccgtcgaggtggaggtgacagaagaagagcctgaggagtga

SEQ ID NO: 2309 - DNA, 237 bp, synthetic construct
  source 1..237: mol_type = other DNA
atggacaacaaattcataatcctcctgtgcctggtgacagtaagcgtctttatcagtgcgtcattcgcattcggcaatgtgctaagcaatgccgataacggaagcgtgcaaacgtacaactcgcacaaggatatctcctcccccaacatggactacaagcatccaggtgaactgatttatgggggctgtggcggaaatcagaacattcagaccgacgggcacatctgcgagaaatga

SEQ ID NO: 2310 - DNA, 165 bp, synthetic construct
  source 1..165: mol_type = other DNA
atgaatctcatatccgtcattatctatctcatcatccttatctttggcgtgtgggtgctatatcggggctacaagaaagggatggagttcggaaagttccagtacgcattcattgtatgcctgagcgccctgtttatatgtttgctgtacagcctgttcaactga

SEQ ID NO: 2311 - DNA, 747 bp, synthetic construct
  source 1..747: mol_type = other DNA
atgggccccgaggatacaatatacgagtcccagtccttggaagacaccatctacaagagaaaatcagtacgctcttatgaggatgctcccctggataacgagacgataaatgagatccgcgatttcatcgaaaatgcaaaccctctcaaccctaatatcgaatggagttacgagattctgcccaaagagaaaatcagcacaatgatgagatggaaggctccacactatattgccatcttttcagaggacaaggagaactattaccaaaacataggattcatcttccaacaggtggacctgtttctacagtcgaaggggatcggcagctgctggatcggcatgggcagtcctaaggattacaagaacccacacggtcataagtttatcattctcattagctttgggatgagcgaaagaatctaccgggaaatgaaccagttcaaacgaaaggacattgatgccatatccgacaacaaggatgaacggctgattccggcgcagttcgccccatcttccatgaatacccagccgtggtacttcacccacaatgacgacggtagcttcgacttatacagggtgaaaaggggagtcctcaggaaccgatttatggggcgctggaataagattgacactgggatcgcccttgcccacctgtatgtggcaaaccgggacaactttagcttctatatgaaggacaatcccaaagagctgaaaggccatatctacgatggaagtttcgaaatttga

SEQ ID NO: 2312 - DNA, 672 bp, synthetic construct
  source 1..672: mol_type = other DNA
atggacaataagctattcttgcaggcctttagcaagtttttcattggcctgattatcatatgcgcgcttctgtttattcccgcgggaactctcaactacccgaacgggtggttgtttatcgccctgctcttcatccccatgttctttgctggcatcatcatgtttatcaaaagtcccgagctgctgcgccgtcgactgaacgccgatgaggaggaagaggagcaaaaaatagtgatcctgattagcgccatcatcttcctgcttgctttcattcttgcagggctaaacttcagattcgggtggttcaagctcaattccttgattatcatcattgctagcgtcatctttctcctggcatacatcatgtacgccgaggttcttagggagaatgagtacctctctcgcaccgtggaagtgaatgagggtcagaacgtggttgacaccggcctctatggcattgtgcggcaccctatgtacacgtccacaatattcctgttcctctcaatgccattggtactggatagcatattttcgtttattgtcatgctgatttatccaatcatcataatcttcagaattaaaaacgaagaaaagctgttagaagaagagctggacggatacgtggagtacgaaaagagggtcaaatatcggttaatcccttatctgtggtga

SEQ ID NO: 2313 - DNA, 990 bp, synthetic construct
  source 1..990: mol_type = other DNA
atgaagtggaagatcggagacgtcgaaatagacaaccaggtggtgctcgccccaatggccggggtgtgtgacagcgcattccggaccatagtcaaatctatgggttgcgggctgattgagaccgagatggtgtcagataaggcagtcatgtatggcaactggaagaccaaggaaatgctgtacatgaccgactatgagcgcccaatctctcagcagattgtcggaagtgacattgaatccctcacgttcgcttccaaatacatccaagacaacacaaacgtggacatcatagatatcaacatgggatgccctgtcacgaaggtgaccaatcggggcaaggctgggagcgcgttgctaaaatcccccgataaaatcaaaagcattgtagagtctatcgtcgactcggtggacatcccagtgactgccaagatcagaagtggatgggacaaaagctgcattaatgccgtggaaatagccaagatcatcgaggatgccggtgcaagcgccattactgttcaccccaggacaaaggaccaggcttacagtggcaaggcggattggtccatcattaagaaggtaaagcaaagcgttaatatcccggttattgggaacggcgacgtccgaacgtgttttgacgcaaaacgaatgctggatgagactgactgcgatgcggtgatgatcggcagggctgccctcggcaatccctggctgatccgggattgtgtaaactacctggataatggggacctgcctatggaggttacaatcgaggagcgcatggatatgttaaaaagacacgtgaacctgttgcttgaaaataagggcgaagagtttgccattcctaagatgagaacacatgctgcctactatgtgaaaaaactgccccgcaccattgagctcaagcagatgatattcaagatgaacaccaaagaggaccttttcaacctactcgacgattacgtggactcactggatgaactgaaaaggtga

SEQ ID NO: 2314 - DNA, 939 bp, synthetic construct
  source 1..939: mol_type = other DNA
atggaaattctgaaacctgaggagctgaaagagaagttcaatgacccctggattgctccgtatgagaaagtcattaccatggctgatggagacaaagtggaactgattgaataccatccatgcccttccggttcaaactggctgctgtaccagtaccaacacagtagcgaactgatcatagacgccaagagggatggaaacaagcacacctatctttgcaaggtaggcaaaaagccattagaccttaaggcaagcataaatgccgccggcattgaggaggtggccatcgacgaagagaagaacgaggtcaaagtcacccacggggggctcgccggcgctggggtgggtgctggcatgtgcagaggcatgggagagggggtcaaatacatcgagctcctggaggtcggaggaggaagcaaggagggaaaagccactgtggtaacgccgaaatacgagaagctggtcatcggtatcgacgatacagacgttaaggatgccggtgcaacctggactatggcacacaatatcgggctgcagctgaaggaggaaggctatgagtacctggaccatatcatcgtgcagttgttcccccacaaccctcataagacgcagaactgtgtgtcgatagcgcttacatttgcggtgctcaaagaggaaaaggaaaatctaatcaaccggctcattgaaatactcaagcacgacacattgtccgacaagactgcaatcgccatccttgaggggatcggcatcccacccaagctgcgcgaatacgcgatggccaccaaaaccggcatgatggacgttgagacagccgaaaagctagccgaagaattaaacattcccctcctggcagtgaccggcgagcagggcaaagtgggggctctggcagccttgggcctctatgatgatgtggatgaggctgtgaaggtttattactga

SEQ ID NO: 2315 - DNA, 432 bp, synthetic construct
  source 1..432: mol_type = other DNA
atggtcaaatacaacatcggagccgttgtggctgagtttaattacgatatcactcacatgatgctggagctagccaaggcggaagcccaggtgcgcgactgtgagataaccaagattgtgatggtcccgggcgtattcgacatgccccttgctatcaaaaaattgacagaggccgaccaggagggacgcatcgacctggactgcatcatcacgctcgggaccgtgattgaaggggcaacagatcatgaccagattgtcgcccagcacgcaagtcggaagatagccgatctgtcactggaatggggcaaaccaatttccctcgggatcagcggtcctggcatgaccaggctggatgcacacagacgggttagctatggcaagaacgcggtggaagccgctgtgaagatgtgcgaccgactccaagatatctga

SEQ ID NO: 2316 - DNA, 1200 bp, synthetic construct
  source 1..1200: mol_type = other DNA
atgtcaattaataagtcaaaatctaacctcagcctcaagaacaagcttaaatctttattcagtggcaacagcaataagagcagataccaatccaagctaatacgtggggacttcgactcgctccacgacctgaatatcgcatacgtcctgaagggcttccccacactttcgcagactttcgtgagcaacgagcttagatacctggttgaagatggcttcaacgtagttgtcttctgctacatggaccctgccgacctggtggagttggatttcgatctcgaagttattcgcttcgacgagtcagacgacccgaccgggaaactggagcaactgctattggactatgagatcgacatagtgcacacccatttcgtctatcccccctgtacagaatacacatttcccgtgtgcgatagactgggaatcccttttacagttttcgcccatgctgtggacatcttcaaatacgatgtcgacaaaatcaaccgagtggatgagatctccaaaagcccattctgcaagggaatcctgaccctgagcaactatcacaagaaccacctgattgaaaggggagtggataaggataagattcacatcacgaggcaggctaccgactacgagatagaggagctggaactcaaagagcggaatgtgagaaacattgtaagcatttcccggtttgttgaaaagaaagggatcgacgtcttgattgatgtggcagacattctccgcgatgaggattacgagttttccatctatggctttggagggcttgaaaaggcctatcagaggcagatcgatgagctgaatctcgacaacatctccattaaggggcggttggacggtcctcaggaggtcaaagaggtcttcgacaaggccgatatactggcgtctccatgccgcatagcggaaaatggcgatcgagatggcatccccacggtcatatttgaggcaatggcctacggcgtgtgtgtactgactaccgaggtgtcagccatccccgaagtgattgacgacggaaggaacggttttatcgtgccgccagacagtcctgagatcttcgccgataagatccgggagattgctaatctgtccccagaggaacgctttgaaatcgctaaacaggcacaggtggacgtgcaggacacgagcagtgtggatgaaactatgaagaccctgtttttaacctggagtctctga

SEQ ID NO: 2317 - DNA, 1188 bp, synthetic construct
  source 1..1188: mol_type = other DNA
atgaattacgctttaatggtgtacaactatacaaccaacctgggcaatgagatacagaccatcgcggctagaagattcctgccgaagatcgactactatatcgatcatgagaagattaatctcttcaacgaggaggacaacgtcaagatgatcatgaacggatggtacctggactgtgaaaaggcatggcccccaagtgaatcaatcgaccctctcctgatctccatgcacttcaacaccacgagcagcaacaaggaacggctcaaagctcttttgagcgatgagagcatcgaatacttcatgaaccacgcccctataggttgcagggactatagtacagtggagttcttaaatgagcaagggatagacgcatacttttccggctgcctcacattgactctggataacggcaaaactaaagaggaacgggaactcgacaaaggacaggactacattgttgtaaactctgaaattgcggatgagatcatttcttttctaaaggataagacagataaaaagatctataggattcagcaagacatgatcccttcatttgacacctcatttccagaatccatgccactgtggctttacaacctgagctccttttatgactacgaggaaaagctgttcatggccgaaaaccttctccgcatatatgagaatgcctcgtgtgtgatcaccgaccggttgcactgcgccttgccctcgcttgccctagagaccccagtgatgctactgaacaataggggatttcgcgagcggttcgatggcctgagcaatctgctgctggagagtgacattgatagctatgaatccaattataacatcttcgatgtggacaatccgcccgaaaatcccaaggactacctcaaaatccgtaaggacctgatcgagaaaagcaagaaattcaccggtcacatcaacaactcttactacagtgacatctcacagcgcgagatattcgagagaaacaacctgctcctctctcgaaacgccattgggacgcgagattacattaggaatgtcctgaaaagaatgcgccagcatgagaaggacatttccaaaaaggaggagatcattaaaaatcaggaagcaattatcgataagcagaaaaagatgattgatgagatgaaggggtccaatagctggaagataactagtcccctgcggaagatccgaaagtga

SEQ ID NO: 2318 - DNA, 996 bp, synthetic construct
  source 1..996: mol_type = other DNA
atgaccaaacccaaagtttccatgattctgtccgcatataatgaggagaggttcatcgataaggccatctgcagtctcacaaaccagagcctgaaagacattgaaattatcattatcaacgatggatcaaccgataaaacgccagagatcatagagaaatatgccgaagaagacccacgtatcactgtgatcaaccaaagcaacattgggctgggggctagccgcaataaaggcatggcaattgcccagggcgagtatgtgggttttctggatggagatgactggtacaggctcgacgctcttgagattgcatacaatgaggcgaaaagcaaggatacagacataaccatgtatcagatgatcaattatgatgacgccacaggaaggatttacgagaacgactggttcaacctcaacaacctggacgaaagcttcgatggcatcgtatttacccctgagaagacgaaagactttctctttgacctgtccgtcagttcatgccagaagatctatagaaatgattttctgaagagcatcaacgccagctttcccgagggtatctattttgaggacatgcctttcttcttctacgtctaccttaaggccgagcggatttccataatccggcatcacttctactaccgccgaaagcacaatgcctcgatcacccacgtggtcgatgcaaattacctggatactgtggaagcgggctgtgaactaatgagacgcttcatagacaatgggttctacgatgactataagttcgacttgatcgcttacaagatcaatgggccacggatggccctaatggacataactgaagatgctaaggaaccgttgttcaacctgattaaggaggactacgagaagatcaaaaacacagaatactaccaggactacttagataacctcggccccaagaagaaaaagttctttctggacgtgattaagtatgacaattatgaggaatttaaaaagaacaaccccgagtactga

SEQ ID NO: 2319 - DNA, 1551 bp, synthetic construct
  source 1..1551: mol_type = other DNA
atgaaagacaataacaaaaaagagcaggctgaagacctcctgatagcaaacaaattccctccgatgaacgatgtcagtgggatcattcttgcaaaacgagccctgctgagcggcaagcggtacgatgtgtgccatacggtgattaaagagccccttgataatgacttcaacgagattgcagaggagattatcgataaccgcatcattatcaagaacttcgaatatgagatgagtaaaaaggagctgaacgagacctttaggaattacatcacggagggactgaaaaaactggaggagacaaatcccaactacaagacaatcactacccgttcctgggggttccagcctaatttcttagccctggaatacaaattgaagcaccctgacaccttctggactgcggagttttcagatcccctcactgtgaacattgaaaacaagccaagggatagacggttcaagttagacaataaggaatacatcgaccgcatcaacaatgaaatcgacaaggtcaacgaacggaccggacaaaatctggagcatattaaggaaagcgacttcatctacctgatatgtgaatatatcgcatatgtctttgccgacaagatccgctttacaaacccaaaccaaagggagattatgctcaaccagtgcccctatgacgtaaaggacatggtcatggctaagtcggagatcaatccgcaccctacccttgacgagaaatactaccacatcaaggaagttgactataagattgatgacgactgcataaatataggttactttggaacttattttggaaagcggaactttgagacaatcttctacgcctgcgaaagcctcaacgaggacattaggtcaaaagtgaagttccacctcttcctaaaccacggggataacctcaaacgactcacgggcaacctgaagatcagcaagaacatcatcgtgaatgacaaggtatcattgctggagtttctgaacctaagcaccaagttggacattctccttgtgaatgataccgagacaaaggggaactttgagataaacccctaccgcccaagcaagatcgctgattatattggaagcggccgggacatctggggcatctgtgagaaggacagcataatggacggcctggatgaaatcaaatataaaagctatattaacgacttctactccgcgaaactgaccttcaatcagatcgtgaaagactccagtaagatagatgatgggctgaaagaaaatccattcgaggataatgattatctagccaaacgagccagtgccatgtccgaggatgagatcgttgaactgatcaatgaaaataactacctcaagggtagaaccaatcatttaaaccacctgttcaacggcacaagaggtagaggcctgtttgccgacgaggctaagaaactgaacttgaagaatgaaaagctggagatggaaaataagaaactcaagaaagaaaacaagaagtacaaaaaggatttgaagtacctgaagtcgtccaaaggctcccttaagtaccagattaaaaagattgtgaagtga

SEQ ID NO: 2320 - DNA, 987 bp, synthetic construct
  source 1..987: mol_type = other DNA
atgtacgagatcgcggtgattcctggcgatggcattgggaaagaggtaatggaagccaccatcaacgtcctggagtccttggatgtggactttaacttcacgtatggggaggctggagacgagtgtctggagaagaacggcgtggcccttccaaacgaaaccatccaattagcaaaaaatgcagatgcctgcctgttcggcgctgcgggcgagactgctgccgatgtcatcgtaagactgcggcaggagctgaacctctttgctaacttaaggccagtgaaaagctaccccaatacaaatgccctctttgaaaacctggacttcatgatagtgagggaaaacacagagggaatgtatatcgcaaaggaggaggaatacaccgccgagggggccattgcccgacgtataatcacccggaaggcaagcgaacgcataatcgaatacgctttccagtacgcaaaggacaacaataagagcaaggtgaccggcgttcataaggcgaatgtgctcaaaatttccgacgggctcttcagagatatctttaatgaaattgcggacaagtataaggatgaaattgatagcgaggatttctacgtcgacgccacggcaatgtatctcatcacacgccctgaaagcttcgaggtgatcgttaccaccaatctcttcggagacatactgtccgacgaaggggctggactggtgggaggccttggaatgatcccctctggcaacattggggagaacggggccttgtttgagcccgtccacggttcagccccagacattgcaggtcagggaatcgccaatcccttggctatgatgctttccgccgtcatgatgctgaactacctcggtgagagtgaggctgaagagaagctgaataacgccatcctggaactactgaacgagggcaaatgcctaactccggacctgggtggctcgtcaacaactatggaagttagtgaggccatcaaaagcaaactgtga

SEQ ID NO: 2321 - DNA, 483 bp, synthetic construct
  source 1..483: mol_type = other DNA
atgaaaggcaaggtctggaagttcggcaatgatattgatacggacatcattctcccggggcgctatttaatctacaccgacgaggaaaagctttccgagcattgcatggaaggattggaccccgacttcaaaaacaaggtcagcgcaggggacttcatcctgggcggcaccaacttcggctgcggttcaagcagagagcacgctcccattgcgatcaaaggctgtgggatatcggcagtaatcgccgagtcctttgccaggatcttttaccggaacgccacaaatgtgggagtgcccctcctagaggctcctggtatcagtagtgccattgagaacggagaggaaatagaggtggatatggagaaggggattatcatatctgaaagcggaaaggagtacgagtttaagaagctgccaccattcatgctcgagatcctggaagaaggcgggctgattaattatctgaaaaaacagaacgaatga

SEQ ID NO: 2322 - DNA, 1278 bp, synthetic construct
  source 1..1278: mol_type = other DNA
atgagcacgatcgcggaaaaaatcctgtctcgagcgtcaggacaaggccaagtggaagctggcgatatcgtcatggcggacatcgacatagccatgatgcatgatttgactggaccgctcgcagttgagtcattcaacaagatagggactgagagggtctgggacaatgagaagatcgtcatccccttcgaccaccaggttccagcagattctcttgactctgccaacaatcacatcttaatgcgcaagttcgtcaaagagcaggatataaaaaacttttatgacgtgtacgagggggtgtgtcaccaggttctccccgaaaaaggccacgtgattcccggcactgtgattgtgggtgccgacagtcataccacaacatacggtgccctcggggctttttccactggcatcggctctaccgacatggctatggtattgagcaccgggcagctgtggtttaaggtgccagaaaccatccagttcaatatagagggaatcctgaaggaaaatacgtcggccaaggatgtgattctgaacatcattggacaggtcggggctgacggagccacctacaaaagctgtgagtttaagggcgagaccatttccactatgaacatttccgatcggatggtactgtccaatatggccatagagatgggcgggaaaaccgggatcattgagccggacaatgtcacctatcagtacctgaaggacagggtaaaggacgaaaacaaaaaccgcctgaaggcattcattgaaaagtccaatctcaaaacggatgaggatagctccagtcttgaaacaatggacatcgatgtgagcgacctggagcctcagatcgcctgcccacataatgttgataacgtgaagcccgccagcgagctaagcgacattgagatcgaccaagtgttcgttggttcgtgcaccaacggacggattgaagacctacgggatgccgccaagatcctgaaaggcaagcacatcgcttccggccttagaatgctcgtgatccctgccagccgcgaaacatatatgaaggcattggatgaaggcctgatcaagatctttgtggaggctggggccctggtgtcagcaccctgctgtggcccatgcctcggaggccacacaggattaataggtcctggcgaggtcagtctgagcacatccaacaggaacttcaaggggcgtcagggaagtcctgagggtgaagtgtacctgagcagcgccaaagtcgcggctcagtcagcaattgaggggagaattagtgtgcccaaatga

SEQ ID NO: 2323 - DNA, 1260 bp, synthetic construct
  source 1..1260: mol_type = other DNA
atgaaaatttgtattgtaggacagggatatatcggattgcccacggccgcactgtttgctaaaagtggctgtgaggttgttggcgtggacataaataaggagatcattgaaaagctaaaccaggggattgcccacatcgaagagccggggatcagcgactcaatcaaaaatgcggttgaccaaggccactaccatgcttcgttaacgcccgaggaggcagacacattcatcatcaccgtgccaaccccctatctgcctgaggatctgagctgtgacctcagctatgtcatatccgcctgcaattccattctccctgtcctgaagaagggaaatgtcgtgatcatcgaaagtaccatcgcccccatgagcacagatgaggtgatcaagcctatctttgaaaatgaaggctacgtcattggcgaggacctctatttggcccactgccctgaacgggtgttgcccgggcagatcatggaggagcttgttaacaacaacagaatagtgggtggaatcactgaagaatgcactaaaaaagccgccgatgtctatcgcacctttgtgaagggggagatcatcgagacggaagccaagaccgccgaactctccaaatgcatggagaacaccttccgcgacgtcaacatcgctctcgcgaatgagctggctaaaatatgtgcagagattggcgtgaacgccctggacgtgattgaaatggcaaacaagcatccacgagtgaatatccattcaccaggccccggtgtgggaggccactgcctggcgatcgatccatacttcatctacgccaaggctcccgagacagccaagattatcaagcttgctcgggatacaaacaacagcatgccaggttttgtgatcgagaacaccggtaagattctatccaaattagacaaagatgcagagaagataagcgtatttggggtggcctacaaagggaacacagacgatgctagggaaagcccggccttcgagataattgcaggcctgaaggcggcagggtacgaagtggtcattcacgaccctcacttcgacaaccccgactacctggacttcgatgatgctatcaaggacagctcaatgattcttatcctgtctgaccataaccagttcaaggatatggactacgattccattaagaggaatatgaagaccaagctcatttttgacactaaaaatatcattaaaagtgtaccggaggatgtgactctggtcaattatggcaacctgtacaagttcatacactga

SEQ ID NO: 2324 - DNA, 861 bp, synthetic construct
  source 1..861: mol_type = other DNA
atgaggattttaattacaggcgcgtacggaatgcttggatcagacctgcgcgaggttctcaaaaaccacgatctgatcgccacaggctctaaggacctcgacatcacagacgaagagagatgtattgacttcattgccaaggaacgtccggaaatagtcatcaacgcggccgcttacacggccgtggacgactgcgagacgcattatgacgatgcctatgccgtgaatgccctggggccgcggaatctggccatcgcctgtaacaagatcgacatccctttggtccatattagcactgactacgtctttgacggaaccaagcgaactccccttatcgaaaatgacaaactgggtcctcagagcgcatatgggaagaccaagctggctggcgaggagttcattcaggaaaacacccaaaagtacttcatcctgcggaccgcttggctatacggcatccacggcggaaacttcgtgaagaccatgttggatctcgctaaggagcacgatgagatcactgtggtaaacgaccagattgggtctcccacattctcccttgatctggcaatggcaatatgcgaggttctcgacagcgataagtacggcatctaccacctcaccaatgatggggaatgctcctggtatgactttgccaaagaaatctttcgcataagtgatatcgatgtgaaggtcatccccgtgtcgaccgaggagtttccaagacctgctcccaggccacactattccgtgctaagtaatgtaaaatggaaaagcgcagggttcgtgccaatgcgggattacaaggaggcgctgaaccagtatatttcactgtacaacttctttgtgaaaataggtaaaatttga

SEQ ID NO: 2325 - DNA, 873 bp, synthetic construct
  source 1..873: mol_type = other DNA
atgaaaggaatcgtgttggccggtggctctggcacccgtctgtacccaattacaaaggccgttagcaagcagctgctgcccctgtacgacaagccaatgatctactaccccatcagcgtcctgatgctcgcgaatattaaagatatcctgataatttcaacgcctcgggatctgcctatgtacaaggacttgctcggggatggaagcaatctcggaatgtccttttcgtacgcggagcaagagaaccccaacgggcttgccgaggccttcatcatcggggaagactttatcggcgatgacaacgttgctcttatcttgggcgacaatattttccatggccacagatttacggaaatcctagaacgcgcccgggaccttgacgatggcgcggtcatattcggctacttcacaaacaagcccgaggccttcggggtggtggagtttgacaacgaatggaacgtactctccatagaagaaaagccagagcaccccaaatccaattatgtggtcccgggactctatttctacgataacgacgtgatcgagatagcaaagagtgtcaagccgagcgacaggggagagcttgaaatcacctctgtaaatgaggagtatctgaacaggggcaagctgaaggtggagctcctagggagaggtatggcttggttggatacaggtactcacgacgggctgctggaggccgctaacttcatcgagaccgtgcagaagcgccagagtctctatatcgcttgcctggaggaaattgcatattcaaaaggatatattagcaaagaagagctgctgaaactcgcagagcctctgaagaaaaccgcctacggcgattacttaactaaattagcagaacgaaagatttga

SEQ ID NO: 2326 - DNA, 579 bp, synthetic construct
  source 1..579: mol_type = other DNA
atgggcaagtttaacataatcaaaagtgaaattgaaggtgtctttaccgttgagcccaccgtgttcgaggatgagcggggctactttatggaaacttacaacgagaatgactttaaggcggaggggatcgatctgaccttcgttcaggacaatcaaagcaagtcctcaaaaggagtgctgaggggcctccacttccagtacacacagccccagggcaagctggtgcgcgtcatcaagggggaagtcttcgatgtgggagtggatctgagaaaagacagcccgacctatgggaaatggatgggggagattctctccgaggaaaacaaaaagcagctgttcatcccaaaaggatttgcccatggctttcttgtattaagcgacgaagcagagttcgtgtacaagtgcacagacttctataagggcgatgacgagggaggtatccaatggaacgaccccgacatagggatcgagtggcctctgggcgaccttaaggaggaggatctgattctatcggaaaaggacaagctcttgaagcctatgaaagacacgccaactgatttctatatggaggatgaatga

SEQ ID NO: 2327 - DNA, 1008 bp, synthetic construct
  source 1..1008: mol_type = other DNA
atgacgaaaattcttgtgactggcggtgcaggttttatcggtagtaacttcatcaaatatatgctggataagtatcctgattacgaaatcgttaatttagatgcgttgacttactgcggaaacctggagaaccttgaagatattgaagataatccgaattactcctttgttaaggggaatatcatggatgaggggctggttgatgtggtggtgagtagcgtggactacatagtcaatttcgctgctgagagccatgtggaccggtcgattgaagacccgcagatcttcatcaaatccaacataatcggaacacaggtattgctggatgccgcctataagtaccagatcaaaaaattcctgcaagtgagtaccgacgaagtctatggaagcctgggccccgaggggtacttcaccgagacaactcctctccaggccaacagcccctatagcgccagcaaggcaggcgctgaccttatggtgcgggcctatggagagaccttcgacctccccatcaacatcacccgatgctcaaacaactacgggccttatcagttcccagagaagctgattcccctcatgatctccaatgccttagaagacaaggagctcccaatttacggcgacggaaagaacatcagggactggctacacgtctacgaccactgtagcgcgattgacctggtgctccacaaggggaagataggcgaggtctacaacattggcggccacaacgagaagcagaatatcgaaatcgtgaaactgattctcaaggaactggataaacccgagagcctaattaaatttgtcaaggacaggctgggacacgacagacgctacgcaatagattcaaccaagataacagaagagctgggctggaagccaaaatacacctttgagacggggatcgtggagacaatccattggtatttggacaatcaagactggatggagaaggtaaaatccggcgagtaccaggaatactatgaaaagatgtactctaaaaagtga

SEQ ID NO: 2328 - DNA, 984 bp, synthetic construct
  source 1..984: mol_type = other DNA
atgaaggtatcggtcgtgacacccaactacaatgggctgaagttcctgaacgcctattttgagaccttagctttccagagtaggttcatcgaggagatcatcataatcgacaacgcatctactgatgccagctgtgacctgatcgaagaatacatcaacagtcctagctataagattgacatcaaactcatcaagaatgacaaaaaccttggcttcgctcccgccgtcaatcagggcattcgcttggctaaatccgaactcatctactctgtcaacaacgatgtggagctggagttcaacacgatcgaaaccctgattcaatctatggaaagatccattgaggaggggaaaaacccattctccattcagtcaaagatgatacagtaccacaaccgaagcctcattgacgatgccggggatgagtataatctacttgcatacactaagaagctaggcgacgggagcccgattgacaactacaacgaaaagagggagatcttctcatcctgcgcaggagcggccctgtatcggaaatccattctggagaaaataggtctgtttgacgacaatttctttgcttatgtggaggatatcgatctgtcgttccgggcccagatcaatggttatagaaactacctcgagcctaaaagcatcatctaccattatggaagtgcaaccagcggcagccgctacaatgagtttaagatacgcttggcggcccgaaacaatgtgtggatgatttataagaatttcccaattcccctcaagattgttaatttcatcttcatatttcttggatttttcatcaaatacctcttctttctgaggaagggattcggttcaatctacttgggcggagtgaaagagggcctgcgggagagaaaggggatagaaaagacccactttgaatggaaaaactggaagaattactttaagatcgaatggaagatgattaagaacacatttggctactttaaaaaatga

SEQ ID NO: 2329 - DNA, 897 bp, synthetic construct
  source 1..897: mol_type = other DNA
atgcgtaacatcgacttatcaattatcgtcgttaattacaacaccttcaaactgacacgggacaccatagactcttgtcttgctgagccgactcattatacttacgaaatcttcctggtagacaacaagtcgacagacgacagcctcgaaaaactgcaagaatactttaagagcgaaaccgagcgaggaatactaaaaatcatccccaaccagtccaacgacggttttgctaaggcaaataatattgccattgagcaggcaaaaggggatttcatcctcctgctgaactcagacaccctgatgaagcagtccacgatcgacaagtgcatggattacataacagacaaaggccacgacgatattgatgcactgggctgtaaggtgtccctggccgacgggagtctggacaaggcctgcaagcgcagcttccccaatcctgccaactccttctacaaattgtttcatatcaacgtggacagtgacaagaacgattacaatctggatgaccttgacgatgatggtatctatgagatcgattgcctcgtgggggcgtttatgctcgtgcggcggacgacaatcgatgaagtgggcctgttggatgacgctttcttcatgtacggagaggatattgactggtgctatagaatcaagcaggcgggctggaagatcgtatacttcggccaggccgagataattcactataagggagctagcagcgaggataagaataccaagaaaagaaacccaaagattatctacgagttttatagggcaatgtatgtcttttacaaaaagcactacactaaaaaatataatttccttgtcaacatcgccgtctacattgggattggagtgttgctagtgtttaacctcgttcgcaatgccttcaggtcttga

SEQ ID NO: 2330 - DNA, 1401 bp, synthetic construct
  source 1..1401: mol_type = other DNA
atgattaaagaaaatcagcggatactgaacgccatactcgtcatcatagacattatcgtgattcttatcagcctcggcctggcatactttgtccggttcaagaccaccatattcagcgtgggaggctccctgccattcagtgactacttcatattcacgatcgtgtgcataattcctacgtatattctactgtactacttctttgggctttacaagccattccggaaccaaagctcaatattcagcggggccgaggacattgtgaagtcggacatcatggctttcatcatcctggttgctattctgttcatcatcaatcagcctaactttagtaggatcatgctcctgctgttaagcctatttggtatgattctcacaatcgctgagcgagtgctggtcgtgcttgtgttgcgcatgatgagaacaaacaaccttaacctgaagcacatgctgatcatcggggacaacgacctggcattcgagtttgcccataagatcaactcgaaaacctacctgggatacaatattgccggctttctgggaagaaaggaaaatatcggcaaacgattcgaaggcaccaagtttataggcagctttgatgacttgcctcgtgttctcaagacccataaatttgaccgggtggtcatagccatcccccttaagtattattaccacctaaacgaaatcgtggacgcctgtgaggaagagggaatcaaggcagaaatcatcccagactactataaatatctgccggctaaaccttccgttgacatgctcgatgacatgccgatcatcaatatccgctacgttcccttggatgatgccttcaataagttcaagaagatagtctcagattactttgtgtccattgtcgcgattattatcacctccccaatcatgattttaactgcaattgccattaagattgagtctcccgggcccatcatcttcaagcaggaaaggattggctataacggtaagcccttcatgatgtataagttccgcagcatgaaggtgcaggatgatgaggaggagaaatcccaatggacaactaaggacgatccaagaaagacaagaatcggcactttcattcggaaatggagcatcgacgagttgcctcagtttttcaacgtcctcaaaagggatatgagcgtagtcgggccccgccccgagaggccgtacttcgtggaggagtttaaaaaaaccatcccaaaatacatggttaagcaccaggtgaggcccggactcacggggctcgcccaggtgaatggttacagaggaaacacttcaattaaaaagcggattgaatatgacatccgctacgtagaaaattggagtctggcgctggatgtgaaaatcatgttttggacagtatttcgacgtaataagaacgcttattga

SEQ ID NO: 2331 - DNA, 2472 bp, synthetic construct
  source 1..2472: mol_type = other DNA
atggaaaaagaatttttcgaaggaatgaatctcgaggaagacattagtgatgaggacttccagactattgtagagggctgggaaaaagtccaagaccagatgtccaaagaggaatttataaccaaatttaatgaacacaaggccgagtttaaagacgcatctttcttcagcgacatagactttttaaacatgatcgtgaatcctctggtgggggggggcgatgatgagccaggacccgctatcgtggaaggcgagtttcagaagatatcggatgtggaacctggcaatgaaggattcaatgttgtggcacggataatgtcaattggaaacagccgaatattcacttcccgcaaaggaaagcagggaaagctgtgcaacctgcagattgccgatgacaccggagagctccgccttgttctttggactgaaaacatcaagcacctcaagcacgtcactgagggggatattgtcgagattacaaatatcgaatgcaaagagggcttccgggggggcaaggagttttccctccgtccacgcagttctctgagacctattgaagagggcagtgaaaactatccggaaaacatcgcggcgttccccgtctatgaggaaaagattacgcagattgccgacattaagcctgatgagaccgtgagcatcatagggaggctaatccgcgtgcctaagccacacgcctatgagagcaacggcaagaaaggtaaggtaacctccctggagattcaggatgcaagcggaaagacctcatacacactgtggaacaatgacgttaagctaatcgacatcctggaattgaaggaaggggacattgtcaaaatccttaatgagcagtcccgggaacgaaacggagagatttccttaagccattgggatggaagaatcgtcaaggctgaaggcgactacgacatcccagagtacgaggaaaacatcattaagatcgcagatgcccaagagatgcaggatgtgagcattatcggtctggtgacgaaggtgcaggacgttattcagttcacacgcaacgacggctcggagggctttgtgaaatcaatcgagctctcggacgacgaagggagcatcagagtgaccctatggggagacgacactaagatacccatctccaagggcgacattgtcaaggtcatcggaggaaacatagaatatgatgacttctcaaacggctacagggtaaacaccaactggaacactgagctcaaaatcaacccggaagagcatagcgatctcatagagaccctgaaagggcaggcagaaaacctgggaccgattcccatcagcgaggttcaatctattgaggaggacggtgaggaggtggacatcatcggtcggatcatcaccttgaatgacacccacaccttccccagggatgacggcacggagggtgttgtccgcagtggtgaaatggctgatggaagttctcccgacgggctggtgagggtatccttctgggatgacaaggctaaggttcctgaaataggcaaggcctacaaggtggagaacgccaggacccggatggggatgtacgccgtggaagtcaatgtcggaaagaccacacggttcattgagatcccagaaagcgaagccggtgaccttcctagttttgaggagctggaggagtccatctacatcagcaaaaaaatcgaggaactggatgaggatgacatgaacattaaagtcttggctcgcatcctggaggtgcatgaaccgcgggaatttccaagggatgacggcactaaagggctggtggggaatatggaggtggccgacataaccggctccattagagtgaccctttgggatgataagaataacctgccatacggcgtgggggacgctatcaaaatccagaacccccgtgtgcggtacaattcaaatatggactatctcgagctaagcgttggcaacgggacaaatatcctgactccaagcgacagtgagataaacgacatccccgacattctggagttacagaatacactctaccagaccaaggagattgcgaacctttcagatgacgacacgaaaatccgagtgacgggcagatttgtagacatctacggtcagaagatgatcattcctaaatgtccccaatgtaacaatacattggagcctgaggatatcgatgccgaggagtgcagcttctgcggcaactatatcgacgagcccaagtacctcctgatgctgcccgggaaactcgaggatgacacaggcgacattcaagtgacattcttcaacgaattggtcggggagctgcttggcatgaaacaggatgaaatcttcgagctctatgagggggaaggtggagacctgggtccattggagggcaagatcgatgatttggaaggcattacgctggaaatcctggcagatgtgacattcaatgagtatgatgaggaaaataggctgagaccccgaaagatctttaacatggagtggtga

SEQ ID NO: 2332 - DNA, 936 bp, synthetic construct
  source 1..936: mol_type = other DNA
atggtagaactggaagacctgccaaatgtgggagaaaaaaccgcagagaagctacgcgaggcgggctttgccgatatgatgagactcgctaccgccactgctaaagagctatcggtcaaggcggagatcggggagggtgtggctgagaaggtgattgaggcagcccggaaggccgagaagatagattttgagacggcatttgatgtgatggaaagacgacgggatgtgggccggatcacgaccgggagcaagaacgtcgacgagctgataggcgggggcatcgaaacccagtctatcacggaagtctttggtgagttcggttccgggaaaagtcagatctcccacgagctggccgtgacagttcagttgccgaaggaacgaggcggtctggaaggggaatgcgtcttcattgatacagagaacacattcagacccgagaggattgaacagatcgccgacgcctgtggaatcgaccgtgaggaggccctccaacgcatacacatcgcccgggctttcaactccagccatcagatactgatggccgaaaagattaatgagcttatccagagtggcgtaaatgtcaggcttgtgatcgtggacagcctgatggctcacttccgcgccgagtatgtcggaagggagtcattagcaacccggcagcaaaagttgaaccagcatctgcatgcactccagcaaatcgcgaacacctacaatgttgccgtgttcctgactaaccaggtgcaggccagaccagatgccttcttcggcagccctaccaaagctattggcggacacgtgcttggacacgcttcaacttaccgaatctggctgaaaaaagggttggcggggaaacgcattgctaggctcgtagacagcccccacctccccgaaggagaggcagtttttaaggtgacaacagacggcattgttgactga

SEQ ID NO: 2333 - DNA, 918 bp, synthetic construct
  source 1..918: mol_type = other DNA
atgctgattgctatggacttccggatcatcatactcagcatcatcataatgattctgctcggagtgctccttaagaaaatcgacctgctaaaagaggaagatgtcgaaacactcaacaatctagtaatcaacatctgtctaccttgtcttatcttcaatgcactgtacactgccgacgtgtccctgcttccaagcttgagtattttaaccctgtccaccaccatcacgagtctgatcgtcggcgtgttcacctacattctacttaaattatttgcctgggataatgtgaaaatctggagcatactggtgaccgtggtcctgggaaacacagggttcctgggctacccaattacacaggggatctatggcagcgagggcctcatacgcgcagtcttctgcgactgctccaccagcatcacatttgtaatcttgagcgtaatcctgatactgatttttgatggtgaattgaaggtggctttgaggaagattgcaacctttgttccattatggtctatcgtgctgggaatcctgtttaacattttcgccattccgataacagatgtcggaactactgtcgttggttatttgggtgacgccacgatccctctcattatgatctctctgggcctgtccctgaacatcagcgggctcaagaacaatctgaaggaggtgagtcttgcctcattcattaagctcatactctacccctttgtggctcttggggttatggccctgctgggcatcaccggattcaaccacacaatcggcctcattgaggcggcgatgtcatcagctatgattgggctggtgttggccatcacgtataagttggacccccatctcacctccgactgcattttcacttcgacgctcttcggcctggtgactattcccctgttcctgatgtttatcgtttga

SEQ ID NO: 2334 - DNA, 1983 bp, synthetic construct
  source 1..1983: mol_type = other DNA
atggcagaagaaataaacaatgaagaaattagggtgggcgtgtatgtgtgccactgcggtgtgaacgtgggtggagtcgtaaactgccctgaggtagcagcgtacgcagaaactctgcccaacgtagtgattgccaaggattacaagtacatgtgcagcgaccccggtcaaagtctgatccaggaggacatcaaagagcataacttgaatagaattgtggtggccgcctgttcccctcggcttcatgagcctaccttccgcagatgtgttgaagaggctggattgaataagttcctgtttgaatttgctaacctacgcgagcaggatagttgggtacacatgacacagcctgaagaggccacggccaaggccaaagatctgacgcgaatggctgtggctaaggcacggctgctggagcccctggaggccagcaaggtcgcagtagataaaaagtgcctcgttatcggcgggggagttgccggcattcagagcgcactggacctggcggatatgggcttcaaaacctacatggtcgaaaggaatcccactatcggcggaaggatgggccagttggacaagacattcccgaccttggattgttccatgtgtattctcgcccctaagatggtagatacatcgaaacacgagaacattgagctgattacttatgccgaagtgaaagaagtggacggatacatcggaaatttcactgtcaccgtggagaagaaacctagatacgtcaaagaggatgattgcaccggatgcggacagtgccaggaggtctgccctatcgagatacccaactattacgacgaaggcgtgggcatggtgaaagctgcctatatcccattcccacaggccgtgcccctctgcgccaccattgataagaactactgtatcgactgtggactttgtgagaccgtctgcgggccagatgcaatagaccgggatatggagccagaagaaatcgagctccacgtcgggaccatcattgccgcaacagggtacgacccatatgaccccaccgaaaagtacgagtacgggtatggccgatatactaacgtgatcaccgccatggaaatcgagaggatgatcaacgcatccggcccgacagggggtcacgtccagaaacccagcgacgggaaggagcctaagcgtgtggcctttatccattgcgtcgggtcacgcgacgagcagatcggtaaatcctactgttccagggtttgttgtatgtatagcatgaagaatgcgcagctgtgcatcgaccacgagccggatacggaggtcacgtgctactacatggatatccggtcatttgggaaaggattcgaagagttctataagactagccaggagaagtacgggatagagtttatccgaggccggcccgccgaaatcctcgagaatgatgacttaacactgacagtgcgcgctgaagacacactgctaggaaaggtgacggagtacacctatgaccttgtggtgctgagcgttggactagagccgcccaagggaagcaatgagctcagacaaacactgggcctttccagaactaccgacggcttttacatggaggcgcatccaaaactccgccctgtggacacattaactgacggtgtgtatattgctggggtggcccaggggcccaaggatattccagacgctgttgcacaagggagtgctgccgcatcacgggccagcatccccatggctaagggtgaagtcgaaatcgaaccgattactgccgacacggataccaccgtttgtggcgcctgcgaggtctgcgttgagctctgtccattcggcgctgtcagtatagagggggaaggcgcggacaaacacgccgcgattaacgtggcgctgtgtaaaggctgcggcacctgcgtgggcgcttgtccatcgggtgctatgaaccagaatcacttcaagaccgagcaaatcatggcacagatagccgctgccctggaggacgtggccaagtga

SEQ ID NO: 2335 - DNA, 666 bp, synthetic construct
  source 1..666: mol_type = other DNA
atgaaaaagttcgaatccgtggattttgacaaaaccgagaaaatcgtggacggcattgccatcgaagataacgaggctatggatatagtggtgatactggaacccggcagcgggcagtatgcattcctggcttcacggaaggcaccatccaagggtttcaacgcgttcattgagaccgaagcggccaaagaccataagacatttgtcaccgcagtgctttttgacaacgagtatgaaatcctccactcacggagggacattaacgaggtcccgattctcaccacgaatgagtacagctgtcgtggatgcacagccctgtacgatgccatcggaatcactattgagagtatcaaggatgaaatcgacaataaggtcctgttcttaatcattacggatggcatggagaacgcttcgcgcagattcaacgaggatcagataagatcttatatcgacgagctggactacgagtttatctttgttggggccgacatagacagttaccgggaagcctctaagatcggaatcaggcaatcccacaccgccagcttcaagaaaactggggagggcattgacgacttgttcaaaacaattagcgatgtgagcgacatccatcgcgacaatatgaagctcgaggacgtagattggaagcaccgactagaagattga

SEQ ID NO: 2336 - DNA, 1497 bp, synthetic construct
  source 1..1497: mol_type = other DNA
atggtgaagagaatccccgatgaagagcagatcaaactgggcatcagaactctggattttaacattccagaggaccacatcagccgttttgtggtggacttcattgacgagtattatcctctgttggggatcaaggaaaataaaaagaagaaggggcgggacagttttcctgtgaaagagatgctgaagctgctcatttatgctaagatcgagcatattgatagtatgagattcttagccgacatggtcaaataccacgacgtgtataagttcgttgggaatgggatctgcccctccgagaggtcactgcagcgataccgcgaaaagtacggcaagtattacaatgaactcctgaaagcgaccctgaaaaaagcttccgatgtggattacactgatttcaacgaagtttccattgacggtaccatcaagaaggcctacaacagcaaaaataaagtgatcacggagaaagaaactgaaatactgacccggtacttcgaaggaggccgggtcagtcaggaggagctagataagctccacaagccggcccgagagattcttgaaaataaaaagatcagcaaccaggagaaactctacctcttggacgacattaaaacgcagttcacactgagcggtcagaaatcggtgcccgttaccgacatcgaggcacgctggatgaaaagcaagaaagggaactcacaaatcagctataatatccagtctgcagtcgactacgatacgaagatgatttgtgcgataaacgtcgtgcaggcccctacagaccattaccagttgcccaagatcgtagacaaggccatcaacaacaccaacgtaattccaagattcgtgctcgccgacacaatctacctgaacgaggaaagcctgtcatatcttgcggataatcagataaacggagttatccccgatcgcaagcaatccaaggaaaaaatcggaaggctgaacaagaacccatatcacaaggatcacttcaaatacttccctgagattgacgcatttgagtgtcccgagggccagataatgtattttttcaacaaatacactgagaagaatgatgacttggacaagccagacaagattaagcggctatactccaactatggtgcttgcaaggcttgcaattgccgggagaactgcctctcatccacccaaacccaccgcacaatcaccgaatacggcggcagtttaaagaaggccatgtgggagaagatggaaacagaggagtacaaggaggagtatgccaaaaggtcgtctgtcgaaggaccgtttggcattctgaaggagcagttccatatcgaaagcgaagtagtgataggaaagacaaagactgaagagcgcattctacttgacgccgtggcttacaatcttataaggctctttaacctggagcaggaaataaaaaatgataaggaagatatcgtggacttctgtgagaaaattagcgtccaagagaaactggaggtccgagcaaccatcttttga

SEQ ID NO: 2337 - DNA, 294 bp, synthetic construct
  source 1..294: mol_type = other DNA
atgagtttcgaagacttgattgaggactatgtcaaagccaagatagatctcaacgtgaagttcggatcagtgctggatgaactcaatattgagtacgagagcttctgcttctatgatgaatttaaatccgtctgcctggacctggagatgcacaacaaggaacttagcgacgaggagatagaaaacatcatcgagaagacaggctttgacttcctaaaggtggaaatcaaaggcaaaaagtttccctttgggaatggtgaggagatcgattacacctacgtattcgagtgttga

SEQ ID NO: 2338 - DNA, 999 bp, synthetic construct
  source 1..999: mol_type = other DNA
atgaaaattagcctgaacaacgtatccctggatattgaccttaagaacagtcaaaaattcaagaacatggaggttattcctattgaggctctgagcgccgggaaaaaggagtttatcacactgaaggcgggcatccaagaggggtatgtgaagatctccgagtgtgagagcagcacagtgaatactgtcatggctcagaacaagtcttccacccccctcgtcctcatagatggcgaggaagtaatcggcgccatgcaaaatagaatcatgaacaggtccctcatcgtgcctggaaacaccactatgcccatttcagtgagctgcacagagcatggaaggtggcatacgcgtggaaacagtccaaaagcaagggagttctcccattcggacttctttgcagactatgaaacccggcaccggaagtctgaaaccttatacaataactctgactgccagtcggaagtgtgggcgtcaatcagcgacctggagattaagaatagctaccgctcgccaacatccgccctgaatgacagctatgtccaccaccgaccacggcttaatgaatatctgaaacatttcagcatgctgtacaatcagataggagccatattcataatcaacggccagatcaagggcctggaactcttctacaacccgttcctctgttcccagtactatgacaagatccttaagagctatatcatgaacgctatcacgaattactacagtaattgcagttcaaatagttcaaacattgatgtgggggcctttttggccgacctgagcgactccaaattgaaccactctcccaatcagggtctcggtcagcacattaagttctcaaacaaccacgggaccggctctgcactaatcaacgatggggagtttgttcacctgaattactttaaaaccaaatacgatgtgtcttacaagaagcagcgcaaaaacgtcagaacttttggctccttcgatgacctattgagtaagatggatgaatga

SEQ ID NO: 2339 - DNA, 1272 bp, synthetic construct
  source 1..1272: mol_type = other DNA
atgtatcagtacgagaatgaggttactaaactcaatgagctgatggagactcataataactggatgcgcgatagcgtgaacctgattgcgtccgagaacacgacatccaatgccgtgaccggagcggtggcctcagacttagctcaccgctacgccgaaggacaggccttcgagcggctgtaccagggctgcacatacatcgatgaaattgaagacattgtgaaaaggctcagcagagaggtctacgactgcagctatgctaatgtgcagcccgtgtctggggtaacggccaaccttgctgctttctttggctttgcaaaggctggagacaagatgatggcgatgaacataccctttggagggcatatctcccatgccaacgtaagtgcagccggtatcagaggactgaagaccctggagcatccgttcaacccggaggtgatgaacattgatattgatgccatgaacaagatgatattggaagaaaagcccaagatcattctcttcgggggcagcctgttcctgttcccccaccctgtgaaagaggccgtcgatgcagccaacgaagtgggggcaactatcatgtacgacggcgcccacgttctcggtctgatcgccggcaaacagttccaagatccccttaaggaaggcgctgaagttatgatggggagtacccacaagacctttccagggcctcaggggggaatcatcctatcagacgagtccaacaaggaactaatcgacaatgctgtgttcccaggtgtggtgagcaatcaccacttgcaccacttagcagggctgggcatcgccacagccgagatgctcgagttcggcgaggattatgccaagcagacaatcaagaacgctaaagcattggctggagctctggcagaacagggcttcaatgtgttctgtgaggatcttggctacaccgagtctcaccaggtcgccatgaatgtcagcgacgtcaagcgtgcaacaatactggccaaagagctggagcaaaacaacattatactgaacaagaacctcattccaggcgacaatgtcaatgacagcgacgacccttcgggtataaggatcggtacccaggagatcacccggcggggaatgaaggagaaagaaatggaggaagttgcggagtttatctggaaagtggccgaaggcgacaaagtagacatcaaggatgaagtcactgaatttatgagtcaataccgaacgatccattatgcgtttaaagaggaggaagggtataagtatattcagtactga

SEQ ID NO: 2340 - DNA, 702 bp, synthetic construct
  source 1..702: mol_type = other DNA
atgcgcataggatgggcctttaccggtgccggacatttgctgagggaaagtgtagaagcgatggaagaagtggccaaataccatgatatcaccgtgttcctgagccaggcttcagaggaggtcctccggatgtacggtttatatgaccgggtggttgcggtaactggcggccgctaccgagagctggcctgcgattccaaccagaaattcagcttcccaatcacgggcaggctgagcctcggaaagtatgacgctctgatcgtgtcccccgtcactgccaacacagtggcaaagatagtttacggcatcagcgacacgctggtgacaaatgccgtggcgcaggctggaaaggggagagtcaaaacccttatggtgccggtcgacattgagcccggggacgttgacaccgtccttccctccaagctagagctgtcgaaatgccaaaagtgcgatgtgtgtgatgccgctgaagtctgtccaaatggggccattgtggctcaccaggagattgatctcttgaaatgcattggctgtggcgcatgcaaggacatctgtcaatatggggcagtgtctgccgggaagatcataacaatgcacatgagagacatcgacattgagaacacccagaagctctcaaagatggaaggcatcgagatctttgcaagtcctcaggagctgctgctccacttcgattacaaatga

SEQ ID NO: 2341 - DNA, 402 bp, synthetic construct
  source 1..402: mol_type = other DNA
atgaagaacaatcggaagaataaccagaataaggagaacaaccatctaaagtcactgcacctgaagaaatccaacgaaaaaataaccgacctcaggatcgcggatagctttctgagccggttccttggcctgatgttcaagaaggatatcgactaccccctcttgttcaagattccccagaatattaacaacaggcaccgcagctccattcacagctgcttcatgcgatttgaacttaaactggtcttcattgataagaacaatatcatctacgaaatctcggacctcaagccatggagatattacgcacctaaaaagccggccaaatacataatcgagtttgacaagaacggatttagtgactatgacttaaaaatcggggatgaggtggagctgaaatga

SEQ ID NO: 2342 - DNA, 1209 bp, synthetic construct
  source 1..1209: mol_type = other DNA
atgagcaggaatatttttgttgagaaactcaatcaaacttttatcgaagatctggatattgaaattgtagagcggaaggggattggtcacccagacagcatcagtgatggtattgctgaaagtgtcagtgaggctctctgtaagatgtatatggatgagcttgggggagtgttgcatcacaatactgacgaggtccagatcaccgcaggcgagtcgaacccggtgttcggtggcggacagatcatcaaacccatcgatattctcctcaccgggagaggcgtgtctgaatacgaggggcataaattgcctcttgattatgtagccatcgacgccgcaaaagaatttctggacaagactgtgatcaacttagatgtgaaccgtgatacaatcgttgagtgtaagatcggccacgggtccggcgacctcgtggacgtcttcaaacgcgagggcgccccgagctccaatgacacatcgttcggtgtaggctacgccccattctccgaagttgagaccatcgtctttgaaaccgagaccctgttgaacagcaaagccttcaagaaagaccaccctggagtcggcgaagacataaaggtcatgggactgcgggaaggagacaagatcacgctgacaatcgggtgcgccacggtgagcaaatacctggcaaatcgagaggagtacatagcctgcagagatgtgctgaaagacattgtggctgaccttgccgtcaagtacacagacagggaaattgaggtgttcgtcaacacagccgacaacgacaatgcgacagatgagtcaggctactacctaaccgtgacgggaacgtccgctgagatgggagacgacggctcagtgggacggggaaatagggcgaacgggctgatcaccccctgccgccccatgagcatggaggcaaccagcgggaagaaccctattaaccacgtggggaaaatctataacatcctctctaacgaaatcgcgaacgatgtggccaaagatgtcgaaggcgtgaagcagataaatctgatgattctatcccagatagggaagcccatcgatcagcccaaggcagcttcagctggcattatcctggaggacggctatgagatgggcaaggtgagcccacaggttgagaagatcatagataattggctggagaacataaccgacattactgaaaaggtggttcaaggtaaggcccgcactttctga

SEQ ID NO: 2343 - DNA, 3432 bp, synthetic construct
  source 1..3432: mol_type = other DNA
atgccaatcgaagaggctgagaaatcatacgactttaaaaaaatagagagcaaggtccagagcttttgggaagacgaggacatctaccagaagaccaacgaactgaacaagaacggtccccaatactccttcctggacggacctccatactgtagtgggaagatccacctcggtacgacgtggaataaggtgattaaagacacactcttacgttacaaatcaatgaacggctttgccctgcgccgccaagcgggttgggacactcacggcttgccaatcgaacataaggttgagcagctccttggcatcgagtccaaacaggaaatcgaggagaaatatggcatagacaagttcgtcggcaaatgtaaggagttcgccatggagaacaaggtggctatgaccgagcagtttaaaagcctgggagtgtggatggattgggacaacccctatatgaccttggaccctaaatatatggaaagcgcctggtggaccttaaagaagactcatgaaaagaacctgcttacaaaggacaaaagggtcatcagctggtgtccgcactgtcagactgcactggctgccgcggagatcgactatactgaggacacagacccttccatttacgtccggttccccctgaaggagaagttcctaaatgaagagaactgcagtgaatttgcaaatgattctgatctggccaacttaaaacagtcgttcctggtttggacaaccaccccctggaccctccccggcaacctagctatctgtctcaatgaggatttcgagtattcattcgtgaaggtcgatgagcggttgaacgagtcagatgacgagatattgatcattgccaacgaactgctggaaaccgtgctgggtcccatcgagatcatacataagaataagattccaaaccctaagtatgatccagaaaataaggagtccaaggagaaaaaatacctcattgaagaggaaacggaagtgatgtacgagatcataaagacagtcaaaggctctgagctcctggggctcggctacgtctatcccctggcggaagaagttcccaagcaaatggaaatagaggccgagaacagtctggtgcacacaaccttccacggggaccacgttgaactgggggaaggtaccggatttgtgcacaccgctccaggccacgggcccgaggactttgagatcgggcaggaagtgggacttcctatccattgtcccgtggatgaggcaggatgctttaccgaggacggcggggcatatgccaatggctacaccaaagacctaaatgacacaatcattgcagacctgatagccaaaggattgatgtttaagaatgacacaataacccaccgattcggggtctgctggcgatgtaagactcctatcatttacctcgcgacggaacagtggtttattaaagtgcctgaaatcaaggaaaagatgctttctgagatcgaccgagtcgagtgggttcccaaatgggctggggaaggaaggttccacgattgggtggccaacgcgaaggactggaccatttcaaggcagcgctactgggggattcccatcccgatatgggtgtgtcctgactgtggagaaattaaggttatcggctcggtggaggagctgaaggagctgagcatcaatgaaatcactgcaagcgatgaggagctggttcacagaccgtatgtggatgacattctcatcaactgcgattgcgggtgcgatagccccatgaagcgtattccagacgtgctggatgtgtggattgactccggagtggccggctgggccgcattatactatcctcgggaggaggaaatgtttgataagtggtatccatatgactttatctgcgaagggcatgatcagacccgtggatggttctattcccagttgggtacaggggtgatcgcactggaccaagccccgtacaacaaggtgctgatgcatggattcgtgttggacgaggagggcaagaaaatgagcaagtccctgggaaatgtagtgcagccggaggaggtcattgaaaaatacggggccgatgtactgcgcttctacctgctgtgggcttgcaagccatgggatgaccttaagttcgtttgggacgagctgaacaatgtgaaaaagatgttcaacatcctctggaacgtgtatgtgttctcaacaacctacatggccctggacgagtttgacccagcaaaatgcgtactggatggcccggatgcaaatgtcacattgagaaatgaggaccgctggatcttatccagagtgaactcacttgcgaaggaggctggcgatgccataaatgacgtccacttccacttggccacaagagccatcaacaacttcatactggaagacttgagcaggtggtatgtacggctgatccgaggtaggacttgggtggaaagcgatgatcctgacaagctgggggcctactacaccctttacaatactcttaatacgctgattcatctaatggcgcccataactccccacctctcggaggaggtgtacgaaaacctggtgaaaaacctagatgataatgcagtggaaagcattcatatggataactggatgtttgacgagtgcctgatcgacaaggagctggaagctgaaatggaccacattagagaaatcatcgaggccgctgccagggcacgcgatgtcgctcgctacaagctcagatggcctgtgagtgacattaccgtggtttctcaggatgagagcatcctaaacagtgttgccctcctggaagatgtgatcaaagaccagtccaacactaaagaggtgcttacagctaacgagtttgaaaacctcacattcattgcgaagcctaacctcaagaccttaggcccaaggctcaagggagatatgggcattgtccagaagttctttgcccaagccaaggctgaaggaattggcaactccattaaagaagagcttgacagtagcggcaaatacatcgtcaccggggaggaccgcgagggcaatcagaaagagatcgaactcagtgccgacgatgtcctgtatgaaacggagctgccagatgacgtcgtgagcgcagaatttaacggcgggaacgtattcgtaaatactaagattacgcccgagatcctgagcgaggccatggcccgggagaccatccggagaatccaggacatgcggaaagacatggacctcgatgtggaagctaatgttggcgtcatgatcaatactgatggagagttcaaggagctcattgaaaagcaatctaatttgatcagcgatgaggtacgggctaaatccctggtgatattcgatggaaaagcctgcgaggtctgcacggataagggtatgggcagggagtacgaggacatctcggtagagtacagtaaagagtgggagatcgaaggtcataaggtgattatttccgttgtcaaactttga

SEQ ID NO: 2344 - DNA, 2211 bp, synthetic construct
  source 1..2211: mol_type = other DNA
atgactttgacagattctgaggtgaaatatatcgagggaattttgggtcgcgaaatgaacgagttggaggagggaatgctggatgtgatgttttccgagcattgttcctataaaagtagtcggccattcctccgcatgtttcctactgaaggcgaaaacattgtcctagggcccggagacgacgctgggctggtgtcgattacggatgaatacgcgctggctgtggggatggaaagtcataatcacccctcagcgattgaaccttacggaggcgcagggacgggtattggcggcatcctcagagacattatcagcatgggggccatgccaattgccctgctggacagcctgcgctttgggccgctggaggaccagaagtcacgctacctgtttgagcatgtcgtggagggaatctccgactatggtaacagggtgggagttcccaccgtggctggggagattgagtttgacgaaagcttccgaacaaaccctctggtgaacgtgctctgcgcaggcctcgtcaaaaaggatgagatagttctggctgtggctccaaacataggcgatgtcttcctgcttatgggcggaaccacaggccgggatggaatccacggcgtgacctttgcatctgaggagctcacgtcagacagtgaaaccgaggacagacctgccgtacaggtggccgatcccttcaccaaaaagcgggttcttgaagcttccctggaaatcctcgaaaagatcgactgctccggcgtgaaggacctaggggggggaggcctaacctgctgtgtctctgagcttgtagacaagtctaagaacggtgccgtggtggacctgcgagcgattcctctgagggaggagggcatgaccccatatgaaataatgcttagcgagtcgcaggagcgtatgatttttgtcattaaccctaaagacgtggagctcgcacaaaagatctgcgataagcacgaaattccttctgcagtgatcggagaggtcactgagggcagcaatatggtggtgaaggacttcgatgccgaagaagagctgcagaccctgtgcaacgttcccacgatccttttggccgatcccccgagcattgacaggccaacagtggagcccgctaagagcgaggacctggtggaagtgattgacggccccatcgacgaatcactcatcaagatcctgtcctctccaaacatcgcgagcaaggcatgggtctacaaacagtacgaccacgaggtgcaaaccaggaccgttgtaaagcctggcgacgacgcagccgtgctgcagatcgacgacgagacagcggttgcacttactgccgactccaacactgtacacacaaagctgtccccatacgatggcggggccggcagtgtcgctgaagccatccgaaacgttgtgtcaatgggggcgaaaccctacgccattgtggattgtctgaacttcgggaacccggagactccagagatcctctggcagttcaaggagtgcattagaggcatgtctgatatagcagagaaattcgaagcccccgtcatcagtggaaatgtgagtttctacaatgaaacggaaggtatcaaaatcaaccccactccggctgttggagtcatcggcgtggaaaagctatcaagcatccggacattgcccttcaagaatgagggggataagatcataatcatcggaaaaacctatgatgagctgggggggtccgagtaccacagagccgtccacaaccttgagcagggcgaggctcctaaaatccgcatagatgatgagttggccgccgccaacgctgtgctcgacctcatagaaaatgatggagattacgtcaaattcctggaaggtgaggacaagctcaacatcaaagccacacatgacgtatctgccggtggaatagcaattgccctgagcgaaatggttatgaaaggcaagttaggctgtgagatcgatatcagcaatgtcccagcggaggaaaatatcagcgataatgacttgctgttctcggaatcccacggtcggtacatcattgcagtagacgccgataaggccgaggaaatagtcaattccatcgacattgatgctgccatcatcggtgaggtcaaaggcgacagcttaataatcaagaataatgatgagaccattgttgactttgccattgacgagttagataacgcttataatggggtgattgaaaagtatatggcttga

SEQ ID NO: 2345 - DNA, 1227 bp, synthetic construct
  source 1..1227: mol_type = other DNA
atgaagtttataagcaatctgattcccctggaagaggcactgtcgaaaatcaatgacaacattaaacttatggatacagaaaccattgacctgaaggacagccagggcagagtgctcgcacatgccgtctcttcttaccacaacagccctccgttcgacaaatcagctatggacggatatgctgtgatcgcggaggacactttcggtgcgtccaataatgttattaaggagctcaaaatcatcgataggattggggccggtgacttttccaataagtcccttcaaaacggtgatgctattgtgatcgcaacaggggcaccaattccagatggggccaatgctgttttgatgaaggaatacacctatgaggatggtgacaatctggaaatccactcacaggtgactcccggggagaacatctctccaaaggctgaagacattgccaaaggcgacgagatcttaggagagaacgtgctcatccggcctcaggagatgggcttgatagcgtccgctggatacagtgaggtggaagtctacaaacggccaagagtaaaactgctgattaccagcaacgaactggtggacccttcccccaacatagacgacgccaagatcatcaacagtaaccaatacaccatcgccgccctcatccgaagtgccggagccacagtggatattgaccacggaatcgatgactttgacgaaattcgcgatgccatcgataaggcaagcagggaatatgactgtgtcattacaaccggaggcacggccataagcaaaggggatgtggtcattgatgccgttgaggacctgggagaggtactcttccacggggtcgccatgcgacccggcaagccggtcggggctggcatcgtcaacggcacccagatcttcatgctttcaggacagcctgtggcggcaatgggtcagttcgatataattgcaagacacttcctctttaaggtgcagggcctggattatagccataagatcgtcaagcggacgagctcaacgaagatccactcgtccctaggccgcaccgactacatacgcgctgtagccgatgacgagactgtgcatcacgttctgaaccgtgggtctggcatcatcaggtccatggtggaggccaactgctacatcatcatcgatgaaaaccatgagggcattgagataggcgacatggtggacttgatcttctttaatgatatggcttggcccagtctatga

SEQ ID NO: 2346 - DNA, 660 bp, synthetic construct
  source 1..660: mol_type = other DNA
atgaacaagaagatcattttcctggcgtgcgtgatagggatcgcccttctgtcggtgagctacatttcagccgaatccgatgtggacacctccgattgggtgaatataaccgtgaacgacatcaacttccaaattcccccagagtatgggggcggcaggaacgcaagcggcgattacctgtttaacaacgtctttaccttcggactcgtagctttggagaacaataagagtttccgcaacaattacggctatgaagcgacaaatgaagagaattatgacgttgaggagatggaaatcgacggacatcacgccgtggcctactacagcaaccggagcatcgtcaaccacacggtcacttatctctactttgagtcaaatggaacattctacgccttatcctatgacggggatgacgttaattcctctatgaagaaaatcgtgtcttatagtccgaaatccaaactgtcaaaggaagagtttaacgaaaagctaaacaaggctcaggaggagtatattgaagaccagatcgagcaggaagaggcttatcagtatgaacaggcataccgggagggctacaatcaagggcgcagcgatagcagaggaggcgagctcctgggttactacttcttctacaaactgggtcagaggagtcgatactga

SEQ ID NO: 2347 - DNA, 1158 bp, synthetic construct
  source 1..1158: mol_type = other DNA
atgaacggcatctattattatgtaatagcctttctactgatttggaccattgccattgtgtttaagggcagactggaaaactatggccttgaagtcaatttcccccttttgatgtggaagacccagcgcttgcgagggtttatcgaccggatcgccaatagggctccacggttctggaaatggtacatgaatatcgggatcgtcatctctaccggctttatgattctgatggctgtggccctggtgtacagcctaaagaccctgatggacgcacccaccgtcagcctggttattcctggggtggaagtgccaggctcgcctatcttcattcccttcctatcggggctgatcgccctggcaaccgtgctgatcgtgcacgagttcagtcatggcattttggccagggtggagaaaatcaagattaactcaattggtcttctcctgtttgccatcctgccaggggcttttgtcgagcctgatgaagaggaactgaagggactcaaccggcctagtagaatgcgcatatatgtggcaggttccatggctaacctgaccctggcagcgatcgcccttgtgatcatgatgctcataagctccttcgtcgtccccgccgtctttgaggacgacggcatcgtaataagccgtctcactgaagacggcaatgcaatcaactatctcagtgagggaatggtgatcaaaggaataaacaattactccgtaagcgacggggcgtcctaccaaaaagctgtgagcacattaaggcctaatcaaacggtgactgttctcacggatcagggagagtacagcttccagctcaagtcaaatccccagaacaagtctttgggctacatgggagtgcaggcccaggtaaaccagatcatctctccggattttgataacaaattctacacgccgttactctggggaataatgtctctgacagacttactcttctggatttacttcctcaactttgcggtcggcacattcaacctgttgccaatgaagcccctggatgggggtcacctgttcgaggaccttctgtcctacattacatcagagaatatctacaagcccgtggtgactttcatgtccttctttatgggaatcattattgttgttagtctggtggttggctttgtgggtgtcccattctga

SEQ ID NO: 2348 - DNA, 1227 bp, synthetic construct
  source 1..1227: mol_type = other DNA
atgaaagcaaaagcggagaaaatcggcgatggtgtgtactggatcggggtgcttgattgggaccttcggacgtaccatggttataccttggatggaaccacttacaatgcttacattgtattcggcgaaaaggtggccatcattgacaatgcctatcctggaaagactgaggagatgatggcccggatcgatgacgctttcgaacaagagggaagggaaatcaaagtggactacatcgtgcagaaccacgtagagaaggatcacagtggtgtcctgtacgacctgtggaaaagattcgatgccccaatctactgcagtaagatcgcgcagggaggcttgctcaggcactatcctaaactggagggggccgagtttaatattgtcggaactggcgacgctctcgacctgggcggcaaaactctcgccttcctggatgcattcctgctccactggccggacagcatgttcacgttacttgccgaggacggcatactattccctaacgatgcattcgggcagcacttatgctactccaaacgctatgataaggacattcccgaatatgtgctgatggatgccgcgcaaaagttttatgggaacctgatcacgccactaagcaaaaaggtgctgaacaagtttgatgaaatcatagagctgggcctgctcgagcaggtgaagatgattgctccctcccatgggcagatctggacagaccccatgaagataattggcgcttacagcgactgggcaaccggtaaacgagccgaagacaaggttaccatagtctatgacacaatgcattattcaacacagaagatggctcatgaggttgctgagggcatcatggccgagggatacgatgtggaaatgttcttcctccacgaagacgaacgttcggagatcgtcaagagcatacttacctcaaaggccgtcgcgttcgggattcccacaatcaacgactttccatttccaagcattggcgacattatctactacttgaaagggctgcacttcaatagaacaggctttaagcggcccgctgtcacctttgggtccatgggaggccgcggtggagccgtggaatttattgcaaacgagctcaccgaatgtggatttgaggtgctcgaccagcaggagatctactatgtaccggcagatgaagacgatgaagccagcttcaagctggggcaaaaactggttgaggaggccaagaagttggagctgtga

SEQ ID NO: 2349 - DNA, 795 bp, synthetic construct
  source 1..795: mol_type = other DNA
atggaaaatgaggagaatattagtcagcccaaggccattcagatttttgccaaggccccaggggagctaggcgtgaatgtggtcaagagccccgtgaaactcacgatcctgtccatgctaaaggacactgatatggagtttgatgaaatcgtgaaaaacaccggcaagtcaaaaagcactatctctgtacatctcaagagcttaagggaggatggaatcgtgagctaccggttcgatgcaaacgaccaccgaaagaaaatcttctacatcagctccaaattcctgggagaagtcgaaagcggggatgagaaggagctggaggaaagacaggccgaatttctggtcaagaacatcttggatgtggacaacttcaagttctcgtttctcctgttccacacccttcgctccaacttgattcaagagggcatcaacatcaacccagtactcaaccagacaggcaagaacataggtgcagcaatgtatgagaagctctatgacgacgacatcaaagtcttctgtgacaatattaccgaattttgggctgacaatggactgggcaaactggatatagtgctgggagatatcattaacgtgacggcctacgagtgctttgagtgcagtttgctgcctaagaagggtaaaccggcgtgctaccttgacgctgggatatttgaagccctgttcgcgaattatcttaaaaaggacatcgctgtgacagaggttaaatgtttcacaatgggggacgactgctgtcacttcctcgttgagggcattaatggggaatcactgacctga

SEQ ID NO: 2350 - DNA, 1983 bp, synthetic construct
  source 1..1983: mol_type = other DNA
atgagcaattcaatcttttgccccgactgcgggatgctgaaggagaactgtgtgtgtggacgctacaaggcaaatcgtgataaggtgaagtacaccaaaggtactagatccaatccccagtacaagaaacgaaaaacgttcaactactctaacaaaaaacgggcggaaaatatgaaaaatacgagcagcaacaaatcaaaaggtctgttccaatatgaagagcccaaagggctctaccaatacgaggatctcgaacctgttaaagtggaggaagaggatgactttggaagttcaaaggtctacgacatcgctgagcacgacctgcccaaggagatcatagatggcttaaaggaggactaccctgagattccagatagcatcatagagaacttcccctttgagaggccaagagagggacagctggatataattgccgatattgaggaggccatttcgaaaggcttcaaatacatcatcctcgaggcaggaacgggtacggggaagagcgctgtagccacaacccttgctagaatgtacgagtccgcgtacattcttaccatgaccaagcagctgcagcgccagtacgcagacgagtttgactttcccctcgtcaaggggcggggcaattttgactgcataaaagacggctttgaggtcacctgtgacatgggggcctgtaagacagctccaaagaatagtaagttcttctgtccatatggtattagcaaaaaccccacactgacaggagacttggcctttcaggactcctatgggggcgacatcttcttccagactaacgaccactgccattactggcagcagaaggccaatgcaatcaactctccaatcaccctcatgaactatgactacgctatcctcgagctgaattacgttaagcatttcgggaaacggaccctcctcatcctcgacgaggctcacaacatcgaagataagctgatgaaaaccatggaaatcaatttgtataatcggcagctggaaaaggacataaagaaggtcataagcccccagactcttaaaacccgggagatgggcgaatggatcatggagattgatgcgatccagggccactatgccgatattgacataaaggacctccctactaacaaggcagacaggatcaggagtacttccgcccgcctgaaggacctaaagaacaagctggaaacagagcctgggaactgggtgatcgactcaaatgaaaatggagtgtctttcaagccacttaaagtcaaccactatgccaacgattatctgttcaagcacggggatgttgtaatattcttaagtgccaccatcctgtccgctaagatgttttccaagtggctaggcctgaaccctcacgaagtgtatcacatcaaggtggacagcccattctcagtggagaaaagacccattgaactaaacctggccggcaagatgagcaaaaaccgcgtgaagcagtctgcccccaagtctatcgaaatcttaaacaagatcttgaaacggcatgaaggagacaaaggcctgatccacacccattcctacaaatgccagcagtatatcattaacaacctgtacaactcccgattgattgcacatggctctaacaatcgcgaacgggtcctgaaatactttgaggaagatgataaccctctcgtgctggtcagtccgtcgatgagcgaaggtgtggaccttccatatgacaagtgcaggttccaagtgatctacaaaatcccgttcccttaccttggcgatccgcagattaatatgagacgaaagaaggaccaaagatggtatgcctacaagacagtaatgacactgatgcaggcctatggaaggggcatgcgcgctgaagacgattcctgcgtgacttatatcttggatagtgatattcaaatgctgctgaagagcccgttgtacaggtcgctgattcccgagttctttaaggaggcgattattgttaatgatgatcgtattatctga

SEQ ID NO: 2351 - DNA, 699 bp, synthetic construct
  source 1..699: mol_type = other DNA
atggtgatcaaagaaaagattgaaattgaaggtatcccggtggaggtccaccgaaaaagaatgaaaaatgtctatctgcgtgtgctgcccgacgccacccttcgggtgtccgcccccgagagggtaagcaatgattacataatcgagtatgtcacttctaatctggactgggtgaagcagactcaagagcgcatcctgaaaaaccctcccaagcctaagattatgtataagaatggggaggtccacaagatctggggagaggagtacaagattcagctaattaccaacgacaccatcaaacacgccttctacgatgcagacgaatcgatcgtttacctgcccgtaagacgcagatccacagtgaacgaaagggagaaggcattgtttgagctttaccgcagtgaaatgaaaaggaacatcgactgctttttgaataagtgcgttccaattgtgggggagcagcccaaggaaataaaattccgaaacatgaagaactggggcaactgcaggcggaataagaccatcacgctcaacataaagctcgcttcaaagccgccaatctgcacagaatacgtgctgattcatgagctctgtcacatcctcgagttcaatcatagcccacggtttaaggcgctgatggatggcttctgtcctaactggcgggagatcaaaaaactgttaaacgaaagcgacgattga

SEQ ID NO: 2352 - DNA, 834 bp, synthetic construct
  source 1..834: mol_type = other DNA
atgctgacgaaaagaattattccttgcttggattgtgacctgcaagtgcctgaaggccgggtggtcaagggtgtggaatttaaacagatccggtacgcgggaaaccccgtggagctggcgaccaaatattacgaggatggggccgatgagatcgtcatcctagacattacagcttcccatgaacgccgtggaaccatggtggacgtgatagaaaggttgactgaaaacgttttcatccccatatgcgtcggtgggggcatacgcaaggtagaggattacaccaggatgctcaaggcaggtgcagacaaatgctccaccaatactgctgccatccataacccccagctgttaacagacgctagcaaggtggtgggatcacaggccgtcgtcatcgggatcgatgcaaagcgaagatatgtggaggaggacccagagcaagccaaagggaaaaccatagtggacacagacgatggagaggtatggttcgactgcagcatctacggaggccgcgagttcactggcatggacgccattgcctgggctcaggaatgtcaggaccggggagccggcgaagtccttctgaccagcatggatggcgatgggacaaaggacggctatgacctgattctcacgaaggccatcaatgacaacgtggacattcccgtaatcgcctcgggcggcgttgggaacccacaccacatcctcgaggccttcgagatcgcagatgctagtgcggcccttgctgcaagcatcttccactttgatgagtacccggtccctgtggttaagaagtacctgaaggaaaatggtgtgccaattagggagacgttttga

SEQ ID NO: 2353 - DNA, 1077 bp, synthetic construct
  source 1..1077: mol_type = other DNA
atgtcgagtcagaaaatcaattccctgatcgatcttaatctgacccagtatagtggccaaaccagccagagcccatggcggcacaactctatggagaacattgataagttcgacgagctcatttacctgaaagtgccctcaataattgatggactggatgataaaactatcaacttaaatggcctccccgtgcttctgaacctaagccaagacaaagacaacatcaatgggttcgaatacacatatagtctcccccagaaagtagaaaaacaagctttttctatcgggcaggacaatctgagcaagaaggaactgcagtccattgaacgggagatcgactccaacctcaataacatctacgacttggaatttgacctggagaagttctacgagtttcttctggaggacgagaagctggcgcccagcgttgacttctgtaagggattgagactattcatcgccaaggaccctttcgaatgcataatctccagcatttgttccgcgaacaattcaattgcccggtggaccgctagcatagacaagataaagctgaactggggcgaaaaggtggaatttgacgaaggtatgttttatggtttcccctcccctaaggactttttagacttctatgaaactcctattgagcagtcagaggctgacggacgccgatacgaggtggattgctacacaaaaaacctcaaatcctgcggcgtcggctacagggctccatacatgaagaaggccagtcagatgcttattgacgagatcgacatgaacgatgtgtcaaaaatggcctatgatgaggcattcgatctgattctgagattgccgggagtcggtccgaaggtggccgattgcatcttgctgtatggcttcggcttccaggaggccttcccaagcgacgtctggatcaagcgcatcgttagccacctctactttgacggggaagatatctctgcagataagacgagggagtttggaatagagcgctttggggattacgcaggctacgcccagctctatctcttccattacgcacgtaaatcggggctgatggatgagatcaagaataaatga

SEQ ID NO: 2354 - DNA, 444 bp, synthetic construct
  source 1..444: mol_type = other DNA
atgaaactggtcatccaacgcgtgactaacgccagtgtggaggttgaaggggaaattaccggccagatcgaagaaggactgatggtgctggtcggttttggccagacagatacagagaaagaggtcgactatctagccaggaagctgacaaagcttaggattttcccagacgaagagggccggatgaaccgatcagtgaaggatatagggggaaagctcctgcttgttccccagttcaccttatacggccggaccaaaaagaacagaccttccttccacaaggccctggcgccaaatgaggctaccaaactctttgactactttgtcgagaagtgcagcgaagaggtgccctgtgaaacgggggtatttggtgcattcatgaaggtgagcttgctcaacaatggaccggtgactatcctgttggagaaagagttcgaggactga

SEQ ID NO: 2355 - DNA, 450 bp, synthetic construct
  source 1..450: mol_type = other DNA
atgaacggggaaagcttccagggcatctgggacaacagccccttgattgcatggattcataatctctcgaagaatcacttcaaatacctcaaggccaaaatcaacgagtttgatctgggccacgagataaggtatatcatgatgatctacgacaacccaaatatctcccaggacgatctggtgatcatgtctggccaaagcaaggggaacattgccaagtcactgaagaaactggaggatgatggatatattaaaagagaggtaaacccggagaacaggcggaagtacatgctccggaccacgtccaaaggggacgagctagtccctaaggtgcgacagatcagtaaggactgggaaaaggaggtgggtatcaccgaagacgataaggaagtcattgaacgcataaaagagatagctatcaatggaatgaaactgacagaggacctttga

SEQ ID NO: 2356 - DNA, 1392 bp, synthetic construct
  source 1..1392: mol_type = other DNA
atgaaattcgactcagagacctctgtattgcttgtatcattccttacagccttctttgcagtgtttctggccgccggtattgtcataggagtgccagccattgcaaatgagttcggaatgaacaatgtagtgcagaattggattattacaatcgccctgctggtggtggccatgttcacgctgccggctggccagctgtccggtaagttcggcgtcaaacgcagtttgctcgtgggcgtcctgatcttcatcgtcggcagcataggcgcatgcctggctttcagcgccgaatccttcctcttcttccgggtgatccaaggaatcggaggggcttttagcaatgtggctagcatggctatggtcgttcaggccatcaagccccaaagcagaggaaaggccctggggcttaccgtcacgggggtctacctcgcaggatcactcagccctgtcatatgcggcttcctggtgtataactttggttggcggtccatgttttacttcaccattccattcttcctgatttgcatcgcgctcatgctttggaagattccaggggattggaaaacctatgaaaatgataagatcgactctatcggctacatgatctatgccgtgggcattttgctcttcatctatggatttacaaacctgatcaacgcctggggtttgatctgtgttgtggtcggcttcatactgctgctggcctttgcatactacgaaacaagagtggacactccggcatttaacatgcgactctttaagaacacgaagttcgcctcctccaacgtggcggcattatgcagctaccttgcagtggccgctctcactaccattttaaactatcatttccagtacgtcaggggctggaacgctcagatgtcggggctgatattgattgttacccccattatcatggcctttatggctcctaactccggtaaactctcggataggatacacccccaaaaattggcagccatcggaatgaccattgctactgcagccctagtgatcctcatcttcttagacgctaacactcccatttggctgattatcgttgctatggtcctgcagggggtgggcatgggcctatttaccactcccaacacaaatgcgatcatgagctctgtgcctcccaaagagacccctaatgctagtgccgcccagagcgccatgcgcacgatcgggcagacaatgagtctggggcttctgaccctggtgtttgcgtggatcatgggcagtctgaagctatcctcccagtacgccggaatggtggttcaggccagccagattgtttgtatcatctgcacaatcatctgtgtagtggcgatctttgcgtcactggtggggataaaatctaaggacgagtttaatattgagaagccaagttga

SEQ ID NO: 2357 - DNA, 1392 bp, synthetic construct
  source 1..1392: mol_type = other DNA
atgaaattagatctggaaacagttgtcgtggcggtatcgtttatcacctcattctttgccgtctttctgtctaacggcatcgtcataggggtgccagccattgcccaagagtttgccatgaataacgtgattcagaactgggtgcctactatattcttccttgtggtcgctatttttacagtccccgcagggcagatttcagggaaatttggggtgaagaagagcttgctgggaggagtgcttgtctacctctttgctagcataggggctgtgctttccttctccaccgagagcttcctcctgttccgaatccttcagggtgcaggggtggccttcttgaatgtgtccgctatggcgatggttgtccacgcagtgaagccccaaaatcggggaaaggcactgggatttactgtgactggggtttatctggctaccagtctgtctcccgttatctgcgggttcctggtgcacaatctcggctggagatccatgttctactttgtcattcctttccttgtcatttgcgtgctcctgatggcattcaaaataccgggcgagtggaagacatacgaaaaggacaagatcgacatgatcggaagtattctctacggcatcggcatcctggcattcatctatggttttacaaccctgactaccagcaccggtctgatcctaaccatcgccggcctggccatgctggtggtctttggcgcttacgagctccggcagaaatctcctgttttcaatatgaacctatttaaaaacaagaagttcacatcgagtaacatagcagccttgtgcagctacatcgccgtgatggtggttaccaccatcctcaattatcacttccagtatgtccgcggctggaacgctcagaccgccggtatgatactgatcatcacgccaattatcatggccattatggctccaaactccggaaagctgagcgacaaaattcatccgcagaaactggcggccataggcatgtcaattgctacggtggcgctcttaattctcacattcctggatggcaacactcccatttactttgtaatcctggccatgatcctgcagggtattggaatgggactattctcctctccaaacatgaacgcgatcatgagtagcgtgcccccaaaggacgcccctactgcatcagcgtcccaggccaccatgaggactatcggccagacgatgagtttagggcttctcaccctggtatttgcctgggtgatgggcagcttgcctctggccacgaaatatgcaggcatggtggttcaggccagccaaatcatctgtggaatctgtaccgtggcttgcatcctcgccattttcgcttctttggtaggtgtaaagtccaaggataaattcaatacagacaggcccacatga

SEQ ID NO: 2358 - DNA, 1017 bp, synthetic construct
  source 1..1017: mol_type = other DNA
atgaacgaccttacagacaggctgtttcactttttcaaggaagaaatcatcttctccattagcctgattctggccatcatttcctgttttttcgttcctcccagtgtcgattatttaaattacatcaactgggagactatcattctgcttttcataattatgctcttcgtcgagattttaaagaatctgtcggtgtttgaaatcctggtgcgcaagctcctgaagaaagtcaaaaataccagagggctggtgctctttctggtcttcacctgcttctttagctccatattcattacaaacgatgtgagccttatcatatttgtcccattcaccatattggccctgcggaaggttgaccgactggacctgatcatcttcgctgtgtctatggagacgatcgcagcgaatgtgggctgcatggtgctccctatcggggctccacacaacatcgtcatgtacatggtttcacatattccattccagtcattcttccttatccttctgccgtacatcgtggtatccgccgtgtttttgattattctctccttcttcgtccccagcgacgccgtaaacttgcccaagtttggcaaagtcgagattaataaggaaggcttctttaaacgcgtcctgttcggtgttgattatttcctgctcttgaccttcatcgcactatttgtactgataggaaacctcgaaaacatcacattctttaatctgttgtttaaaaagtggataatcggcaatgaggtgatttggggcgtagtggcctctcagtttatttcaaacgtgcccgccgcaatcctgctcagtggattcagcactaactacgaggcgatcatcgttggaatcaacattggagggcttggtacgctcatcgccagcatggctaacctaattagttacaagatcctggtgagggagcatggggagtttaaaatccggtatctgatcatatttaccttcttaaatgtggtgctgctcttcatcctattgggcgtgtacgtgtttattcactga

SEQ ID NO: 2359 - DNA, 591 bp, synthetic construct
  source 1..591: mol_type = other DNA
atgctcttcgagaaggaaaataccgaggaaaagattatccgggccacattcgatatcgttcagagggagggtttacagaaggcaaccactaaaaagatagctgcggaggccggggtgaacgaggtaactattttccgaaagtttgagaacaaaaagaacctcataaaaaagacgaaagaatactacaccaatcagctcatcgccaaactagaggagagctttgaatttaacgagaccgacagcattgaggagtacctgaaaagatccttcaacaagatcctggaattttcagaagaggatttcaacatcatccgcgtcgccatgcaggaagtgaagaacgatgacgacaaaaagctccttatcactaccattacagacacaattataaacaaactggatgagttcttcaaactgcaactggaaaagggcacgatcaaggatcttaattccaaggcggtcagtttgatgtgctttagcatcatattccagtcgctgatcctgtggcagatttacaatgacggagacctggctgccgactattatgcagatgaatttttggacatcatcttcaatggcattaaggtgcaatga

SEQ ID NO: 2360 - DNA, 3285 bp, synthetic construct
  source 1..3285: mol_type = other DNA
atgaaggtcctgaagatagccattatcatgctgattctgatcatcagtctgggagcggtttcagcaaccgagaattttaataatgatctgagtgataatggtctcaacgataacactctgagcgacaacagcctgaatgaaaacaccctgagcgacaacacgctgagtgataaatccttgagcgagagcacaatcatccagaacgaccacgacaacttgaaagacaccaacaacaatgataacaacaaagctctcaaagatcctgcgaagacgtttacagacctgcagatggaaatcattaatgcctccgaccttttggaactgaccgacgactataagtacaacaatgaaacggacaacatcacgctcaccatctctaagagcaacttcgtgattaacggcaatggccacacaatagacggcgacaatcagtgtggcattttccagatcaacgggacgaacattaccctaaaaaatctcaacatcatcaatgccaactctactaaggacagcgccctactcctcaacccaggctctgagcttgagacaaacaatgtgaccttcatcaacgacagctcggacaaaagagtaatctttgcatttggtgcaaaatataccagcaataatgataagtttatcgactgcacctccctcaacgatggcgtgattaactcataccttggtgagatcactatcaacaacggatattttgagagctccaagccactggactgggcgttcgtcaacagtttgggaaattcctcgatctacgttctgaacacgacattcgcaaataccacctccaagtacgcgacagcaatcaagggagatcgagagacagtaattcacgattctaagttcattaatctctatgccaacctgactgccggagccataggcctgaagcgcattgaggaggctgagattgacaattgcacattcattaatgtgagttcccaaaaaaatgggggggcaatattcctggacatctactcggatagcgaggacgtgcccatcatgatttcgcgatcctcctttgttaattgctacagcgagtttggaggcgccatcctctctcttgggggaaaaatcacactggaggaagacaatttcaccaacaacggggcattctttgacgggggcgctatctattcttccttctcccagcttaccatttcacagacaatctttgacaataactctgtggaattagatgatgaccggggttcctttgggggggccatattctctgacattagcgcactgattattttgaattgcagcttcagcaacaataacgcccagactgggggcgccctctatacctacgattcgggctactacattgccaactccactttcaaagacaacaccaacaaggagagtgagtttgatgatatcttcacggacttcgatggggagatcgccacactggaaaacaatagctattccggcgaggattcaatatgcctgaacaacgagaggtatgagtcagtgatcgccgtgtctggcatgaacttcaccctcatcgagaatgagatcaatgtgaccaaccctccgcggaaatttgacctccgtgaatggggatgggtgactccagtgaaaaaccaaggctacatgggttcctgttgggcttttggaactgtgggagctatagaatcttcaatcctgagatttttaggccttgaaatggacatctctgagaacaacatgcaggacagcctgttgcagtattaccgctacgggaccctcggcgcggaagaagggggcgagtacaacctcggcccgtcctatgcattgagttggtttggggtgttcccctcagagtatgacgtttacgacgagctgggaaagatttcagccataatcgctacagatgacagcatccatctgcaggacgcagtctttgtgcctcctctgatgaatagtactgacaaggataaacttaagcagtccctcctgaagtacggcgctttggcagtgagctactatgccgaaaccgatgagccaggattaaatgagaatacctcatcccagtacagcctcaaaaatgatagtaaccaccgcgtgcttttagtgggctgggatgacgactattccaaggacaacttctacatgaccccgcccggagacggggcttggatcatcaaaaacagctggggagaggaactgggggataaggggtactactacatatcctactacgacgccagtttcgccaccctagtgccctctgtcggcttccccatcatgaacacagtcatttacaataagaactatcaatatgacatcgggggcaccttggagtttacggatatgggtaacgaatacgtcaacgaatttgaggctctcgaagatgatttcattgcggccgtcggaacatacttcattgatgcgggcgtcgattacaacatcgagatctatgtcaatgatgaactgaagtacagccaagatggaacttcaccatttttcggtttccacaccatccaactcgattcgtatgtgcctatcaaggaaggggatgagtttgacgtgaagatcacatccgactgcattcccattctggagagtggccggcagcattatatagaaaacaagtcagccgccaatcttaatggggaatgggtggacctgaccagtgacgggaaagtctgtgctattaaggtgtatactaccgatgaggacaagaaaaaggagtcttctaggatcaatacaaggatcgactgtaaaaacatgacaaccacggctgtggcttctgaagacggccggattggtgaatacttccaggttactctgaaggacgagaacgggactgctttagccaataaacccatcaagattggtttcaatggaagggtctatgacagaaccacagatgaaaacggcagtgccaagctacagataaaccttgcctacaagggcacctacacctttgccataggcttcctgggtgatgaggaatacctgggagcattcgaggttgcgaagattactgtaaaagtgcagacccccaaactgactgccccaaataagtcatataaggtctcggcaaagacaaagagcctgactgcaagcttcaagacagctaacggaaaggccgtaagcggtaaaaagataagtttcacagttaatggcaaaacctactcagccaaaaccaactccaaaggcacggctactgtgaatgtatccctaaacaagaagggaacgtatagcttcacggtcaagtttgccggtgacgatacattcgccacttctagtgctaaggctaaactgaccttgaaatga

SEQ ID NO: 2361 - DNA, 138 bp, synthetic construct
  source 1..138: mol_type = other DNA
atggcacgctgtcccagatgcgggagcgaagccctcgaggagatcaacttcaacacctataagtgccacgagtgcggctacatgataaggaacccagacgacctggaactggtggaacgggagaatggagatctatga

SEQ ID NO: 2362 - DNA, 429 bp, synthetic construct
  source 1..429: mol_type = other DNA
atgaaaaaggccattattgaaacggaaaaaggagatatcgtcctggagctgttccctaatgaggctcccgggactgtggcgaacttcgagaaactggcaaacagcggcttctacgacggacttaccttccaccgggtgatccccgactttgtcatacagggcgggtgcccaaggggcgacggtacaggcgggcccggctggacgatcaaatgtgagaccgaagggaacccacacaagcatgggacaggcgccctctccatggcccatgcaggtaaggacactggaggaagccagttctttattacccacagtccgcagccacacctcgacggtgtgcacaccgtatttggccaagtcatcgagggaatggatgtggtgaatgctatccgccctggggataagatgctaaaggttacagtgcagggctga

SEQ ID NO: 2363 - DNA, 276 bp, synthetic construct
  source 1..276: mol_type = other DNA
atgctcgaacagtatatgcagttcatgtggctcatcatctttgggaatatagagaacttgattctgagctcccagggagttgtccagggagtggaccccaagatcctgggaggcctcagtattctggtagtgattatgtggttcgtcatcggcaccgtcattacagatgtggccatacagtacagcaatctaatcaacttcatcggcgggctggcaatctttcttctggggttccaagccgtgtacgaggctgtgcggaacatcaggggtggctga

SEQ ID NO: 2364 - DNA, 270 bp, synthetic construct
  source 1..270: mol_type = other DNA
atggactggaaaccctatgccccattcacggccttgctgattttcggaaacattgaaaaccttattctctcaagcgagggggtaatagcaggtgtgaatagctttgtgctgctgatcttaagtttgatagccgtcgtggcttggctgctcctgggaacctacgggacaaactacgcaatcaagtacgctgattatatcgagatcatcggcggcatcgcgatcatcctccttgggctagagtccatgctggaagccttcggcattctgtga

SEQ ID NO: 2365 - DNA, 1041 bp, synthetic construct
  source 1..1041: mol_type = other DNA
atggctcggattatactgggcaagactggccttgaaatcgagaaaaacggctttggcgccctccctattcaacgtgtagactttaatgagagtgcagagatcgttcgaaaggcttacaataacggcatcaacttcttcgacactgccagagcctatacagattccgaagaaaaactgaactatgcctttaaaggattcgataaagagtttccacgggaatccatcatcattgccagcaagacccagggggaaaaccgccgggacattgaaaaggatatcaagacgagtctggacaatttaggtaccgactatattgatctgtatcagatccacaacccctcattctgtccgacagaaggggacggaagcggagcctacgatgccttgttcgacctctacgatgagggaacaatacggcatatcgggttcacctcccacaaatacgagctcgcagaggaagctatccacagcggcctgtacgaaaccatacagtttcctttctcttacctcacggggccaaaggagctggcgattgtggagatggcaagggcgaacaatatcgggttcattgcaatgaaggccatgtccggcgggcttatccgaagctctaaagcggcatttgcttacatcaatcattttgataacgtcgtgccaatctggggtgtgcagaaactcagcgagctggacgaatttctaagttatatggccgacgacaccaaactggataagcagctggaagagatcatcgctaaggaaagggaggaattgcagggagacttctgccgcggctgcggatactgcatgccctgccctgaagacattcagatattcatctgtgcccgcatgtcactgtggattagaaggttccccgctgagccgaacctaaatgaggagactcaagagaagatgagaaagatagaggactgcacagagtgcaggcagtgtgtcatgaaatgtccctacgagttggacattcccgagcttctgaagaagaactatgaggattacaaaaagatcctctcgggtgagattaaggtgtga

SEQ ID NO: 2366 - DNA, 1176 bp, synthetic construct
  source 1..1176: mol_type = other DNA
atgaatacccaggaaatcattgatattgaagacaagtatttcattaatacattcaaccgcgtcccaatagtcctggaccatggagaaggagtcaaagtttgggacatcgatgggaacgagtacctcgacttcctcgcagggatcgctgtcaactgcctggggcacaaccatcccaagctggtaagcgcgatccaggagcaggccggaaagcttattcacgtttcaagcatctattataacgaaccagccacagtgtatgccaaacgattggtggacgctacgggcttcgacagaatattcttcgcaaacagcggggctgaggccaacgagggtgccatcaagctcgcaatcaaatacagtggcaagcatgaggtcctatactgtggagacagcttccacggccggaccatcctgaccctgagcgttactgatcaccctgagtacagcgcaccctatgtggaaaacctgccaaaaggatttaagaaagtggagtttggcaatttggactccgtgaaggaggcaatcacagatcagacggccgccatcatcattgagccggtgcagggtgaagggggggttcacgtcgcttcagaagagttctacaagggactcaatgacctgtgcaaggaaaaaggcatcctaatcattgcggatgaggtccaatccggttttggacggtgcggagccttgttcgcccatgagctgtttggcctggagcccgatataatgactgtggccaagggcatcggcggcggcttcccaatggctgcatttctggccaaagaggatgtggctggcggctttgtaccgggcgaccacggtactaccttcgccgggagccccctcgccggtgcggctgcaaatgcggtatttgatgccttcgaagaagagaatattgtggagaacagtaagaagatgggagagtactttaaggagaaactcgctccccttaaagacaaatacgacttcattaccgatgtgagggggtccgggctgttagtggggctggaactgaacttcgaaggcgccgacatagtgggcaagatgcttgaggaaggattcttaatcaactgtacagccggtaatgtgctcaggtttgcacctcctctggtcgttaaggaggaagagattgatgcgttggtggaggctcttgacaaggtgttttcgtccctgtga

SEQ ID NO: 2367 - DNA, 645 bp, synthetic construct
  source 1..645: mol_type = other DNA
atggagataaaaagaatcaaccggtacgtcatttacctattctccctgttcctcatctcactgggggccagtatctcaatcaaggccaatctgggtacctctccaatcatctgcttaccatatgtgagcagcctgatcttgaatatgagcgtggggactgtctgcttgatatttaacgtgatcttcatcctggttcagataatcctcctgcgcggagactttgaaaggcgacagtatctgcagataattgtcggcaccatcttctccctttccattgactttagtatgacgctcgtaactttcttaaacccgacaaactacattagccagttcgccgtcctgatgctcagttgtgtggttgttgcatttggcgtattgcttgaggtgcaaaccgaggtggtctttcttccccccgacggcatcattgtggctattagcaaggttctaaacaaggagttccccaaggtaaaaccattctttgatacatcgctggtgctgacagcagcgattctgagcatagtgttcctcggctacctggccggagtccgggaaggaaccatcatttccgctgtgatcattgggcctatcgtgaaagtgctccagaagttctttaatccttatatcgaggccgtgattgaaaaatga

SEQ ID NO: 2368 - DNA, 438 bp, synthetic construct
  source 1..438: mol_type = other DNA
atgacaaatcggaaggactgggggttgacggtccgtgggatcgtccaacaggaggacaagatactgatcctgaggagacaccccaagagccgaaacaatcctaacaaatacgagctcccaggcggcaaagtggaccccggagagttcttcgatgaagccttgattagggaatttaaggaggaaaccaacctggacgtaaatatagtgtccctgtttgagaccgtccaggatgaatttatcagtcgccggaccaaccagccgatcagcactgtgcagctcatgatgaacctagagatcatgggcggagaggtggaaatttcctcagagcatgatgatttcaagtgggtgagcatcgaagagctcaaggagctgtataaaaacgacatggttaccccaacattacgccttactctggaaaaaagagacttcaagatttga

SEQ ID NO: 2369 - DNA, 1284 bp, synthetic construct
  source 1..1284: mol_type = other DNA
atggatctgaacatcaagacaaacgacaaaggccatctcgatattggcggggcggatgcctgtgagctcgtcgaagagtatggcacacccatctacgtgatagacgaagaacgggtgagagacaactacaatcgcttttataatgctttcactaagttctatcccaaatttaaggtattctacgcctgcaaagctaatacaaacattgcagtgctcaaaatcctcgaagaggagggatgctgcatcgatgccgtgtcccccggagaagtctatatctgtaaaaagatgggattttccggcgacaggatactctttacaggcaataacattagaaacgatgagatggactatgtgaacagcgaagacgtgatcctaaacatcgattcagtcagcgcccttaaaaggctggccgagagcatcgatcctcaagggaagaagatctcgttccgggtgaaccctatggttggggcaggccaccacgggcattgtatcacggggggggagatgagtaagttcgggattatggagaccgaggcggtggagatctacaagctggctaaggagctgggattcgagcctgtaggtatgcactctcacatcgggagcggcattctggacccggaacccttcaaattggctatagagtctaccatgaacatcgcagggaaggtccaccaggaggcgggcattgactttgagtttattgacttcgggggcggcgtcggtattccttacacgccagaagaagagcttttagacctggagcacttcgcagaggagaatattaaactattcaaagagaagttagaagagttcgacatgggagaacccattctgtacctggaacccggccggtacatcgtgggcgatgccagcgtgatactggtggaggtcaacagcgttaaggaaagttaccgcaagttcatcggagtcgatgccggcttcaatactctgctgagacctgccatgtatgattcctaccatcacatcgttgtggccaacaagatgaatgaggagcccacccagactgtagacgtggctggtaatgtctgcgaatcaggagacctctttgcccgagaccgcccactgccagatattgaggaaggtgacatacttggaatcttgaatgctggcgcatacggttataccatggccagtaactacaattcaaggccgctgccagcagagatcctcgtgaagaacggagaatccttcgttattcgagaagcccagacctttgatgacatatttgagaagcagtccatcccagaacatttgaaatga

SEQ ID NO: 2370 - DNA, 864 bp, synthetic construct
  source 1..864: mol_type = other DNA
atggtagatctgaaagggctgaaattctcgaaaatgcatggcatcggtaatgacttccctataattgacgagagtaaaggcgaacagatcaaggaagcagacaagccagaggcctgccggcagctgtgtcacaggaacttcggtgtggggggagacggggtattgttcgtggtcccatcagacgtcgcggacatcggctaccggatgttcaatcccgacggcagcgaagcggaaatgtgcggaaacggcatccgctgctttggcgactttgtctacaggaacaagattgtggagaaggaaacaatgactgtggagaccaaaagcgggatcaagaccatcgagatcactgtggaggacggagagccggtgctctttaaggtaaacatgggcaaatccacattcaaggtccccgaaataccaatgatcgctgatacagatgagtttgttgatggggatctggacgtgatagataccacgttcaaggcaacgtgcgtgaatgtgggaaaccctcacgccattctgtttgtggacaacgtcgatgatattgatattgacaagtacggaccggccattgaatgtcatgaagttttccccgagaagatcaatgtgcactttgttgaggtgttgagcaagaacgagggcaaaatgagaacctgggaacgaggagctggcgttaccctcgcctgtggtaccggtgcaacttccacagcccttgccggggtgaaactgggtctcttcgataagaatgtccttctccacctacctggaggcgacctggagtttgaggtctatgaggaagacggggagctgggggcattcatgaagggccccgctgccttagtgttcaacgctgagatccaatga

SEQ ID NO: 2371 - DNA, 171 bp, synthetic construct
  source 1..171: mol_type = other DNA
atgatactcagccgcaacatcctcaattatctgaaagaggggaagacccttgaggaagcttgcgccaaggcaggagtggtccagaatgagctgaacatctggaagctgtgggccgataagggcctacagccctacaaagacttctttagggaaattgagaactaccggtga

SEQ ID NO: 2372 - DNA, 729 bp, synthetic construct
  source 1..729: mol_type = other DNA
atgaacctagaggagcgtaactcacgggaaattgaggagttcttcaaatccaaaggcgtgaaagtggtcggttttgctagtcttgaaaacattagaaatgtccctaaggagtatccaaacagcatcctcatagggataccaatcgagaaggaagcattgaaaaccatctataccaacgaccaaagcttgtatgttgagtccatgaaggaggtggctcagaagctgaatgacatcatccttgagggggaggattacatcaaaaacaccatgaattacaatgccctcgccatttcgcgggagagggtggcgggggaactgaaagacctggccagcaagatcccccacaagactaccggcactaggtctggcctgggatggatcggacgctgtgcactgctcatcagtccggagtacggggccgcactgagactctctacgctgctgacggacatgcccattaaggtcggcacaccaattgatgactccctgtgtgaggattgcacagactgccaggatgcctgtcctgtagacgcgatcaacgaagtgaaatggaactcacgccgagaaagggaagagtacttcgatgccgaaaagtgctttgagttcattaagaaggaaatgaaacgcacaaacggcaagagcttatgcgccaaatgtggtctggcttgcccctacactaaggaatacctcggaatagagaccgaccggaatctaattaaggaaatctga

SEQ ID NO: 2373 - DNA, 651 bp, synthetic construct
  source 1..651: mol_type = other DNA
atgaaaactaagaacaccaagacccgaccccagctcacaaaggacctgaagagtgaagacttcatggagtactattttcttaaggaagagttgaaggagttttgcagacgcgaggggctaaagatcgggggttcgaaaaaccagctggaggaaagaatcatttactatctggatactggcaaaagcttagatgaaagcgtgaaagatggcaataaaaccaagaatcacaagtcagtcaaagatgacaacaagacgaagaactgcaatcacaagatcagcaatagcgactctcaggaaatcacactcgactccattctgggggagaacttcaggtgcagcgaggacaaacgggaattttttgagagggaaataggaaaaggatttaagttcaaggtgaaattccagcgctggctgaaggcaaacccagataagacatatcaggatgccatcaatgcctactacgagttgcagaactccaacgagaagaccaaaattgacaggcaattccagtacaaccaatacatccgggacttcttcgaggacaatgagggccgttccctggatgacgctattaaatgttggaaatacaagaagagtcttaaaggccataaccggtatgaagacagcgatctcaagatactgaagtcatga

SEQ ID NO: 2374 - DNA, 585 bp, synthetic construct
  source 1..585: mol_type = other DNA
atggggaaatttgaaattgaaaccgacgatctggtatacatcccctcagacgacactttcctcctggctgagaacctcgagataaaggaaggccaaagtgtcctggaaattggcacgggctcggggcttgtgtctatgtatgcgagtctccttacagatgatgtgacagcaacagacatcaactacaacgccctggagctggcagagaagaacttcaagctaaacgatatcaacaccataaggctggagttcggagacctatttgagcctgtcaaaaatgagaagtttgacgtgatcctctttaataccccatatctgccgaccgacactgacgacatcattgacgatgacttgaattacgcctttgacggtgggatagatggccgcaaagtcatcgaccggttcattaatgaggtgagccactacctgaacgatggtggaatcgtgcagatcattcagtcctccttatccaataacgataagacgttggatatgttcgacagaaacggattcatcgccgaaatcgctaaaagcgagagctttttcttcgaagagattgttctgatcaatgcctataagatttga

SEQ ID NO: 2375 - DNA, 897 bp, synthetic construct
  source 1..897: mol_type = other DNA
ttgaaggaagaaatcagcttagcaaagcaaaccaaaaggatactgcaggagaacgacattaagcttaacaagaacctgggccagaactacctgatcgacgactttaaacggaagaaaatcatcaattacgcaaatctaaccaaggaggataccgtcctcgagattggccccggaataggaacgctgacaatagagctggctaaacgcgccaaaaaagtgattgccatcgagcaggacgagacgatttttaacatccttaaaaaacggctcgagaaggaaaaaatcaacaatgttgagcttatcaacggggatgccgtgaaagtggactttcccgagtttaataagatcgtctcaaacctcccttaccagatatcctcacctatcagcttcaagttccttaatcacgacttcgacctggctatcctcatgtatcagaaggagttcgccgaccggatgaatggtaaggtggggactaagcagtacagtaggctgagcgccatgctctacttcaaggccgacgtcaagttcctgactaaggtatctcccgagtccttcattccgtctcccaaggtggatagcgcggtgatccaactgaagccaaagaatattgatagtataagaatcaacgataaggaatatgaaatcgataaagaaacatacaagacatattcgaaagtggttaaggcgctgttccagcaccgcaacaagaaggccaggaacgcactgattgactccagacatatcattggctttaaagataaaaaggaattgaaaagcattctgaacgatctggaggacgaaaatccacgtatcaaagaaatcctattggagcgaaccattaacctggctccagaggagattatggaactcaccatcctcttgaaggaccagttatga

SEQ ID NO: 2376 - DNA, 750 bp, synthetic construct
  source 1..750: mol_type = other DNA
atggataaccccaacatcgataatccggcccccaagaaagaggagaatgtgattatactggactatctgaagttcgggtacataaatcccgaacggcccacggcgcgggggaagccaattgcacaggctcttggcgtggacaagttcacactgatcgaggtcacaccaaaacagggaattgacctggagattcatgagaaagtgtacataggttctggaaagagagacaagatcaaccgagtaaaggggctcctcgattatgaaaagctgaccgctacaagccgcatcgaattggaatacgcaattaaggaaatcatccagtcaaaagaggagatctacatcaagttctttaacgaaatcgatagtttaaacatcaagatgcacaagctcgagctgattccaggaatcggcaagaaacacacccaaatgattctggaagagcgtaagaaagagcccttcaaagactttgaggacctaaagaagcgagtcccgctgctgggtgatcctgttgacatgttggccaaaagggtgtcccttgagctcgacaccacccaggtgaaacgcggcaagaaaaaatactatatgtttactcaggtccccagcaaacacccttccaataagaagagataccggagaggccggaacaaccgcaacaggaacaacaggaaccgcaagcctaataagaacaggaataagaaacctaacaacaaggccaataataaggccactaataaaccaaaaacggaatga

SEQ ID NO: 2377 - DNA, 3177 bp, synthetic construct
  source 1..3177: mol_type = other DNA
atgaactttaagaccaaaggaagtctgattctgatttccctgctgttcattttaattataggtattggaatggcttccgcctccgaagatataaatacagatattgacacggattatcaatctgattccattgatgtgtctgatgtgagtcttaatgatgaacagatcgcgtctgaggacagtttgcctaactatgagattgccaataaatccaaggacaagctttatgatgaaggagaggaggaggagggcggcattacaaatgacgatgatgatgaaaactatcggatcgatggcatctacgccgattataccattaccccgtctgagaatggaacgatcttcgtggaaggcgaacgaatccagataatcttcaattttacagatcaggactatgagcctgtttccggcgactggtttattaacttctacggtgagagtacggacgtcgacatataccacccatttgaggccaccgggctcaccgactatgtcgttcccatttatttgccccccggggactatgtcatcttcttttacgagggcgtggtttttgacgacttcggtggaatcgaggatgaaggaactcagttagatgtgacttttgaggatgccgaaggaaaccagttggataatccggagttttctatcaggaccaactacaacaagaaggtgtatgctaatctgaccatagactacagtgtcgcggaactggaaaatcttgtggagggggacgatatcactgccaaaattagcctgatggatgagtttaataacaagatgactgaaaaggttaacctcgagatttacaggaatggagagaactacgattctaaaaaggtgaacgtggtagagggccagaataacaacatcatctttgaaaacctgcaggaagggaactattcactggaagtggccagcatcgacagtgttcccaaatacacgaacatcataacaaaggcagtcaacttcacagtcaaaagcaactatgacccagacaactaccagatcatcctcaatccagaggatgagaaaaaactggtgggggactcatatgaaatgggtgtgaaactcctcaatccatctgaggaagctgaggaggggtcgattgacctgtacctcaatggcaacttcgtgaaaacattagaactgaactatgatgaagacggttactcccaccacatcgtggaaggccttcagctgggccccaacaatgccacattcctctaccagatccgcgacggggtgaacgtgtccgaatcagtgaacctcatcagatacgaaaccgagtccatcattgacctggagagctcagatatcattatcggtgacgatgccaagatcaaggccagcctcagttaccttgacgggatcgtcaaaaagcccatcaacgaaaacttcaagctgtatatcaaaaactacgtggaggatgaggatgaggtcgaatttgtctacgatgaagagttcaccataaagggcagcgagaccataactctgagcgacctagaggaaggaacctactacatttcagctgtgtacaacggtaagaactacaaatacctagccactgaggaggagtccaccctggaggtcttccccaaggagacaagagttgacgctgtcgcccgaacctattcaactgaggagaatgttattgtaggcattgaattagctgacttgtctggaaaggccataaaaggcacggtgaatgtggtcctggacaacaagaccagttaccaggttaacactaccgacgacatccagcatcctgtggaactggacctgggcaagctgggctacggcctccacaatattgagctgaactacacaggagacgatagcgaaggatggcttccaagctacaacaatgcagagtttctagtaatctacccaagcttcatgagcatcgaagatggggacgtcacctccggcagcgacctgacggtcaacatttccctgacaggccctgacgatgagggcataaacggaatcattacagtgcgcatttacgacaataccggaaaatatctcattaacggcgacttcaacacaacaaatggcgtgaaaagcatcgagctcaaaaacatcacgaaggattacatcatctacggccgctactatggcctggacaccagcaaaatcgaaatcgggcctagcaaccattatttgtcgtcggaggcttatggcttcattcggatcgctgaagggaaatcggagaaaaccgaatatgaccttgagctgaccaaggtaaatgacaacacagtaattgcttcccttaaggactccgattcaaagcctgtggccaatgcggagctgaccgtgaaggtgaatggggttgagtccaaggcaaaaacagacaataatgggatggccaacatttccttctccggtaattcatcaatcaaggtaagctatactgacgcaaataacactactgcgaaggcatctatggagatcatcatcataaacaacgtgactgagaagatcgtcaaccagacggtagaggtgccggttgaaatagagaagatcgtctacgtgaaccagaccgtggaggtccccgttgaggtggagaagatcgtgtatgtcatcccaaacagaacagacactgcgttcgagtacgaaaacatggtgaccactgcagtggcttctgcagatggccggaccggagagtacttcaacgtcaggctcatcgacgctaccggtaagccgctcgcctacaagcctattaaaatcggcttcaatggggtcgtgtacgaccgtacaaccgatgccgacggacgggcgaaactgcaaatcaacctcggttataagggagattacacctttgccataggattcctgggggacgacaattacactggggcattcgaagtggctaagattactgtgaaactgcaaaagccccagttgtctacggccagcaaaacatataaggccagtgctaagacgaagacattgactgccaccttcaagagcgaacacgggaatacagtcagtggcaagaagataagttttacagttaacggcaagacctacagcggaacgaccaattcaaaaggtatcgccagcgtaaatgtgtcgctatccaagaaggggacttatagctttacggttaaatgggcaggtaatgaccaatttgcatctgtgaccaagagtgggaaattgaccattaaatga

SEQ ID NO: 2378 - DNA, 345 bp, synthetic construct
  source 1..345: mol_type = other DNA
atgatcggcaagaaaacactggaaagtgagccgataccagccgctaaagtcaaagaaatactcgaagagtttagcgagaagtacgagctcaactacgagcagaacttgaccttagctcatgtgacgaatctaaataagctttccctcgaagatgccgagaagctgatcgaggagcttgaggccttcatgacccacaagcaagcaatccgcgtggcggacctgctgcccagggacatggcagacctgcggctgattttcgccaaggaaagaaacgcccctagcaaagaggatatggagcagatcctggaaatcattgaaaagtatgaaatttacgtagaggagtga

SEQ ID NO: 2379 - DNA, 291 bp, synthetic construct
  source 1..291: mol_type = other DNA
atgcagagatcccgcggcttcaaaagccgctcacggaaaaagctgaccaagaaggtgaggcccggccgggccaacccgatcacaaggcgaatccagcagtttgaaaacggagacatggtccacattatcatcgacccaagtattcaaaagggccagccccacagcagattccatggaaaaacggctaaggtggtagacaaaaaggggaaggcgtacatactcgcactcaaggatgggaataaagccaaggaactgatagtgacccctgagcacctaaaactgcaggagtga

SEQ ID NO: 2380 - DNA, 1269 bp, synthetic construct
  source 1..1269: mol_type = other DNA
ttgaatcaagaaatactgaataaagccgaggagttaattaaccataccaacgggaacatctgtaatcactgtctgggccgtaaattctcagactgtgtggagggggatgggaacgaggatcgcggtgctaaaattcgccaggcacttaacctcgagccgtacaaagctaacgaagataatcctgcgaacgatgagaaatgcctaatctgcaatgatctgtttgaagacctcaacactgtcctggatttggtgaatgaaaaaatagatctcctgaaggtggaatttgacacctttgtagtgggatgcaagctgcccaaggaaatcgtggaaaaggaccaggagattagtgacgagttcgatttcaatgtggagatcatcaaaaaggaagtcaaccgcgaaatcggcaagctcctggagagcaatctcgagcagaacgtagacttcgacggggaggacgtcctggttatggtggacttcagacggattttaaaggaggacattgaaaatcccatcaaggtccgccttcagataaaccccatcttcattgagggaagatatcggaagctgatccggacgattccgcagaccaaatggccttgccggaaatgcaaaggcaaaggatgcgaggaatgtaacttcacaggcaagcagtacccagagagcgttgaagagctgctctccgaagtggttctaaagcacaccaacggctacgaagccaagttccatggtgccggcagggaggacatagacgtgagaatgcttggaacaggcaggccctttgtgctggagattaaagagcccaagatccgaaagattgacctaaaaaagatagaggaggaggtggcaatctctgccaaaggaaagacagagtacctgaacctcaagtttacagaaagacggcgcaaggccgaaatcaaggagagctcgccagacacctataaggtctaccgggctctggtgaaatgcgaggattatatcaaggaggaggacctggagaagctccaaacgctgcacatcatccagcaaagaactcctatcagggtctcccaccgaagggcggataagatccgacagaaggaagtcaaggagatcaaggcagaatttattgacagcaagaccttcgaaatgatcattaaaaccgaaggtggattgtacatcaaagagctgatctcttcagatgaggggaggtccaatccaagcgtaagtgaggttttgggcactcaggccatatgtgccgagcttgatgtgattgaagtggggattaaatga

SEQ ID NO: 2381 - DNA, 1335 bp, synthetic construct
  source 1..1335: mol_type = other DNA
atgttaggcagtctgggagagaacctgacaaacaccatgaaaaagctagctggaatgagtgttatagacaagaaggtgattaaagaagttgtgaaagacattcaacgggccctgattcagtcggacgtaaacattcagctggtgctgaagctatcaaagacaatcgagaagcgagccctggaagaggagcccccaaagggaataacgcctagggagcatgtgatcacaatcatctatgaagagatggtcaatctcctcggcagcgaagcccaggagcttaagattacagaaaagccatttaaaatccttttcttaggcttgcagggaagtgggaagaccaccaccatcggcaaattgtgccggtacttgcagcgcaaaggtttctcacccgccgtcgtctgtacagacacttggagacccgccgcttacgagcagctcaagcagctgactgaggaaatgcagattcagctgtacggggacccagacaacaaagatgccctggatctggctgaaaaaggtcttaagcactttaaaaatcagaaaatcatcatcttcgatacggcaggtaggcacaagaatgaggaagacctcatcgaagagatgaacaagctggacaagatcattaaccccagcgagtccatgctggtgattgacgcaacgatcgggcagcaagcaggggaacaggctaaggcattctcccaagcaacggacatcgggtccatcatcatctcaaaactggacggcacagccaagggggggggcgccctcagcgctgtggccgagactggtgcgccaatcaaattcattgggaccggcgaaggaatagatgactttgaagcatttgacccggaaagattcattagccgtctcctgggaatgggcgacatcagatcgcttatcgagaaggctgaggaagtgatagatgaggatgaggccaccaagaccatgaacaatatgctcagcggcaagttcactctggtggatatgcgaagccagtttgagatgatgaacagcatgggccctatgcaacaggtcatgaacatgattccggggctgggaggcaagatccccaaagaggccagccagatgaccgaggataagatcaatggatttaagataatcatgtcctctatgactgaagaggagatgctcaatcctaagataatcaagcagtccaggattcaacggatagcgcgcggcgcgggcgtagaggaaagcgatgtgaaagagctattgcggtactataacaataccaaaaaggctatgaaagggattggccgccgcggcatgggtggaggagccatgaacaggattatgggtcagttcatgaaatga

SEQ ID NO: 2382 - DNA, 567 bp, synthetic construct
  source 1..567: mol_type = other DNA
atgcttgagaacctggtagaatcactccggaacgcacccgtggtgaaaaagggggattacgactacttcgtgcatggcataagcgacggaatacctgccctgaacccatgcgtgctaaaagagattagcgaagttctcgccgaaagaatcgacttggataaagtcgacaagattgtgggggtggaggcgatgggtatccacatcgccactgctctctccctcgagacaggcctaccgctgctggtgatccgcaaaagggagtatggcttggagggcgagcacgaaatcctgaagcacaccgggtatgccacgtccaaactctacatcaatgacttaaacgaaggagacaatattgtcctggtggatgatgttgtcagtaccggcggaactctttcggtggtcattaacgagcttaaggcaatcggtgtgaatatcctggatacatttgtggtcgtggaaaagggcgaagggaaaaagatagttgaggacaagaccggagagaacattgtcaccctggtcaagctggatgtagtggacgggaaggttgtagctgacagcctgatctga

SEQ ID NO: 2383 - DNA, 1008 bp, synthetic construct
  source 1..1008: mol_type = other DNA
atgtcaatttacgatatggaactcaagaaggttattcgaaagatcaactccttaaacgtcaagaacgtgggtctgcagttcccggaaggtctcaagatgcaggcggtcgctattgctcgcgagatcgaaaaaaacacggaggccaatgtaattatctctgcggacccctgctttggggcctgtgatgtgagtgaccgcaaaatgaacggaatagtggacttcattgttcattatggccacacccccctcccactcagatatagcatccccacaatgtttatcgaggccaaggccaacgtgaacatcaagcaatacctggaagatgccctggaaatgcttgaggactacagtaaagtggccattgcgaccacagcccagcacctccacttgctggacgagatcgtggactttctcgaggaccacggaaaggaagttgtgataggctcgagcagaagcactaggaaagggcaggtattgggctgcaatttctcttccatcaagaatctgggggcagacgtctacctgttcattggaagcgggaacttccaccccctggggatttatatgttcaccaactctcctgtcctggccattgatccttatagtggcgacatccgtgagatgagcggctacgcagataggattctgcgcatacggtttgctagaatcgtcaaggcccgggaggtgaagaaatggggaatcatcgtatcctcaaaggaaggccaataccggatggccctggctaaagagctgaaaaaactgcttgaagacgagggaatggaggcattcatcctactgatggatcatatcaatccagacgtgcttctgccgtatatggaacttgaaggcttcgtggtgaccgcttgcccacgaatcgcaatcgatgactcccagatgtataagaagcctgtcatcactcccaaagagctcgagatagtgctaaataaaagggagtgggaaaagtaccagttagatgagatattgtttgaggatcggtactaccagtga

SEQ ID NO: 2384 - DNA, 462 bp, synthetic construct
  source 1..462: mol_type = other DNA
atgaacttcgaattttccatcctgggcttgttcctcctccttctcctcttcgtcccaaacataatctggacgaaattcatccctaaagactatgagaattactccaagagggagaacaagatactgctgatcctggagcggattggggaagtggcgaccgtggtattcgcccttttttgcggagccaaattcagctggtccttactgctgatcattatctttattctaatggctttgtacgaggtctactggatcagatactttatgtcgagccacacaatgaaggacatgtgcgatagtctgctcatgattccccttcccggggccaccttgccggttatcgcattctttctatttggaatctattcaaacagcatattcctggtgatctctagtattattctggcaatcggccacatcggcattcattataaccacaagaagcagtgtaatctgaattga

SEQ ID NO: 2385 - DNA, 567 bp, synthetic construct
  source 1..567: mol_type = other DNA
atgaaagtggaatcgggagatttcgtgatgcccggcgacttcctgtccgtgagtgaggaatttctgccaggccctggcgcatatgaggatgacggaagcgttaaaagtggtgtgcctgggaatgtctttgtggataacggggagaaggagatctctgtcatttcaaaatccggcggtccaaaccttctcaaggtgggagacatcgtatatggggaagtgaaggacgtccggggccagcgcgccctgatctccgtatacgccaaaaaggggaccgatcggcagctcgcgctgccatacatggccgctatacacatttcacaagtgacccccggctatatcgacaagctgactgacgctttcaggatcggagacttgattgaggccaaagtcgttaagataatgggcgataatctagacctcaacaccgaagacatcacgagcggggtggtgaaggccatgtgcacaagatgcagggcattcatggagccccgaacagagagcgaagtgtactgtccggtctgcaaccgcaaggagaaaagaaaggttagcaagaattacgattactga

SEQ ID NO: 2386 - DNA, 279 bp, synthetic construct
  source 1..279: mol_type = other DNA
atggagatcgaagtaatcaaggagagcaagctggaactcgaaatgattattcatggagagaaccacagtctgtgcaatgtcttgagaaaatatctgatggaggacgacgatgtggaatacgccgtgtacggcatcgaccaccccctgacaggcgcagggaagccggtgatgaccatcaagaccaaaaggtccaagcgaccacggaacagcctacttaaagctgcgacgcgcctgaaggaggagactgccgagttcaaagagctcatagaagagctctga

SEQ ID NO: 2387 - DNA, 417 bp, synthetic construct
  source 1..417: mol_type = other DNA
atggcgtataagatcccgagtctgactgtggacatattcatctttaacgacgagaaagagtttatactaatcaaacggaaaaacgacccttacaaggacttctgggccctgcccggtgggttcgtggattacggcgagaccaccgagcacgccgccgtccgggaagctaaagaagagacgagcattgatgttgaattgattaagctcttcaatgtgtattcagaccccgacagagacccacgacgccacacagtgtccgtattctacctcgctcatggagacatgaacgatgccaaggcagatgatgatgcaaaggacatcggcatcttcagctttgacgacctggataatctggaccttgccttcgatcacaggatgattctgaaccaggtcaaggagtactttgataaggaatga

SEQ ID NO: 2388 - DNA, 396 bp, synthetic construct
  source 1..396: mol_type = other DNA
atggagttctgcccaaagtgcaatgggatgatgatgaacaccacggtcaaggtgaagaaagaagacctcgaggagaaagtggatgaggagaaccagtcaaaccaagagacagaagaagagaaagtggtctttaagtgcatgacctgtggctacgaaaaggacccctcggaagtggaccaggaccagtacaaagtgaaggagacagtcgaatccagtgacagcgttatcatgcggggcgacgaaagcggaatgcgctctactgtacgagagatatgtccgaaatgcggtcacgatcgcgcgtcctacgagctgctgcagacccggagcgccgatgaggcacctaccaggttcttcacttgcgagaagtgtcatcacaagtggagagggtatgattga

SEQ ID NO: 2389 - DNA, 1620 bp, synthetic construct
  source 1..1620: mol_type = other DNA
atgtcaaactcgcaaaatgacggcctcgaagacgtttccaagggcaacaacgaaagtgccggtgagaatacagactcaactagtaataaaaagactcggtttaccaaatccaagagcatctcagaggtgtttaaggaactggactcccaggagaccaacgattccatcctcgacagcgaggatgcggcctctgagctggaaagcgaagataagtacagcaacatagagaactacctgtccgaggcagaatccgaagaagagatcctggacgccagctccgaggcagagagtctggatgcgagtagcgatgtcgagtttgaggaggatatcattatcgactctaccgccgaagaagagatcgacgaaatcattccaattcacaatgagtataaggatctcgatgagagtgaagctttcaacacagaatccattgatgaggaggaaatcagcgagtcttccgagttggacaattatgtggagagcattgtgaatgagaaggatgacttaagcagcgacgaacttgtcgacagcaaggagaacctggacgctgtcggtggagatgaaggctctatgagcgtaaaggacatcgaaaacgcctcattcgaagccgaagacacctcattagatgctgaggactacgaggatgactcgattgacagtgaggatatcgatcaatcgtacgaggaagagcttctggacgagaatatgaaagtgataaaggtaaataatgcttcttcagaggacgtgctgtcaaagaaaaataaaggcttccttagcagtttcgggagcataaaaatggactcttcctttattatcacagtgctgagtttcatcgtgggactgggaattttgatcatggggatattctatctcaactccagttctgaccgggtggtcgataacgttctcagcggggaaacggcaggtctagcagtcttcctcattatcattgggctgctgattatcgggttcagtatactcaggttcctgtcctctacaaaggccgatcagtcgtcttctatgctggacatgtttaaaagcatcagggacatcgactatgatgacgtcaaagacgataacataagtcgcgacgactttgacagcgtattctcgagcgtgttcggcaaggaaaagcgcagcgacttttccaacgacgatggcgataaaagctcggttgacaaaaaccttttcgacgaggacgacgagatctccgatgaggatattgatgccctgtactccgactcaaatctaaacaaaaccgcctcctctacgaaaaactcaaccggcatccaggacaccgacaatataattgaggaggatctcgatgacgattttgatatgatcgactccgacaactccgaggactttgacaacgacacggatctcgaggacgataatgtgtctgacctgaaggacaaatacagcaagtacaacttcgatgacgatgatgctccctccaagccgcagttcaagaagtcagtggacatttcaaagttcgatgacgatggactgagtgaagaggaattggaagccgagaggagacggaaggcggaagagttggaggaaaagaaacgacgtatcatccagggaactaactttgataatagcctaagaaagtga

SEQ ID NO: 2390 - DNA, 735 bp, synthetic construct
  source 1..735: mol_type = other DNA
atgttcaaggccgagctcagtgattcgagtatccttaaaagcagttttgacgctatttcatccattgtcgatgaggtgcagattcaaaccgacagcgaggggttccgcctggacgccctggaccggtcgcatatcacatttgttcacctcgaactcaaagccagcctgttcgacgaatttgtgtgcgacgagcccgaaaagattaatattgacactgatgagctgatgaaggtattaaagcggtccaagtccgatgaccgcgtcttgatgtcattggatgagggcaacttcatcctgaccttcgaaggcgaagccaccaggacgttcaaaatcagactcatcgacatcgaatatgacagtcctgcaccgccatccttgaactaccctacagagtttgagattcccttctctctgctcaaggattccatccaggatatggatatcttctctgacaagatcactctgatggtggacccagagtacttcaaagcttttgcgcagggtgagtttggagacgcaaacatcgaataccttcacggcgaaaagatagatgcaagcgcgaaatccattttcagcctggagaagatacgtgagatgctaaaggccgataaattctctgacatcgtcaacatcagcctgggagacgacatgcccgtgacactaacccttagacgagtggccaatgatggggagctgagctttctgctcgctccaaggatagagtcagaggaatga

SEQ ID NO: 2391 - DNA, 1614 bp, synthetic construct
  source 1..1614: mol_type = other DNA
atggatggagacttttttcagctcctgcgaagggtgcagaaggaggaacggactaaatccaccctcgcaagagtggacaaagacttctacaagcagctctactcctatattcgagacttggaacgtagcgtggctcagaaccccttcgataccgcccagtcaaatctactgaacaacgcccagcgcatcgctactgagatttgccagtggagagaaagcaagatcagtacggcggcaaacaataatatctatcggagcttccatctgttcaagaaaggcaacccccagtttgatttgattgatacaaccccactgcaccttacacccgaggaggaaacgttatatttcgccctgatggacgccctgaagacccatcgctacaatatttcactggacaagttcggggatgagaaggccgattggggcgcggacgattacgaggacgaagaggaggatgattttgaagaagtcgcttccgtggtgaaaagccgagtgaataaaggggtggtttcggacgaggagttcttcaacgaggggggttcttctaacgagtccgtgacggacggattcagcggagagtctatctccatcgaagagtccggggctgaccccgtagtgcaagagcccgccgtcgaaacccccgtggaggaaagttccggcagtggctttaagcaggaggttcaggagtcggctgtcgaaactactaataccaatgtcgggggatcggacgaggtgctcgacaggctcaatcagattaagaactcaacggtagttacagacgaaaagtacgaacccattgaaaagcagatcaataatcaggctaaggtcgtgccaaatgtctccatgagcaacaacctgaactatgagagtaaaaactacaacggtcaagacaatgagttcgactccaaacttaaaccagattacgaatctgatgtagaaagcgaaccgaaaatcgagagcaaaccaaaggtcgaatctgcaccccggatcgagtctaagccgaaggtcgagagcgcccccaaaatcgagtccgaacctcgcttggagtctaagcctaaggtcggctcagagccccgggtggagtctaaacctaaagtggagcccaagaccatcgaagataggcctaagcggaaaagttcaagtacactcgactttgacagcatctttgccaacccagacagccagttcgatagcatccacaattttgagccggactacgaggcggatcttgccaacatccaagccagttccagtttcgcagagcctagcgaggcagatctgatgttttcaacaaaacctaggccgaaaaaggagcccaagcctaagagccaggttggctccaaggaggagttcgaatcgcgccctaaggtagaggaaccaagccacgctccaactgctaaggcagaaagaccaagatcccaatctataaaggcgtttgccaaaaaggaagagctggagaacaccacagtggtgatatacaaaaacatcgactcattcatgggcattgatgaaaagatttatggacctttcatcgccaatgacgtggttatcctgccaaacataaccgcccaaatactgatagacaacaacaaggccggtctaattgatatttga

SEQ ID NO: 2392 - DNA, 279 bp, synthetic construct
  source 1..279: mol_type = other DNA
atgaagatgcctaaagagaagagaacatactgcccccattgtaagaggcacaccatacatgaagtccacacgtccaagaagcggaaagcaagcgagctgaagtggggccagagacagtttcgtcgagtgaccgccgggtaccgcgggtatccaaggccactacccggaggcaacaagccggtgaagaagctcgacctgcggtacaagtgcaaagaatgcggcaaaagccacatccgcaaaagtttccgggtgggaaaacccgagtgggtatcaaattga

SEQ ID NO: 2393 - DNA, 180 bp, synthetic construct
  source 1..180: mol_type = other DNA
atggcgagcaatggcaggggcaactttctccgcgtgaagtgcctggattgcgacaacgaacagatcattttcgaccgggcagccagcgacgtaaagtgtataatctgcgggaaaaccattgtgaaatccagaggaggtaaggctaagatcatggcccacatcgacgaggtcctggattga

SEQ ID NO: 2394 - DNA, 783 bp, synthetic construct
  source 1..783: mol_type = other DNA
ttggtcagaaagagccaggaatggccaaatgagggagagctgatagtgggaaccgtatacaaggtgcttaactatggggcattcgctaacttggaggaatacgccgggaaggaagcctttatccatatttctgaagtgtcaagtgggtgggtgaaaaacatccgagatcacgtgagagaaaatcagaagattgtagctcgggtgctacgcgtgaaccctaaaaaggggcacgtcgacgcctccctgaaacgcatcagggaagaccagcggaccaaaaagatacagcagtggaagatagagcagaaagccgaaaaattcctggagctcgccgctaaatcgttagataaggacctcgataccgcatacgatgaggtcggctacgagcttatggatatctttggggatatctatggcgcgttcgaaagtgcagcggaagagggagctgagacactgacagaagagggcattagccaagagtgggctgacgcaatcaccgaagtggcggtcaagaacatccagcccccagaggttcacattacaggctacgttgacattgaaagctatgccccccatggcgtggagatcattagggaagccctgctcgcagccgaggacgagaatatcgaggttcaatgcgtgggcgctccgcgttaccggatcactgtgacttccacggactataagctcgcagagggtcagctgaaagaggccgccaataaggccattgacatcgtcatcgagaacggtggcaagggagagttcctgcgcgagatagacaactga

SEQ ID NO: 2395 - DNA, 171 bp, synthetic construct
  source 1..171: mol_type = other DNA
atgaagatgaaaatgaaaaagtgtccggtctgcaatatatacaccctgaagccacagtgccctaactgcggcggggagctgagggtgatctatccccccaagttcagcgtggaggacaagtacggaaagtaccggcgccagctaaaaaaagaaatgctcaacaaggaatga

SEQ ID NO: 2396 - DNA, 789 bp, synthetic construct
  source 1..789: mol_type = other DNA
atgcgaacaacccaatttaaagtcctcgaagaagtgaaactgaacaacccaatatttatcgaagcactgcccggtgtcggccatgtggggaagctggccatagaccacgttattgacgagttggaggccactaaatttgttgagatctattccccatacttcccgcctcaagtgctagtgggagagggcggcatcgtggaagatatgaagaatgaattatactacttgaagagcgcgggcggagacgaaagggatttcatcttcctggtgggaaactgccagggcctgaatcccgaggggcagtacgagctctgtgggtccatactggactttgtagagtcactgggagccaaagagttctacacactgggaggcctagctaccggtcagcccctggaaggggtcgaagaccgcgtgctgggggcggctactgatgaggagcggattgagatgctcaaggaagcagatattgagatcagaagcgccgatggcgggatcgtaggggccagtggtctgttcctcggactcggacgtcttcgggggatgaaaggcgcctgccttatgggcaagacccctggctatttcattgatgccgaagccgctgaagccattttggcaaagctggctatcctggtgaagctcgaggtcagcacggacgagttagaggagcgcgccaatgagattcgggagatgatcaacaaggcgcaagagatggagcaggaaatgatcaacagggctatgggccagcagcaggcacagacccaggacgaccttagatatatcggttga

SEQ ID NO: 2397 - DNA, 1188 bp, synthetic construct
  source 1..1188: mol_type = other DNA
atgctgcagatcgccgtaacaggcaaaccaaatgttggtaaatcttctttttttaatagtgccaccgcatcgcaggtcgaaatggctaactacccattcaccaccatagatgctaacaaggcggtggggcacgtcatcagtgaatgcccctgtaaggagctcggggtcacatgcaatccaaacaactcccaatgcattgatggaacacgcctcatccctattgagctgattgacgtggcaggtctggttcccggggcccatgagggtaaagggctcggcaacaagttcttggatgacttgatgcaggcgaaggtgttcatccacgtaatagatgccagcggaggcaccgacgctgagggaaacccagtggaactcggctcccacgacccactggaggacattgaatttttggagcatgagatagtcatgtggatgtatggcatcgtcagcaaaaactgggttcgactgatccggaaggtggaagccgagcacttagacttcagcaaggtcatattcgagcaactgagcgggacaggcatcttaattgaagatgtgattgaagctctgcgcactgtgagtcctgactatggaaaatgggaggatgaagacctgatagaatttgtgagaaaccttctcaacatcgccaagccctcaatcgtcatcgccaataaggccgatctgcctggcgcaaaggagaacattgaaaggatgaaggaaaaatatccccgcgtcattgcgacctccgccgagtccgagcttgctttggttaatgccacgcgggccgggctcatctcatacatctcaggagacaacagctttgaaatcctagagaaggacaaactaaaccccaatcagatcaaggcactggagtacatccagaccaacatcctggacgtgtacggcagcactggaatccaggaggcactgaacacggcggttttcgagcttctgaatatgatagtggtgtatccggtgggggatgagcataagttcacggaccagaagggcaatgtgctgcccgatgctttcctcgtgccgaaaggctccacccctcgggagtttgcatacatcattcacacagacatcggtgataaattcatgcacgccgtggacgctaggaagaatatgaggattgccagcgactacgagatccaggatcgtgacattattaaaattgtaactagatga

SEQ ID NO: 2398 - DNA, 1119 bp, synthetic construct
  source 1..1119: mol_type = other DNA
atgatgcacccacggcctagtccaatcgccgcttcattatacactctgcgcgacttaaacgccgatgtgatcattatgcacggtcctcacggctgctgctttagaacaggcaggctcctggagagcgatggggtacgcgttgtcaccacggcgatggccgagaatgacttcatactgggggctgccgacaagctagaggaaacgttgcaggaggcttatgacaccttcaatccgaagttgatagggatcgtgggaacttgtgccagcatgatcatcggcgaagacctgaaggagccgattgaaaacctgaacctcgatgcggtggtcatacccgtagagagtcacggaggctttggagagggcgacaacaccgagggtgctatcgccgtgctcaacgctgccgtcgaatgtggcgtcattccccaggaggaagcggacaggcaaaatgagatgctgcggctggcaaccgtggttgagaaaacacgaggcatggctcagggaaagtacattaagcctaacttcggagacaataaggaaaaggtcgccaagattgttgtaaaagccgtgaaagaagggaaaaatgtggcatttgtcctgaatgcgaaaaaagaaacgtcctacctgtttgcagacatcctcaactgcgatttctctaaactgttccaagatactgattccaatatcaagtccaacaaagatattgaaaacttgcatttcatcgccaacctggacgagaacatcggcctgccaagaatacgccagcacgccgtgaacattaccaaggagctgaatgaaaccgggatcgacatcgagtgcatcacagggggcctcgatgagtacccaatcactccccggaaggctgaagagtaccttaacgagctaaaccccgatctcgtgatcgtggcaggagtgccccatgccttgtatgtcgaggagcttgactgtgagaccatcgcagtgacagatggtcctaggcttgtgcagcccctcaatgaactcggctatagccacgtcattgcagaacttgacgcccattcgaagacactgggtgtggacgagattgttgattcagacttcgggatgatgatacgtagcgccattgagtgggagctggaatga

SEQ ID NO: 2399 - DNA, 594 bp, synthetic construct
  source 1..594: mol_type = other DNA
atgatcacaattattgattacaaaagcggaaaccttcgcagcatctccaatagtttcaaaaagataggttcaaaagcagtcatcacgagcaaccccgaggacatcgcaaatgccaatcacctggtgctgccaggggtgggtgcctttggaacagcgatggaaaacatagagccctacaaggacttgatttatgagcatatcgacgatggcaagccatttctaggcatctgcctggggctgcaggtgctcctctcctcaagcgacgagacccctggagtcaaaggccttgatatatttaaggggcacgtcgagaagattcccgaaggccggaagattccgcacatggggtggaaccagctcaagcaagtcaagccatgccctatcctggatggggtggatggcaaggacttctacttcgtgcattcctattatgccgttctggacgatgaaagcaatctctctggaatctgtgactacggagtggacttgactgctagcgtttcgagggacaacgtgttcgctacccagttccaccctgaaaaaagtggcgtacccggcctgaaaatcctgaagaactttgtaaacttagagtga

SEQ ID NO: 2400 - DNA, 621 bp, synthetic construct
  source 1..621: mol_type = other DNA
atgggcaaattcaaattcatttttattctagtgcttgctcttttcctgatatgcgggatcgccgcagttgtcgatgcgcctgactcctttgatggctctctgaacctgatacccgtgtctgattccagtgtgagtcagtccgactcatcagtaaatcagtccgactgtgaaaacgggacttgttcagtggacttaaacaaatcggaggacaatagctcgaaagaaaccagcgacgatgaaatcgattatgacagcaagtattatgacgatagcctcattgacggtctctacttctgcaacgacctcgagcatgcattcaaggacgctaagcagcaccacaagaatgtgatgatcatttttgacggtgccgcctgcatctactgcgaatacctgaaggatgaggggttgacagactccgacatccagaaggaaatcaacgagaatgatatcttgctcatgacgtacaccagcgatagccccgagctgtctcaaaagctggagatttacggaaccccaacaaccgtcatatttgatgaaaacggaactgagctgggacggatcgagggctatgagagcccggagcagttcctgagtgaactgaaggagtacaacggcaaatga

SEQ ID NO: 2401 - DNA, 618 bp, synthetic construct
  source 1..618: mol_type = other DNA
atggagataatgccgattatctcattttttatcggggtaatttccatactcagcccatgcattctgcctaccctcccaataattgcaggattcagcctaaaagccgaaagcaaagccgaaatcgtggccttcatcctggggctttttagcatcttcaccatcatcatcttcctgacaggcttctttaccacgattctgttccggtatatcgtgtatgtcagggtcatcgccgcctttctgttgctcattatgggcatattgatgttttttgactacaacctatcttttggctcggtgaagtcccgcagtggtgagggaatagtcaactcattcattcttggattcctgacatccgtggcgtgggcagattgttatagcggttacctcatttccctgatcactatgcttgtctcaagcagtcccctgtacgcagttttcaatatcttcatctacgtgttcggctttgcgctcaccttgctggttctgtgcctggccattagcaaaatcgacctcgagaagctgatctacaagtccggctacatccccaagatattcgctgtgttaatcattattggggctttctatatgttttacactagtatccaggtgttcttatga

SEQ ID NO: 2402 - DNA, 693 bp, synthetic construct
  source 1..693: mol_type = other DNA
atgatttacagcaaagagattgaaaacatgtgtcccgttcataagggggcagaccacgggcctgccccaatccccgaggaggggagatgggtgaaaagtaaggagatcagcgacatttccggactaacccacggtatcggatggtgtgcgccccagcagggatgctgcaaattgactctgaacgtgaaggatggaataatcgaagaggcattggtcgaaactcttgggtgctcgggcatgacccatagtgctgccatggccggagagatcctggtcgggaagacaatcctggaggctctcaatacagatctggtgtgcgacgccataaacacggcaatgcgggagctcttcctccagattgtatacggccgaacccagtccgccttcagcgaaggaggcctgccgattggagctggcctcgaggacctgggcaagggtcaccgctcccaggtgggcaccatctattcaaccaaagtgaaaggcccacggtatttagagctgacagaaggttatatcacggaaatcggtcttgatgaagatgatgaaatcatcggctacaagtacattaatatgggggtcatgctggacctgataaaggacggcactgatccaatggaggcgatcgaaaaggccagcgggcaatacggcaggtttgaggacgccgtgaagaaaattgaccctaggaaggagtga

SEQ ID NO: 2403 - DNA, 999 bp, synthetic construct
  source 1..999: mol_type = other DNA
atgagtttatttgagagttatgagagacgcatagatcagattgtgcccgtgctggagaaatacggcatcaaggacctggaggaggcaaaagccatctgcaatgaaaaaggattcaatccctatgacattgtaaaaagcgtacagccaatttgcttcgaaaacgcgtgttgggcttacacgctcggcgcagctatcgccatcaagaaggactgtaaaaaggcctcggatgcggctactgcaataggagaagctctgcaggcattctgcatcccaggaagcgtggctgatgaccgcaaagtcgggctcggccatggaaacctagcttcaatgctgcttagtgatgagaccgagtgttttgccttcctcgcaggtcacgagagctttgccgccgccgaaggtgccattggaattgcaaacagcgccaacaaggtgaggaaggagccacttcgggtcatcctgaacggtctcggcaaagacgctgcactgatcatctcaagaatcaatggcttcacctacgtgcaaacagagtttgactactttactggagaggttaaggttgtgagggaaaaggcctacagcgacggcgagcgtgcaaaggtgcgctgctacggcgccgatgatgtcagggagggggtcgccatcatgcacctcgaaggggtagacgtgtcaattaccgggaactccacaaaccctacacgattccagcatccggtcgcgggcacctataagaaggaatgcgtcttgcagggcaagaagtacttctccgttgcctccggcgggggaaccggacggaccttgcaccctgacaatatggcggcaggccccgcttcctatgggatgacggacactctgggccggatgcactctgatgctcaattcgcggggtccagctctgtgcctgcccacgtggaaatgatggggctgataggtatggggaataaccccatggttggtgccacagtggctgtcgccgtggccgtggaagaggccctgaaatga

SEQ ID NO: 2404 - DNA, 1407 bp, synthetic construct
  source 1..1407: mol_type = other DNA
atgtatacatttctgatttgcctctttgcgttaatcttaagctattttgtatacggcaagttcctggagcggatcatcggagtggacgaaaccgccaaaacgcccgcttatgagcttgaggatggggtcgactatgtccccatgaacaaatacagggcacttttggtgcattttctgaatattgccggtctcggcccgattttcggagctattcaaggcgcattattcggccccagcgcattcctgtggatcgttctgggcactatctttgcgggtggcgtccacgacttcttcgaaggggccatgtcggtgcgaaatgacgggctatccatgccgggaatcataagcaaatacctgggagacagggtgcgcaagttctttgccgtcctgatcatcatcacatgcatcctcgtggcatcggtgtttgccagcggcagcgcagatctcctttcaagtctaaccaacatagacattcacatttggctcgttgcaatattcatatacttcctcatcgccacactgttccccgtggacaagatcataggcaagatctacccaattttcggagctttgttttttatcatggctgttttgctgatttctgccttgatcctgaacccaaattactcactgcccgaatttaccaccgccgggctctacctcactgacaaagccattttcccattcctatttgtcaccatcgcttgcggtgccatctccggattccacgcctcccaggcgccaattgtagcaagatgcgtgaaaaacgagaaggatatgcacatggtattctacggcgcaatggttatcgagggcatacttgccctgatttgggccactatcgccatgagctttttccacggacagcctcagctggccagtatttacggctcaagcccttccatcgctgtgaaagagatgtcaatcgctctgattgggacggtcggattggttttggccatcattggggtggtaatttgtccaatcaccagtggggacacttccctgcgtagtgccagaataacaatcgcagatgagctggggctcaaccaggataagctaaagactcgcctgaagatctccattcctctgttccttgtgtcttttggcctcaccttcatcgatttttccctcgtctggcggtacttcgcgtggagtcaactgattgtcgcgattgctgtgctgctggccgccaccgtgtatctgatcgataataagaagcatttcattgtgacatttgcccccgccatcttctgtacggtggtggctatcgcttatattctccaggcttctgaaggtcttcggctggaccctttcataagcaacgtgatcagcgtcatagttgcacttgcgctgagcgtgtattttatcctgaagtacaggaaacagcctaacaccaccacatga

SEQ ID NO: 2405 - DNA, 246 bp, synthetic construct
  source 1..246: mol_type = other DNA
atggggatattttcattctttaagaaggacaaagacaaggagaaagtcgagagtcatgaagaggtgcactccattcagatcaatgccgaaaactgccagggctgcggacggtgcgtgtccgtgtgtcccaacaacgcatacgagctgatcgaaggcaagtctagcctcaaagagaatttcacatgcagggattgtaaggtatgtctggctgcctgcagcaatgacgcgatcaccttcgtcaactga

SEQ ID NO: 2406 - DNA, 783 bp, synthetic construct
  source 1..783: mol_type = other DNA
atgaaaatttttattaacgcagacacctacaaggagattgcccaaatcaccaaggaaaaactgattgagacagctaatgagctggggatcgagatatccgaggacatcaacgaagccgacatcatctgttccattggaggcgacggtacgttcctagaatcttcaaagctcgctctgcagaagccaatcattgggatcaactgcgggaccctcggctacttgactgacgtgaatcccgaagggattaaaaaagccatgaaagacataatcgatgggaactattatatcgaggagcgcatgatgctcgaagcagagattatcaaggaaagcggcgagatcattaagatgcctccggccctgaatgaaatgtcgatctctaagaatatcttcggcgtggttagattcgacgccatcgtagatggcaaacttatcaactcatacactgcggacggaattttgatctgcaccccaacaggttcaactgcatacaacctttcctgcggcggccctattgtcgatcccacggcggagattatcacaatcacccccatcgccccacatacaataataaacaggagcatcgtcttatccgataagagcattgtggaaataaagatcacagagctgcgggagcacactagcagttatgccctgtccgacggaaagagcagtgaaatagagacgggagatatcctcaaaatcaagaaaagtgatgctaagaccaagattatcaaactgaattggcagagctttattgataccgtgcgagacaagataaactga

SEQ ID NO: 2407 - DNA, 1371 bp, synthetic construct
  source 1..1371: mol_type = other DNA
atggatatagaggggtttgtcaggggacgcctcaccaaaggcgaggatgaggaggagcttaaatctatccttgcggagcggataagagagtttaaagacatctcagaagaacactccctcctgatggccgaaagcgtgattgatgaggtgaagaccacgctggagctaaacaatactgaggatgagttcctcaaggacatcatcaccgttcccaaggcaaacgtgggcatggggaagatgggggtggggtcccggggggctggggacttcttcgtacatcgaaagattgctcagatcgtgaaaagtaccaacacacaaagcgttgtcgaccccaacgcgcaggacgatggcggggtggtcaaggtcccagccccaggggacgatgtctatataaccactgcagtggacggcatccactcccgattaagcgaatatcccttcttaggagggttccacgtcacaagagccaccctgagggatgtttgcgtgatgggagcagatcccgtcgctatcctaagcgacctgcacctcgccgatgatggtgacattggaaagctctttgactacacggccggtatctgcgcagtgtcagagcttattgacgtgcccttggtagccggcagcacactgcgtgtcggtggagacatggtgctgggcgatcggcttgtgtcctgtgtgggaagtgtgggcgtctcacagcaccctccaaccgccagaaaaggcgctaccgtcggagacatcattctcatgacggagggtgccggagggggcacaatcactacaactgccctgtacaatggctactttgatgttgtatgggatacaatgaacatcagctttgtgaaggcttcgaaggcattgttcgatgccgacctggtgaaggacgtccatgcaatgacggacgtgaccaacggaggcctgaggggcgacgcgcatgaaatctgcgaaaccacgggtgtggggctcgagttctatcacgacaagataaagaccacagtcgccccgaatgtattgaatatgctggaagacctggacatcgatcctctgggcgtttcgacagattctctgatgctggtggttcctccagagattgctgacgacgtggtgaaaactgtgagcgatgtgggcgtgtacattacagagatcggtaaggtggatgatgaaggcagtcctcgcctaattaaagaagatggctccgtagacactctggtgccgctcttccgggaagccgcgtacaccaagatcaaaaagctggttggagacaccactcccgaagactttgaaatcatgaaggagaaagttcagaaggctgccgacgactctataaggaaaaaagagcgcgtcattgactacattttgaataacaactga

SEQ ID NO: 2408 - DNA, 414 bp, synthetic construct
  source 1..414: mol_type = other DNA
atggccctggagggcgcagagagaatagatgagtttataagcgaggccaaggtgtttttcctggcaacggttgacggagacaaaccaaaaaacaggcccctcggtttccatctgcttaaggatggcaaaatctactttggagtgggcaactttaaggacgtatacaaacagatggaggcaaacccgtatgtggagattgtggccctcgtcgaaactgatttcctacgctactatggaaaggcggtcttcgaagagacatacgacatggctgatgccatcgtggctggcaacgaatttctgcaggggatttataatgacgaaaccgggttcaagctggccattttccacttggaagaggccacagcggagatccgggacatcaccgggaagatcaatgaaagctacaatttctga

SEQ ID NO: 2409 - DNA, 396 bp, synthetic construct
  source 1..396: mol_type = other DNA
atgagcctgtttaaaaacttcatcgggaactttaagaaatccgacgttctggatctcgccaagggcttcaagctggaatacgaggccaataacttagagaatatgaaatcgatcgtagacaagttcgtggacttccaccccgattcctactttgcgagttgctctatggtgatctatataattcagctgtataagaaagacccgctcaaggtgagcccaaatatgcttaacaatctcagcatcatggagcgcaacattaaattctacgataattcaagcaccgactcactggataacgaagagttggagctacggcagtggtttaagaaggaagtctacgagaacgtcaagtatatggaatccgcaggactgaggttcagtgctgacgacaaatga

SEQ ID NO: 2410 - DNA, 159 bp, synthetic construct
  source 1..159: mol_type = other DNA
atgcagctgaacaagatctgtctagccgctatcgtgctgtttgtcctcttcaccatcctcaaattcgtgatgaagtggagcttcaaattgtttgccattggaattgtaatttgcatcatccttgcaatatttggcttcttcaagggggatgacctgtga

SEQ ID NO: 2411 - DNA, 639 bp, synthetic construct
  source 1..639: mol_type = other DNA
atgagcagcaatagcgacaaagatatcctcaaagaactgcgtgacatcaccaaggacaaggaaagctggaaatcaaatatcaatcacgtcgcggtgaaactcaatgatgacttttccctgagcgtgaaggccaaggtcctctggcttctgggagagatgggcctgaaacaccccctggagatagaggagtatgtcgatgacattgccgtttacctggaggacgatcaccccaagctgcgggaaaggtccgccaacgcaattgggagaatcggcagggctgacaagaaccttgtgatcaactatatggataagctgatgaagctgagcgacgatgaatcggaatccgtgaggcacgccttcatctgggcttgtgagaacatcgccgtcaacgctccagagctattctgcgagaaattggatatattttacgagatgatttcagaccctggcgaaaaggttcgcatagaagcccccgagatcttccgggtggtaggaaagagaaacccaagttgcgtaaagccttacttggacaaactcgagcatatcgcagaaaatgacgagaacccggtggtgcgcattcatagtgctggggcagtgcgaattacacggaaggccttaaaagagagcgataacgcgtga

SEQ ID NO: 2412 - DNA, 693 bp, synthetic construct
  source 1..693: mol_type = other DNA
atgggcttcttttcaaatatgcgcaaacccgagggcaagctgggcaacattcagctgaaatccatgaacaaggaacatacgccagtgagcttatggggtctgaagcacctagacattagcccggaggacacaattctggatattgggtgcggcgggggaatgaacatcaatcgcatggcccagaccgcaaagaaggtgtatggggttgattacagcatcgagagtgtcaacctgtccaaggaggtgaatgccgactttattcggagcggaaaggtcgaagtatatgaggggaatgtgagtaacctcccttttgaagacaatagcttcgatatcgtcactgcttttgagacagtttacttttggccagatatcgaaaaatcattcggcgaggtgaaacgagtgcttaagcccgacggaatgttcttgataggctgtgagtcgaacggggccaacaaccttgcaatgaagttcttcgatcgggtaatcgacatggaactctacgaagacaatgagctctacggcttcctgaaaaacaacgactacggtgatatcaccatctatctgagggatggaaaaaacaaacaagagatcatcaaaaaggacgacaagaccttcgtcatcgatgacgattacgacaatttttctatttccgacagatgggtgcagtggatgaccataactgcgataaagtga

SEQ ID NO: 2413 - DNA, 462 bp, synthetic construct
  source 1..462: mol_type = other DNA
atgctcagtctcatcaaagacaacaaaggcttcctgtctctgattgatgctatcctgagcatttttcttatctttatagtgctcatcagttttaacatgatcgtagatatggagatgcccagcctttccgaagacaacaatcagttcaagaccagtcaggatctgatggagctgatgtcaagcaagatcgacgggcgcgactactccacattggaacggatcagctacgttttatcctccaacgacaattcgatagcctccagaagggaagtgaagaatattctagatgacttctttagcgcacacctgggtagcgactacaaatacgtcttcatcgagaccaaccaactgaacggctacgtcttgtcatctgacggggattactcaacggcggatgaggtgtctctcgccattcgaaactatggaaattattcgtataagctgtatattttcaaggcctga

SEQ ID NO: 2414 - DNA, 1359 bp, synthetic construct
  source 1..1359: mol_type = other DNA
atgctgaatgccaacacctatgttacagaggaggagggtatcggcggcaccataagaaacaggtgggaagacttctacgtggaggagattccggaggtcatccccgatggagaagggcccaacatctacatttggattgaaaaactggggaggaccacccttgacgtgctgctcgacattgcccgggacctccacatagacaggaaacgcatgggctttgccggaatgaaagataaaaaggccatcacccgccaatggatctgcatagcgaatatggatagtgaggaacagtttgcacaggtggaggctctcgctggcacaattcacaatactgagtttctcaaagtgatccgcgggcgaaaaaagctgcggatggggcagctgaagggaaataagttcagaattttagttaaggacattgatggcatggagagcgacaacgaagaaactcggaaactcgccatcgaggacgctgccaagagagcagatgccatccttaaaaccttggagaagacgggcgttcctaactacttcggctggcaaagattcggaaagccacggacaaacacccacctggtgggtgaggcccttatccacaatgatctgaaggaggcggtccggcgttatatcggaaaccccagcgaagaagagagtgaggactcacggaaagcccgacaggccttcgacgatggcaactgggaagagtccctggagttgatgcaccctggaatgcgctacgagaagatgatgctcaaggtgctgttaaaagaaaagcgccgcgcaatcaggaagatcgccgaggaggaggggatcgaaattgaggaagtagacgagtccaaagtggaactgtcagacaaggcctacaaaaacgcgatccatgcactcccaaagccactacaacgaatgttcgtccatgcttatcagtcgttcctattcaatgccgcagtaagcgagcgtgtcgcaatggggatggataaatatatcgaaggagatatcgtcattgataaggaagagagaattgtgcgcgacaagaccccggaggagtttcaggaaatggtgtcttcctttgaaataaatcagacgtgcccactgtatggtacaaaggtcccctttgctgggggagaagtgggcaagatggaggaggaaatccttaacagctacggcttgacgagggacgactttgaagtacctaaaatgccccgactgggcagccatgggctgagaaggtctatgcggttccaggtctgggacgccagcgctacagcgactgaggatggtgttatgtgtgagttctccatagataagggcagttacgctactgctgtgctgagggaagtgatgaagaaggacgtgtactga

SEQ ID NO: 2415 - DNA, 1206 bp, synthetic construct
  source 1..1206: mol_type = other DNA
atggaggaacgcacaggtcttttctcgaatggggttatctggttcggcgttgcaatctctgtctcagagatcgaggccggaatacagctggcctccatgaacacccttgactccatctggctccccctggtcctcggccacatcattggaggcatactgctattttctacaggactcattggtgcccggctgcgcttgaatgccatggagaccatcaaatcaacctttggcaactacggctccaaattcttctccacactgaacgtgctgcagctgatcgcgtgggttgctgtgctgaatgcccagggggcgtcggcattgatgggcttgaacctgcccatatccttcccgttaacctgcattatcctgtctgcaatcattgccgtgtgggtgtacgtcgggcttcggaggagttctaagattactaccatcatgatgattgtgctgacagcactgctggttattctatcggtgaagctcctcggggtccatatatccaatgcgttgcccattcagaacattaacagcacggccttaagcttttggagcatctttgaaatttccatcgccatgccaatcagttggctgcccgtgatttcagactataccaaggatgtggagaacccagtcaacggcacattggtcagcgccatcgcctacaccatcgcaagcctgtggatgtacttcctaggcatcgagatagtgggcatcgggacaacgagcattgcacagagcatcctccttgctggtctgggagcgcaaggcgtgatcattctcgtgctcagcactgtcacctccaacttcgtagctgctaattccgccggggaaagtgccaaggccatcttcaaccgaatcaatccaaagattgccggtgtggttgtgagtgcaataagtgctatcctcgctatctctggaatcatggatcactacattggattcttatatctcattgccagcgtatttgctcctatggctgccgtgctcctggtaagcttctatctgtcaaaggaagagactggcaatgctagaatctggtactggaacatctttgcctggcttgcaggatttattgtatatcaagctacggtgaacctggacagtatattcctagggcctactctgcttgcagtgattgtctcagccatactggcgtacatcccgatcttgctgaaaaacaagagcaaactgcctaatatcagcaaatga

SEQ ID NO: 2416 - DNA, 843 bp, synthetic construct
  source 1..843: mol_type = other DNA
atgaatgaaaccatcaagacccttacaattcaagacatctcctgttatgggcagtgctccatcacagtggccctgcccgtgatttctgctttcggaattgagacagccatcctcccgtctgctgtactctcaacacacacgagtggatttacggattttacagtgcgggatttgaccgaggatctgccagagatccgcaagcactgggagaaagagggcatctttttcgattccatttacaccggcttcattgcgagcgcggaacagctggattacatcaaggacatcatagactcaagacttaaagaaaacggcctggtctttgttgaccctgccatggcagaccatggggaattttataacgggttcgaccaggaatttgcagacaaaatgggcgagctgtgcaaactgggtgatttcatcctccctaacacaactgaagcctgctttatcctccacaagccctggaaggagagcttcaccaaagaagaaatgctagagatggctaaggagctgaaagcgttcacgaagaggtacgtcatactaaaggggtacgaggaggaagacaagatgggcatgatcgtgttagacaaaatcgaagacaccatcgacatagtttacaatgaaaagatcaactatgtgtcccacgggaccggcgatgtcttcgctagtagcttcgtgggaagcaccatgctgggtaagtcgcccagtgcagccgccaagatagccggagagttcactaagaaggcaattgagaagaccattggcgatgagactcatacttacggagtgaaattcgagcaggccattccagagttgtatgacctgctcaaaagcatttga

SEQ ID NO: 2417 - DNA, 675 bp, synthetic construct
  source 1..675: mol_type = other DNA
atggactggtcccccatcttcatctcgatgaaaaccgccagcctaagtatctttattacctttttcctgggtctgatcgtcgcttggcttctcgttaagatcaagaatgacactacaaaaattgtcctggatggcatcttcacacttccaattgtgctgccaccaacagtcgtcgggttcttcctgctgtatatttttgggatcaggggcccgataggcagcttcttcctcgacttctttgcggtaaagatcgcattcagctggcctgcaacggtgattgctgccgtggttatgtcttttcctctgatgtaccggagcgctaggggtgcattcaagcaagtagattccaatttactggatgccggccgaaccctcggaatgtctgagtggaagatcttctggaaaatcctctttgcaaatgccttgcccggaatcataagtggcgggatcttggcctacgcccggggcctgggagagtttggcgctaccgcaatgctagccggaaacattgccggacagactagaaccctccccatggcggtgtactcagaagtggctgctgggaacatggggacggccttcgactacgtgattttcattgtggccatatcattcatagcgatttttatcatggactatttttccatccgcaaggaaaaccagtggaaaaactga

SEQ ID NO: 2418 - DNA, 825 bp, synthetic construct
  source 1..825: mol_type = other DNA
atggattctaagaagatactgatgatagccgtagtggctctgatagccatcgtggcggtctcctcatgctctgcaggcttcctggactttctgggcggagacaacgctaccgacgacagtctgaatggcaaggaagtgaatctcgcggccgcagcaagcctaaaaaatgtatatgatgatgagttgatccccatgttcgaggcaaagtatcccggagtcaaagtgacaccaacatacgccagcagtggcgacttacagacgcagatcgagaacggtctggagacagacgtcttcatgagcgcgtccaacaaacagatgaacgctctcgctgatgaggggctgatcgacaatgacaccaacctgcagttcctagaaaataaagttgttctcatcgtgcctaaggatagcgacctcaacatcacatcattcgatgacctgaaagatgtgaaggggaccattgctattggggacccagaatctgtgccggcaggccagtacgccaaagaagcccttaccaacctcgggatttgggacgcggtggagtccaagttctcgctgggaacggatgttactgccgtcttgaaccaggtggctcagggcagcgccgaatgtggtattgtatatgccactgacgctaaatccaatgatgacgtcaaggtggtttgcgaggcccccgagaacagcttgaacactagtgtgatctaccctgtcgccatgattaaggacgctaaggatgccgatgcagcaaaggccttccttgaatttcttcaaacccaagaagccaaggacaaatttgtggagtacggatttaccatccacgagtga

SEQ ID NO: 2419 - DNA, 390 bp, synthetic construct
  source 1..390: mol_type = other DNA
atgatcgagtgtcggaatatcagtaagggcaaggcagagggggagctcatagtatcagacgaagccatcagctttctgggaggcgtcgaccctgaaacgggggtggtgatcgatcccaaccacgagctaaagggccagtccatcaaagataaaatcctgttcatcccaggtggaaaaggctccaccgtgggttcgtacgttatattccagatgatgaagaacaacaccgctccaaaagcgattatttgcctcaaggccgagcccattattgcaacaggagccataatgtccgacattccgatggtggactctcccagcagcgtggaagagctggtgaatggccaaatggtcgaagtcgacagtgataacgggaagatcgagatcctttga

SEQ ID NO: 2420 - DNA, 1239 bp, synthetic construct
  source 1..1239: mol_type = other DNA
atgccgtcgttatacattaaaaacgtaaatattataaacccattcagtgaagagcctctagacgaacgccacgtcctcatcaaggacggcaggatcgaatccctccatgcagaggagagtgccctgtatgccaaccacatagtcttggatggggaggacaattacctccttcccggctttatcgactcccacgctcatgtcatggcaaacgggttccataaagaggatacaatgaaaaatcccctggccttgcacttctacaacgctatagagaatatgaaagcgaccattgatgccggggtgacaacggtgcgggacactggcctggccgacatcggagtgaagatggcccaggagaggaagatattccccgccccacgattaaacatttccattaagcccctggcgatcactggcggtcattttgacttctatctcaactcaggctttgatatggaactggcatatcccggctttccaatcggtacctgcgacggggtggaggatgtcttgaagaaaacccgggaggtgatcagggctcgtgcggactttattaaaatcatggcaagcggcggcatcctttctccaaacacgagccctgagtttgcacagttcaacaaaaaggaactgaagacaatcgtcagtgaggccgagaactacaacctcaaggtagcggcccattgccacagcctggagggcatacaacggtgcgtaaaagccggaatcaagtccatcgaacacgggactttcattgaccgcaagacatcagagctactggctaaaaagagaatctacctgacgccaaccctgatcgttcaccagacccttattaaggaaggcttccctgtgtgggacaattttgcagacgataaggttaaaaagctgaaggaagtcgtgaagatccagaaggaaaacatcgagacagcttaccagtgtggggttaagttcctgatgggctctgactgtggtgtgatcgaccacggaagaaacctgggagagttgaagcagctggttgatattggactcagcccgctggaggctatccaggccggaaccatcgaaggtgctaaattcttcaaccaagagaatgacctgggaagcattgaaaccggcaagattggggatgtgattctagtgaaagagaatcccattgaaaatatcgggtctctcgtggataatgataatattctcgccgtgatccaggatggaaaaatacttaaggacaaacctatctattga

SEQ ID NO: 2421 - DNA, 249 bp, synthetic construct
  source 1..249: mol_type = other DNA
atgaatgaagccgatttcattcaggagatcatgaagcaggcgaacctgagtgaggaccaaggaggccaggtcaacgatattttccagagcaccttcctcgcaggaaataagaacaaggacacaattgtgaacctaatcgccgagaaacttggcgtggacgcagcccaagctgaacagatctacgacatcgccatagggctgctcgctagcggggtactgtccaagatcaaaggcttgtttaagaaatga

SEQ ID NO: 2422 - DNA, 207 bp, synthetic construct
  source 1..207: mol_type = other DNA
atggcagagaaggaactgaatgtggtcgggatgcactgcccaagctgtgtcatggcggtggagctctccatgaaggatctaaacggcgtggacgacgccaaagccagtctggacacgaacagcgtaacagtggaatacgatcccgacaagatcaccgatgcagacctggtgggcgctgttaaagaggccggattcgatgtcgagtga

SEQ ID NO: 2423 - DNA, 2481 bp, synthetic construct
  source 1..2481: mol_type = other DNA
atggctcagaaagagttggatattcctgtagatggcatgcactgctcctcttgctcccttctagttgaaaaatcgctcgggaaactggacgaagtggagtccatcaacgtggacctaaacaccaacaaagcccacatggtgctgaaggacaatctcagccccgaaactatcgataagacagtggaatctgtgggctttaccgttccaaaagaggaagtggtcatccagatcgctggaatgcactgcgcctcgtgcgtgaacaacgttgaaaagttcttgcctcgggtagatggtgtggtggaggcaaacgccaatctgtccaatcagaaggtgaccatcacgtactatcgagacatgctcaatctaaaggagattcaaaaaacaatcgaaatgcttggattcgagtacatcggcctggacggcgagctggacatcatggatgaagaggagcgctatcagaaggacctgcggggcaaactctatcgcatcattgtcggtctggtctttgccggtatactgatggcaattatgcacttccatattacgattccccccctgactatgggacaactctctttaatcatagctattttcccattctgttacgtaagcatgcctatcttaaaggctggctggaactccttcaagcataagaacctagacatggatgttatgtactcaatggggatactcgtggcctttgtgtcaagcgtgctggggacgttcaatatcatcctcgactcaagtttcatgttctacgagtctgccgtgatgttgccgagcttcctcactataggacgttatcttgaggcccgagccaaaaggaaaaccagctcatcaatcaaggagttgattggccttcagcccaaaacagcaaccttgattacgagtgatgaggagggcaacagcatcgagaaggaaatagatatcgaggatatcaatattggagacatcctgctcgtgaagcccggtgaaaagatccccgcagacagcattgtagttgacggtgagagctacgttgacgaggctatgattactggcgagccggtgcctaaactgaaaaaggagggaatcgacgtgttctcagggaccataaaccaagatggggccttaaagatcgaggctcagaagattgggtctgaaactgtcctgagtcagatcatccagctggtggaaaaggcccaggggagtaagcctcctgtgcagaggctggccaataagattgtcagctggtttatacctgttatcctgacgatcgcgatagtcgtcttctgtctctggtactttgtcgccggagcaggcctgctgttcagcctcacatgcctgatcagcgttcttgtcgtggcctgtccatgctccttgggccttgctaccccgaccgccgttaccgtgggggtcggtcgcgctgcagagtatggtatcctcatcaagaatggagaaaccctggagagctcgaaggatgtggatgtctgtgtgttcgacaaaactggcaccatcacagagggcaaaccggaggtcgccgacattgaaacatttgatatggctggggacaagttccttcaggtcctcagcagcgtggagaataatagcaaccacccaattgccaaatccattctgaacagatttaagagtgataacctgaaattaacagaggaaggcaaggacgacttggctctgctggaggtcagtgactttgagaacataactggtaaaggccttaaggcgaatgtggtagtggatgaaaataattcttcggtgctcgccggaaacttgaaactcatggaaagtgagggggtggaggtcacggacgaggtcctggataagttcaatacctttgtgtccgaagcgaaaacaaccattgtgatggcaattgatggcgagatcaagggcatcatcaccttaatggataagataaaggacaactccaagagcgcgattgatgagctccataagatgggcatcgagacctatatgcttacaggagacaacgagaagacagcctccactgtcgccaatgaagtcggcatcgataatgtgatagccaacgttctgccaaacgacaagctggacaaggtgcaagagcttcagaaagaaggaaaaagagtcctgtttgtgggggatggaatcaatgacgcccccgcgctgtcccaggctgacgtaggggtggccatgggaaacggtaccgacattgccatggaaagcggggacattgttattatggaaggcgacctggaaaacgttgtagcttccatccagttctccaaaaaggtcatgacaagaatcaaggaaaacctgttctgggcgtttgcatacaacatgctcctggtgccagcagctgccgggttgctcttcctactatttggaattgtatttaagcccgagtgggcgggcctggcaatggcactgagttcagtgactgtgatcagcctgagtctgctgttgaaacggtacgtgcccccaatcaaaaggaacaaggtgtga

SEQ ID NO: 2424 - DNA, 1479 bp, synthetic construct
  source 1..1479: mol_type = other DNA
atgcgaatcaagtacctatcaaagcaggatattaaaattatcctacactatctgggatacatcatgatcggcatcggggcgatcctgctctttcccctgccaatcgacctgttctaccgcgagtttaactacgtgtatggcgtaattccgcccctgatttccatcattctgggagttattttttctcagggcttccgggagtatgacaaactgaaattcaagcatgggatgatcataagcagcatctcctggctatgggccgggcttgtgggcgcgatcatcatgatgctgattttagacgtctccttcgtagacgctttctttgaaaacatctccgcatggaccggaagcggcttgaccatgttcagcgacgtggagtccttgcctatgagtatactatttctccgcagtgtggaacagtggatcgggggacttggagtggtcatcatcttcataagcctcctcattaagcccggaacgtcggcattcaagctctacaagtctgaagcgagggaagatcggatcaagccaaacatcaaaaataccctcaaaaaaacaatgcagatctacgccatttacaccgtgattggggtcatcctgtatctgatcgcagggttgcccctcttcgattccataaacctgactttcacgactatctccgccggcggcatgtcaataaagaacgccaatatcggattctaccagaacgatattgtttatatcatcactatcttcctcatgatactgggggctaccagcttcacagtccactataagatggctaagaccaagggcaaagccatcctgaaggatattcaattccaactcttgattgtcagcatcatacttagtgccatagccattgcaatcattaccaaacttgctcctatggacgtggttttccacgtcgtgtctgccattaccaccacaggcgccaacattgccccgccaagtgagatggcagcctgggctccccctgcgctgatcatcattatcgtcttgatgctgatgggtggttcttcaggttccactgtcggggctattaagcttgtgagagtgattacactcctgaaaagcacacatcttgctgtgaccaatattgttagtcctggacggtttgtaaagatcaagatctctggcaaatcaatcaacgaaggcgagatgaaagaggcatcgtcatacatggccgtttacatattctttttagccatctcgtggataatcatgacctactatactaatgaccccttcaacaccctgtttgacgtggtgtccacgttagggaatgtgggtctgagcacaggtataatcagcggcgagctgggcacgattccaaaggtagtgttgatttttctgatgtggctcggtagactggagataattcctatcctgctgactatccagatcggatttgagacatttaaccagagtctcaggtttgtgaagcgccgtatgatgaggaaaattaagccaaattga

SEQ ID NO: 2425 - DNA, 1656 bp, synthetic construct
  source 1..1656: mol_type = other DNA
gtgttttaccccaaaatcgaagaggtcaaggaaatagccaaggatgattcgtataaaagaatcccaataagctatgaaattttctcagacacgaagacttcgatcgaggtcctgagacgccttcgtatcttaagcaaccactgctacatgctggaaagtgtggaagactcgaaaaactgggggcgatacagttttcttggcttcaatccaatcctggagctaacctgtcaggatggggagctggtcattaaaggtaaatcaagcttcagtgattgtggaattgaggatgaaaaagataagtgcttcagcatcaaaacggataatccgggtgaatacattagagaaatcatagaagaaaacaaatctccaaagctggagaacatccctccattttccggtgggcttgtaggctacttctcatacgattatatcaagtacagcgagccctccctgatcctggacgcacagaatcaggacgccttcaaggacgttgacttgatgctcttcgacaaggtgattgcatttgacaactacaagcagaagattgttgtgatcgttaatatgaaagtgaacgatgaggatatgctcaaaaacgaaagtatcgaggagaactatcaaaaagcctgcaatgacattaaggacatagtgaatattataaaggcggataacatcgtggatctcctgaacgacgactttaaggaccagctcacaaacaagaagacaatcaagtccctggaggaaatgaaaggcctaaaaaccttagaggagttggaccgctgccgcaaggaaattaccaaacacctgccgattgagctcaagtctgacttcagatatctctttagcaaggaagagtactgtgacatggtggagcgggccaagcattacatccgcgagggagacattttccaagtggtgctttccaacaggatcgaggccgacattgagggaagcttgttcgatgtatatcgcgttctgagaactacaaatccctccccctacatgttctacttctccagtgacgatatcgaaatcgccggtgctagtcctgaaactctcgtgaagctcgtaaacaaccaggtgtacaccttccccctggctggcacccgtccaagggggaaaactgacgaggaagaccgacagctggaagaggagctgttggcggatgagaaggaacgcgcagagcataatatgctggtcgaccttggtcggaatgacatcggcaaaatcagccaaataggctctgtcaaggtcaaccggtatatggatattgtgaggttctcccacgtgatgcacatcggatcaacggtagagggaattttgagggaaaattacgactacctctccacaatcgattcaatcctacctgctggcaccctgtctggggcccctaagattagggcatgtgagatcatcaacgagctggaggacaacaaacggggcatctatgggggagcaattggctatattgacctgacaggcaacctggacacctgcattgctataaggatcgcttttgcacgagacaataaggtgtttatccggtccggggcgggaatagttgccgatagcgtccccgagagcgagtttgtcgagtctatcaataaggcccaggccgtgatggatgctctccggctggccgatggcgggatagagtga

SEQ ID NO: 2426 - DNA, 627 bp, synthetic construct
  source 1..627: mol_type = other DNA
atgatcctattagtcgacaactatgacagtttcgtgtacaacctctaccagtttattggagaggctctggccaatataaagggttacgacctcgccagcaaaggcgatctctacaagatctacgaagagattaaggtgatccggaacgacgaaatgacggtggaagaactcagagagctgaaccccgattatattatcctctccccagggcccggcaaacctaaggacgcgggtatctgtaaggacattgtcaaagagtatattaattcagacgttccaattctgggggtatgccttggccatcaagccatttgcgaagcccttggcaccaacatcatacacgccaaggaactaatgcacggaaaaacctctatcatcgaactggatgaggataagatattcaaggacatcagtgaccccattcagatcgcacgatatcactccctggctgtggagaatgactcgctgagcaacgatttgatcgtgctggcacgcacagatgataatgagatcatggcggtgaggcacaaaaacgctaatatctacgggctgcagttccatccggagagcgtcttgactcctgagggactgaagatcatagagaactttctgaatattaaaaactga

SEQ ID NO: 2427 - DNA, 1008 bp, synthetic construct
  source 1..1008: mol_type = other DNA
atgattaaagaagctattctgaaagtatacaaggacgaagatctgacgtacgacgaagcgtatgccactatggatgagatcatgagtggggaggccagcgaggtgcaaatgagcgcgtatctgactgccatgagcatgaagggcgaaacgatcgaggaaatcacagcaagcgctgaggccatgagggctcactgtgtacgcctgcttaatgatgaggaggtgttggagattgtcggaaccggtggcgacgggagtaacacattcaacatatcaaccacctcctctattgtcatctccgctgcaggcgtgccagtcgccaagcacggaaaccggtcggccagtagcaaatgcggtgccgcggacgtactggaagagctgggggtcaatattcacataagtcccgaaaaaagcttagcatgcctaaaggaaatcaacctatgttttctgtttgcgcagaactaccatctgtcgatgaagtatgttgctggggtgcgtaaagagctctcaatccggaccatcttcaatatcctcgggccactcacgagccccgcaggggccagcatggaggtcttgggagtgtacgagagggagctgatagagcctcttaccgacgtgctgaaaaacctcggcgtcaagtcagctatggtggtctacggcctggacggaatggatgaaatctccgccagcgacaagactgctgtttgcgaacttaaggatggaaagaccagaacatatgagatctccccggaggacttctctatggatattgcctccaaagaggacctggtgggtggcgatgcaaatgagaatgccgaaatcacattggctgtgctcaacggtgaaaagggcccccgacgcaacgcagtgctcctgaactcagccgccggcctctacgttgccgggaaggtggactccatcgaagacggagtgaagctggcagaagagatcatagattctggcaaagccttaaatcagcttgagaagttcattgaggtgaccaacagatga

SEQ ID NO: 2428 - DNA, 777 bp, synthetic construct
  source 1..777: mol_type = other DNA
atgctgaagaagatcgtggcgaaaacggaagagcggctcatcgaggctaaaaagatcaaatccctggacaagctaaaagaggaagtctcaaagctggagataaataacgaatttccgttcaaagaggccttaaaagaccccgagatcgcgatcattgcggaggtgaagaaagcatctccctcaaaaggcctgatcgccgaagactttgactacatcaagattgcaaaggaatatgagcaggctggagctagtgccataagcgtcctaacagagccatatttcttccagggcagcaacgatttcctgaaggagatcagccaaaatgtatccattcctcttctgcgcaaggattttaccattgacgagtacatgatatacgaggcaaagatcctgggggcttctgccatcctgttgattgtttcgatacttgacaacgtgcagctcaagaactacctggacttggcacatgatctgggtctctccgccattgtggaaacccacgatgccgatgagataaggactgcagtcgatgccggcgccgggattatcggagtcaacaatcggaacttagccgactttacagttgacattgaaaacagcatccgactcagaagtcttgtgagcgacaagatcttgttcatttccgagagcgggatcaaaaccgctgaagatgtaggccgcctcaagaaaaacaatgtggacgccgtgctgatcggagaaactctgatgaggagtgatgacaagaaaagcatgatcctggagctcaagaatggttga

SEQ ID NO: 2429 - DNA, 654 bp, synthetic construct
  source 1..654: mol_type = other DNA
atgctgaaactcaagatctgcggactaagacggaaggaggatatcgatattgtgaacaaatacaacatcgactatatcggtttcgtgttcgcaggcagcccccgaaaggtgagctacgagcaagctaaggagctgagcgcgctgttaagggaagatattatccctgttggggtcttcgtcaatgagcatatgaaactgattgtcgacctgtacaaggaaggcatcatcaagattgcccagctccacggagatgaggatgaggactatataaagaacctcaaagccaagtcactggagcagacggggcacgaaataccggtgattaatgcaatcgaaatcaacaacgccaataattacgacaacttcaatgacaagctgttggagtggcgcgactcagtttctgactacttcatcctggacagtggcaagggctcgggaaagacatttgactggtcccttcttgataaaaacagcgaatttttcaaaaattccatctttctcgccgggggtttgaactccgaaaacctggactctgctataaaggagttcaacccatatgccgtggacctcagcagttccgtggaaaccgatggctttaaggatgaggagaaaatcaaagagattgtggaaattgtagagcggtacaggaattga

SEQ ID NO: 2430 - DNA, 1185 bp, synthetic construct
  source 1..1185: mol_type = other DNA
atgagtagggggcgattcggagtgcatggtggacagtacatgtcggagaccctcatgaacgaactccttaacttagagaaacagtataatcactttaaagaagaccccgagtttatagaggagttaaacactcttctgaaggaatatgctggcaggcctagtctgctgtactatgccaagagaatgaccgaggacctgggaggagccaagatctatctaaagcgtgaagacctcaaccacactggtgcccacaagatcaacaatgtgctgggccagtgcctgctggctaaaaagatgggcaaaacccgcgtgatcgcagaaaccggggccgggcagcacggggtggctacagcgacggctgcggccctgttggacatggagtgcgaagtcttcatgggggaagaggacacaaagcggcaagcattgaatgtattccggatggaacttctcggcgccaaggttcacaccgtgacaacaggcagcaaagtcctgaaggacgccgtcaacgatgctttccgagagtggatcagcagagtggacgacacccattacgtcattgggtccactatggggccccacccatttccaacgatcgttcgggactttcaggcagtgataagtcaggagatgaaagagcagatcctcgagctagagggcaagctcccaaacatggttatcgcctgtgtcggtggcggcagcaacgcgatggggtcattttacaatttcctggatgatgaggaggtggagctggtaggcgtggaagccgcaggaaagggcatagacactgaataccatgcggccacaattgcaaaaggcgagctgggcatattccacggtatgaaaagctacttctgccaaggcaattatgggcagattgcccctgtatacagcatctcagccgggctggactatccgggaatcggtcccgaacacgcctacttgcacgatattggaagagcgaaatatgtcagcgctaccgacgacgaggcagtggaggccttcgagtacctctcccgcacggagggaatcatccccgcaattgaatcctcccatgcaattgcccatgctatgagggttgctggagatatggataaggacgatattatcatcatcaacgtgagcggtcggggagataaggatgtggccgctattgcccgctacaagggcgtggaactgtacgaatga

SEQ ID NO: 2431 - DNA, 783 bp, synthetic construct
  source 1..783: mol_type = other DNA
atggagaaggacataaagattagcgatgccttcaaagacgggaaagccttcatcggctttctgaccgccggagatccgacaattgaaaagaccgtggaatacgtgctggccatggaagaggcaggctgcgacctggtcgagatcggcatccccttctccgaccctgtagctgaagggccagtcattcaggaggccaatatacgggctctcagcaacaataccaacaccgacgatgtctttgaggcaattcggcaaatccgagagaagagcgatgtgcccctcgtgtttctcacttacatcaatccggtgttctattacggatacgacaagttcttcaaaagatgccaggaactaaacgtctgtggcattatctctcccgacctgccctatgatgaaaaggatgagatattggaggtaacaaagaaatacggcgtggatatcatcagcctgattgcccctaccagcaaggaacgcatccagatgatcgccagcgaggcaagtggatttatctacgtcgtttcaagcctgggagtcacgggtatgcgcagtgagattaggacggacttaaagtccataatcagtgacataaaggaagtgactgatgtgccaacagcggtgggcttcgggatcaacactccagagcaggcgaagaacatctccaaagtagctgacggtgtgattgtggggtcggcaattgttaacattatcgctgagcacggggaaaatgctagggagcctcttgccaactatgttaaatcaatgaaagacgccatctccaagtga

SEQ ID NO: 2432 - DNA, 1389 bp, synthetic construct
  source 1..1389: mol_type = other DNA
atgcagggtaaaacactcgatacaagaactcgcaacctgatcctcattctctttttaatcggcgtgttcatgggctccttggacaccgggatcattgggcctgtcctgccctcaatcgagcagagcttccatctgacgagccgagaatcaagctggatatttacgctgtttgtcatcaccttcatgattggttctcccgtgatggccaaattttcggacttctacgggaggaagaagatcttcatccttgacgttctgctgtttgggatagggtcttgcctaatcgcagcctccattagcatcgaattaatctttctgggcagactcattcagggtttcggctgtggaggaattttccctgtggcgggggcatttgtaggagacggattccccttggaagagcgcggtaaggcgttgggcattttagggagcgtgttcggcatttccgccattggagggcctcttgtgggtgctgccctaatcccctatggctggaactggtgttttacaattaacattccaattgctatctttctcattatctttgcttggtacatactgcctgactcagataacgataggaaactcaagatcgactacctgggcatcctaatcctgagcttgctcgccatattcctgtcctacgggcttaaccaaatcgacagtagcaatttcatcgcgagcctcctctctctcaatgtgctgccattcttagtcatcttcatcattctcatcccaatcttcctcaaggtggagaaaaaggccgaggagtcgatcgtgcccatccacatgctgaagaacaaggaaatctccattgcctgcatcgagaccctctgctacggtatcatctactcttctgccattttcatacccagtctggtgatcctgtccatggggttggacgatcagcttgctagccttatgctgattcctatcctgggcgcaaatgcagttgcggccccgattctgggaaaaatcctggataaaaccggctcaaagaagctgatggcaatgggcactatgattcttgccatcgggcttattgctattgctatctatccaagtaatctaatcttcttcataatcgccggatgcctgattggagtgggtctggtaaccataataggcgcgccgctgcggtatatagtcctcaccgaggccaagccatacgaacggggcgctggccaagccatcgtgaatatgctgtccagtgccggacagctgatcggaggagccctgattggaggcataatcgcatcctttacagggattttgggctatcaggtcagtctgatcatagctgcaatagttgcactgattgcctttgctttcacccttcggttgaaaggccgtgatgagcagatcgctactatgaaggccaaccagtga

SEQ ID NO: 2433 - DNA, 1365 bp, synthetic construct
  source 1..1365: mol_type = other DNA
atggcaaatgagaatgtagagctcatgcgaggggccccggagattgcggtgaagaaactggcaattcccatcatgatttccatgctcctaaccgccagttataacatcatcgatggcatcttcgttgcgggcctgggccaggcagccattgccggcatcggcttcgttaccccgatcttcatgattctgaacggtgtcagcgtgggtttgggcagcggtgcgacaagcagcattagtaggttcgtgggggctaaaaaccacgaaggcgcgaacaagtccgccacccatgccctcttgatcttccttatagccagcatcatcctaaccatcatattcctcttcatccaggaacccctccttagaacatacggggcaagcgggcagtctttggctgaaggactgaaatacggcagccccctgtttctgggcctcttcaccttcatgtttgcaaatggaggaagcgggattttgcgcggcgagggggacatgaaaagggccatgtatgcagtaattgtatctgtgatcttaaacacctgccttgaccccatcttcatctacaccttaggtatgggctccgcaggagcttcccttgccactatcgtcagctctgctggttcagccatcgtcattatgtattggatactgatcaagaaagacacttgggtccacgtggagctcaagaatttcaagttcgattcaaatattgcaaaggacattctgaaagtgggtatccctgcttccatggacatgttcatgatgtccctggctgtcagtctgtatctgatcttcatctcaacaataggaggggaatttggcattgctgccttcacatccggtcaaaggctgtacctgtttgctataatgcctctgacatcaataggatcggccgtggccgccgtggcagggtcggcctatggagcccggaacggagattacctctcccggacccacatttacggcgctaagtttgggatagcctttgggacagcggttacaataatccttatagcctttgctccacagctggcaacgatttttgcctacactccagaaactgctccactggtccctgagatcacccagttcttacgtattgccagcctgtgcctccccctgaccggggctggcatgtgttcaagcttcctgtaccaagggatcggaaaggggacgatcagtctcatgtggacaattattcgcgaggtgatctttacggtgagcgccacgtacatccttggcatcgtgctaggctggggattggtgggaatctggactggcctggctattggaagaatcactgcgagtatcctgaacttcacgtttgcccggtttaccatcaagaagattcgcgagaactttggcacctga

SEQ ID NO: 2434 - DNA, 414 bp, synthetic construct
  source 1..414: mol_type = other DNA
atgccctttattgcgttaatccaccacatatcccagaataagctgcggtatgccagaaaaaacccaaaccatatcgacatggtgcatgagggtcgctacctcatggagatacacaagagaaagaatctgagtcaggacgaccttgctaacatcttcgggcagagcaaaggcacaatcgcaaaggcactgcgcaagttggaagataaggggtacgtcgagcgtatcattaaccagaacaatcggaggaaatacattcttaaaaccacccaggaaggcgagaagctcgctattctgctggaagaggatctgtcaagctgggaagaggccgtgggaatcgacaagctcgacgatgaaacgaaaaaccaactgcgaaagatcgccaggaaaactgaggaaatcctaaaggaggagtga

SEQ ID NO: 2435 - DNA, 684 bp, synthetic construct
  source 1..684: mol_type = other DNA
atgattggaaacgattgggacaatgccttggaggatgagtttaataaagactacttcatcaagattaaggaatttgttgaggccgaatacaagacaaagactatctatccgccgaaagaggaagtcttcaatgcatttaagctgtgccccctggacaatgtaaaagtggtgattctgggccaagacccctaccacgagaaggggcaggcccacggccttgctttctcgacccctgaaggccatcccatcccacgcagcctaaaaaacatctttaaggaaatcaaagaagagtacaactatcctattcccgatagtggatgccttgagagctgggcgaagcaaggtgtgttcctgctcaacaccgtcctgacagtggaggaggggaacgccaactcccacagcaaatgcggctggcagacgtttaccgacaacgtcatcaaaatactgaaccagcaggactcccctatcgttttcctcctgtggggaaagcaggccgaactgaaaaaggagctcattacaaaccccaatcacctcgtgctaatcagcagtcacccatccccattctcagcacggagggggttcttcggttgtaatcatttcaagttagctaacgagtttctcaaggacaagggcctggaagagatcgattggcagataaaaaatgtgcagaccactttgatatga

SEQ ID NO: 2436 - DNA, 732 bp, synthetic construct
  source 1..732: mol_type = other DNA
atgaagtacctgattattaacggttccccaaggaagaagaacacctgggccatggtaaagcaggcgaagacaaacctagaaggggagtttgaggagattcagctgatgaaaacaaagatccccatgtgtaatggctgcttcaaatgcatcatggagggggaggataaatgtcctcacttcgagacagtgcatccaatcgtggagaagataaaggaagctgacggcctcatcatcacgagcccagtttacgctatgaatgtcacaggcctgatcaagaacttctttgaccatactgcatatatctaccaccgcccggaattttttgataagaaagccctgatcatcgtgtcaactgcaggggctggtcacaagaatgtggccaaatacatggacgaaacccttcggcattggggattcaacaagaaccacaagattacttacgcctgcggcggaaaagacaccatcaacaccgaagagattaacaagacggcgcagaagttccaaaaggacgttagctctaagaaactccactcccctaaatttatggacattgtcttctacaatgtgtggagagccatggcagtcagtaaagatcccataaaggctgataaggaatattgggaggcaaccggcttggtgaattatgacttcgcccccaacgtgaagctggggttcttcaaaggaatctttgccaaaatagtcttcgccatgatgaaaaaggtaattaaatga

SEQ ID NO: 2437 - DNA, 1344 bp, synthetic construct
  source 1..1344: mol_type = other DNA
atggccaaaaagaatacaaaggagaagatatttgactcatcgattgacctcttctcccaatatggatataccaacacttccatccgacagatcgccaaagaggtaggtataaaggaaagctcaatctacaaccactaccagagtaaggaggccatactggagtcaatcctgaactattatatcagcgagatgctcaaggaggaagctcctattatgcagtccaacgacaatctggatctgggcttcgagtacttctacaagcagggcagcgacagattcctatcaaaactcagcgaagagaggatgatgaaaatcacgcgcatctttctggttggctcgtatcacaatgaaaagatgaaggcgtttgtgaaggaaggcatcattgactacgccatcaagggttgggaggagctgttcaacctaatgaaagaaaaagagatcattcggaaggatgcaaacagcaaacagcttgctgagtccttctatagttacgggatcttcttgctctatgagcatttcattttcaactatcctgaagatgatgagaagttcctcaaggacttcgaacggcgaactaccgaccatatgaagattatctttaacagtgtgaaaataaacaatgaagaatctaagatcgacaataataaaaacaatccatcctccaatcacgataaagagaacaaagagttagagacagagatcatgaggctggaagaggagaaggactacaagaaggttgaaaatcttgtaagagatgccttttggaacatataccgtcccggagcttacgaacactttatcgtgtacaatttgagggaggaccccagcttcatcaaggacctggcctacattattgaggaagacgatgagattattgggcacattaactattctaagggcaatctgaacctgtacaagaaaaacaatcaggggatggagaagatcaacgattggaatgaggaggcagtcgtgcttggcccaatagccatcaaccccaaataccaaaaccaggggtatggattccggctgattaagcataccttacgcctcgcgaaaaacaagaacattccgtatgtctttgtgatcggggatgagaactactataaccgctttggctttgaaagcgcatctaaatacaatctctttctggagggtaccgatacaagcgaggaaaatcccttcttcatgatcagaatctttaaagacctgttcaaagacaaggactacgaccggggaatcttctacaatccaaaagtcttcaacgtcagtcaggatgacgtggataagtttgacgaaaactttgagtacaagcagaagagggtgcaagaaggacagttggaatga

SEQ ID NO: 2438 - DNA, 1029 bp, synthetic construct
  source 1..1029: mol_type = other DNA
atgtttgacgccaagtttcaatacaccaacaagatcatcaacaatttgatggaaatttccaccatcaaggagttcattctgaatagtcagattctgccgagttatgacattttactacgaaataaggcaatcatcacgagcagctacaattcaacaagtattgaggggaatccactggatttcaaacaggtcaccaaactgtttaacctaaagcaggaaaataagctcgatgagcttaagctgaataagagcgaaatagaggtgctcaactacttcaaaacccttgagaatctcgacaactacgaaaaaattgacgaggaaactattctggacatccacaaaaatatcactgaagggaccctgaaggaccctaacatggcgggtaaattccgcgattcgccagtcgtcatcgggaacataaagacaggccagcttaattatgtgcctcccagccccatcaaggtgccctacctcatccgtgagttactggactgggctgacgtccaggaggacctgaacccaatcatcctcgcgggaatcttccactatgagtttgtgagaatccaccccttcgtagatggcaacggacggaatgcaagagccctcgctacactgatacttttgttgaaagatttcgacatcaagcgctacttctccctcgatgaatattataatcaggataggcagtcctactacaacgccctgcaaagcgccgataagagccaggacctgactgaatggctagagtatttctccacaggtttcctcgtgtcactgtccaacgtgaagaaggacatcgaaagcataagccggtttgacataaaaatgaacggcaagattaagctgaacgaaaaagagatcaaaatcctggagtttattgagaaaaacaacagtataaagaacaaggaggttcaggatctgctgaacctttcggcccaaaggtcccatttctacatcaacgagctcgtgaagaaaggattgattaagtcaaaaggcaagggccggagcacggtttacatttttaaatga

SEQ ID NO: 2439 - DNA, 3303 bp, synthetic construct
  source 1..3303: mol_type = other DNA
atgaagctgaaatcaaagtattttgtgtttctcctcatcatttgtatcctcttcagtatttcgacagtgtcagcgaacgacaacgatatgagtatcaatcaaaacctgcaaaatgacgctaaccaagatatcaaccaggatctgcaactgaatgaagcctatcaatcagacaccaatctaaaccagaacttgcaggcaaataatcaggaaaatgatctgcttaaagcctctgaggataagacctataacgacctctataatgacataaaaaactgcgaagatacgttcaacattgagaacgactacaaatacactgaaagcgataaccacacctttatcagcatcaataagaccaatctagtgatcaacggaaacaaccatgtcattgacggatcaaataaagctgggggctttgagtttttaaaggagtcactcaacatcatcatcaatgacctcacgttcattaactgcaacgattacaccatcgtgaatgaggacggaggcaacatcagtctgaataatgtcaatttcacgaacaatcacaacaaattgggcattctgtattcggagggaatgatttcggtgttcaatggagcactgactattaataactgtaatttcgacagcaacaacaatacgaacctcatctacacgaattttgccgagctccgcattacaaattccaatttctccaacggaaaggggattggaagccccatttacgccaacaggttcgaactgtacattgataactgtagctttgagaacttcactgccccctacgggggagcaatcaacttcaaagggaacaccttcgtcattaagaactcaaagttcaagaacttgaatgccgagataactgccggcgccatttttgccaagtatttcccaaaaaccaacaaggatggcccctacattccgggtgaggacatgctgtttgagaactgtgagttttccaatgtgtccagtacgcacaacgggggtgctatctacctgaacctggactcaagttctgagggctttgcaaaaacgatccacattaacaactgcaacatcaccgatgccagctccgactttggcggcgcgattgctagccagggggagatcctagacttctccaacttgaatatcataaactgccacgccaagataggcggtgcgatctacagttcctgggcagacctgagtctgaaagattgcaatatcatcaacaacagcgccgataaggacgcaggcgctatctactttgattacagcaagctgataattgacaattccaatttcacagataataaggtgaacaatatctcttcaggcaaagagagcatcatctacgccaacgacgtggacgcggagatcagaaattccatatttgataacggaggcgttgccgtctacgcaaacttcgccagcaactccaaatttgaaaacaacacttctacagatctgttcctctggaataataccaactatattgtgtctgttgagaataagggaataaaacttaacctgaccaacaacacaatcaatgttgataaattgccttcgaaatttgacggccgtgattggggttgggctagccctcttaaattccagggagacaatgtggcctgctgggcctttgcaacggccggggcattggaatgcgctcttctgaagcagactggcgtcctgtacaacatttctgaaaacaatattcagaatctccagctgaagtatttctccgaaggggataggcgaaacagtgccatcggttacgcttacagtggtctcggccattcgctgagctggtacggagccatcacatcagaagatgacccatacgatgaacgcggcatgtactctgacgtggctgagaccgacaagcgaatccatgttcaggatgcgatgattatcttcggcgggagaaacgacacaaggaacctgatgaaggaagctattatgaaatatggtgcagtgtccatccagtatatgtatgctccctacgattacactgccaattacaccgaagtggacctgcagccaggccatttcgtgaccctgatcggctgggatgacaattgccctcctgagaaggtaaacaccaaaatggccattgacgagaccaatattcctcccggcccgggagcttggctaatgaaagacagcgaggattctaaattgggagaagacggctatgtgtacctctcctactacgacctgtcgatattatccaaggatttctacccagtcattcctcaggctgcgggtgtggcctacatctttgaaaacactaacgactaccatgtcaactatcagacagacatcacaggccttgcaggttttgatgaaaactacagctattactccaatgagttcgtatcaaagtacgacgagtggattggggctgttgggacctatttcaacgagtccggaatcgactattcctttgacatttatgtgaatggcgagaaggctcactcccagaacgggaccagtgagtttgcaggcttccggaccatcgttctggacaagtacgtgccaatcaaggcaaatgacacattcaaagtgattttcaaaagcaatgcgctgcccttccaggcctattcaaggcaacactatatcccgaatatgtctatgataagtgcagatggcagcaattggatcgattacgccgacaagaatcggaccgtctgtctgaaggtatatactatcgaaagcgataaggaaaacatatccagccgggcatctaccatcatagactgtaagaacatgaccacaaccgccgtagctagtgcggacgggagagtgggcgaatactttgtggtcaccttaaaggaccagaacgggaccgccttgacaaacaagcccatcaaaataggtttcaacgggcgggtctatgaccgcgtcactgatgagaacggaagcgctaagctgcagataaacctcgcctataaggggacctacaccttcgccatcggattccttggagacgaggactatctcggggcctttgaagtggccaaaatcactgtgaatcttcacagccccaagctaagtgcccccaataagtcttacaaggcgagcgctaagacaaaagagctgactgccaccttcaagacatctaacgggaacccaataagcggcaagaagatcagcttcactgtgaacggtaagacttatacagcgagcacaaacagtaaagggctggctaaagtcaatgtttcattatccaagaaaggcacgtacagctttacggctaagtatgccggtgatgagacatacaaggcaactagcgtaaaatccaaactcacacttaagtga

SEQ ID NO: 2440 - DNA, 1092 bp, synthetic construct
  source 1..1092: mol_type = other DNA
atgaacatttcgagtctgtttagcgacgaaaaagttaatacaggcagacaagtcgagctggatatcgcgaaggcctttgcaatcatatttatgatttttctgcatacggtcatgatcgtggaagcatacaatgtcggcctgagcccaacgtatacttacataatcggcaacgtcctcgggcgaccctatgccgccgtcgtcttcatgttctgcatgggagtgggtgtggtatactcccggcacagccagtggaacttgatgattaagcggggaattatcctctacctcctgggccttctggtgaacgtctttgagttcttcctgccacactaccttgccggttaccttggcgtgaacgccgaggctttccctctctttggaggcctcatcatcttttgtgtggacatcctcgccttcgctggtctggccttcatccttatgggcatcctcaggaaattcgaggtgagtaacaaagcgatgattatcattgcagtgataatgtctctaatcggcagtttcacaatcgggattgactttggaatccctgctgtatgctcattcttcggtcacttcattggggctaagaacggacataccgcctttcccttattcaattggtttatcttcccagttgcggggtacgtgtggggccagtatttcatcagagccaaggacaaacgtgaattttttaaatactggccgatcctcctgattgtggcttttgcctacttcttcatatcctcccgctactgggggggggtcttctcagaggacgttcacctgtactactttctgaacaccttggatgcagtgttctgcatcatcaatgcccacgcattcatcggactgtgctattggatttccgattacctgcccgacagcattaccaagttcttttcaaccttgagccgcaacattaatgaaatttatattgcccagtggttctatatccccgtaaccataatcttgatcacgtatttctccaaggggttagtgtttgatgacctggtgaccacaatcgtgagcatatgtatgctgattatatctacagttactgcactagcttataggaagctgcggactaagggctga

SEQ ID NO: 2441 - DNA, 1995 bp, synthetic construct
  source 1..1995: mol_type = other DNA
atgtatctgattagcttttttggattaggggttaaactgaccaacttcaatgatgttgcgctcttcatcatcttcgtcagtctcatcaatgcgatcctgtggcccatcctcacccgcatcctgatgccatttctcgtgctgtccttcgggatagggacactgattctcaacggcctcttactgaacttctgcggccccctgttcggcatcaatgtggaaggccctgccatcatccttgctccacttgcaatgtcctttgttacaacagccctctctacgatccttaccatcgaagatgaaggaagctattacaggtcagtctatagggatgctgaaaagaagcggaagggggaggtgaaggactatccgggactcatcatcgtggagattgacggtctggcctacgacgtcctgaaggaagcggtggataagggatatatgcctaccctcaagtcgatgattgacaacacacacaccctacgcatgtgggagacggacctctcctcccagacaggggccagccaggccgggattctgcatggcaacaatgaggacatcaccgctttccgctggattgagaagaagaacaacaatcagatgatgcaatgctctggcgtgactcaagtaacaacgttggaagagcgaatctcggatggaaatgggctgctggtagataacggcgccagccggtccaacctcttctccggtgataccgacaatgtgatatttacattcagcaaaatcttaaacatccgaaagctatacaacaaggcatggttctccgtgttcagcaatcccagcaactttgcccgtatcgtatgcctgtttatttacgacatgaccttggaaatcatatcccaaataaagcacagcgtgaagaacatcaggccacgcatcaaacggggcatagcctatatccccacgcgggctgcaaccaacgtgttcatgagggaaatcaacaccagcacgttgatcggggacatgatggtcggcgacattgacgttgcgtattccacctatttgggctacgacgagatagctcaccattctggcgtgcgcgacgaggactcttggtacgcccttaaaggaatgaacaagcagattgagaggctgattaataccaataagtacactcctagaaaatatgagtttgtcattcagtcagaccacggccagacaaacggtgcaacattcaagcagagatacggccagtcctttgaggattacgtgaagtccctgctgccaaaagagatgaagatgtttgcaaagatgtcgtcaaacgaagaccactatgccgaaagtttcctgcctttttcacgaaagaacgatgatctgatagatgagaaggatctcgaggagctgggggactctgaggtgattgtcctggccagcgggaatctggcaatgatctaccttacccagtgggactacagacttagcatcgaagagatcaataagttcttccccgagctgattcccggtatcgtggaaaacgaatacgtgggatttattgtcatccggtcagacgaaggagacctggccatgggtaaaaagggcatttacaacctggacactggcgatattataggaggaaatcctctggaaggatttggcaagaacattgccagacacctgaaaagaaacagctcattcaagtacacccccgatatattggtgaacagcttctatgactgtgaaaatgacgaggtctgtgcatttgaagagttggtaggcagccatggcggtgtggggggaagccagtccaaaccattcatcttatatccgtcagggtggaacgtcagtgatgaagagattgttggtgctgagagtatttacaaaatccttaaagagaatctgaagaaactaaaagagtacagtaatgataacactgccctagaaaaagagtacagtaatgacgagactgccctcgaaaaagagtgcagtaatgatgagactgctctcgagaaagagtacagtactgctttggaggagtga

SEQ ID NO: 2442 - DNA, 714 bp, synthetic construct
  source 1..714: mol_type = other DNA
atggacatatcggagatcattggcgacgcaatcgcctatcccatacacaacattaaggctctggtgatttatatgatcattggcatcattactggaatcctggggggcgccagtttcatgggcctgcttatgagcctaacaggcaaaaacgctctggcggccggcggctttggtatccttggcgtcttagtgctcctcatcggagccttactcattaccggctatgggttggatattgtgaaatttgggatagaacggagagatgacgggccgggaattgacctggtgcgacaggttctgaatgccgtgaaactgctgattgtcagcatcgtttactacatcgtcccagcaatcatcgcctgggtgttgttcaccctccttggtagggggatcttgaccgtgctgattgttatgataatttctattatcttcgcttttgctgagtttatggccatctgtcgcctggcgaagtatgattccctcggagaagcgctggctatcggggaggccattggtgacatatcaaaggtaggcgtgataaagctgctcgcaacgattatcatcgtcgtggtcatcgccatgatcgtgtgcttcatcctgctttacgtgtacaagctgaacagcctcatcggaggaatcctgttgggtatattcgccgtatacctaacattcttcgccaatcgggcagctgggctcctgtactccgatgcatga

SEQ ID NO: 2443 - DNA, 750 bp, synthetic construct
  source 1..750: mol_type = other DNA
atgattatcgatacacactgtcacatctacaatagcgaaatggaaaatgccaaggagatcatcaaagaagctcagaaaaacgacatctgcctcattttgaacggcactgatcccaaaagcaacaaggagattctggagctgagctccaaatatgataatgtgtacggtgcgctcggatatttctacactctggccgatgagataagtgacgaagagattgatctcttggacagtcagctcaacaacgacaagatcatcgcggtgggagaaatcggcctggactattaccatacgaaagagaacaaggactcccagaaggaactcttcgaaaagatgcttgatcttgccgaaaagcacaaacttccagtcatcgtccattctcgcaaggcctcgcaggacacctatgacatactaaagaatcacaatgcagttgggtcactgcactcttaccagggttcagccgaaatggccagggaatttgtgaagttaggcttttacatcggcatcggagggacgatcacctacaaaaacagcaagaaaatccggaaggcagtgaatcaagtggggattagccatattctgatagaaaccgactccccttatctgccacccgaggataaaagaggcgagaacaacacaccgctgaacctaaagtacattatcgaggagctggcagaggagttggacattaaggaggagaaaatcattgagataaccacagagaatgctaagaagctgttcaaagtatga

SEQ ID NO: 2444 - DNA, 717 bp, synthetic construct
  source 1..717: mol_type = other DNA
atggacgagaagttctcccggacagagatgctcgtgggaaatgagggcatggaaaaattaagaaatgcgaaggttgtgatttttgggctggggggggtcggttcctttgtttgcgaaggacttgcacgaagcggcgtcgggaacttcgtcctggtggattatgacaaggtggacgaaaccaacataaacaggcaggtaattgccaccacaaagaccatcggccaatgcaaggtggacatcatgaaggagaggattctcgatatcaatccggatgccaacgttgagatttataaggaattttacttggaggattgtgaaatcgacattatcactagtgatctctcctacgccgtggactgcgtggacacaatcatggcaaagattgccattatctgcaagtcaaaagagctgggcgtaccagtgatctcaagtatgggaaccggcaacaagctggaccctactatgttcgaggtggctgacatctacgagacgagcgtctgtccactggcccggatcatgaaaaaagacctacgcaagcgcaacataaaagactgcaaggtggtgtacagccaggagctgcccaaaaacacgaatgattgtgatataaacaaaaacaaggggaaggtgaaggtgaaaggcagcatctctttcgtcccctcggttgcgggtcttatcatcgctggagaagtaataaaagatattgtcaatgctaaatga

SEQ ID NO: 2445 - DNA, 471 bp, synthetic construct
  source 1..471: mol_type = other DNA
atgtttcgaaagatgcgccgggcaaaacaggaactgtccaaagaggagtgcatcgatatcctcattaacgagcctcggggcgtcctggctgttctaggtgatgacgaatacccgtatgccgtgccactgagccatgtctacgtagacggcaagatctacttccacggaaccataaaggacagccacaagagagacgccatcaaaaaacacgacaaggtgtccttttgtgtgatggataaggggactaagtcagattcgtggtggtacactttcaagagtgtgattgtctttggcaggatgaagacaatcaatgacaagcagaccaaaattgagaagctcacctatctgggaaacaagttcttccccagcgaagaggagacaaaagacgagattgataggcttttggacgtgacggaactgtatgagatcagcatagagcatatgagtgggaaagtggttaaggaaaaatga

SEQ ID NO: 2446 - DNA, 1350 bp, synthetic construct
  source 1..1350: mol_type = other DNA
atggccatacatccaattgaatttagatacggcactcccgaaatgaaacgcatctgggagcaggaaaataaacagcaacgaatgctggatattgagtcggcattggcccaggctgagggggagctcggaatcatccccaaggagtatgccgatgagatcaaagctaaagcaagcattgagtacgtgaccctggagcgcgtcagtgaaattgaagcggagaccaagcacgacatcgcgtccctctcaaaaggcctgagcgaggtatgtgagggggaggccggcgagtacgtgcactttggagcaacctctaacgatattgtggacagctctaactcattgcttctgaaagactccattgaggttctcgaagaaaaaatcgaacgcctgaccaagataattctgaaactggccgatgaaaacaaaacaaaggtctgcataggccgtacacacggacagcatgccctcccaaccacctacggcatgaagtttgcaatctgggccgatgagttgcacaggcaatatgacaggttgcagcacgccaaggacaatgtgtgcctgggcatgatggacggggctgtggggaccactgccgcgcttggcacccagggctgggaggtgcataagaaggtctccgagattctcggccttaagcccgccccaattacgaaccaggtcttacagagggataatcatgttgagttcatagccaccctggccaacattgctactaccctcagcaagatagctctggaagtgagaaacctacagaggactgagattcaggagttaggagaatattttgaccctgagaagcaggtgggaagcagtacaatgccgcacaagatgaaccctatcacagcagaacgcatctgcggtgtggctcggatcgtgaaatcctatgtaaatgcagccatggaaaacaaccccctctggcacgaacgggaccttacaaactcatcctgtgaaagaatcatgttcccggaggcttgcattctgacagattacatcctgaacctgacgatcaagttgatgaacaatctgatcttctacgatgaaaacatcgagcggaacctgaatttcacgaatgggctcatcatggccgagagactgatggcagagctgacacgggcgggaatgggtaagcagacggcttacggggtcgctcgaaagaatgcgataaaagcaaataaggaaaagcttctcctagccgacctgatcctggaggaccctgacgccagtcaattcctaagcaaagaggacgttgagcggatcatggacccccacacttatattggtagcgccccaatcatcgtggatgagatcctcgaagcttcgaaggactggttctga

SEQ ID NO: 2447 - DNA, 807 bp, synthetic construct
  source 1..807: mol_type = other DNA
atggacttcagcgtgaaggactttaacgtgcggctccgaaccatccggatttgggaagtagtcatagccctggtggtagcattctttctgaccgggttcacatgtgactatttcggaatctactcaggtgaagccgagtatatcattttcttcctgtatatgatggtcttcttcgcaatagcctccatcgggacccatgggttcaaagatgacatctacggcgtgttcaaggcctccaacctgtttaaggtcattatgatcgtcatcccaaatatgctcctggctttctttattcagcagcaccttgcaggctttgatgctatgttcaacaatatcaacctgcttgctctgccagttagcgacctggcttacgaggccagcaatcctctcctgttcctttttgaattttttagtgcaatcttcattgcgcctatttcagaggagctcttctttaggggcatcttgttcaataggcttaagattagaaaaggtgtgatctttggagtggtggtttcctcgatcatctttggattgtgccatttcaactaccccgaccacttggcccacatcatttacacttgcctgttcggaatgtgcttatgtattctctacctgcgcacagacaacctactgataaacatgtttgcccacttcctctataatctattgagttatgtgatagtttacacgcccattggggatctcttcttaggcggcccctttatggatttcactgtcatagtgctgctgtttagcatcgtgtttgtgccggcgtacatcttttacttctctatcaagctgaaatga

SEQ ID NO: 2448 - DNA, 804 bp, synthetic construct
  source 1..804: mol_type = other DNA
atggactttaatgtgacagacttcaatgtgcggctgagaaccatcaagctgcgggagttactggtgggaattgtcatcgcgtttatcctgtccatcgccctcctgatcatatttccggttatggatagttacgatgacttggcactcatggtgttcgtattcttcctgttcattttcttcctttacgccctgaaagggacctctggtctaaaacaggacttcaataagctatttgagagggacaacagccgcgaaattctgtatgtgctcattatcaacatgttgtttgctttccttgtcctcgctatttttagcaccttcgacgcctacctgactctggcggattcggagtgggtgagcatcctggactttactcccactgctatcgatcccgccgtgttcctattcgagagcttcacgagcatcataatcgctccaattctggaggaactcgtctttaggggcgtgttattcaaccgactgaagattcgcaccggcattctccccgccatgcttatctcttcattcctttttgccataggtcacgaatttggcgggatgacaagtgcatttgtttttggaatgtgtatgtgcgtcctgtatctgaagaccgataacatactgatgggcatgtcagttcatttcctgaacaacctgatctttacagtatgggacctcttcgcattggatgcaatcgtgttccagatgcctgtcctgccattgacgttgctcatttccattatctccggactcttaataatcctctatctttacaaggagatcgggaaactgctggccgaatga

SEQ ID NO: 2449 - DNA, 243 bp, synthetic construct
  source 1..243: mol_type = other DNA
atgaagactataatccgatacctccgccaggaggtgaagatgagccagcaggatctagcaaaaagcgcgggggtcacgagacaaaccattaacgctttggaaaacggacggtacaaccccagccttctgctggcctacaatatcacaaggattctcaataaagccacctatggcgacgacgtggattcctatctgagtatcgaggacgtatttaagttcgatgacgacgaaatctcagtgtga

SEQ ID NO: 2450 - DNA, 630 bp, synthetic construct
  source 1..630: mol_type = other DNA
atgttcctcatttacggctactcctacagggtgacaaaagtcagcgtggaggggatgatcaacggtaacgatcccctgccagaatttgatgacgtgatcggcatgtttgttgacggcataaaagtgtgcctggtctatctgggatatgcgctggttccgattataatattcatggtctttgccttagtctcgagcgctattggaggatacggcgagagtgtgttgatggccttcggctcaattattacgcttctcgccatcatcggcgcttatgtgatgagcatgtttggagttgcaaatatggctaattacgacggcgcactggccaaggcatttgacattaaggagatcatcgaaatcatccagtccgtcggcgtggtacggagcgtaggggcctacattggtctggcgatcatctgtaccgccatctttatgatcgtggggctactgctcttcttcgtgttcggattctttggaataatcactggtaccctagggtcctatacagccgccgggggcatattcatcgcagggattatcctgggttacttcctgatgctcttcatcgtgagtccttacattctgattatgcagtcacgcgtggctgggttgctctataaccttcactga

SEQ ID NO: 2451 - DNA, 849 bp, synthetic construct
  source 1..849: mol_type = other DNA
atggcgagcatcacagacattatcaaggaagggctgaaatacccgttcaacgacacgaggaaggtcctgattttagggctaatattcctcatctcggggctcatttcccttttcactcagtacgtggtgtatgattccatgaccctgatggtcaatgcctccccctatacctccgtgaatggcatgtttgcaagcattcctccatctaactcagcgctgattttcctgtcatggatcgtaacattcattctcttccttttcacgtcaggctacatctacgatgttattaaatatgccatcgacgggcggtacgaactgcccgactttggcaatatatttgccatcctcaaaaacggactgcgcacactcatcgtgggcatcgtgtactccatcgtgccagccctgatcttcatccttggactcatgctgatggtgaacgaggctagcggtgaggctgtaaacatgtttggtctcatattgctttttgtgtcatttatcgtcgccatattcatttacctgatcgaagtcattgccatctcccacatggttgaaaacgacagtttaaagtctgcattccagtttagtgagatctttgatataatttcgaatatgggctggggacgatttatcggagccctgatctttgctttcatcgtcattgcaatcatttccatgttcttcggaatgatcttcggggccataagcaccgggattggcatcttgttcgatagcgcactggtgagcactctagttagttctatattgaccggtttgctgctgagcccctatatcagcatcgcgctgggcagaatgtttggcagcgtgtataaggaggctattagtgagtga

SEQ ID NO: 2452 - DNA, 798 bp, synthetic construct
  source 1..798: mol_type = other DNA
atgaagtttaacagccgggttctggggatactgtctctcctgttcgtgctgacgattctcgtgagcagtgtgggggcagccgagtacaagctcaccgagaaagatttcaataacacctttaaaataggtatcccagaaggaacagacttccagcaggatgcatattcaaatattgcggccgggaatgtcaactttgccatgaaggtgttcgacaacatcggaaataatactgacggcgtggtctctgtattgtactttaaggactcgtcctctgattcaaatctgatttccgatgtgatcgatgacctgaacagcagtggggaagtggtcgaggagaacgacaactacatcatcgtgaagaacaactacgacgctgaatggaacgctccggatgccagcaccagctcagacgagttctggagcttcatcggcgatttatgctccagcggcagcgacatgaacttcggagatggtgacagtaatatccacctttccgatgatggagttaacattgaggatagcagtgcaaacgtctcattttccaaaaacggaatctacgtttctgactccgatggccagaatgtgtccataagttccgaaggcgtaaaggtctcgggcgggagctccaacgagacagtggacgtaaatgctgatgtggactcagtcatgaacagttattctgaatttgccgactattcgctgtgccttaagaatcccaaaaaggaccagttgattatcatttgtggcaatgacctcgacctactgaagcaaatggccgacagcgcgagcttcaaatga

SEQ ID NO: 2453 - DNA, 384 bp, synthetic construct
  source 1..384: mol_type = other DNA
atgtccaacaactacctgcccaaaaagctcgaaattaaatatagccaccagatcgacgggaccaagtcaatcaagctcttgaatggcacgctgctggtgaacaacccgaacccagaacttatagatatcaatcagatcgacgaggaaaagtggattgagttttgggatgcagtggagaagatcgggctatgggaccttgaggaggtctatgagagctgcacactggatggtggattcacctggaagatcgaaatcgaatatggcaatcgggagattaacagctacggagccaatatggagcctaaaataattatgggcgacaaggtatactcggtgttagaagagctgtacaaatccattgaggaactcatcagtctggactga

SEQ ID NO: 2454 - DNA, 777 bp, synthetic construct
  source 1..777: mol_type = other DNA
atgatctttgacttccacctggggagtctctttttcaaatttatcctgtaccttgtgatgttgctattctttatttataaattcaactctatctccaagaagaacagcagctcaaatttcaattataatagcagttcgaatagggattctaacagcgtgaacaacagcagcctgtcagatgcctttcggaacgatctgaacagcatattcaaggtgtcgaagatctaccacattctattcatcgttttagcaaacatactatttgtgtccgcaatatacttcgtactgagttacctgggatcaatctccattattcagtttaacgccccgctgttcggtgacttcaccggtctcggcttcgacgtaacgctcctttaccttataaccgtggttatcctcagcccaattatcgaagagttcctcttccggggcatcttcttacgaaggttcaatctggagctcgacaacctgacacttgctatcctgatctcctcagtcctttttggaatttgtcataactttggcggaatattgggcgccattctctttggcatctgcgtgtccatcctgtatgtcaagtcccgcaacgtgctggtccccatcttggcgcatttcatcaacaatctcatctccttcctgctggccttgattgggatagagaatttcattcacgggaatagcattgtcattgctctgatcatcatcctggccatcattagtaattttgtgctctttagagcgattgtgctggagtggcctaaatcttttaaagaatga

SEQ ID NO: 2455 - DNA, 606 bp, synthetic construct
  source 1..606: mol_type = other DNA
atgttaaaatttaccggtaaggaaatcagggacctgatcatcagtttcattgtgattgcgttggccttcagtattctgtactcgaaccgcgatttcaacggaattttattcatatttcccatcgtggcaataggggtaggtgccggattcatctttcacgaactggggcataagttcgcagcgatgcactacggatattgggctgagtaccagctgtggcccaccggccttgtcattgccttggtaagctcctttttcggattcatctttgcagctccaggcgccgttgtcatctacagccaaggcatggagaagtccgagaatgggctggtgtccctggctgggcctgccgtcaacatcgtgctgggcctaatctttctcgggattctcaattcactgggtcaggtgacggactacaacggctatatcatcgctctcatttgcctgctcggcactcggattaacttcttcctcgccacatttaacctgctgcccatcccgccactcgacggatcaaaagtgcttagctggaatgccctagtttggatagtggcattcgccatcagcgtgatattgcttgtggtctatggcgggtacctgggctga

SEQ ID NO: 2456 - DNA, 162 bp, synthetic construct
  source 1..162: mol_type = other DNA
atggccaagaaagatgacaaatatagcatgccgatgtccggggcaggactggtccggtactttgacgacgagagtgtgggccccaagatcgctccagaatacgtgattgccctaaccgtaatcctcggcatcttctgcttcattctgaggtacagcatatga

SEQ ID NO: 2457 - DNA, 3564 bp, synthetic construct
  source 1..3564: mol_type = other DNA
atggattctggcatggattacttcgagagactggaaagtgaaacacagcggctctacgagatagccaatgaggccagatctaagggttttgatgtcgagctggaaacagagattccagtggcaaaggacttggccgagcgggtggaagggctcgtcggtcctaaaggcatcgcccgacggattaaagagctcgaggctactggcatctctcgggaggaggtggcctttgagatcgccgctgagattgcctcccaggagtctagcgaaactggagctaagctggaagctgagaagcaggcctttgccgatcagggcctgcgtaccgcacttgcgatcatcactgaaggggtggtggctgcgccgctggaagggatttccggtgtcaagattaaaagtaactcagatggcaccaagtatgtggcagtctactttgccggacccatccgtagtgcaggaggtaccgcagcagcgctctccgtgctccttggtgataagatacgggtagcgactgggctggaccgcttcaagcccaccgacgatgagattgaaagatatgtggaagaggtcgagctgtacgagtcggaagtcaccaaccttcaatactcgccgacgccagaggaagtaaggtttgccgcacgcagcattcctgtggaagtcagcggggagcctaccgaccagattgaggtttcccacagggacctgccccgggtcgagaccaataacattaggggaggagccctgctggcgatggtggaaggggttattcagaagtccaagaaaatcctcaaaatctccaaaaaactcaacctggatagctgggagtttctggccgagtacgctaaaggtatcggctcatctcaagaggaggaaaagagtgaggaggaaaccgaagagatcgtggaggaaatcgacgataatattatcgataaggacgaactgtttgcccattcaaaatacgcccacgatatcatcggaggacgacccgttctgggatacccctcggaaaagggcgggttcagactacgctatggacgctcgcgcaacactggcctggctacaatgggggtgcatccggccactatggaactactggaatttttggctgtcggaacgcaactgaagatagagaggcctgggaagggtaactgtgtggtgccagtggattccattgaggggcctacagtaaaattaaagtcgggtgaggttcgcagattagattccatagcggatgcaagggaagtcaagggcaaagtggtggaaatactctttctgggagacatgcttgttgctttcggcgaatttctgagaaacaaccagcctatgttaggcagctgctggtgtgaggagtggtggatcgagtgcatacgaaacagcgacaaatacaaatcattctccaatgacagcgagctttatgactatcttatagagcgcggaatcgacttgagcatcgaacatttcatctcacacgaagactctagcaagtatatggactttgatagggaaagcttcaatctgaacttccttgagaaaaagcggtatacggccgaagaggcctttagaatcagctacgactttagtgttccactgcaccccgaatacacatactactataacgacatctcccgtgaggacctggcgtacctgaatgagtggctagacactaaaagggattatctgagtacggactacttgaatggagaggacttgattcttgatctggctcctcagaagagaatccttgagatattgggcttggtgcataagctgatcgataaaaaggtcgtcattgatagggatcatgcttatgccctaatgaaaaccgtgggaaacggctctgcactggaggacaatgatggggacctgagcagcgaagtgaaaaccatagattactccaagtacctggacgatgaccactataagagcaaggtggttgacatcctcaacgaaaacatcgactttgagatcatggataaggcgccatgctatatcggcacaagggtcggccggcctgagaagtctaaggaaaggatgatgcgccccgccccgcacgtcttgttcccaattggcaacaatggcggaagcagacggctcgtggccgaggccgccaaaaagagaaaaatcaacgtggagatcgcccgacgccaatgcacaaacccggattgtgggctcagctcattcatggctatttgccctcactgcggcgccccaactgaaatcaccaaagccagtcagaaggacatcaacctgtccaccatgctctcaaaggctagcaataacatcggggtgcggaaggtggatgaggtgaagggtgtcattgggctcattagcgaggataagctcccagaacccctcgagaaagggattcttcgggcgaaaaatggggtcttcaccttcaaggaaggaaccattcgtcatgactcgacagacctgcctctgacccacttcattccaagggagatcggcgttactgtgccaaaattaatcgagatgggctatacgcatgactgctacggccaggaaatcgtgagcgacgaccagataattgagctgaaggtgcaggatattgtagtgtctgacaattgtggcgattacctggtcggtgtagctaatttcgtggacgacctactcgagaagtattacggcatggaccggttctataatgtggaggacaaatatgacttgatcggccacctcatcgcagggctcgcaccccacacatcagcaggggtgttgggccggattgtcggattcactaaggcactgggctgttacgcccacccctacttccacagcgctaaacgacgcaactgcgacagtgacgaagactctgtcctactgcttctcgatgccctaatcaacttctccaaatcatacctgcccagtacccggggtggcagtatggatgctcccctggttctgtccacacggatagacccagaggagatcgacgacgagtcacacaacctggacatatttgaaagattcccactggggttctaccagaaaagccaggagcctttaaagcccgcagatatgctggaatttgttgataacgtggagatgcatcttggaacggacagacagtatcacgacctgatgttcagccaccacaccagtaacattcacgctgggcctaaggtgtgcctgtacaagcgcttaggctccatgaaagaaaaggtggaggcccaaattcatttggcagagctcatccgtgccgtagaccagagaggagttgtagagggtgttctgagctcccacttcctgccggacatcatgggaaatagcagggctttctccaagcagaaggtccgatgccccaagtgtggcgccaagtaccgacgcatgcccttgacaggcaagtgcaagtgtggaggggaccttatcctcagcgtttccaaggggagcgtggtgaaatacctggaaatctcccagaatctcgtaaacaggtatcccgtgtcacattacttggagcaacgcctcgagattcaggagtttggtatcaatagtctctttgaaagtgataaatccaagcagagctctctggatgtgttcttcggcaaatga

SEQ ID NO: 2458 - DNA, 2343 bp, synthetic construct
  source 1..2343: mol_type = other DNA
atgggtctgaaaataaatgagggtgtgaaagtggaaaatgtgtataatgtagaaaatgatattaggaaagctaaaatcaccgttaagaaaaacaacggggtctgcgaagctttcagttatgagaaactgctgaagagcttagtgatggttgaggccccctattttgagagtgaaaagatcgtgtcaacggttgtggaaaacctgtacgacggtatcactactaaagaaatcaagaagatcgtgtacgaatgcctggaggaggtggactcagaggccgctaacaagtatctcgccaagactaccttgaaggtccgttccagtcgcgataagatagaaccattcgacatggctaagattgcaagcacacttgtggaggagaccggggccagccaggagacggcttttgaaatcgcctctgaggtctggaaagagctgaaaaagctcaatgtggagtacctcacggctcccatgattagggagatcgtcaacacaaagcttgtagagtatgggctggaggaccttcgcagccggtacacccggttaggcatccccgtttataacattacaagtttgattgaaaatgggaaccgcgacaatgccaacatgatgcataacccggaatccattcacaaatatgtggcggatgaggccctaaagcagtatgctctcttgcatctactcccatcacacctggccgatgcacacatgtccggtgacattcacatccacgatctcgagtttttcgctggacgacccctgaactgtctccaacacgatataagggccttcatcaaatacggccttaaagtggacgggacaggtgaccacacgtctgtggccgcacctccttcccatatggagaccttgatgaaccacactggcgagatcatgctggcagctcagcagaatatgtcggggggccaagctatgagcctgtggaacgtgtttgtcgccccatttgccagaggacgaacctacgaagaggttaagcaatccattcaaatgcttgtctacaacctgaacatggcttatgctgccagaggatcgcaggttccattcaccagcatgcagttggaatttggcgtgccaaatttcctgaaggacgtcactgcctacggccctaagggccaggtcgtagggacttacgctgactttgaagatgagaccaggatgattcagagggccttcactgagatcctgctggagggcgattcagagggcaagccccacctattcccaaatacgatctacacactgcgggaagagaccttgaatggggactatgatgatgacatgctcctggtgcacgagcttagcgcaaagtacggaagctcctactttgtgaatatgttgcccgactacagagggcaaatggcgaactatatgggctgccgcacctgtctccaggacacatggaccggggactgggaacaggactgtctgcgtacgggtaacctcgcctatgtgacactgaacatgcctaggatcgggtaccaaagcaatgatgaggatgatgtgttcgaatacttagacaattatatggacctggccgtcgagacccttatgattagaagaaagcagggcctgaactgcttgaataactttgacatcctaccgttcctggaccaggaggttgacggagaaacatattaccgcatccagaacagtaccctctcctttggcttctgcggactgaacgaaatgctcctggcactgttcgatgagggcatagagaacccggatgcgaacaagttcggcatcaaatgtctggaatacatcaatgcaagggccaaagcactccaggaggaaaccggactcagatggtctgtgctccagacccccgccgaatctacagcctaccggtttgcaaccttagataaggagcagttcggagataaggccatcctgcagggtgacaatggcgctaactactacactaactcctcacatgtccctgtcaactctgacattgcgtttgccgacaagatcaagatcgagggccagtaccataagctaacacccggaggacacatcttccatgcattcatgggggagtcctactctgatcctgaggcattgatgagcctgaccaataagattgcccgaaaatccgacataggattctgggcctacagttcagcgttcagtttctgcctgaactgtaagacacttatgaaaggactgagcaacaaatgccccagctgcggcgaatcggccgatgtggaatggtatgaccgcataactgggtacgtacagcaggtgggccatgcgaaaagcgcgaacggcggatggaatgcaggtaagcggcaggaactgattgaccggcggcgatttgagcagtga

SEQ ID NO: 2459 - DNA, 1587 bp, synthetic construct
  source 1..1587: mol_type = other DNA
atgaaacactggattgagcgcatcgccgatgagttgaatgagatggacgtggagaaacatgtcatcgcaagcgggacatcgatctcaggctctatccacataggcaactcctgcgatgtgttcatcgccaacgccataggaaaggccctaagagagctgggcaacgatgccgaaacaatttggatcgccgacgatcatgacccgcttcggaaggtgccttatccattgcccgagtcctatgaccagtacctgggtatgccctactccatgataccctgtcccgagggatgctgcaagaactttgtcgagcactttgagaaaccattattcaatgtgctggatgattacggcatagagatcattcccaaatcgggtttcgagatgtataaagatgggagctaccttgaatcgatccggatctccctggaaaagcacaatgagatcaaggccatctttgaccagtaccgtcgcgagcctttggcagaccactggttgccttacaaccctatctgtgacgaatgcggacgagtcaacaccactgaagcctacgactacgacggagacatcattaagtataggtgtgaatgtggccacgagggggagatggatataaaatcaggcaatggtaagctgacctggcgggttgaatgggcagcaagatggaagatctttggaaccacgtgcgaaccatttggaaaggaccacgccgcagctggaggctcctacgatgtaagtagcgtgatatcagaggagatcttcgactaccctgctccttatccagtgccatacgagtggatcaccctggacggtgaagcgatgagtaagtcccatggggtattcttcacgcccgagcagtggctagagatcggccccgctgaaagcctgaactactacctcttccgcagcaaacccatgaaatctaaagacttttcacccaagatgccgtggctggactttatggacacttttgatcgggtggaaaaggtgttctacggcgaggaggaagccccatcagaaaaagagggcagaaaattcaagagcatttacaagatggcgcagatcaatccagactcccccctgcctttccgacctccattcaggttcctggtcaacgcgtatcagattgtcggggagaaggacctggagaagatttttgccattgttaagaagaacagtcaactcacaaaaagcttcgcagataaggagtttgaagacctcagcgaactggaagtgtctcaatttagtgagcgcgtggataatgtaatcgcttggctcgagaaatatgcgccgaaatttgtcaagttccaggtgcagtatgattccattcccaacctcccgcttcccgacgatcagattgccttcctaaaggacctggcagacctcatggaggagaaggagttctccagtgctgaagaactccacgatagcatgtatgagattctggaaagccatggcctcaaacctcagaaggccttccaagctatctataaaatgattcttgggcagaagcaggggccaagggccgctagtttcctgctgtctctggataaggactttgtggttaagaggttaagacaggaagcttga

SEQ ID NO: 2460 - DNA, 861 bp, synthetic construct
  source 1..861: mol_type = other DNA
atggtgatcttcatttcagaggaggaaatagaaactcttaaaaagcagctcgctgataaggacacaaaactcaaaaaccaggcaagcgagctgaatcacctgaccaatgaggtgattccggagctcaaaaaggacaacaagaagctaaaagcgctgaaggaggagctgacagacgccttggagacaagtaccaaaaagtacttcgatcaattggaaatcaacgcagacctgagtgaatccgtggccaagaagggcgcgggactacagctggctaaagtacgactgaacgagatcgaaaagctcgttgtggagttggagacggcccgcctggaagaggaggagaagaaagccgctattccaacagaggagacggacgaagatgaagtcaccaagatttatcaggagaaagaggaggccatagaacagctgcattccgaaatcgataagctggagaatgaaatcaaagagaaggacgcagagattgaccggaaggaatccctcatcaaaagcaaggattctaagatcaaggagaaaaatgatgagatcaaggacctgaatgacaacgtcatcccctctcttaaggccgaagtggcgtccaagaatgcagaagtgaaagccacccaggaagaggctcagaaagaaatcgatggggtcggaggcaagattgccaaactcgaagccgagataaagaacctgaatgagagcttagacaaaaagaagagggactacgatagattatacaccgaactgaacgctaaggacaagactatcaactcgcttaagaacaaaaaccagcaactgactgagcaactcgaagaggagagcagcaaagggttcttttcaaagcttaccggccggtga

SEQ ID NO: 2461 - DNA, 240 bp, synthetic construct
  source 1..240: mol_type = other DNA
atgagttttgggatggtgtttttcagctgcctggggatctgcctcttctgcaatgagttctggtatggtttcttcctcgtggtgtggggattcgtgtgttttgtcatgtcctttggcatggtgttcttctcatgtctggggatatgcctgttttgtaacgaattttggtacggcttctttcttgtcgtgtggggattcgtttgcttcgtaatgagctttggcatggtcctagttaactga

SEQ ID NO: 2462 - DNA, 2364 bp, synthetic construct
  source 1..2364: mol_type = other DNA
ttgtcaaatattgagacggacgattcatttattagtgaaaattcaatctcgagcgatattaatgataattccttaattaatgagtttaccgcctcaaatcaaatcaacgacaatatcgccattaacgatggcctgagcaaaggcgacaagagccagctgtctgagtccaaatcgatttacgtatccactaacggcagtgacgattccggagacgggagtgagaagagcccataccagagcatcaaacacgccgtgtccaaggcagatgacgattcaatcatatacctctccagcggaacgtacaacggcgagaataaccagaacataagcatcggaaagtcgttatccatctatggagaagattccacgataatcgacggtgaagacaaggcacagctattcatcatgaatagtagcgccaaactgagcctgaacggactgattctcacaaatgcgtataaggacggcaacctcagtgactatggtggggccatcatcaatgagggcggacaactgaccatcatcaactctacaatcaagaactcttatggcaactactatgggggggccatctacaacaacttggggcggctgaccatcatcaactccagtattttgaacaacagcgccattcagtatgggggcgccatctatacactgggggtgaccaacatccagaactcagtttttgagaaaaacaccctcacagctgaaaaaggtgtgggggcctcgatagccgccggggggactatcaccctcaacaataccgatttcctcaataatcatgcgatatactccgcagccgcgcttctcagcttgggcaacgcaacaatcaacaactgcagtttcatcaaccagaccactaactatacagccggggccataagcaatcacggcaacatgtttataaacaacagccttttcttcaactgccgagttcggttctatgccggagcaatcctggcgcctcccagcggccaccatgtcgtaactgaggtctacaataccatctttgactataacaatgccggaaaccacggggctgtgactaacaacttccaggacgcagagattacaatgataaactgtgcgatcaccaataactacatccagaagaacgttttctacggtgatattgccctggatgacaacgctaccgtccaatactgctggtggggccaaaacaacattagctcttactactattccccccactccaataatgaggaccctggtcaaattaacgcttcaagatggctaatgatgacgttcacaagcagcaatggaaacatctcagctgatgaggtgaacacactcactgtaagcattaagcagtactttgacaacgataccaaagaaatatacgaatataacgaggatatcaacctccctcttaccgtgaagttcttcgacgacaataaaaagaccattgccacaaaaacgctgaagaatggtaccgcatcctacaattacatccccgtgaagggtgtcaatgctgtctatgcgcaaatcaccaatgaaatcattgaaattccagttgtgcagaaaaaggagagtaatcttagcaccagcaatctgaccaaatactacaaaaatgagagtcagctggaggctaagctgaccgatggcgacaacaatccgctgtccaataagacgatcagcatcgaacttctgggcaaaacgtacaataagacaaccaacgagaacggcatcgttaagcagaacatcgggctgaagcccggccagtacactgctaacattattttcaaggacccagaatacaagaacaaaaacattacagtgcagatcactgtcttaaagaactcgactagcataagcgctaaaaacctggtgaaatactataagaacagctcccagctcacggtgaagctgctggacaataataagaaagccatgaagtccaaaaaggtcaaattcaccattggtaagaacacgtacaccaggacaacaaatgccaatggagccgctactttcaacatcaatctaaaggtgggcacctataacgtaaaggtgtcatttggcggagatgactactacaagggatcttcaaagacagtcaaggtgactgttaagaccacaaagatgcaggcaaagtctacgaagatccgcaaaaactctaattttgtggcaacatttaaggacgctaatggcaaggtcataaagaacactaaggtgaaattcactttgaataaaaagacctataccaaaaccaccaatagcaaaggacaggctacactgaaggtgagtgtgaaacttggcagctatacaattaaaagtcagtacgcatccactaagacctatggggccactgtctttaatactaagattaaagtggtgaaatga

SEQ ID NO: 2463 - DNA, 918 bp, synthetic construct
  source 1..918: mol_type = other DNA
ttgactattaaaaaagacttactagcgatcggccatacggcacttgattatataatcaccgtcgacgaatttccaaaggccaacaactccgcccccatgaagaccatgctcaacctgaatgggggggccgcggccaatgtggccatgattggcgccagcctgggactcaaatctggactcgtatccgctgtcgggaaggagtttattgactcgcactaccataaagagatgacccggctgggtgtggacactgaggcgatgatcatctcagagacggaaaacacacctactgccttcgtgatgacaaataaaaatcaggaccagattagctatttctactggggagcaggtaaggatttccacgatagtgaagtaccacgagagaagataaaggagtttaaggcagtgcacctggcaacgggcgatccccacttcaactgcaaatcgggcatcgtggccaaggaagaggagcgcctggtgagtttcgatcccggtcaggacctgggcatgtacagtccaaaaaagctcaaggaagtcatcagcaattcaaacatcctttttggcaaccatcacgaaatcaaacggattcaagagtcattggctgtggacattaacggtctgatggagctggggccggaaattgttctcaccacctgcgggaaggaaggaagcataatctacagcctggatgagggcaaattcgagatcgactccatctacaggcctgcagttgatcctaccggggctggagactcctataaggccggcttcctatcccagtttatcaatggcaagacactggaggagagtgctaagttcgcttctagcgtcagctcctttgtggtggagaagcagggatgtcaaacaaacatgcccagctacgaagacgcctataacagaatgatggacttctactga

SEQ ID NO: 2464 - DNA, 1299 bp, synthetic construct
  source 1..1299: mol_type = other DNA
atgacacagataagcgatgcaaaaaagggcatattaacggaagagatgaaacacgtggccaaaatcgaaaacgtgtcagaagactttattctgagatccgtggcaaacggtactatcgtcattccaagcaatgtccaccgcgacatcgaagcatcagggatcggggctggcctgagaacaaaggtcaacgcaactgtgggaacgagtacagacatcgttaactttgatgaggaagtgctgaaggcacagatcgccatcgaccatggggcagactgccttatggaattaagtatcggcggagacttggatgtgatacgccgccgagttcttgacatgtcccccttgcccgtgggaagcgttcctgtctatcaggccgctatcgagagcatcagagagcatggctctgtcatttacatggatgaggatgatctattcggcgccattgagaagcaggccaaagacgggatcgactttatggctgtgcacagcagtatcaacattgagaccctgacccgtctcaagcggcagggccgggtaacgggtctcgtaagccggggaggatcattcatgtccggttggattgttgagaatgagaaggaaaatccactgtatgctaactttgattacgttttggaaattgccaaggagcatgatgtggtgctgtccctcgcgaacggtatgagggcggggtccatcgccgacagcactgaccgggctcagatccaggagctgatcatcctgggagagctcattgacaggtcccgggaagctggcgtccagtgtatgatcgagggaccaggtcacattcccatcaatgagataccaaccaatgtgatgattcaaaagaagatgtgctcaaacgcccccttctacatgctgggccccatcgtgtgtgatgtggccccaggatacgaccacattgtctctgcaatcggggcagcctcgagtgccaaggccggcgccgacttcatctgttacgtaacccctgctgagcacctggcgctaccgtccccggaagatgtgaaggagggcgtgattgccacccgaataggcgcctatgcaggggacctcgctagcgggcagatagatggcagccaagacctggccatggctgaagccaggaaaaaactcgattgggaggcgcagtatgagtgcgctatgttccccggcgcggccagagccaaacgcgaccagaggcctcctgaagaggaggacacctgtacaatgtgcgggaactactgcgctgtcaagatcgtgaatcaatggctggaccagtctgattcggatcttattaaatga

SEQ ID NO: 2465 - DNA, 1062 bp, synthetic construct
  source 1..1062: mol_type = other DNA
ctcgacgcattgcgggccttagcgatcatctgcgtaattgccatacacgcttacgcatgctcccgcaatttcgtgattagcgagttggtggggaacctgccttccctgaactggattatcattcagttttccggcaatactttcagaataggagtagacctgttcctgatgctctcaggggctctgtctctgggaagggattggaagatgaaggacttctttgctcatcgcttcccccggatagtttatccatttctcttctggagcatcctcctcggaaccatctttcttctactgtcctattatgatagttttaatgtgatcagctcctttgatctggtgagcattgccaattacttctacggagtctttatgggcattatcgacttcgcgaagccctattggtacttctggatgattttggggatctacctgataatgcctgtcttcaacaaatggattctgcactctgacctcgatgaccttctttatttcctattcttctggcttattacgtgcctgtttgactatacattaggcgtggagtttcccatcagactgtcatactttaccagtccgattggtctggtggtcctgggctactatttgcgatataccaggagaatcatcctaaacaaccagtattttgcattgttcttgattatcttcagcagcctactgatgcttgtcctttcggccatctattcgacagacactcatttctacaactttaacatctactccattttagtcagcatggaagttatcggagtgttcctgctgttcaagaacttctacaagtttaatctgaacatcgggttcttctcacggccagatgggttcttcaataaatcagtttacgccctcgcccgatacagttacggcatatttctgatccacaatgcctttatctgtgtgctggtgcactacctgggcaacaccggcatccccccagtcctctacatgatcatactgtttgtggtgtctctgctctgtagcgtgatcgtcatggctgtactcagtcgcattccttacctcaacagggtgatcggtgttaaatga

SEQ ID NO: 2466 - DNA, 930 bp, synthetic construct
  source 1..930: mol_type = other DNA
atgagggatatcatgctcgagaacactgataatgagaagggcaaagccatcatcgaaccggaaattggaatcaccatcaatgggatatcctttaatcacaaactattcgaaaccctggaatccctctcacgaacatactcgcagagaaaaaccgctaaggaactcaaaattgcccattctgtgttgaaccggcgtatcaagaacgctgaggacaaacttggtgaaaagctcgtggttacgattggttcaggctcggagttaagcccaaaaggctacgagttgcttaatgcgtaccacaagtacaagaatcgcctggaggaccgcgaggagatcgtcattgccgggggccacatcataacgggcctgctgcaggcaatcagctacgacctgcccttcaagacactcatctacagcagtgacgatgagagcgcttatgagcttgcaaagtctaaccagatcgatatcctggccttagacgatccattgctcgcctttgagaacgacctgaacttcacagcaatagcctacgaccatctggtcctgatctcccccaaaaaggagaagcctattgaaaagatacgggacctgagcgatttggagtttatcggagtgaagggcagcgcccaaaggctagcttggagtactctcaaacaggagaacattccattcaacattgttaaagaggtcaaatcccagttcgatgcatttaagattgtgaagaactcagacgagtattacactttcctgaatgcgtcctatttcaacgggaatgaaatactgaagaacgagacccggcacgtaatcagcctggtgcagtgcaacgatgagaaggaagacatttataatctgatggaatatctgcttatggacgggcagagtcagatcggagaacaaggatttgtgcccatgaaaccttggaagaccagatga

SEQ ID NO: 2467 - DNA, 591 bp, synthetic construct
  source 1..591: mol_type = other DNA
atggaatacatgaaggacgccatcgaggccattctggataacatacgcgacgccgaggactacctggtggaggaggatgtggccacatttatcgacatcataacctcatgcgagaatattttcgtcactggcgcgggacggtccggtctcgccgctaaggcattcgccatgagactgatgcatctcgggctctccagctacgtggtcggggagaccattagtccagctatcaatgctgatgactgtattctggctatctctggcagcggcgagaccaacaccatcgtgactgcagcgaaaatcagcaaaaaccgcggggccaaggtgctagccctgacaagttaccccgaaagcaccttaggtcagttggcagattgcgttattctagtaaaagggaggacaaaggtggaagcggacgacgaaaactatctgaagcggcagatcaagggaaattatacgtccctgacaccgctcggcactgcatttgagctgacctcactggttttcctcgatggcatggtgtcggaacttatgaacgccatgggaaagacggaagctgacttgaaacttcgacacacggtcctggagtga

SEQ ID NO: 2468 - DNA, 1107 bp, synthetic construct
  source 1..1107: mol_type = other DNA
atggaaaagaaaacgaccattatactcgtgattctaatcgctctgatcgcctgcggggtgggaatcacccttttcgcttcaccatcaagtatctcgacagatgggaacaccacaatcactgatatggcaaatcgaactgtcaatatctccagtagtgttgatagggtggtggccacaagcccacctatgaccaccatcgtttatatgctggcacccgagaaactggtgggcgtcaacttccagtggaccgatgaggaactcaaatacgtcccggatcagtacaaggataaattccccgtgatcggtggatggttcggaagtcaggacgggaactacgaagagtttatcgcctctgagccgaacttggtgattgagggtattgacgaaggaatgggtgtggacctatcaactgttgaagaaagacaggagaagttcggttcactgcctgtcgtggccgtaactgacaacacaaatgtcacaaagatcgacaacacgatagagttccttggcaagctgctgggggccgaagataaggcaaatgagttaatcgcatttaatgacaagtatttgagccaagtgcaatccaccgcaagcagcattcctgactccgagaagaaatccgtttactacgcctctggggaggatggcctctccacctacgccagtggcgcctcacatgggcagctgatttcgcttgtgggaggcaaaaacgtagccgacactgaagttaaggatagcggcagtgaactgacggtatccattgagcaggtaatgagctggaaccccgatgtgatcatagccacagacgaggacttttacaacaaggtgtacaatgactccaaatgggctagcgtcaaggcggtgaaggaccaccgggtctacctgagcccacagtcgcccttcaagtggtttgaccgcccacccggcgctaacatcattatcggagtgccctggaccgcgaaggtgatttatcctgacaaatattccaatatagacatggtcggcgcgacgaaagagttttatagcaacttctaccactatggcctgagcgacgagcaggctaaagagatcctcaccagctccggcctcaaggggtctgatttgtga

SEQ ID NO: 2469 - DNA, 1026 bp, synthetic construct
  source 1..1026: mol_type = other DNA
atgagtgaaaactcttcctttagcgtggacaatctggttatttatctgctgctaatagcattgccaatcttccttttctttgtatcattcatgctggggaggtaccctgtggcccccatagatgtgatcaagaccattctatccccgatcttcccctctcttgccgtgtctcctgagctgaatagcatcgtctttaccatcaggctgccccggataatcgcggctctgctggtgggcgctgccctcagcatagctggagcgtcattccagggaatatttaaaaacccgcttgtctcgcccgatctgttaggagtgtctatgggcgcagggtttggtgcggccattgccatcttagctaacgctggtaacgcccttatccagctgagtgcctttgtctttggcctgatcgcagtgttcattaccttttccatcagcaagacatacaaggccggaggaatcctgctcctggtgctctcgggcactgctgtcagcgccttcttcaatgcactcatttcaggagccaaattcatggcagacccttatgataaattgcctcagattacctactggcttatgggcagtctctctgccgtgaattttgataagctggctatgataatcatcccattggtgctgggcatcattgtcgtgatgatcttaagatggcatttgaacgtcctctccatgggcgacgaggaagcccaaagcttgggtctgaacccatcccgcctccgcctgatcgttattattgcctgcacgctggtaacaagcgctgcggtttccatcagtgggatcatcgggtggatcgggctggttgtgcctcacatgacgcggatcattgtgggtccagaccacaagatcctgattcccgcctccctcagcatcggggcaagtttcctactcctcatcgacaatatttccagaactttcatatcaatcgagattccaattgggattctgacagcaatcattggcgtacccctcttcctttacttgctgcgaaaaggctatagcgagtggaactga

SEQ ID NO: 2470 - DNA, 831 bp, synthetic construct
  source 1..831: mol_type = other DNA
atgacaaaactggtagaggttaaagatgtgagtttttcctatgacaaggactctccgattgtctttgagaatattaatttctcaattgagaagggggatgtgctgtgtattctcgggccaaatggaactggcaaaaccacgctgataaagacattgaacgggctgcacaaggtcaattccggggagatcctcctaaacggaactaacatcaaggagctgtcattcaacgacatcgccaaacttgtggggtatattcctcagggccatattccctcgtttcctttcaaagtgttcgacgtggtcttgatgggccggtctccctacatcaacctgacagcttccccacgcgaggaggataaggaaatcgctctcaacgcgcttaagacgcttggtatagaagacctgaaggacaaaagctacaccaacctaagtggcggagaacgacagctggtcttcctcgcacgggtgctggctcaagagcccgacctgttaatcctggacgagccgaccaatcacctggacttcggaaatcagatcaaactcctcgaaatgatcgaacagctgtccgagctaggcctcgccgtcatcatgagcagccattacccagatcacgcctttctggcggccagcaaggtggcaatcatgaaagacaagagctttattgatttcggtacccccgaagatgttttgactgaagagaacctgaataaggcctatggcatagatgtgaagcttgtggagttggaagacgatagaaaaatctgcgttcctttaaggaccaacctcgagctggtaatgagcaactacagcaagaagtacagtaaggactga

SEQ ID NO: 2471 - DNA, 573 bp, synthetic construct
  source 1..573: mol_type = other DNA
atggtcagtgtcgaagactatgaggagcaactggctaaagcgggtgagtttcacggagagatctgtggaggaatagctatcggcacaaaactcgccatgtacgggatggagctgatgggcttcgagctgaacaagcgtcataagaaccttatcgtattcctggaaatcgacaggtgcatgagcgatgccgttcagtcagtcaccaaatgttctatgggcaaaagaagcctgaagcagatgtactacggtaaatttgcagtgactttctataacatggacacaggggaggccattagggtgtccgatgccgatgccaataagcaggagaagaaacgagaaaccagagacgaaatgattgaacggtttaagcgcacgcctgcggaagagctattcaatgtggaaaaggttcacgtagagttgcagccctcccagatgccaggaaagccccacaccagcgtgttctgctcggtctgcggggaaaaggtgactgacggccgccatgtgaaccggggcgggaagccggtgtgtattccatgcgcagagggcgcttattacgagctcatcgatgagtga

SEQ ID NO: 2472 - DNA, 4188 bp, synthetic construct
  source 1..4188: mol_type = other DNA
atgaagaataagagtctgatcctgatttctttactgcttctgattaccatcatcagcataggctctgtggttgcaacggacaatgaggagattaatatggataatatcaacaacattgataataatgaggatatcgctaatattgacaacgtcgataatgtcgataactccaatataaacaatccaactgacatccgtatagacaattccaacctcaatcgcgagactgagctagattcaaacctcaacaaatctaatcagattagggaagacgaactggaacaatccaatgccaaatccaatctcaaatccagtaagctgtcctccacaatcactgtggacggctcagatgagaaccagatgtctaatcctaccattcagagtgctatcgacagtgctaatgctggtgatacaatcatcataaccgggaagtcatatgttcactgccacttcatagttaacaagccactgacaatcataagcgagattggtacatcaatgagcccatgccctagtaatacaaaaggctctggggcacatggcattttctacatcagcccggaagctagcggaacggtcctaaagggattcaatctaacaaacacctacggggactacgacgactatggaatcctcatccgcggagctgagaatgtggagataatcaactgtactatcaacacagtctccgacggggacggaatcaggattgaaaacgccacaaacaccaaaatcgctgactgcttgattaaggactcaaacattggcattaacattacaggtagtagcaagaccaccgtaacaaacaataacataacgaacaacaaggtcacaggggtcaatgtgggaatcaacaacaacgataccacgattcacactaacaacatcacatacaaccagcattctggtatcgacctctactctggtgattatgtatacatcctcaacaactttattggtcacaatcagaactctaaaagctcaagcggcgctgggatatacgtgaactcaaatatcaccaaagtggagatcaaaggcaacttcctcaagcagaacggacagtacggcgtcctcaacgactatcgtgtgagaaacatggatgcatcccggggagctgaaaccctcgagataaacaataacaattactatctgggacataccgaacggatcacctaccatatcgagtactccaagtacgccggaggccccttcacttacgacagcgagaatgacctctacgtctatgtgggggacggaaatggagactgggacattggcaagacggtagtctacctgggatatgcgttctacagagacgagaccgtttgcggctcgactctctttaaagctcccagcaccacttggggaacggaggtctacaagctggagatcagtcccatcagccaggtcaagaagggggtgtactctgtttcgattgtagacgtcaacggcatcgtggcaagcgacatatcgtcgatatacgtgactttttatctgaacaaaaacaataccgatgccgagcctcaaagtggagacatctacaaaactgtcctaatggagaacgggacggctactgttaatctgaccgacaaagagtttaaggagagtggcaataagatcaccgcatgtttccccgggctgtataacgtgtacaccatcaacccctatgcgacctttgatgtaaacgactcagatatccctgggagctatcggaacaccaccatcaacgcgaccgacatgagtctggtgccaaactctggaaacaagattacggccaggttaactgacgagaacgggaatcctgtggctggcgaaagcctgcaattcaagatctctggcatttcgactacctatacaagaactacagacgaaaacggtgaggcgaatctgaaggtaagcctctccaatcctaagacatacacggtcaacatcaactttaaaggcagtgagaactataacaaaagctccaaaacaattaaattaaccgtgaaaaaacagacccccaagatcgaatcgagcaacatagatcttttgcctaaatccggggagaattttactgtgaccctaaaggacgcaaacaacaaggcaatcgccaataaagagataagctttacactgggcaagaagacctacacacgcactactgatgaaaatggtcaagccagtctgaagatcaaccttgccaacactggaaaatacacaatcactaccaaatccgaaaagacatcgcaatacaacgaggtgtcaaagtccaacacaattacaatcaagactggggccaacaaagtgaatatcgagtcctcagataagacctacattccgaaatccggggagaattttacagtcaccttgaaggacgcgaactcgaaccccatagcaagcaaggaaatctcctttaccctgggcaaaaaaacatacacccgaacgaccaatgaaaatggtcaggcgagcctgaagataaacctggccaacacgaagaagtacccaattactacaaagtatgccggagatgacacgtattcctcagctagtgccgagaatacgattacgatcgcgaaggccgctgccgaactgacgacttacaacaggacatatatcaacaaatcaggacagatgttcagcgccaagcttacggataaaaacaatattccattggaaaatgaaaagatcagcttcactatcggcaagaagacctataaccggaccacagatgcagatggcttagcatatctgaccattaatcttgcctacgataagaacatcagcacgaaattcctggggaacgatcagtacaatgccaaaacaaacacgaatagcatcaccatcaccgatgagatagaaaccgcttatatcgataagggccttaagaacgacgagattcagcgcatcatcgatgaaattaagcccaattacgacgttaaattcttgggggacagttacgacgatgtcaacctgaacattaacaaaacccttcttatctacaccgacgttaataccaccctcaatggcaagtcagccagccctgtgttcaatctgcgaggggggaatattggagtgagcttctttaacataaatgtgaactccacagatggggagggttatggcatcatccttaacaataccaaagaagcagtgatagatggaaacactatttccaacatattggattcctctaaaatgactgattacaacaatggcagcacaatactgccagggcacggcattgagattctgaacagcaaagccaccttgattgaacagaacaatattgaccactttgaaagcggcatctatatggaatacagcgatgatgccgtgatccgggagaataccattactgagaacaattatgggatcaagtacggctttggtaactccaacacccagatttacaacaacacaataattgacaatatcggatggtacacagaggaggttcccgaaggcccgaggggctacggggcattcctgaataactcagccaccaacatcaccatcacagataacaacatcagcaacaattacatgggaatttccgttgacgccaacaagagcaccggcatcgtcatcacccgaaatctgattgccgacaactcactggagggtatccgcttcaacgagggctatgacctggccgaaaatgcaattgagccagtggtaactgacaatgccatctatcggaatgccgagggccctagcctcatgattctgggtgagatgtccgcgaatccaaatggaatctatggggccggccagtgggacgacagcatgaagttgaagatcgatcccaactggtacggcgtgaacaatctcaggacctgggactatgaaaccggcattgtgggggttggcaccatgtgtccgagaatcaagtccacgacaatcaagttcaacaccctggagtatgaaaacggaacttacaagatcaatttctataaaaacggcacttttgcaatcaacctcgctaaattcgacatctacgccactatcaatagaaatacagacaagaaggccgaggtgcacttctatgtggaaaacggtactggtacattcagttttgataagagtaactacctcgactctaataacacgattgaaatctctgtggggtctttgattaatgtggtggaccgcatttatagtgtggtgtacgcttatgacgtgcccgattccgagattcccaattga

SEQ ID NO: 2473 - DNA, 1341 bp, synthetic construct
  source 1..1341: mol_type = other DNA
atgggaggtatttatatcatcatgaagacttttagacaacagctattggaagaccctgaatttcagaactacctgctgcagcgcccaaacctgacggagagcagcctgcagtcatacctcaatgccgccaccaacttcgtgcgcttcacaggggagcctttctacaaaaccgtgcatgagctcagaagccagcagaacgatcgaattgaaaacaacatcatcatacggttcaacccgaatcagtcccggataaacatcatgcagtttgagtttatagaatacctcaagggacgtggctgcaccgaggtgagcattgactcctatgtgaggtacatgagaaccatcctgtccaccctaggaatcattctgcccaaatctccgaaactggacgacactccacaggactggtatctcctgacaaaggacgacattaaatatgtactcgatacagcaaatctgcagtataaggccgtgatcaatttcgctgccgttacaggtctgagagtgagggacatgcgatcattgactatcaaggacttcatgactgctaccgaggagtatcatggctgtacggaggtcgaggactttctggatagcgcacccgacgggatgattggcttctgggagctttttcctcaaaagaccagaaagttccggcttccctgcaaagtgtgcaacaccccagaatccagcgatctcttactttttagtttgaatgagcgggtgaagtactttgaatggaaaaatgagaaggatggcactgacctgaagatcaccaagaatgatcctctctttgcaagccgccaacgcaaatacaagaacttcatagcgcccaattcgatcagttggaccctgtcccaatacagcgagaaactgagcgccgagagggaacgtgtcttcaaatacaaactggagcacggcgagatcagtcaggagacctatgacgaatccgttgcgacgatccccaagttccacgcgcacgggctccggaagttcttcatctcaacattggctaagaaccgagtggatgcccgcattagtgcactaatggaagggcacaaggctccactggtaacggattcgcactacatcaacaatgattacctgaaggagacaatcaaggaggagtatatgaggtgtattcccgatttgagcttcgagaatgtcgaagtccggttccttacaagcgaagaaaggaaatccttacagcagaagatagatgagctccaggaagaaaacgaaaacatgaagaaagacatggagaagtacattgacgatgccgtccatgaaaagatgaaagacgcctttgagaactggctgaacattcaggactcaaaatga

SEQ ID NO: 2474 - DNA, 297 bp, synthetic construct
  source 1..297: mol_type = other DNA
atgaatacactgaaaattgaatgtagcaaagatgactatatcatcaagaccgccaaggccaacagcgagaatgagttgaaagttgaagtgccggagaactggaactgcgactatgtgaacgctgtcctgtgggaggaggacatctgcgaagtgctggaaaagggggatgagcggatgctactcatccccatgtgtggcgaactgcttctcgagggagtgcaggaggacgagtacataaagtacatctgcctcccagtaaaataccaagatcagatggtcctgattgcaaagatttga

SEQ ID NO: 2475 - DNA, 885 bp, synthetic construct
  source 1..885: mol_type = other DNA
atgggaatgaagaaggtgaagatcgaaagcaaagcaaaaaacaatatgacacggaacgaaaaactcttctacaaactgtacgacgacctgtacaacgaagaccggctgatcttattctccacatactttaacatttatgataaatttatttttaaaaaagatatcatccactatgtgctcatgaactacagcgagaatgaaatcatcgaagccatgaagaaaatcgatgagattcagagcgagggcatcgatatcaagaccttcataccgaagaagtattgtcccaagtgcaaaaaggtaatggacagttatggcaaaatctgcccagactgcggtacaatcctgatagaggacgaaaagaaaatccaagagctccaggccaaagataaggcatatgaagaatatctcgaaaaggagtacaacatttacctccagaactcatatcacaacatgatccaagggtcatacactattaagatacgaacgaggaagcctaagacggaaacggagattgtgcgcatccccgcgcagacagtcacatccagaggcaagttcaattcgatcagccagcattacccaagtgaaacctacaccaggcagaaggtgactcgtgccaagtacaaagagtgcagagtcctgtttgacaaagagaagatgatactgaatattgacggaaccgccactaaactttactatgacgaggtgtgtgagttggagtaccctgagcaggaggtgaatgagcttgttaccctgaccttgcacaatggcaccgttctgactttcaaaattaagaacgggtggttcgcttccgataacgagaagaaggcccgcttcgacgctttcgtcaagacctttattgagcaggggaagaatctgcccctatga

SEQ ID NO: 2476 - DNA, 828 bp, synthetic construct
  source 1..828: mol_type = other DNA
atgaaaacacaagatctaattaatatcattaatgatgaggaaagccctgtgttcctcaacagagaagtctttgagatggactatgtgccggacatctacaaatacagggacgagcagctggcgaaaatggccatgtactgcaattcaatacctgacaacatagcacccaagaacctgcaactctgtggaggcaatgcgacggggaaaaccacaactttaaagcagttcttcaagatgcttaacgaggcatttccaaacatagtgacagtgtacatcaactgtcagctgttcaacacggaaaacaccgtgtacggaaaaatctacaacaagctgtacggagtaaaaggctcgatcaacgggaagagtaacaccatgctctttgacaagattgtcgcacgtcttaagaaggaaaataaaattttgattatcggcttggacgattttgacagtttcaagtcacgcgatgggctcaacaaaatgctttacaacttcctgagaatccatgaggccgaggaaggcatccagatctgcatcttcaccgtcagcaacaaggagaatctgaaactagctccctccgtcgagactatcttcaatcgggttcccatattctttgaccagtactccttggagcagatgtatcacatcctggacgacaggtgcgccttcggtttctatccaggcgtgatcagcgatgagctggtgcgagttgtagccggcaagtcctatgacctgggcaatctgcggtatgggattaagctcctgagcgccgccgggcagaaggctgaagtgtttggtgatggaaagattattcgcaattttctcgattga

SEQ ID NO: 2477 - DNA, 858 bp, synthetic construct
  source 1..858: mol_type = other DNA
atgtttctggagaaatgcgacggaaaggacaccatcagcatgtcccttcaagagaagatgaatctgattctggaaactatggagagcaaaggaagccccttcatatcctgcatccattgtaacattcccatcaatgaggcagaagaatggtacaaaaacggtgagatcggggaccaggacttcatcaatttctatgatgacgtcaacctgatcgaggaaagttttgggttcgagatctataagaaaagcgagtacccgacactccacacgcagagcataaaccagatagcctcgacctatccaatgaaccggacccaaaatgagaagacacctctcttcctccgaagggagagaaaactgtacgagatcactaacatttttaagtcccacagcaccaacgaaattttcatcagcatggatagcaagtccaagctaaaacatgagattaagtacgattttactcttaaggaactgaacgagatctttaaaaattatctcgaggaggattgctcaatctacattctgaacgataatagggcgtttgtgatgaccttgggccacttccagttcgaatttgacgtgtttggtagcgccaaggagagttatgtattcgacgtggaaatcgacgatgaaaaatacgacaagattttcattcggagttcatactattttaacattcctgttgatgagctggacggcttggccaagatactgaagcagaagcgcatcatcgaagaggggtttttcgaaggccagttcttataccacacaccaggaaacggcatgacatacggcgaccccgtcagaatcatagaaaatgagatcgagaaatacgctttccgcttcattacgttctga

SEQ ID NO: 2478 - DNA, 219 bp, synthetic construct
  source 1..219: mol_type = other DNA
atgcaatattggcggattgtcaattacagccccctcgctgtggcatgcaaaaaaaggaagcactggacctgtaaccattccttttacgccacattttacatcctgaactttcagatattcaagatcttgctgttcatggccaagcagcagctcttaagccgcatcgacctgaatctactgttccttatatatttccagaacttcctcctgattatctga

SEQ ID NO: 2479 - DNA, 168 bp, synthetic construct
  source 1..168: mol_type = other DNA
atggagaaactgatagaaatcgacggggtccagtacaccgaagcccagatccggagggctctggccattgagcgagacgtgcgcagtcccaacttcgtggatatgctcctgggaaagatcaaaccatccgagctagcaagcagagtaagcgagaagggcgacgcgtga

SEQ ID NO: 2480 - DNA, 156 bp, synthetic construct
  source 1..156: mol_type = other DNA
atgtgctatgtgggcaacacccggacactggtctaccacacggaggactgcttctgtaaccattggctgctaaatgagaacaagaccatcctcgaggaaaagccggtggatatgaaaccctgcagcttctgtaaaccacagtttgacactgaatga

SEQ ID NO: 2481 - DNA, 225 bp, synthetic construct
  source 1..225: mol_type = other DNA
atggttgccgagatggtagaaaacatcaggaaaggtgaaggggacggatatagcatctacccgccctttagctgcattgtgttcctacagggcaaaaagtactccgaatgttgctgcaaggctgaggcccgagaccagaagtttgcactggtgaacctcgtgggcttcagacgcgaggatgtcaaggtcatagacccacggaccaatgaggagctgttcgtgtga

SEQ ID NO: 2482 - DNA, 162 bp, synthetic construct
  source 1..162: mol_type = other DNA
atgagcatgttggccgacttcgagcccgccaggctccacaagcggacatgggctgaacgccatgatgtcgaaatcctcgctgtaatatgcctggccatcagcattgcaatgctacttctgttctttgcgctggcagagccaaccgtggccggcgtgatctga

SEQ ID NO: 2483 - DNA, 453 bp, synthetic construct
  source 1..453: mol_type = other DNA
atgacaaaggaatttgaggacttcatgagaaggaacacaggactgcttgtcttcctacggtgggacacggtggcctatctgaaatacctcgagtcccattatgatgagcgcaagtacgagtgtgcttaccgattgctcgaggcgatcgataatctctttgacttctatcagataaccttcagcaaaaagactgaacgggaaattcccgaccaattatttgaaaaggacaagataaacaaaggcttcctgtcacacatcggtaaggcttgcaaaaagcagtcggatttctacgggcagcggtggaagtccacccgtggaatcagagatgcctacggccactatagtgcaggcaatttcctgtttgccgacatctacgggtgcctgcaccgcatcagcgacgattgctacaggattctgaactttagcgagtatgaaattgaggagaaagcatga

SEQ ID NO: 2484 - DNA, 756 bp, synthetic construct
  source 1..756: mol_type = other DNA
atgaatgagatcgtgactacaactaacgagaacaatgtacctgtggatgtagactatgccatcgaggaatggaaggcataccagcgattgacgagagagctactggacgaaacggattaccagacacaccgcggccggaagtacaagaccaagagtgcttggcaaaaatacgccagagccttcaacataaacacacagataatcgacaaggaaatcgtcaaaaatgacaaaggaatcgtgattgaggctgagtatactgtgagagccacactgcccaacgggcgcttcgtcgagtcagacggcagctgcgaccggcgcgagtccggaaagcgagaaatgtccaaccacagtattaaggcgacggccaaaacccgtgctaccaaccgggccatcagcgagctcatcggggcaggggacgtcagcgctgatgaactggacccagcattcgataaggtgcagcactcgaagaccaatcatgtcattgaggcggaagttgccgagataattgaatctccgtatgataaaaatgccggttttgagactgccgacaagattgagccagtggatgaggaccctgtttgcaagaattgggtgaaaaccatctgtaagacaatcaaggcagagggcaaaccctgccttaaaggtgtgctgatccagaaggctaggaccattggcaccatgaccgacgaagaaaggaacaggctgatcgaatacattaagacactccccaaaggagaggtgaacctcgatgattga

SEQ ID NO: 2485 - DNA, 231 bp, synthetic construct
  source 1..231: mol_type = other DNA
atgattgagtgcatacaggaagagggcgacttcaccgattgggaagtacccagttcctcttccgacatcaagtacattgtgagcgtggatgatgaggggaacctgttttgcagctgtccagacttctactacaggaagagccgcatgaacccgcatatctcaaaccctgaatcgtattgcaaacacatcagacaagtcctagaggaggacaatcggctgcagatgctctga

SEQ ID NO: 2486 - DNA, 1005 bp, synthetic construct
  source 1..1005: mol_type = other DNA
atggataacattaataagacaaagacaagtctggccaagttcgaagagtttttcagcactgtgtacaaggacgaggtcatggaggttctggaaaagtatcccgaggaacgcaccctggtggtggactatgagaatttggaaatgtttgaccctgatctggcggacctcttaatcgagaagccggacgaggtgatcgccgcttcacagaaggcaatcaagaacatcgacccactgatgaaagatccaaagctggacatcaaattcaagaatgtgagcaactgcattgattttgtgaatgccgacagcaaatacatcgggaagctgatatctttcgaggccaaggtcatggaagcgaaggagcctaaacccattcttgacattgcagtctacgagtgtaggggttgcatgagtttgcgagaaatcccgcaaaccatcaacagcagccttgaaccctcactctgtcccgagtgtggagggaggtcctttagactgctacaagatgagtccgagttcttggaatcacagctactcattgtcagttcggacgacacttccaaaagcctgaaggttcttctgctccgggatgaatgctccttcgacctgtactccatgggtcaggaggtaagaataacgggcatactcaaatctttttcctctaactacgggtacgagtatttcctggaatgcaatttaatcgagatcctcaacgattctgaggattccgaatacgacgaatatggcaaccgcaacagtcccgagtaccgaacctggcagaaagtagtgatcgattcagaccgcgtgtgccagtgctgtggaggatcgaagcacctggaggctcaccacatcttcagctatcagaataatccaagttaccgggtgaacttggagaacggcattgctctctgtaaatggtgccatagcaaataccattcctattacggcaaggacgcctctcctaaaagccttattcggttcctgaaaagatttgggaggtatgatggctga

SEQ ID NO: 2487 - DNA, 435 bp, synthetic construct
  source 1..435: mol_type = other DNA
atgatggccaacaagatcagagtgaatctcacagtcgaccccaatctgtggcaactggcaaaagacaagctgccgtgcagccggagcgaatttttcgagaatcagctgaagatgttccttggcattgaggatgacgagagcgagatcattaaggacatccagaccaaagaaaatgagattaacgcactacgggacaagctgtgtcatgtgcgcaaatcaaagcagttaaaactcgaatccaacaaatcgatggagaaggctatggcctccctgaaccgaatgcacaagaaatacgggaaaatcggagagaaccagatcaggaacctcgcccacgttcacaaggtggatttcgatgacttgaagaaggaatgccaggacaattgcatgaacatattcgaatttgcggaggtaccaaagcatgatagtgtcatgtga

SEQ ID NO: 2488 - DNA, 420 bp, synthetic construct
  source 1..420: mol_type = other DNA
atggagctctttctgatgacaattgggagcttagacaactttggaaagagtgatggtgagaacatgaaccccgaagatttcgactgctctgtattctttgaaatgtacaaggcactgttcgagatattggacgttgaagtgggcagcttcgctgagctcttggatgtgtacaaaaatgtggagatggattacaccctgaaacgccatgccctgaaacaaaaagaaatcctgtactggttcaataccgactggaaggaggagcttggcaaggaaaagccaactgagaaggacaaggagaaatggatcaggcagaagattgggtatgactcattcgtggtcgagcagctggaagtcaagctcaagcacatcagacggatgtatgaaacggcgctaaaacactcctttgaggccatcaaatga

SEQ ID NO: 2489 - DNA, 276 bp, synthetic construct
  source 1..276: mol_type = other DNA
atgaatgtgaaaacagtcatgaacgaccttatcggattgtcaaaggagttcgagggtgtggaatatgagattgaaagcaaaaacagtatctacttctatagctttccaaagtacatgaaggaaggcattgtaatcctgaaatactccgccatctacgacctgcacaccatactaaaaggcatggatgggatcatagtcgacattctggaggttgaggacaaccccggggatgagaagaaggatctcctctatgtgcagatcgaggtgaaggaatga

SEQ ID NO: 2490 - DNA, 234 bp, synthetic construct
  source 1..234: mol_type = other DNA
atgattagcgacgaatgggaagaggagtactatgtaaaggtcaacgaggagctggagcaggtggaagtgaggtttttcagcaaggtggaccgcctcgtcttcgcgcagtcctactcgagttcatctagcttctcctttgaggaggcagaaatcctgtgcgaccggatatgtgacatcctgaccaacgatctagggaatgccaaatattacctcggaggcaaagatgaactttga

SEQ ID NO: 2491 - DNA, 150 bp, synthetic construct
  source 1..150: mol_type = other DNA
atgaattatcgcgaatgggtcgccagtcagttcgagctgaggatgacggaggatggcagagtgtgcttcaaaacaccctgtagctactacacctttagcaaggaagactttgagataatccgggaaatgttcctcaacttcgagtcctga

SEQ ID NO: 2492 - DNA, 174 bp, synthetic construct
  source 1..174: mol_type = other DNA
atggatagaatcaaagaactaaatgtatgcggcacctgcaaacacagccatctgattccagacatcaacggcgagatagccgtgaacatctgccggattgggagcgaggcagtcaacaaggacggtggactcacgtactgtgtggactggacaccccgcaggaagctgtcctga

SEQ ID NO: 2493 - DNA, 336 bp, synthetic construct
  source 1..336: mol_type = other DNA
atgctctccaaaaaagaagccatacagatgacgctggacaatgagaagcactatccagtgaagtgcaagtactgcgggaagcccttcaccaagtctcacaacaggcagatgtactgttccgacagctgccggcggaacgccttgagggagcagaaggcacgctaccaggctaaacgtagactaaaaattaagcagaaagtgctgatcgtcgatgaatataagaaatacgggctcggtagctatggcacaagtgcgaacggccacagaaagaacaatttttcacatgagtacatggccatccaaaaggagatgaaacgcatcggactgaagcgatga

SEQ ID NO: 2494 - DNA, 552 bp, synthetic construct
  source 1..552: mol_type = other DNA
atgtacttggcgaagttctgccccaactgcggcaataaggtagaagaaaatgataaattctgcatctattgtggaaataagctcagagttataatccctgagaagaaagtgaagcgcagctccaacagtattaatgacgagaagactagcaaatatgtggaggtcatcgatgggctgatgcgttataaggtgtttccatcgagtctaccagtgaaatatatcatctacaaggtgaattacggcacaacgtccgacgagattaaaaatatactggaaaacggtaactataactacaagattaatatccattacttcctccagaacaagaagctgtacttccggagccccaaaaaccccaacatgtttttcaaattccataatgacagattcaatgaggagatgaggaaggacaacaaagaaattatccacatttccagctacgcaagggtccaccgcccgtcactgaccaagatatttaactttaaccaggagaaaaccttcatccttgccaacaagcactttgaggaaaacatccgaaagacacggctgtga

SEQ ID NO: 2495 - DNA, 237 bp, synthetic construct
  source 1..237: mol_type = other DNA
atgatgatttatgataaagcgacggtcacaagcctcatagtggctatcctcctgcccttgatgtcaatgctaggcatcggcgaactgactcagaactacatactggccattgtgagcggtatgatcgccctggtggtctggtactacaatgagaagcacaacagtgacctcgtatccgggaccaccaagtgcgactgcgagctttgttatgggggagacgatgaagcactgatctga

SEQ ID NO: 2496 - DNA, 339 bp, synthetic construct
  source 1..339: mol_type = other DNA
atgaagcatctatatgagataatcccctataggcggactgtttggattacagggtttctgaagaccacagtctccagcgcaatgattaccactggcgtcgtgatactgttcaatagcattaccgagcacccatacttcatggagtgggacgaaatcggaatcgtgttgggcatcgtgagtatcaccatcgcctgcatttacatagcgatgattgatagatggaaagaacgcaggaagaaggaggagctggacacgatcgaggactacatcaaccggaaagctgaggagatcgccaacatgaaggtactccgaaaacttgaagaactcgaagaggaatga

SEQ ID NO: 2497 - DNA, 621 bp, synthetic construct
  source 1..621: mol_type = other DNA
atgactatgatagaaatcagcaccatcaagatcaccgacatcaagccagccgaatacaatccgcgcataatgagccagcttgaacacactaaactccggaactccatggagacattcggcgtggtggacccaattattatcaacctgaagaacaatcacatcattggggggcaccaaaggtatgaggtccttctggacaagtccatggaggacaacgagtttataaaggaactgcacctcatccggctaggagatgtgggctgggcattccccgaatcagacctcgaggtggaggacgatgaccatgaaaaagccttgaatctggctctcaataacatcgagggtgagtgggacctgccaaagctggaacccattttgacggatttaaaggatgtaggattcgacattgaacttacaggcttcagcgacatcgaactgaccgagctgaatctggaaaacaacctcgtgtttgcggaggagttcgagcccgacgagtcggaggaggatgtcgacctggaggacatttacgatgagcctgtgaaagaaatgctacagtgccctgcctgtgaccatgttgatgttgtgaaacgatttaaaagagtcgatagtcagggggattga

SEQ ID NO: 2498 - DNA, 201 bp, synthetic construct
  source 1..201: mol_type = other DNA
atgaagatctacttggcggcagccgacacaatgagcgaggacatcattcgcctcctgcccgtggccaaaaggctacactggaacctgttcagctactactacctcctgaccctgaagaagatggaggactatgatatcatacgaaaggcttccaaaaaacggccgtatagacagcggagtgcccagcttccagaaggctga

SEQ ID NO: 2499 - DNA, 459 bp, synthetic construct
  source 1..459: mol_type = other DNA
atggacgttgacaacctgctgggctatgataaggtactggaactcaggtctctgcttgaggaggtgacggataaggtgatccccgtgtggcacaagaaccgcggaatcaaggacttcaaacagatgtgccaggactacaattttgtcagcataagtggctggcgcaacgaggacgtgaaagatgaccagttcatccactttgtccggcatgcacaccggaatgggtgtcgcattcacggtttaggactgactcggagaaaggttctcgacagggtgccattcgactcagtcgactcgagcagctggctccagaccattctatatgccaggcttgggcaaaagcagttggattccaagttcgctaccgaacgtcgaggcgatctggccgtgctgtcctacatcaaatggatgaagacacaagaagagtactacaaaaaatggagacactatcatgattga

SEQ ID NO: 2500 - DNA, 657 bp, synthetic construct
  source 1..657: mol_type = other DNA
atgattaatgaacggataagaccttatcttaattttagcttcaatgacaagaaagtcatcttcgtcaccttgttcgttgtgtccaacctgataagcaacctgttagccatcaaagtattcaacctgggcttttggggcctgacgaccgattgcggaaacctcctgtttccgttaggataccttatggcagacgtgattaccgaggtctacggcgagaggacagcccgaagggtcatactgctggggctctttgccaacattctactgatcgtggccaccaccctcactgtctacatgccctatccatcctattggacagggcaaggggcgtacgcctacatgttcggcttcactccccgcatcgtgctcgcagggttcatcgcatacttggtgggtcagttcgtgaatgcgagactgatggtgctcatcaagaaatggaccaacagtaagtacctgtttatgcggacaatcggatcgacgctgggaggggagctctgtgatagttgcatctgcagctccatcgcctattacggtattgtgccaaactctggcattttgctatttattcttatgcagtatgtggttaaggttacttgggaagtggtaatgcagcccctgacatacaagtcaatcgcttgggctcgcaaagacggctga

SEQ ID NO: 2501 - DNA, 591 bp, synthetic construct
  source 1..591: mol_type = other DNA
atggcaatgccagagccctgggaaaggcagcgggacgagaacggaaaacttgagccgataaaggccttcgagtatttcacggagtacctgactatggataagccacgatctatgagggtgctgtgcgagcgcctcggcaagaaagatgggtatattcgccagctgcatgcctactcatccacatggaactgggtggaacgtgctgaggcctacgatgaacacataatcttgaaaaaacggctccgcaaagagaagttttacgatgaactcgtggagtccgagcttcccaatttgagaaaacggctcgaatactataacaagaatatgaatgacatcgagaccgacatgacgaccaaacccactagcaaggctcacgcctatgacaagaacagtaaagcgcactccacaaccctgaatgagattctgctgatgatcggcaagcctaccgagatcaaggaaaccagcttagaagcagacatcgaaagtgacaacaagattgatctggagaacagggtcgaggtagacattacatcggacgagttcatggaaagcgaactagaatacatgagaaagatgatcgaggagaagtga

SEQ ID NO: 2502 - DNA, 1476 bp, synthetic construct
  source 1..1476: mol_type = other DNA
atgacagctgcaagccgagtgaatgcccacggcacaatgggtctgggcagatggagcatttacataaacaacgggttctggaagcctagggactttgatgtcctgataattgagctcctgcagtatgccattcagggacgggtgagcggcatactgctgggcgtacccagccgacacggaaaatccactcttatcagtaagaacttctgcagctatttcctctcctatttccccaatgagcaggtcatcctttccagctattcgcaaggactggcttccgagttcggcggacaggtgaaggacatcgttaatcactacggctaccttagcccgtacaagccgaccatcaggtctgatagtaaggccaaaaacaagttcaagctcaatgagccttatcgtggccagatgttgagtgcaggtgcgggcgggtcaatcatgggatacggggcaggtctcctgatcgtggatgacccaatcaagaacgtcgctgaagccgaatccaaagtgcgacaggccaaactcaaggactggtggggaggcaccatcaagtccagggtccagcgccggtccaacgggcttcctcccatcaagattgtcattgcccaacggctacatctgaaagatttgcatggcatcatcaaggagacagagccgaccattcccgcaaatgacgccttccggatcttaaggaacggcggctcaatcgaccctaacacgtgggttgacttcaaccttccagcaatctgtgacagcgaggacgatattctggggaggaagataggggaagtgctgtgggaagagcagagagactacgaatggctcatggcggaaaagcgcagcatgggctcatatctctttaattcgatctatcaaggacagcccgtagagcgggatggggagatatttaaacgggaatggtttcaggacgaggtcaatcacaagctcacatgcctcatcgacccaaaggacatccccaaagacctgccccagctccgctactgggatttcggtgccagcggggacgctggggacggaacctctgccatcctgactagctacgatggtgaatacctgtacgttctggatctggtggccgggaagttttcatccctgaaagtgttgaaaacgtttaagagactgtgtaaaaaggacggcaaacaaacccgtgtaatggtggagcaggagccaggaagtggcagcaaactactgattaagaagtttaggagagaagaggatttacgaggatacaacattcgggccgataaggttcaggtgagtaaaaaagtccgcgcttttgacttggaagggctagcagaggacaggagaatcaagatggtgccagcccactggaacaataagttgattgaccagctggtggctttcaccggtgaagatggtggagaggatgatatagtggacactattacgggctcttgccgcttctggaccagacctcggcgccgcgtgaaagcgtga

SEQ ID NO: 2503 - DNA, 1326 bp, synthetic construct
  source 1..1326: mol_type = other DNA
atgtccaagaagcaggaaatgatgagaattgagaggcttaagcactacgcataccagacagggctcatcatccccattttcaagaaccatgatctcattaaaaaaatagagaacgggaagatcacaaacaccgacgagatcaagatctatattgaggaaaatgagaagcagatcaaacgacgccgggagtttatcagcattatttatgataattgcaaatattttaaatacgacagcatttgttataaactgatctccaaggtaaataactttgaaataaagagcctagaggagctcatgaacgaaatcgagagcgaaaaaaagaagaatggcttccggaagaacatagaggaaaaagagttgatcaaggagaacgaaaataagggaaggctaaaggagtacgtgcgaattgtgaggagagagtacggccttgatttcacaagcgtcaagaaactcaaactcaagatcgacaataacaagatccgcagcaaagaggagctgaatgaggaaatcattgaggaaaaaaagaagactgagttgaggcgcattgtgtacgactccgacttaaactgggacctgaaatgggaactggagtccaaaatccgccacaacgaaatcacaactaaagaggaactgattaaagagatccgaagaatcgagttcattaacattatttacgacaataaccgcgatttcaagctcgactatgtcaccatccagaaacttgtgagcaagataggaagtaacgagatcaccacgaaggaggagctgatcaaggaaatgacggaagaaaaaaagaagggcatcgagcggcggacggagtataagaagattgtcaatgaggcccatgccctggacaacacatcgcagtggaaactggaactgaagatcaacaatgatgaaatccgcaacaaggaagaactgatgaacgagatagaaagtgaaaaaaagaaaactgaattgaggcggattgtgaatgacagcgacctgaatgatacctcccagcggaaactgctgtcgaagatagatgaggatattgaggttatcaccaaggagaaacttaagaaagaaatacaaaaggaagaacgtatcatagagtacaagaaaattgtgaatgaggcgcacgccctggataatacctcacaatggaagctcgagttaaagatcaacaacgacgaaatcagaaacaaggaggagctgatgaacgaaatcgagagtgaaaagaagaaaaccgagttgaggcgtaagtcagaggagatcataagaagaaaaaaagagcggagcgactcataccacccgaacgctaataagccatggaagttttga

SEQ ID NO: 2504 - DNA, 1659 bp, synthetic construct
  source 1..1659: mol_type = other DNA
ctcagtaagaatgctaaagcagacgcctttgtcgtgaccactgaagacggatcatatgacattgtcgatgcagatgtcttggagaggtatgcaatcaagagcgaatctgacgagacaggcagcaagcagttaaagacggatggttgggaatatgatgacaccctgcttgagccgctctatgacccactgcagctctgcgagctcctcgagatcaacacatatcacgagaactgtgtcgatgttgtggcccgcgacagtgcaggtatcggctatgacattgttcccgttactggcgagaaagaaaaggaacttaacaagccaaaacttaccaattttctcgaaaacatcgagcccaatatcaatgaactgctgtaccaaatgaactacgaccggagggctacgggctacggggccctggaactgatccggaaagataaatcgaaatcagagcctgtgaacctatcccatatttcttcttacactctgcggaggaccagtgatgggaaaagagtaaagcagagagtgggaacgaagaccgtgtggtttgtaatctatgggaaaaactatgacaaagaaggcaatctgtgcgacgtgcactctgagaccggcgagttccacccctacaactccctgagcaaggaagaacgcgctaacgagctgttgtggacgatggaatacaccaccaaaagcaagtactacggattgcctaagatagtgggggcaattcccgccatttatagcgacataagccgttccaagtacaatacctccttcttcaagaactacggaatgccatccttcgccgtcctggtaagtggggacttcgtggactatggccaggaggagttcctggaggacggaacaaagaatcccgaatacgacgtgacaaagactctgaagtggaaaatttcccagcaactgaagcaggccatcaaaaaccctcacagcgctgtaaccatcctggtcccatctgagggagaggaaggtaatgtggagattgaactgaagccgctgagtgtcgagaccaaagaggcgagcttccgactcttcaggcaggataaccgggatgaagtcatccatgcacacagggtgcccccctacaaggtcggcatcaacgagacaggctccttgggtggaagcaacatagagggagccaccataaactacaagaacgatgtggtgctacccatcagattcaacgatgagtttctaattaaccaagtgattaagaatgactttaagataaaggactggcggttcaaaatcacggaacatgacacacgggactacaccacagacattgccatcatcaaggaactgttcctcatggcttcaatcactccacgacagatcatcgagaacattggcgagcgcttcgggctgacagcttcagacaatccttttctcgatgagtactacttaaacaatgtgcctttggagaatgtttggaatggcggtgatgtgccgatggaagcggagacagttcttgacagcctcgagaatgaccttatgaaagacgccggggtgatggatgaacagctgcgcgagaagagacagactcgtgatgatggcgctcagggggcctcgtttaaagaggccgattccgaatatcaagagcgcatacagaaggcgtttgatactcgaagagccgtgcagtga

SEQ ID NO: 2505 - DNA, 2328 bp, synthetic construct
  source 1..2328: mol_type = other DNA
atgatggcgctcaaggtgcgtcactccaagaggcagattcagaatatcaaaagagaataccgccggcgtttgatcctcgaagagcagtgcagtagggagattgcggacttcttccgcaggcttgagaggaaaatccacaaggtcatggatgagcactgggagagcgagctgggtcttttccacctgaacaaagtgtcggacatcatccaggacagccgccaggagtactatgacatcctgttcaagtactgtaaggactcctacatgaagggacgagaagctaccgagcgaagattcaaccgcaaactggaaaacattagcatgaaggctgatgtgaacatcacaagacttgaggacctgttcaagcccgaccctactatacgctacaatctcaacaataaggtctttcaggctagtgcccatactatggaccgagtcgacaataggatcatggagaacatcacccaaagttatgatgacggattaggcattgatgaggccaaggatcgtctgaccgtcgagtacaatgggttgaagtcttgggaggcacagcgtattgccaggaccgaaatcaattcagcccagaatgacggtgcctttgacgtctatggagagctgggcgttgagtaccatcagtggtggactgcccaggacgaaagagtccgggagacgccgcaggcagaccaccgcgagttgcacggcaaaatcgtgaaggtgggcaactcgttctccaacgggctgcagtatccaggagacaggacaggcaggatcgtgcactggatcaactgccgttgtacaacgctgcccttcctcatgcctctcggaaagatggccccaccaggaatgattgagttcaccgaagaggacctgattgacattccaaacttcgagatgcccacaatagatgacctgatgcggagatacgaggctgttgagcccaaatcccagtggattctggatgactttgaggatttaatcaacctcaatgaagatgaggaacgccggcttgctgagatacaggaaatctttaagaggaatgctcgggataatgtgcccccaagttatattgtgcaacgccagtacgacgaatttatgctacgaaagaactttgcagagaatctgcggatgctgaaaagagggcagaatccgttcctcaacgagtctgaaaaacagatgttcataaaagattacagccgattcctaaagcagtacgaaaacgagatacgcatgaacaaggaattacagaaaatgtatccgaaggagttttcaaaggttgcaaaggatgtcgacctgcaattctacagggagaactacaacaaccagttcagcatttaccatcccgatgatatcaggtcatttgaagtaacctccaaaacgttgacttctgaggagcgggcccggctgaaggaaatcgagaagctctatcctaaggaatccaagagaatcgccaaagaaatggacctaaagtattacgagaaacgacatcctgaacgctttggccgattcatggaggaagaggaacggaagaggctggcaaaaattgagcggatgtatcccaaggaaacctccaagatggcaaatgagtttgcgcctcgcgatgtgagccgcctgcgcaccaaggaggacattgacctgtacgagaaaaacttcatcatgaacaaatcatacagaaagaaagccgatgagattgtgaacggcaatggcatgacaataacaagaaacgtgaagtatgacctgaagggtagatacgaggattacatcaacatcactgacgatacgtttgatgttctgcggttcaaggattacaattgcgagatctggatcagtagcaaaagcgaagtgtccacggtggagatcatgcaaactctagacaaaattccccggaagctcatgaaccaaaaccacaaccggatcatattctctgctgaccgcgatgtctataatctcaagaagaaccacttcgtgggcggtgtgacaaagagaaaagacaatgagattgtgatctttaaatgcaaagagggcatcctttcgcaaaccaaaaccctcgctcatgaacttggacacgcctgggacaacaatctgagcaaaattgccaatcgggggggggcctactataaggtggccgaagaggaaggggggtttgtaacctcatatgcccggaagggctttgaagtcttcaagacccattacagcgaagactttgcggaagcaatggaactgtatgtaacaagccctgaaaaactgaggagaaaattcccaaaaagatacgagttcataaagaacatgatggaggacgatttgtttgttttggggctcatcccctattga

SEQ ID NO: 2506 - DNA, 264 bp, synthetic construct
  source 1..264: mol_type = other DNA
atgataatcgaaattcccggaaatgaccggacagaagaaattaatctccccaacgggcagtttgtgctgatcacctacctacaggagaacgacatgatgagcttgccggacgggaagtatgtgtgtccattcaggatgatccaactcttcacggaagagggcggcgagctgatcggcgagtgcattgaggaaaaccctcactacaacactcgcttctacaataccgtctttgagcatctggatgagggaatcgagtatagatga

SEQ ID NO: 2507 - DNA, 540 bp, synthetic construct
  source 1..540: mol_type = other DNA
atgctgcgggtcgtagagcgcacctattatcagcaagaggaaatcaagacactagactgtcgaattagagaggccggagtgaatacttacagcctggcccgacagggcgcagttgactatcccacctacgaatcctacaacgaggtgagagaggaaaggatcaaggaggctaaggaaaaatacggcgaaagttactactatcactggcgggacgttgagacttacttctattacctcggtcgcttctttagcgacctcgaggaaatcgagaagtacctggaaaggacggtgacatataagccacaccgggaagagctgaaagaagcgatggagaggctggacaagagattcgaggaagtcatcaacgagttctggtattcattagaggaatacgaggatataaccgaggatgtgctcgagcagttgaaagaaggggattgcaccgtgcattgcgaatttcttataaaagagtttaagaagttcgtcaatgtgatctgccgcatcattaaacagaacgagattaaccacaaggagttttga

SEQ ID NO: 2508 - DNA, 291 bp, synthetic construct
  source 1..291: mol_type = other DNA
atggacgccatcaacgttatcaaccagaacaagatactcgtggatgtcctgtaccggggcactgtaaatctgattgacatcgtgatcggtgatgcactggtctatgacaatcccacggtggtggtcaaatgctataccacagacctcgctttcgccaccacagagatagatgagattgtgttggagaacgaagaatttgagttactgatcacctacgaggacggcgagttcagcattctactcaagagccacaatcttggggaactgggatacatcgaatgggtgatttga

SEQ ID NO: 2509 - DNA, 330 bp, synthetic construct
  source 1..330: mol_type = other DNA
atggggaatctgggtggcttccggatggtgtttgtcgatttgtgcgagaacgaaattgcggacatggtggagagcttctaccgcaatggcgacggatcaagcaggatactaaccaaccgggcagttggcgagatcgtggagcactactgttcctttgaagtagacggtagaatcacgactaatctccgagatttcctgctgtatagtgttgtgctctatgacaccattggcgaggccgtcgatgatggagtgaaccttgaggaagtgttcatcatcgaagacaggaactgctacacagggaagtctcaggtcatcctgattggagggtga

SEQ ID NO: 2510 - DNA, 567 bp, synthetic construct
  source 1..567: mol_type = other DNA
gtgagaaaagtggtgaactggttgaaggccatcggagataacttctccgtggattacctccttttagcactgttctcgtccggagacctgatattggttgccatcgttctcaattcttacggtgtcatctcaccggagaacgtaagggaactggtgattgactatatcagttacaggaaagtagatattttctggcggcatctacggcgtccacgcatgagctttgaagattatgtcctggacaatttcgaagagatggaaacgggcgaactcaccagagagcaggttgtcgaatttgtcagccgacaggaacggaaaggcctcacattctgcaatgagatcttcatcgctgtgcccctaaagaaggggagcaaggacgatatcgtggagatactgtggaacgagtactttgtggaggactacaaggagaactggctggagcaacacgagaatcttgggtggaatgactggaagaaactgctcaagaaagaaattgtggagaacgggggcgatgacttccagatctttcgcaaccacctgattgactgtgtcctgatggagtattga

SEQ ID NO: 2511 - DNA, 192 bp, synthetic construct
  source 1..192: mol_type = other DNA
atgacaatgaaggtgacgtttgaagatgagaacggtgagcggaccgtcgagttcggcgatgacgtggacttcgtactcatcgaaagcgacgatgacggaaatattgagatccgcgaaggggactgggaactggacggcgatagcgacgacgattgggaagagtacgatgactgggacgaggaggagttctga

SEQ ID NO: 2512 - DNA, 282 bp, synthetic construct
  source 1..282: mol_type = other DNA
gtggacgaatttgttgagacgctgttcgacacatattggaaagtgaatgagaacggcgagtatatgagcctaaccgactgcggcgatttctacatcgcaaaggtcgcgccctgtgtacggaactggtccatagtgatcgaatgcaattgcttctgtttccactgcaaggaatttgtctaccatgaaaacggggccatcctggagatcggaatggagattagttcactctacctgagccagatggagatcaaagatctcaagatttacatgattgactgttga

SEQ ID NO: 2513 - DNA, 372 bp, synthetic construct
  source 1..372: mol_type = other DNA
atgggtctggatatgtttctggagggaatcttcgagcaagacggcgagaatgtgagggagcaggtgatttactggcggaagtccaatcaggtgcataactggttcgttgtcaacgctcaggacggggaggacaactgtcaaccgcacagcgtaagccgcgaacagctcgaggaactgcgagacctatgcagagccgtgctcgcagataacgacaaggcggaggaactgctcccaacaaggcccgggttcttctttggcgccatcgactatgacgaatggtactattacgatttgcagtacaccgtcgagaaaatagatgaagtgcttaaagatgaccggtacctgtactttgagtattgcagttggtggtga

SEQ ID NO: 2514 - DNA, 198 bp, synthetic construct
  source 1..198: mol_type = other DNA
atggaatgcccgtgcgataactgtgagatgctccgggagaacgaacccatcaaggtgatcgactggaagtccaacagcccatttggtatggatctgtaccacttcgaggacggcttccgctgttgctataatggggaggaaagtctgcgaaaagaggacctaagcaatcatgggtgcagactgaggggcggaatttga

SEQ ID NO: 2515 - DNA, 351 bp, synthetic construct
  source 1..351: mol_type = other DNA
atggagctgatgacgagggagatggaagggaagctcaaaagcttccccttctattcccaggacggaaagggcgacgacgcaatcgtggtgatgaagttctttaacccttacggtctcggaacctggtatgtccttgaggccgagaaacaggagaacggtgattacctgttcttcggatatgtcgaaagccccataacaccggaatttaacgagtacgggtacttttcactaagcgagctggagaacctgaagattccaatcaaaatcaatggcatcaccgtaagttacgggcggattgaacgagatttgtactttgaacgcgtgagaattggcgacataatcggcaattga

SEQ ID NO: 2516 - DNA, 225 bp, synthetic construct
  source 1..225: mol_type = other DNA
atgttcggccagaagaaagaatttgtgaagaagatgtatcacgtcggggacgtggtcgagctggtgcatatggacgatgcgcaggccccacccagcggaacccgcggcgaaatactcttcgtggacgatattgggcaaatccacgtgagatgggagaacggcagcggtctggcactaatctacggggaggaccggttcaaggttgtagagaggaaaggagaatga

SEQ ID NO: 2517 - DNA, 153 bp, synthetic construct
  source 1..153: mol_type = other DNA
atggacctgctctatctttacgacgacctgaccgcaaggcgggaggtctacgatagcgtggggctcagttttgtggtaaaatataaattcagctcccgcaaggaagctcaggatttcgccctaaagtacggcgccgagctgatcgaggaatga

SEQ ID NO: 2518 - DNA, 189 bp, synthetic construct
  source 1..189: mol_type = other DNA
atgatagagcggaggcgcctgggcatgaaatacgacatctttaccatcctcgatgaaattagcagaaagctggacgacggggaactcagcgatgagcaggtcgatttcctgttgcagatggagattctagtggaggaaggcacgatcacagacgagcaggcccaagatgtgatgaacggagactattga

SEQ ID NO: 2519 - DNA, 168 bp, synthetic construct
  source 1..168: mol_type = other DNA
atgatgaaactcagcctgaaggaactcggcgaggaaatcgagatgatacttgccgaagggggattgacgtttgaccaggtggattatctgctatacctggagacctgcatcgcagacggcagcattacagaggagcagaagcgggaaattatctgtagggacttctga

SEQ ID NO: 2520 - DNA, 207 bp, synthetic construct
  source 1..207: mol_type = other DNA
atgtatctagaaattgacgaggtcaagtgtgagaacatcgaccgaattgagtttgacgatgtggcaatggagatcgtgctgaccgacgaaaaagtgtacgagagaatcaagcggtggctgaaaagcaatgagattgattacgattgccgcgaagaccggtatttcgccaacctcatagaatacgtaatcaggatcacatggtggtga

SEQ ID NO: 2521 - DNA, 249 bp, synthetic construct
  source 1..249: mol_type = other DNA
atgtcggactcaccattacggaacggctcttcccttctgctccgcaattggagtatccccaagtgggagcggaacacgagagcctccctgaccgagccaagccactgctgtacacgaagcagcgaacccgagacttccagtagcccgacaaaaaacgggaactcttggaggatgctgctcagcttgtcagcgaccaatagggcacaggtgtttctggagggactatacgaagtccctctgttcctctga

SEQ ID NO: 2522 - DNA, 1353 bp, synthetic construct
  source 1..1353: mol_type = other DNA
atggcgaaagagaacgtgatcgattataagatcgagcgacagaatgataacacctggagctatctctacgtaacagaaagagggagaggcaatatcattgcttcatcctttggcgagctcaggcagaaagttttaaagagaggtctaccttggaatgacatatctaacctcttcacaaaaaagagttccgactctaacgtgcgccgcgaaagcgtcaagaatattgatgacgaatccgtgctggcggacgtcgctaaaaagagttctgactcaaacgtacgccttgaagcagtgaggaagattagtgataattacgttctgatcgacattgtgaaaaacgctagcgattacgacgtgcgtcgtgaggctgtaaggaagattaatgactcatcggtgctcgaggatatcgccaaaaataacaatgacgagaacgtccgactggaagccgtaaggaacattaacgacgagtccgtgctggagaacataagcaaaaacgcatccgattctaaagtgcggatcgaagctattaagaagattaacgacgagacgatcataatcaaactggcaaaaaacaataacgatgaggatgtgcggatcgaggcagtccgaaagattaacgataagacagtcataatcgatttcgccaaaaatgcctccgattccaaagtgcggcgcgaagccgtccgcaagattaacgactcaagcgtgctggcttatgtgcttaaaaacgaccccagttggatcgtgcggattgaggccgtcaggaagatcaatgacaagagcgttctggccaacatcgccaaaaaggacaacaacccgagcgtccggctggaggccgtcaggaaaatcagcgatgaatctgtgttgataagtgtggccaagaacgacagcgattatttcgtgcggcttgaggcagtcaagaagatcaatgataagtcggtgctggaggatatcgccaagaacgacatcaactccaccattcgacgggaaaccattaagaagattactgacgagtcagttttaataagtgttgcaaaaaatgatagcgactacttcgtgcgcctcgaggctgtaaagaaaattagcgacgcgtacatcctaaaggatatcgtgaaaaatgcctttgactccgacgtccgcatcatgtcgatcaatgagatcacggacgagaccgttttggtgaatctggacaagatcgacccaaatttgagactggttagagacagcctcaagaagaaaaacagaagaatacacaagtttaggaccctggaggaatgggaagaatattactacgacaagaaggtgccaaaacactggatcactccccggtggcattacggactggatgactga

SEQ ID NO: 2523 - DNA, 696 bp, synthetic construct
  source 1..696: mol_type = other DNA
atggtggtcaaatgccccaactgcttcagcccgcgtgtgtccaaatgtgaggacacgaacatcaaatggcaatgtgataaatgcaaatgcaagtttaaccacggcgccttcgatatcaatgcggagatggagaaggtagaacagctgacaatagagaagattgagcgggaacgagaacggaccgagcagtttgagcgcgccattaaggaggctaaggagcagttcgaaagagagcgaaccgagcagttcgagcgtgaacggaaggagaggctcgagagggaaaagagagaaaaagaacgcgagaagatcgagaaggagcgggagcgtaaggaacgcctggaacgaaacaggattaaaatagaggagagagagcgagaacggatcaagcggaatgaacgcatccggagagagaatgagagaaacaggattaagagtgacaagcgcgagagagaaaagagcgaggaaaaacgcatcaagaggaatgagcgcatcaggaaagcaaatgaacggaacagcattaaaagagaaaagagggaacgcgagcgggagagaaacgtgatgactattgacgaatactacaggagcataggctacgggtcaacaggaaaatccaaggtctggtcggccattatcatcccaatcctgttggttatctgtatcatactcatcctaatgttttatggcgggggaatgtga

SEQ ID NO: 2524 - DNA, 1044 bp, synthetic construct
  source 1..1044: mol_type = other DNA
gtgattaatattttagaggtggttaccaaatcaagggattccctcctgattactgctccagtgctgattccaggggaacgggactgtgagtttgactacggggaggagccgctgacggagggtcagatcaggcagattgcgcatgagtatctggccaattacagccttgtcgacaagaaccacgagttcttcgagacgcgtgaagtaataggagtgcctgtggagtcatatatcacaaacgagcccatcagtctcaaaggcttggacggaacagtcaacgagtaccccaaaggcacctggatagccaccacaaggatcactgatgaagaggagatggaaaaggcactcaatggagagtacactggctacagcataacaactgtgagcaagaagttcgccgacaagcaaatccagctgcccagacgagtcctgatgaaagacatcaaggacccagtggggttcaccattagcctagtccgcaagccttgcgtgagaggagctaaattttgcagtatgaaagaagatatagagaacggcgacgttgtgagcgaaaatatcgacgataagctggaagaggaaaccaaagggttcgtgcagtccatcaaaggaatctttaacaaggaagataaggatgaagacaagaaccctgaagatgaggatatcgaactagacatcaaagccattgtggatgaggtaaccaaggatttcgtaaacaccgacgattttgagacattcaagaatgagctcgagaaggctctgagcgacaaatttgagacgcttggggccgagctgttcaagagtctgaagaaatccttggagaaggacaaggctgaagaagccaaaaaccaggaagatgacgaaagcgacgaggacgatgatgaggaagaggcaaaggacaatggcgaggcacaaaacgtccagtccagcaaatcgattcccaatcacgacatcaaggacaaccagaaggttgcgaagaccggtgccgcccgggtgtatgaaatcatgggccgggacaacacaggctctgcagtccgcaaactctga

SEQ ID NO: 2525 - DNA, 1038 bp, synthetic construct
  source 1..1038: mol_type = other DNA
atgggaaatgaagctactttaaaccaactggtaaatgagcaggaaaaagccgtgttcaagtccatgcgcactgacatggagacaggcaaggctgtgttgaacgtcgagcagctaggttatttcctgagagaagcaacattagacaatacgattctaagagatgcggactttaagctgatgaaatcattcaagaagcatctcaacagggtaggaatcaacggcagggtcctcacaaacggatatgacgtgaacggcgagaccgacccggagattccggccgctgacgtcgatttcggagccaacgagttggacgtcaagaagctcaaggccatgtgcgaaatcgaggatgacgagaaagaggacaacatgacccaagcccagttcgagcagaccctgctccagatgatgggggaacgaattggggaggatctggaatactgggcattgtttgctgacagcgaagttgcacggagcgacgatccccttctgaacacgaatgatgggtggctgaagaaatgcgccaaccacataagtagccggtcaatagctcctagcaatggaatgtttgacattgaggacggtccagaagccatgttcgatgcaatgatcaaagcactgcctccacggtttcgaaaaaaccgacggatgctgaaattttatgtgccctttgaagtcgaggatgcctaccggaacatcctgataaacaggggcactggccttggtgattctgcccagatcgggttcaatgccctgtcctacaagggcatcccaatcgagcactgctcgaccttggacgatgaggacgggaggggcatgctcggcaatagagtgtgttccatgctgacaaatcccaaaaacctggcttacggaatctggaagaatctttctgttgagcctgaacgcattgccaagaacgagctcaccagatactggttccgtatccgcggcgatgtggactattacttccgcaacggggcagtggtgagcgtgatgaatagtagtgatgcggaggcgctccccgaactgtcccgcgcctga

SEQ ID NO: 2526 - DNA, 405 bp, synthetic construct
  source 1..405: mol_type = other DNA
atgatctcgcatatcattgtgctactcatttgctttataggacttgtggaggccatcctgatggccctcgtcgattgggaggacttggcaatctccgttcgcaagagtccgagaaagctctacaatgtgttgaaggatgagttaggcctgcctgaatggaacgaactgtctgtgatcgaacgacggagcatgaagaaaaggtatgctgtaattcgcgattccttccccgagctgcctccctgggaagagctgtccgtcatagacaggcggagccacaagagactctacaaacttatcaaatcagtgtacgatggcgactacgacgacagtccaagcctggaagggcccccagcggcagtcggtcctcagaaagagattccactggaggaggccgagtatccctga

SEQ ID NO: 2527 - DNA, 414 bp, synthetic construct
  source 1..414: mol_type = other DNA
atgacctggatcgggacggaggatgtcatcgagttcaccggcgtcaagccccagacattccggtttgagaagggtgacaccagcagcctggaaacactcctggagaagtggattctgcaggccgaaggcctgatcatatcctactgtaactatgatttcaatgacctggaggagatcccgccagcggtggttaatgtttgcctacgactcacggctaacatggtggcccttgcacaagccagaaaggacactcctgtaattcaggtgaaggaatggaacgtgcagactgtgagttccaacatattctcaaatgacctcaaacgcgacttgaccccctttgtgcacgaaaggaaaagctacaaaggggacgagattgacttctttgtcatcacaggagatgatgattcgtggtga

SEQ ID NO: 2528 - DNA, 444 bp, synthetic construct
  source 1..444: mol_type = other DNA
gtgaaactgcagattgacgtggaggagctcaagcccttggagccccggttcaaaaaggtcgccaaacgtaccgtcgtgctaaccgctaatgagctgcagagaaacctcaaaaagttatcacctgtggatcatggcaggctgcaaggctcttgggtaatcttccagactggagaactggaaaggacggtgaaaagcagtgcaaagtatgccatcttcgtgaatgacgggacaggactgtacgggccgctggggcacaagatacgacctaagaacggcaaattcctcgcgtttacaccaaacaaaggcaagttcaagggaaagcttgttgtggttccatggactcggggtcagaagccccagaggtttgtcgagcggagcatggaaatgaccgagcgcagagtccaagaatttatgatccgcgccatgatggagatggactcctga

SEQ ID NO: 2529 - DNA, 510 bp, synthetic construct
  source 1..510: mol_type = other DNA
atgcggttcgtgaacactgcttcgctggtgccccagactgtcaaagcatatctggagcgcgaaatctgcgaaggagggttacttgaggacgtagagacactcattccgtccgtgaactccgacgtgcctgtggacccaccagccatctggatagtccaacatcccaccacccgctggtctggcagtcagccaaatctctcaaacaagatcgccatgagcgtccctttcgagttcgtatgcgtggaatacagcgatgacctggaagaggcagagatcctggggatatctctagccagccgagtgggctcaagtctgatgaagaactttaacaaggtgaaagttgatgactccatgcccaacaggttctttcacaagctggagtttgagacactctatcctgtcggagaggtcacggtggtgggcaagagcgaacggattcccgcgaccagcatcatttttaatttcgtttacgttgtggattggttgaaatgtaatagaaggtacgattga

SEQ ID NO: 2530 - DNA, 1281 bp, synthetic construct
  source 1..1281: mol_type = other DNA
atgggcattagggttgtcgggatgaaggaagaggcaagatatggagtggcggagtcagcgcccgacttccaccaggaagttagcaaagcaaaggcttcccttaactccacgccgaacaccaagtcaagcggctcacgcatgaagaaaaaggcacgtgccggcgtgtacaagcctactgccaacatcgaaggtgaagttgatctcaagaggataggacactatctcaaagccttcctggataattaccattttacggatggaggctccaacccaaacgtccacgagttctggggcggggaaaacaataaattgagcagcttcactctttgggtaacttttgatatatttgagaagaccatcgtgggcagcctgctagacaacttcaaaatggaggtgtcggacgagtacatgaaattcaccgctgactttgtctacaagacagaggaaagcgatgagatcgagaacattgagctctataaagtgaaactgcttgatggcgattgggcactgatgttctacgacgtttcggtggagatagacgagaacgcccccccaggcattgtttcaagtttcagttttgacggaaagaacaacatcaacgtggacaagacgatcggcttaggaagcagaggtccccagcggaaagctgctgcccaaggacgggacatttccatttcctttgtctccactctggaacgagagaccttggagctgattcagaaagctgaatacggggaggtaggcacagaaccgtctgaatgtaagttgtgcaagattccactgaagctcatctgcaatgtctgtgaggacacaaccgaccggctagagatcaccttccctgaatgtatctttgctgtggactatgagctgagtgaggccgacgagatcgaggtgaccttcaacctcgacgccatggggacagggtacgccacaaagctggacggtacccgcgttctgaccgacatgtactgcaggctggtgaatgaccagcccgagataaagagtggggagggtgtgacaagcgccaccgtacgactcactgtcaaagacgataacaatcagcccgtggcatctaatgccgtaactatcgtgaatagagtgacggatgaaagctatgaggcgaccacaggcagtgcagggggctgctccttcaatgatgtggaacctgggcgctacgatgtcatcgtggaaggatatgatgtggtggccggaagcatcatctctgtcaatgacgatgaggaaagctttgacattaccgtcgaggaaatcgaagaggattga

SEQ ID NO: 2531 - DNA, 441 bp, synthetic construct
  source 1..441: mol_type = other DNA
atggtcgtcgtgaagaaaagcgacatactcaagggcgtaaaaaagattgaaaaggtgaagatcgaggcgctggacggcgacgagatgtacctacggccgctgtcccaggccgagatcaacgaggtcgacgagattgaggcaaaggctatggggatcttcgagacaaacgagaccgcacacaggggccgcagacagaaaccaaagagtgtggttgaaagcaaagggaaaatcaatctcgaattacagcagaaggcccagcaccaagccaagacgaaggccatcttcctgtctctggataatgagaagaacgtgggagaggaggcttggtcagaaaccgaaattgaacaaatgccccacaaactgtttgaggaacttttcaaccatgtgaaacgattgtccggaatagaactcgatgaggatgacgtggatacttttcattga

SEQ ID NO: 2532 - DNA, 3300 bp, synthetic construct
  source 1..3300: mol_type = other DNA
ttgccgtcatctaatgtaatgaacatcatagtcaaagccgaggacatggcatcatctgtggcccaaaaggttgaaaacagcttcagaaaactcgggaacacaatcgacagcacctttaccacatctctcagcaacaccaagttcaatcaggaactcacttcttttgggacagacctggacaaggtgacccaacggctgaaacaggtaggcgtgaacggtcagtcctcgttcaaccagctgacaaatgctgaacggcgcaccctggaaaagctgagcgaatttgatcccgtgtcagcacaggttctgcagcacctgtcacggatcggaatcaccgggcagcagacattcaaccaactgtcggtgtccgagcagaagtcactgatgaacatgaagagcaccgctcagcagctggaggaagtaaattccaagctgagagtggtggggatcggggcggctcaggccgcgaacatgctgaaccagatgaagcttgacccatccgttggctccaatctggacagggccaagctgaaagtttccgaaatgggctattccctggacagcaccaaagggaagatccttgtcctgggcactgcaatccagaccagtctcggcaataaatgggattcgatcaaaaccaaagttcagaccaccgccacaaacattaggaccgccttggggaatgcactgacttccgtgaaaagcaaggtccagaaccttggaaatgccttcagcggtctgggcgggatcatctcctctgcaatcggtgcgatcggaatggcttccatcagtcagctgactgtgggcttggccatgaaccgggaaaggatgacggccttgactaacgccacaatgggcggcgctaaggccggagatcagctgctcaacggattcacaggcgtgaacaaggtcttcaaggacctaaatgggaacagcaccaactactttatggggctcgacgagatgacgaaccactcgctcgtctcattggacgatctggggcaggctatgtcaacaatcaagatgtccacgggaatgagtaatgaggaactcatgatgttctccagcaccgtgaacgatgttgggcagagagccattctcatgggcaaatcgggggaggaggcgatttccctcatgcaagcggccggcagagggctgaacggcgagtttgacatgctgaagacaaacttcggcatcaccaaagacacccttacggatcttggatggagtggtgccgctgatgatgtcaaaggctaccaggaggctttagacaaagctcttgagaaaggtggcgacatggacggcatgctcgataccactactggacaccttgagacattgaaaaagaacttccgggtggccggccgccatgtgggagagatgttcactccatacatcgacatggcagtccagaaactgaatggcctcaaggagacttgtcccggcttgtttgagaaccttgtcatgatagcgggtgcagtgtccgggtttgccactgtggctcccagcattgctcctatgataagcgtgtttggggatgtgggaagtgcgatcaaaaggacagcaggattcttaggcctgatggaggtggccgaggacgcagtaaccttaaagagcacattcctgacaatcgcccagattgcaggcgccgacgccgccgtgctccagactgccgcaaactcggggttgacggcatctttctgggctatggctgctgccatcttggctaaccctcttacgtgggttgcggttgcactgatagccattgccgtggcagtctacgaggtcggaaagagttttggctggtggtctgatatcggctccatgattggtgctgtgtgggctggtatccaacgactatggtctgcctttataaacaatcccaacgtgcaaggctttctgaaagacctgtctaacgcctggaatgatatctgcgaggcactggcaccagtcatcgattgggctcgcaaggcttgggccgagctgttccctccttcggccacaggcagttttgacattgtccgcgcgatcattgacgtgttcggacagctcggagacttcttaggcaaggtggtgaatgccgtaaaatctgcctggaacgctctcggaggatttgccggatttctgcccatgctgcttgggcctgtaggaatggtggtcatggcgctacgcatgattgtctgcatcctcttaggttgcagtcccggcatagtgcccgcactccagaaaactcagtccgtgtttatgagcgtgttcggtgccattgccgagttcattgggggtgcggtgagcaatgttgtagccattctcaccaggataatctctgcactgaccggcatctttacgcgggtgagttcaatagtgagcacatatctggccaagatgatcagttccgtgatctcttgggcttcatccattgtcagcaaggctaagagtgcaagttccaagtttctgactaatgttgtgaattacttcagcaaattgccgagcaaagtgtggaaccacctgaaaaacatcattcaaaaggtgaccagttgggcgacgtcaattgtgtccaaaggaaagaatgctgccagtaagttcctgactgctgtggtgaaccatttcagcaagttgccaggaaaggtcggcacctatgtctccaatactgcctcgaggatttcttccggggccaacaagtgggtttccaatgcccgaagcaaggcttcatccacggtgagtgccgttacaggcccaatcagcaagttaccgggaaaagtgtacaatgagttcatgggcataggctcacgaatgctgagtgcagggagcgcccttgtgtctaaggcccggcagatcggaagtaacatagtcagcggactgttgaatgccatgaacattcactctccaggtacaattcagcagaaggttgttgccgaatttgagaacaccctatcacgtgtcgggagcatggattcaacggctcttgatgtcgggcaatccgtagggaacagcattgtccgtggcttcactgatttcggcctggataccggtagcttcaatgcggactattccaccgactacaatctcaaccgcaaaaatgacgataacctggacgtgaacattaagcaggaactggaatttgtgtttgacttcaagaatctgcctaatgatgtagatgaggacaagctactcgaaatgctaaaggaaatggttaccgacaagagcgtcatccaggccctcgtgagcaatcccgatttccaaagcatggacaccaaggtgaaaaacagcatcatcgcaaaagtcaagagagcaagaggtgtctga

SEQ ID NO: 2533 - DNA, 3039 bp, synthetic construct
  source 1..3039: mol_type = other DNA
atggcaagtgttacaaaatacccgagtaacgtgtcacagaccactggcggaaagttcgtgtccttcagcaatctggcaaacatcaagaacaatgctgacggggcgcatgccgtgagcagtgttcttatcaaaagtaagaagcagtctccaaacagaccgtccacagtctcatgtaaaggctttggattcagtcttcccgaaggtgctgaacccacgaaaatcacagtaacttataggcacaggaaaaatgctggtagtgactacagctcaaaaaacaagactcacatctgtaacatcgggggccctaccatctcattgttaggagtgagcggattcagctccaagggaagcgggtgtaccaccactatgaccactcacacaaaggctttcagcgttcatggcaagctctctagagcccaagtaaatagtgctaattttggagtgaagctggactatcctaccaactccaacacctacaacggttacatgcggataagttacgtccgtgttacggtcgagtacatcacgagccagtacagcgtgtccgtgaagcatgtctccggaacctatgaggatgaggactatgtggtctcattaggcatttcgaacaagaacctcaccagttacaaccccacatgcacgctgacggttcctgcgggattcacctataagggcgtgacaggtgccgccaccgggaccgtaaccaaagtcaacaaccgaactttctcgtggaaccctcagctgcagggccgggcaggttcgcggcagatcagcctagcatttgagccaaatgtgacatttccggaaggcactgactcatattctggcacatttagactgtccgagagcctcaacggtgccaacagtagcctcaatgccgtgatcagcaaaagacctgcgccctcaggctccgaaacggctggcgaatcgacacaagtcttggagaacgaggataccttaagcgggaacgattcctacctcatcctcaatgtgggcgaggagttcctgttctccgtcgagttcacggatgctgagaacgccgtctacaatcgcatcggcaatggagaggacgattggggacgtattgcactgactttgtttaaactagtggacggcagttggatcggacgaagccattacgatgtgtcaacccaactggaatacgatgaatcaattcccgaggaagtggcattggccgaaggcgacaagtggagcctcaataagaccctgagcattggtcaggtcgggacctaccggttctccctgagatacgagaacgagcacaaccacgagcttgactatgacatgaggcagttcctggcctatgtccgcccctccgaggaacagctgggcaatccatgtttcactgtgctgcggctgtccgatgaggagtgcgacagattaggctccctccacacatacatcgcccaggcctacatgaaacacattacagatgacacacatccccgggattggtaccgcaaccttcgccttggggtgttcaacaatgcaatcgccgataacataacagtaacctccgaagaggtcgacggtgaaatcattgaaactgtggaggatagcacagactatgaaagcctcaccaatgaagacatctttaataatgccgaatactggtcggatgccttggccaacgtgaatgagtttgacaatctggaatgcgagtttacctacaatgaggactatcctctctgcatcatcatgaccggggactacaatgaggcggatggctatgattacgatgtggggacggtcgaatacacaaatccatgtatcgttgagaaggatgtgtacaaacaacgagaacccagcggcaactatccaattcctctggagaatgttctatcaaacgacgattcaagcgaattgggcatagagcagttcaacatcagcacgccaataatcctctacactcttcccttcgatgagggctacggcaccaacgaggagatgactataaggggaatcgaggttagcggaactctggagcagagcgatgagctgacagtgaatgctaagctcaaatctccaactgggataagcggtacaagaagcattatcatcgaggagaatgacctgaccctggactccaccaacgagttcaggattggagggtttggagacctgtggggcttctccacatttgacttgactaatctggatgactttgaacttgagctaaccgtgaacaacaatattcacgatactgaggctaacattaattttcaggacgtgaaaattacattctatctggaatttatacaggaccagaagataaacatcaagatcaacgaagaggacctaagcttttatggggtgttcaccgatgacgtgatcattcctgaagggctggagacagatacttcctttctgacgatagacggcaccgacaccaacgacgcctaccgacagaacatcaaggaaaaggagattgagcttattctctacattgcagaatgcgatttccaaagcagtactgacatgctgcggcaactgagtaaggtgctcgtgaatgaaagggatgactataaccgtccgattcccaaccggattgagttctcgcactatcccgacgtctactttgagtatgtgatggaaagcgcattgtccgtcgagtcagacatctcgacctacaacatcaaggcgaagctcaccattcctagcgggacggccttcagcaaaaagacctattccacaggagtagatggctatgtgcaggggattgctccagtcaatccagtaatcacattcaagccccagagtgacaccgtggaaatcctggaacgcaaaagcgggcagcgctttaacatgacctacactgctggctgggaaacaatgattgccgagatagactgcgaatcccacactgttgttctgaaaacggatgaggacgattccgagatgacggacatcagcggtgcctgcgacttcaatgtggactggttcagcctgcatggagagtatcagtttgaagggaccgggtgcaacatcaggaccgtaagctacaacgagcgctggtga

SEQ ID NO: 2534 - DNA, 3309 bp, synthetic construct
  source 1..3309: mol_type = other DNA
atgggcattgctattgtcgtcatggacaatgaagaaaacttcctgcaattccttgaccccgatttatgtaccatcaatgagaccatagaggaactgggcctccggactctggagttcaactacaaatttcaggactatgtggaagaccgagatcttttccgaatcggtaacaagatctggattagcaattcccaaagcctggaggactgcctctatgtgattaacactcctgtggagaacagcgtctatcaggagaattactttgcatgcgagattgaggaagtcttggctgagctatactatgctccattgttcagtcagaccgaactgacgagtgccaatggcttcacgctgcggaccaccaacggagagcagaccgttgatgtggactggaatgccctgaactactggttcggcctgtatttcaatataggggttgttcaggaatgtttgggtacctatgcgaacaggatcactgtaaacggaacaatgaaccgtttgaacctgcttagatcgattgaagagcagactggaaatcgctttgtaacaaggtatgagaaagacttgctggacaacaccatccatcgctatctggatttcctgaatcctgtgaacgtgagcaagaactggaaattgaacatcgagtacgatttcatctatgaggatgacggggagtactgtgaggcctacacaagcgatggaaatcccatttccgaaatctatgatgacatcgaggaggaggacgatattgtggacttccctccatcaactccaagactgaacgtcgatcccgaaggcattgagttccggatagtgaacgaagactttgaggtcatcaacagtgacggcaatgtctatgtcgatgacagacagcagactcctctcgtctggagcagtgcgagcgttggctttaccggcgagaaccggcatgtcctaatcacgttgtccaaagagaaaagctttgtggaactgagcgtcaatgggaaaagctttgtgatgctggacaatgcagttggcgatgtcgtgagcacgggctttgtgaacccaagcagtgaaccggtgcaaaggtcgagcactgtaatccctgacgattcgtattttgaaatctttgatgtcagcaggaaccgggctgtcttccgcacctgcataaaccgggagatcgggcatgtgcacgaggaggtgcttgacttcggttacaacctcgaggaggtgttctttgaaaccaacgaggaggatacattcacggccattagcccagtgctgagcctggatgacgattccgaggggctcaccagagccaatatgaacaccataatcagtaactacactaatctcagcatcccaaaagggaagattatccccatgattctggaacgggtgaacgtcaaagcaaccacgctggccaatgcaaagagttcgttaggcacttttgatgtgagccggaactactattcaagacccgtgcagccgaatgacagcattgacacatcagacagttcaaacaacacttgggagttttggcgagcgacggcttactggagagctccgtttgcaaagttcggcggcgatctgcacgtggcgaccgatgccgtcctcaaaacacaatacactgacatcagcggaaggtccgacaatggggacgaacgtagagttacaagacccaagatgggcatggtggaaaccggcgatgaggacgcctatgccatctacaatgatgtggcactgaagctcaaggagaagatgtatccagaatttaatgtgtccgtggatgtggccaatctccgaaaaggaaggttcaatgactacagtctctacgataaggtttacataaagctacccaactccactgagcttgtgaccgctcgcgtgacgaaaacagtgaaggacgccaatgacatttcgaggaacacggtggagctgtcaaactacaccttcagctccaccataaagaacattcagaatgagacattcatcgacgcctacaacgtcagcttcaagtatcccaacagcaagaccctctctgcccggcttgtgaacctggactatgacaattccaatccggattccgttcagtatcctgccaaccagatgataacgttcaccgtttacaataaagattcccagtccatagtagcctcctacaacaagctaaccaatgcccagggctatgccacaatcaacatgaagtacgatcccggaaactatgagatcgacatcggatttggaggggacgaggaataccttgactgttcaacatccgtggaagccaatgtctacggaaagaaggtggtggaaaagcctgttgtggtgaagactaagtccaagacaaccaagaaaacatcctccaagaaaaaggcttcttccaagagtactgccaaaaccaaagcaaagacccgaagcaccaagagatactacagcaagtatggcgttagccctgacggtaaatatctcatggcgatcggtcgcccaagcgcaagtggagagctggccaaatacgggtacaagttttacaggacagtgttcgtacggaaatgccctatgtgcggaagcactgagatctactggtcaatcttctgggcaggaaacgagcacggatcgtggggaaagttccccgctaccggccggagagaatcaggctccgcagaaggtcaaatcttttgcaagaagtgcgatgcggattggtcaatcttcgggaacaaccacaattcaagccacaaggacttgaaaatttacaagaaacctgcccgcagcacaaagtcagaagcctacaccttaaagaagggcaaaatgtactatgacacagtaacagtaaccgtcaaggagaagaagaacacaagctccaaagaacgcgtagtgctggctaatgacattcctaaagccattgtgcagctcgctctgagcattgtggggaacagtacaggtcttgctgctgcgaagaagattgccaagtggtgcgggcacaagcgaaacctgaaatgggttgaatacaggaacttcaaacatggtgtctcttgggttcgccgtaagcgcaaatgtaactgttgcgatggggcccgcttcatgctgacgctgatggacgctgcagggtgcactgagaaactcaggttacagtatgtgaatgtgagcggtggcaaaggcgggcacgtgttcaccaaaatcactgtcaaggaaacaggctcttggtgctatgtagaccccacctgtaaatttgagaacggaaaaaacccctggaaccactacatcaagggttacggcagtcccccagggcatgtctacaattacaatgggcccatcaatccgccattttga

SEQ ID NO: 2535 - DNA, 1518 bp, synthetic construct
  source 1..1518: mol_type = other DNA
atggtcgagaagatcacagtgagtccccaggaagtcagagggtacggaaatgttgttgacgagaaggaattggaagattacgggagctaccgatgtgatgtgagcgagagctcggaggtgatcaagggtgttgaggaacggatattcagcgtttctggtgttccggctcccgctctgagcattgccaatgttactgaagacactcgcaggggccggtgcgcccacatctccgcctcctttgaggatggggaaggcgatggcttggatgataaggcaatttccctcaaaagcggcgatgatgtcctggcaaccatcacaacgggaagtggggaaaacgtgtttgatgtggtcctctatgacagcgctcagctctatgctgtctttgatggagatgactattatcctccagctgtcagcgaagcaatcaccgtcaatcctgcaaaaagcctgtgggatgtggagttcatccttgacgaagaggagtacgaagtgggagacacagccattctgtccgggaccgtgggaacgattgtggacgagattgtggacggggagattgttacccgcaggcaaatggaggcgaatgtgacactgaccctagtaacggacttaggaattaggcgctgctccaccaatgccaacggggaatttgtgcttcaggtgccgaacattcagcagaaccaatggagagtagtgatcgccgccaccagcacccatctggtcttcaatggcctgatcgatgtacccgtccatgactattccctcgtgatttcagggtcagaaaattccactgccgcctccactatattggtggtcggtctcaccgacttcaacagcatggtagagggagccacaatatccatcgctgggagtgacggctcgtcttacaccgctgtaacggactcgatgggcggagccacagtgaatgtgggcagactgaacggagccacaacattcaccgccacttacggcaatgtctccagcacggtgacggtggtgccacccttggactggtacgatgcgtcaaactacaccgcaggctcaggccggatgccatcctcgagagcgagttcaatctatctgcaggctgtgggcggacgatggctcaacaaggaatttactgacagtgagagctatgtgctcgagtttgacctgatcctgagcaaaaacaatcgtgagggtttctacttcggtgcaaaccctaacagtaacaccaacagcggaatcagcatcttcaaagacatctctaacaccatgattgagacattcgattccacaggcactgcaatacgcctggaaagctcattatcagggagctatttcaacaccggcactcaccacatccggatcgaaagggactatgacgtggcctacatttactttgacgaggacctgatattcgagtttgacgatgagatacttagctacggtgcggaggatcagatgtacaataccgtcggtatcctatcttggggcagtggcatcatcgagttcgggaactttgagctgagtgactga

SEQ ID NO: 2536 - DNA, 159 bp, synthetic construct
  source 1..159: mol_type = other DNA
atgaacgatgaaagctgccgcaactgtgtcttcaggaatgaggactacccaccgttctattgcgattttggggacgacaaccccgtgatctgcaccgtgaagatgaaaaagatgcgggaatacaagaaagagaagctcagaagctgtctggacggctga

SEQ ID NO: 2537 - DNA, 687 bp, synthetic construct
  source 1..687: mol_type = other DNA
atggtgcggttcagccgcgacatgctccaggacggagcgaagagaatgtttaagtggctacgcaagggcgaagggctgcctaactacttgattatgtatgatatggaccggaataaggagtataaactggtcccaaaggaatatgcagggctgtacgagtcccgaaacattttctggatcaagaacggacgggagccaaactacgtgacactgacttccgttgcaaggaatccccttgtgatggactaccagaacacgaattacacctgttgcccaaccagcttgtcccttgcctcgcaaatgctgtaccactataagtcagaaagtgagtgcgccaaggccctgggaacaagcaagggcagtggcacaagccccgcacagctgatagccaatgctccgaaattagggtttaagatcatccccatcaaaagagatagcaaggaggtgaaaaaatacctcaaaaaaggtttccctgtaatctgtcattggcaagtgaaccagagcaggaactgcaagggagactatactggcaacttcgggcactacggtctcatttgggatatgacctcaacccactatgtggtggccgatcccgccaagggcgtcaacaggaaatacaaatttagctgcctcgacaatgctaataagggctaccgtcagaactactatgttgtctgtcctgcgtga

SEQ ID NO: 2538 - DNA, 2250 bp, synthetic construct
  source 1..2250: mol_type = other DNA
atgaaaaagcactgcttctactttctgggggacagttttgccgacatatgcaacgaggccatgttttgtgagaaacacttagtggaaggaaactatctggattcaattatccgcgcaggcaaggctagcgagataattaccgtgaacatctgtgaacttgagggccaagacggcctgataagcagcgggcagaagaaacggctggaaatgcttggatacaagggtatcatcagttatgacatctacaaaagattgaaccatatcaggaaaatccgaaataaggcggtccacgggcatctgagtgacattgaggacaacgccaatattctgcacgcctatctgtacctaatttgcgcatacttctataaggagtaccgcgacactaacttttccgcggaagactacacgggccctatcatggacattgcctcgaagcctaaagagactgcttcagagaccagcgaggataatgaaaatatcggcgagttcatttcatccccactggatgattaccttttcgagaagtatgacgacagctacctgctcaacgagctgtctaagcttaaggactcttcaaaggaagctgtggaagacgacaacctcagcgagttcaaggaataccttcacatcgaccgctctatccaagaggatttcttaaaggcactcaacagagccactagtttcaattcatctcatctgattatgctttgcggtagcgtgggagacgggaaaagccacttgattgcaaacctgaaaaagaaaaacccagaactctttaaccagtttgctatccactatgatgctacagagagtttcgatcctgagaagaatgccatcgacacgctggcctcagtattggaacccttcaatgacaacaaccttaacaactcgacagagaaacttatcctcgccatcaacctaggtgtactgaacaacttcctggaatcctcgtatgctaacgaggattacacgaaactcaagctgattatagaagaagcgaacatcttcgaatctaacgaggtgtccgacaacatctacggagacaaggtgagtttcgtcaccttcagtgattacaacatgtttgagctgaatgacgacgaaaacagcaactacacaagctccaagtacatctcttccctattcaataagataacccagaaggaggacaccaaccccttctatgttgcatatctcaaggataaggacagccacttcatcaatcctataatctataattacgagatgctgatggatgaggaggtccagaagacaatcattgactacctcatcaagattttcataaaatacagaaaaatcatttccacccgcgacctgttgaacttcatttacgagatcatagttcccccggaatttctgaagagtgaggatctggacaatatcaacgatttcatggactatagcctccccaatctgctcttcggatacccagagcgaagcgatctgttgaagctatgcaatgagctggacccgacactgcatcggaacgagtctctggataagttcattatcgacctcaacattaacgacgatacggaaaagatattgaatcgttactttgatttcactcggtttaacttccttgaagagtacggcgagtacctggtcgattttagggagtttaacaatagcgaaaaagagaaggtcaccaatattctaattaggttcgcagtcttctatggcaagagcattatcaagaataatttcaaggataaggtgtacctgaactatttaaaatatctgtatgcctacaatacccagtcccataaggactacaaatacctgttcaccgaagtgaaggacgccatctttaattggaaagggtcctataagaagaacactatctgtattgacactttggattccttcaaagtgtataaaaacctgaaactcaagccatctgttgacaaattcgaaaaatccctgttggatgggctctttctcggaaatcggttcaaaacagacataaaaatttacttctccgtagagtctaacaaaaagaaaatcccccttaatgtggatttttcactctatcagtacatcatgaaattatataatggttttaagcccaatcagtcggacaaggacgatctcatcatcctcgacgaatttatcaacaatctgctggacgaggatacagatgatgatttgtatgtgatcagtctggagacctacgaagagtttttatttgagtccaatgattttggcacctttgaatttaagaggggctga

SEQ ID NO: 2539 - DNA, 1371 bp, synthetic construct
  source 1..1371: mol_type = other DNA
atggacttctcagaaaattacaacatcttactgaagcagatgacctgtgacgtgaataaaaggaagctgatccatcagattaaccagaatagcccactgttgcctttcaaaaccaatacgcccaaaaaggccaactttgagaacggcttcgacatcatactgggcgaactgtccagaatcctgctgaacaaaactatcgagaaaaactttaaacttgataacattgtttccaacctcatcgataataatattgaaatcgaagacggaaccaaggagtacataacaaaactgctcaatgaatatctgttcgatgaaaagaatgatctgaaaataagccacccgaacctctacctgtacatccctctttccaacaacaaaagttccaacggagagcaggaggtcgccctcttcctgcgagatattttctgcaagaataaccagaaccttatcaactttttcgagtcatatgacagcaatcacattatcctcaatctgatcctcaagaacactcccaacttgcaccataagataaccgaaactaagtacgtgattcattttgaggagatcgccaatttattcaatgaggacatcaactatgcaatcctttataagaaatttttcatggagaacatcgggaacattttcgcttactactatttcttttatatcagccagttaattctaaagatttcaaaaggctttaatgataataacgaatttgagaagctgtactacctcctcgactgggagtctgcaagtaagaatcggaagtcgctgaacagctactccttactcaagcaccactctaagcccctgtatgcaaagatggccgtcatagaccagatcaacacactactggggacaaacaatctcctcgagaaggatatttccgaatatttcaacaacctggacatcaactctaagaacaactttctgcacttccttaagaaatgggttagcgattatcgttacgtgaggaatttcgacgataaggagctgccagacaatttgctcgagctgacagaaatccttttcgagagcctgaaaaacgaaaaactgggtgtggatggcgcggtccaaagccgctacgccttgaaccttgaggacatagctaaaaagtacctgttgaagcggcgcggttcgtatgggtatgtgctcaatattaaccgggatatgttgcttgtactgaccgccctctgcgtgaaagacaagaaaatcaagctaaatcagctattcattgagtttgagaaaagaggagtgtactttgacaagtactcaaaggaagaggtcgtaaactttctgacgaagttgaatctgattgacaagaaaagtgacagtggcgatgcgcaatacgtgaagccagtgctgtga

SEQ ID NO: 2540 - DNA, 5223 bp, synthetic construct
  source 1..5223: mol_type = other DNA
atgcttaaccagttttacgactacctatccaacaaattactcaattactttgacgacaccaagatcctgagcggtgagaaatttttcatcagcttcgatgaagatgaccagatcatgagcttctataactccctcaggagtattgccgagacgaatttctcctgttctgaatttatatatgtccatactatttccggaaaggagtacaacacttattccataaacattaacggagtcaagtttgtcattagcgaaagtctgacaattaacgtggacttccttgtgaccctgagaaatcaagtgaccagccaggagggggtttggaaggacacggccctgctggtgatctgtaatgaagcaatcgacagtattggcaaggggatgcgcaaccttcagaaggagggcatgcccctgaacgtcaagtcgatctccaaaaatctggaggatgaaattaacgattcccaaatcctcaactactccgataagcagatcgctaagttttctctcaacatccaggaggaggaactgtttcaaacaacactctgggactacgagaccatcctcagcatcatcaacaaggggtttgtttccgatgaggacctgcgcgagctcaatcttttcaaagatgaccagctaaaccaaaactctccccaaaagatgctgaagcggctcaaggaaaattacgacacattcaacgaggtaaataagttttcacaatacggagataagaaagagcagctgaagaacatgtttaccgattcgggagtgtctatccttagcaaggacgactggtataaagcagagtggaagatggtgaagaagtcaaaggacgacttcatcaaccagcagaaccccctcaattacaacgaaaacttggagaagatcaccgagaatggcctcaattattgggagatccctaactcatttacgaagactggaaaaaggaagcgaaatatcattgtgtttaatccaaaccactcccatgaagttagtctcaagttcagcttcgaccagatcttgagtaactcattcctgaatacaaattcaaagaaattcaccatcgctcgcggcaagtcactgattgtcaattttacgctggactctagtgagcccattttcaagactataaagtacaaacataagaatgaaaacatctctgaatttacctttaacatcgtggtgctcaatttcgagcctgagattttcaattcgattaagtctcgttttagcgtcaacgtcaagtctaaacagatcatcgtaaccaatgacgaggatagtttcgatattgtgtttgggacgggttcaaaagaaatagagaagttaatcaaggagaatggtgagaagctgtatctttatgacgatgaatctctgataatcagcgagcagtctcctgcgtggaacgatggaaagcttagtttcaaactctacaaagacaacaattacgcccccttcttgatcaaagaaaaatcgaagaagaccctgcccgtgaactcctacgtaatctggaatctcaaacgcagaaacatggaaaactttatcttcaatggagtaaaggccgttcaagatgtcaacagtttctacctcgtggaagagtttaaagagtttctaaaaatggaacgagaaatcattaaacaggacatattttacgctaaaaggaatattgatggctctctcgaaaaaatcgaagtgtcattcagtaacgagctcgaaacggcttacatggacatattcaattactacaagaccttcgatgactctccagaagacaaccttcccagtttagtgtatctgaacgatgacttgaaagagttgtacaagaaattcataaccatcttcaataaggagataagcgagattgaggagaatagcattctgtcggattttaaatacaagaagaacttgcttaagctgggtcgtattgagaccgacaacaagataatgtattctcccctgtcgccactaaatatcgcgtaccaactggaggtttctaagcagtgcggcaacgaggacctgtccgtgaatatactggagcggttagtgcccaacaacttaatcccttacatttgttccgacgacggaaaagagttgtttcggccgatttatcaggaagaagcccatgaatggctgatctacgagaaatccgaagaagtgtcaattggcacaacaaatgtattcatcagcaacgttgtgactgaaaagcttaaccagtttgtcaaacactttaactacctgtttagcttcaacaactccagccccattaagattaacctcatcaacataaaagatgataaggaagttgtgaaaggcgtcttcaacttcattagatccagattgccggataagaccaagacaaaaaaggttatccccgttgagatcaacatctacaacgacgccgaaaagagttctttcgacaacctgttcgactgccagtctgaaatccagctgctggaggagtttggaatcaagaaactcaagtccgacatcttcgatccgatagacatcatccacatgattcagaacaatattagctattataaacatccatttaaaaaggaggaatacgaatacgctcatctttccttctataaagtcaaaagccacaacaacatcgccaatgacaacatggacaaaattgagactggcctctcgctgaacggcctgctgtcgagcgtgacctcaacgacgaaacactcagagtatcggacgggtttcggtacaaacaacattctgaatatgagcaatcctctgattaagacagtgattaacctgaacgaacttgtggagaacagcaagaacttcggcaaaaatacctattcaaaaaataagtccgttatcaccactgttgagttagaggaagacaatattgaagagttgtacgacaagtctcactgggtaacattcatcgaacctacatttgggatcgaatactttgacagtagcgatagcaacttgatcatcatccactacagcgaccagtacagttcctctagcaagtatgacactattaccgtgactaacaaatcaacacagtacgaggagattatacgcgacttcctccagtccaagtacgtcaaggttaccgatgaggaattgtatgacgtaataaagatgttcaactcaattaatggggagtggctcctgcgagtcattagcaactccggccactacgacagggaaaaactgagtattatctctgctatcaagtattgcctgtccattttggaccataaggatattgtgtggattccagtgagcatggaggagatcctgcgcatcgcaggaaatgtgaagctggacaagaataaaggcatctttgacagcaagctgataaagggaaaccacagtgatgatctgctattcatcggggtcaagttcaatgaggataatagaatcgaggtgatattctacccaatcgaagtgaaaatagggctgaataacgcttcaaccatcaagaaagggaaaagtcagttagacaacacttataagcttctcaagacccagctacaaaacatcaacgtggagaacagtgaatttcggaataagttctttcggaacttcttcatccaaatactgctgtccaacgagcagaaactggtcaccaaccacatttgggatgaaaaaggactcgaccggatcgaagagtttaaggcagaactcctgaacgacgagtacgacatcctctatggtctggaggagtacatcggaaaagggtcgttggtgagctttaaaaaagaatctcatcacatctccatctatatggacgtggataagcaagtcattgagctcccagaagactttgcttattacgggctggccactcccatcagagagatccacgatgagattcagtccgacaatacagatatcctggctgaaaccctccttagccatgtggatattagtgagattagagccaagaacaatgatatctgcgactcaaatgaggatatgagcatagatgatgatttcgacaacctgtccgagtttgaggacagttttatcgaggaagagtcagaaatcagcgaagagcccgatgaagagttgaccgatgcgacttccagcagcgacaatgaatcaattgagaacattggcgagtcccctagcaagattagcaatgtcagggcactgatcggcacccagaagggttacaatcacaaagtgtattgggaatttggccatccttctctcgccaataggcacatgctgattcaaggcaagagcggacagggtaaaacctatttcatccagcgaatgcttaaagagctctccattcagggcattcccagcataattattgattatactgatggattcaagccgtcccagctggagcctaacttcaaagactccctgggcgataagatcagccagtacttcgtggtcaaggagaacttccccatcaatccatttaagcgcaacacgatcatgatcgataaggacatattcattgaagaagacaacagcactattgcgagccggttcaagtctatcattaatagcgtgtatgggctagggattcagcagtccaataccctgtatcagacagtgctggattgcttggataagtacgacgataatttcgacttgaacatcctaaaagaggagattctaaaggacgagtcaaacagtgcccagacagtcctgaataagctgaacgagctgctggacaagaacccgttcgcatccactgacttcgactggagcgtcctggataataaggacggtaaagtgtacatcatccagctcactgccctttcgaaggacatccagacaatcatcaccgaatttatcctgtgggatttgtggaattacaaactgaccaacgggagtgaggacaatcctttcattgttgtgttagatgaagcccacaacctcgatttttccaacgactctccatgcagcaagatccttaaagagggcaggaagtttggatggtctgggtggttcgccacccagtccgtcaagggctcgatgaaaatcgacgaaatagccaaattagagaatgccgacgagaagatatacttccacccaacggatgtgtcaacaatcgcgaaagacctgagcaaggacaatgaggacaaaaaaatatacgagaaagagctttctcagttgacaaagggctattgtatcgtgcaagggtccgcaatagattcaagtggcaatctgtatcagccaaatcctgtaactgtgaagatcgaggagataagtttcgatgagaactga

SEQ ID NO: 2541 - DNA, 3165 bp, synthetic construct
  source 1..3165: mol_type = other DNA
atggagagtaaggacagaatagagaacacgatcttcaatgacaagcggatggatgcttatatcgacaagtacttcgaagagttcactctgagttcggagcaggaggaggccctgaacatttggatcgacaagctgaacaacgaccagctgacctcggagaaagggaattaccacaacttcttcgaaatcattcttgaagacctactcggttacaaacgtagtgatgtgaaacacgaggagaacattggtgatgaaggccatcccgttgagttcgtgttggagaaagacggtaaagactacgtgatcatagaactaaaaggcaccacctacaaagacctcacgaagcgtcgccctggccagcaaagcccagtcgagcaagcgacaaattacgcttccgccaagaaggaaactgaatgggctaccgtgtccaattatgacgagtttcgattttttaatccaacagcacgggataattacatttcattcaagttcaggcagctgaaagatctggagatcttcaagaagtttcttctcgttttcagtaaatttagcctgatcgatgaggacataccgaagaagctgctgaatgaaacaaaggtcattgagagagaacttgagaacgaattttatcagctgtatagtgacactcgtttaatgattatcaaggagctggaatactcttccgaggacatcaataggatcgaggccataaaactttctcagatcatcttaaatcgctttattttcctttgttttgccgaagacctggcgctcatggaggaagagaccacggcggacgtgctgctgacaccccttaagcacagaaacctgatcggaaacaccatgtggaataggcttaacgaattatttatctttgccaaccaaggaaacaagcatcgccgcataccagcctttaatggaggattgtttgaggacgatctgtcgaacctgaaaatcagggacgagattgaagacaggtccttcttcgagaattggaatctgaaagaagacttcgaagacaaatatgaggatatcgctaagctcatcggcgtttacaaggacactctgaacccaatcttcattaaccttctgatcattagcacatacgactttgacagcgagcttgatgtcaacatcctcggacatattttcgagaacagcattagcgatatcgaggagttgaaaaatgacaaccaggagcagcggaaaaaggatggagtgtactacacccccgagtacatcacagactacatctgccggaatacaatcatcccctatttaagcatttctgggaaggccagcacagtgcacgagctgctttacgagtatgaaagctcgaatagcctggacgtgctcgacagcaagctgacgaacatcaaggtgctagaccccgcctgtgggagcgggagcatgctgaacaagtcagtcgatattctgtttgaaattcacgaggcactgcatgcctccaaatacgctggcgattcatctctggaccggtttttcgatagtctggaaaagcgaaaggagattataagtaataatatctatggggtggatctgaacgaggagtccgttgagattacgaagctgtccttgttcctaaagctcgccaccactgtgggcctgaaagaggggttccagcttcccagtttggacaaacacattaaatgcggggattcacttgtggacgatgagtccattgccggaaataaagcattcaactggtacgaatcattctcagaggtttttgagagtggcggctttgatatcatcgtaggcaaccctccgtatgtggatatcaaagaaatggatgaaaaaaccgcaaagtacatcttcgataattatgaaacttctttcaacaggataaatctctattctacatttgtggaaaaaagctattacttgctaaaaaacgaggggatcttctcctttatcatgcctaattccatcctgtttaactctacttactccaagatcagggaactaatcctgaataatacctccatactgaacattgtacggacctcggacgatgtgttcaaagatgcgaaggtggagccgattattttgatcttcaagaagggctacgacgagggaaacaagaccaagatactcataaagaaggacgacatggacgagattccaatcaacaactatagcgaacacttctttacccaggagagatggtttgaaaacaacagcatcattaacatttttagcgacgactttaccttcgatctcctgaagaagattgacggcaacaacgagcgcttgattgactattgcgatttcagtctgggtctcactccttatgataaatacaagggtatgtccgaggatattatcaaaaatagaaagttccactcaaaaatcaagctggacgatacgttcaaggaattattggatgggtccgatatcacacgctacaacgtgaagtggggcgagaaggagtatattaaatacggggactggctgggagcccctcgggaggagaaattcttcaagaatccccgcattctcatccgccagattctgtctatagcccctaaggaatctcgaaaaaggatcttcgccgcttacaccgaagaagagctctataacgctcaaatcgccttcaatctggtcctgaaagagggcttcgatgataaaaatctcttgaagtacttcctcggaatcatcaacagcaaaatgatgacttggtactacgaagagcggttcatggacaagaataagaagaacttcgcaaaaatcttgattgaaaacgctaagaacctcccagtcatcattaactcaaactttctggatgagatagtatctaatgtggattcaatcatagagttaaacaaagagttttattccgtcagaaatgcattccagacctggcttaagatcgagtttgagatcgagaagctctctaagaaactagaaaactactacgacctcaacttcgaagaatttctcaaggagataaagaagaagaaggtagtcatccgacccaatcagatccaggacctctccgaactctttaacgaaagtctgggcaaaatagaatatctgcagagagagatcaaggaagcagacgagaaaattaacctcctggtctatgagttgtacggtctgaatcatgaagagatcgaaattatagaaaatagctttaacgactga

SEQ ID NO: 2542 - DNA, 261 bp, synthetic construct
  source 1..261: mol_type = other DNA
atggacgatgaaaccctgatcctcattgagtacatcagaaacgcccccacccgggagatggtgctaaagtccttcgaaggggtggactttatacgaccaatccagatcagcaggaaaacaggcattcaccccaacaatgtcagcaagaagctgaaggacctgcgcgaacacgagctggtatatgtcataaacccggagtaccatgtgcctaaactgtaccggctcacggagaagggaaaaaatatgcttcagttcttgtga

SEQ ID NO: 2543 - DNA, 2061 bp, synthetic construct
  source 1..2061: mol_type = other DNA
atgaataagaagattatcttatccctcctgttggtcctcctggtcgcgattagtgtctctgccgttgccgcagctgatgctgatgtcacatatataaacgatgccgccgatgtggacgatgtggcagacgagaaggtggcgccgctgacagcctcggctgatgcccaagacatccagactaagcttgataatgctaaacccggagacacaatagagctggagaacaagacatatgacgtggatacaacatttaatgtaactaaacaggtgaccatcaaggggcaggacacggtcatcaaagctagcggcgcctcccagggtgggagcggcgcactcttcattgccaatgaagccggaactgcgtttgagggaataacctttatcaacacggacggccataagaactatggagaacaggtgagcggatatgctatccaattagctattgagaatggtactgtcgacaactgcaagttcatcgactggagtagcggtgtttacgggaaaggcgcctctttctgcagcattaccaactcttacttcaacgggtcatccgaacaggtgaccaatggcgggaaaaaagaatacggtacaaaggcaatcaacctaatggggtcccacgacattaccgtgaccggatgtacctttgaaggacaagtgcttgacgccatttccattgccagcaattcaggtaacaacatcatgaccgacaacactttcatcgacaactgttatgccatctacttcgggggcgcgtccacccagggctgtgtgatcgcgaacaactcgttcatccggtgcggctactgcgtggatgacaagggcaacgtaatctttaaagatctgcctataatcagtactcagaaagccgctaacggatacatcattgctgataacacgattgaggcaaatgagggctctatctttatgaaggctgagtcaggaaacacagcacacggctatccaagtaagatcggggacataaacattacaggcaacaccattaccgccactgccggggctaatcccgaaggcataacattcatgtacatcctcagtaactctggtcctctgaacccatatgcacccattgcaatcgtgaacaacaacctcgacgccggcataacccctgtgaccgtctggtatgcggactgggacaatgaaaatggtactgttataccggccgccgataaggccgttacctccatcaacattgccgagatcgctgccgcagatggcaccgtcactgtggagttggtggacgttaatggcgctcctcaggcagggcagaccctgtcctacaaaatcgacgatggcaatgcaaccgagatcgagacggatgaaaacggtaaggccgtgatcaatgttccaattgatgaaaacgcgacagcccaaacagtggccgtggaatttgccggaactaacgacctggctgccagcagcgcccaggtgtcattcaagaacactgcaacaaagaggacagccacccagatcaatgcgaacaatatgagcgtggtcacgctggcacccaataccggggacacaaatgacaattacttcaacgctaccctacttgatgcagagggcaatccactggtgaacaaagaggtcaaaatcggctttaacgggaaggagtatactaagaccacaaatgagaatggggtagctcagctgaaaattaatctgggatacaagggaggatacacctttgctgtagcattcctcggggacgatgagtatgaagcatcatttggagtgtacttgattaatgtggccgcgcagacgcccaagctcactaccaaggctgccacatacaaggcttccgccaaaaccaaatccattagcgctaccttcaaaaccgagcagggctcggtcatcgccaataagaagatcagtttcactgtcaacggcaaaacgtacactggcactaccaactctaaaggggtagccacggttaaggtgtcaatcaataagaagggaacatacagcttcacggctaaatatgcaggtgacaacacctacaaagccgttagtgccagcgcgaagctgacgataaagtga

SEQ ID NO: 2544 - DNA, 2091 bp, synthetic construct
  source 1..2091: mol_type = other DNA
atgtcgttgtccatctttgtgctggttatcggaggtggctttatcaataaaagaatattattgatcttcgtgtttctaatattcttcataagcatcggctctgtagtggccaatgatctggattccaattcagtcaaccaggacaactatatctctgatgtggactctttcgatggttctaactcggtgctgtccagttcgaacttggacagtagcattgataaggacaattatctgaaccttgactctaacaacaacctcaacctggattccgataagaacagtgtttcaggttctgatctgaatttaaataatgctgacctcatcaattcggtgtcagggtcggacctgaacctcaacaatgccgatctcatcaacaactcaactactaatgattcaagcaactcaaacaattcaaacaaccttgagaaccttacaaacctggatgattccaagggtgcttctaatcagaagccgcagaagtacctgatccccaatgacagttccataggttctgcctatatccagaagatcattgacaacgcggcacccggaagtacaatccagtttacaggttccttctacaagaacatctatctgaagatagataaagccctgaacattataagtaaatctggcaccgtgatcaattcaagctaccggctgcctgtttttactatctcaagaggcgggtctggaacaaatatctccggcttcacagccaatcttgcaaactccttcgtagaggcaagtgatgtgtccgatataagcatctccaagaataaaatctttacaaaacggaaagccatcgtcctcgagaatgtttttaatagcaagattgtaaggaatagtttcctacgctttgaaacggccattgacattagcaagtctggcggcctgaccatatccaataataatatcaccccagataacggctacaatgtgggaattagcctgaaagacatttatcgcgacaaggttagcatattgaacaacaatatcaccggccatgaccgacgcatcgagtccacaggcatttacttcgggccaaacgcgaagaatgtgctgatcgaaggaaacattatcgacgaatggtacacgggtgtcgacttccctaactcggtcaataacgtgtccattctgaacaataccctcaatcacaatggtgacggggtaatcattaacgggtggattaataacttcaccttcaacaagaacgtcgtcactaacaccggccgagttggagtgctatttgactatgatttttatggaacaaaaggggacttcactttagagaagaacttcttcacccaaagcggccagttggacctcagaaacactggggaccaggccgtgacgattggggagaactttgccagccgccggtgtgttagggtggccatgaaaaacggattctccattaaaacccgtcaaaatggaaacggctattacttctcaattgtggacaagaacagtaggggcgtgagcgggctcccgaactttagtgcgacaatcagcatcaacggagtgtcctacaacgtcaatttcatcaattcggttgcttatgtggaggtggacggcgctagcggcgaaaacgatgaggtcctgctcgacgtgggggaggacaagcggaagctgagcgactggggagagactcagaacctcagttccagcgagatggaatactacaaaaagatctacgatgatctgatcaaaagcatggtcgaagagaccaacaatgataaccaggacatgaaaaaggtcgaagataagaatggaaccggctccaccccatccggggggaacggcggcggcgacagcgggatttcagacgggagatctagcgtcagctccaacggagactcctctcccgccagtgccggcacctctaacgtggcagccagttctgcaagctcaagcgcgggccccagcgctgctcaagcagacacgcctgaaagtagcacggtgaagtccttgagccttgatgaggagacctttagggtggctggggtgggtggactggtcttcctgatcatttgcgtaattggactttactaccgggaagacattatggacatgatcaaagagtga

SEQ ID NO: 2545 - DNA, 684 bp, synthetic construct
  source 1..684: mol_type = other DNA
atgatggatctgatctttgaatatctgattgttttcattctgctgttcgccacaaacatagcatttctgctccggtactctagttttaacaaaaacaaatttatccccttcgtgttaggctatgccatcatcgtctttgccctcacttttgtgtttagctccctgaacctccagaaggagtccatagacttcattccgtatatcctgttcgccgtaagtgctctgatgctcattattagcattcgatacgtgggctttggcaagaattacggaatcaatgacgataaggtggtgctctatggcaccatcttaagtagcttcctctcgatcggggcactggcgctgggactgaagtccgacaatcttttcctttccgggctggaactagccatcctcagcgtggtcgtgatctttctggtctacaagatctcaaaaatattcaacaatgctaagcgcccatactatgcagtcattggtgagtatatgttcttggagttcattctgcttcttattctggccctgaccttctctagcgtaagagagttggattactcaatgttcggaagcttcctaatccttacgcctacatacaaggtgctctacatgatcatagcgatcgtcatcttgttggttctgggggttctctacaacgactgggtgctgaaacggctaaaaaggaagtga

SEQ ID NO: 2546 - DNA, 642 bp, synthetic construct
  source 1..642: mol_type = other DNA
atgattcttcagggaacggagatactcacttcgtttatccacattgtctctgaatccctgctggcaccggtggtgatcgtgctcgttatcttcttaatctacgccattctgagcttcggcggattcctgaatgaatggttcacaaagaagccattgaaaagcgcaggactggaaaagttgctgcaggacatctcaagctccgactcacccgaggaccttaaggctgtgatagacgccagcgcgctctataaagagcagaaagagattcttgtcaagatcactgataactacaacctcgggccagaggcaaggaaggcgtttgccagtaagctgattgaagaggaggaaagcaatctgctcaagctcacaaccaaaacagatatcctggtacggctgggccctatatttggtctcctggggaccctgatccccctaggccccggactgtccgctctcggcacgggggacatcaccacccttgcccaatccctaacaatcgccttcgatactaccgtcaccggcttgactattggtgctttagggtacatcgtgtctaaataccgcaagcagtggtatgagagtgatctgacgaccaccgagacaatcgccgaggccattctggaaaaattgaaccagttttga

SEQ ID NO: 2547 - DNA, 318 bp, synthetic construct
  source 1..318: mol_type = other DNA
atgctgaggaagcgcaagcggttcagtgatgacggcgacgaggaccccatgtccgggatctccaacctctcagatgcaatgctggtgctcgctcttgggttcttgatctttgccattatggccctacaggtcaatccagacatgatggctaagacgcaggaaagccaggcgcaacaggccacctcgcaagtgagcacagggcaggacttcaacagtagcgccaacgcaggcgccagcctggaacagtccggatactcagaggtgggaaaggtttataaagatccggataccggcaaactggtcatggtacagggttga

SEQ ID NO: 2548 - DNA, 1623 bp, synthetic construct
  source 1..1623: mol_type = other DNA
atgaacaataaaaagatcatcatgtcttttctcctggtcctgttgattgccatttctgtctctgccgtgtccgccgccgacatcatcgcggacaatcaggattcaatttcatccaatgacaactccatcaacgaaattgctacagaggacatcagcaaggacatcaatgacaaatctctttcagatggcgtcagtaccggcgggaacaattggatcgtaaaacccagtacagatgggaaaagcgacgcaaactccattcagaaggcaataaacctcgataataccaagcctggagacagtctcctgctgactgataagaacttcaccctggagaagtccgtgagcctgaacaaagacctgacaatcaacgggggaaatatctacaatcagaacaacctcacggacctcttcatcatagatcctaagtctgaaggcggtcccaagaacataaccattaccaatgtgactttctatgttaacgggaacgaaaacattgtgcttgccaatggagagaattacggcacgacttatattgatttggccaatataaaaataagcaactgtacaatcctgccgattaacccagacagcaatatcaatgataccgtgctgctgaatataaagtccgatcgcacagtgggccaaacaggtcagagtacaggattcgttctagtgtcgggcaacaagctaaacggcattaacaccctgaagaataacgattacgtactgaaagacgactttgtgattcagaaggcggaccctatcttaaataccgccctaatttgccccaacatgactattaccacctatgataagaacacgaatgacactccaagctattatgaggtgaagttgatagaccagaacgtcaatcccgtaatcaaccggaccatccagattggcttcaacggcaagatctacgataggaccagcgatgagaatggaattgcgaaggtaaaactcaccctggcttacacgtcagtttacacatttgcggtgtacttcctcggtgatgaaagctatgcaagtgcctttgacgtttcaactgtgaccatcatcaagaaaaatgccaccatcacgcccaagacagtgtcctataacgtgaacgcaaaaacaaaaaccttaactgctaccctgaaagacaagaacaacaaggctctggccaacaagaaggtcactttcactgtcaatgggaagacctacactgccaccacaaactcgaaaggtgtggccagcgctaagatcagcctcagcaagaaaggcacatacacgttcactgcccaggtcttgcaggggaccatctctatcatccagtttccaaaaaagggaaagcttaccctgaatccgcttagtaccaacttgactgtcaagaagtacacattcaaaaaggcagccacgaagaagatccaagtcacgctcaaatccggcaagactgtgcttaagtccaaaaagctgaccatcaaagttaacgggaagacatactccggaaagacaaacacaaaaggcatcgctacaatcaccataaagctgacgaaaaaagggacctacacttacaccgctaattttgcaggagacaacacgtataaggctatttcgaaatctcaaaaagtggtgattaaatga

SEQ ID NO: 2549 - DNA, 822 bp, synthetic construct
  source 1..822: mol_type = other DNA
atgtcctttaagagccctgcagatacagccaaagcagtggcatctgccgcgaccgccaagggtgaaatgcccatcataaagcttgccattctgggtttcctggcaggcgcctatattgccttcggaggcttgctcgccgaagtggccaatactggggctatagctggcggagttccagttggcatcagcaaacttctcttcggggcagtgtttccggtggggctgataatggtggtgatctgtggatcggagctgttcactggcgacgttatgtttatgactatgggtctactcgacggcaaaacagatatcatgggcttgctcaagaactgggtcggcagctgggtgttcaaccttatcggaggactcttcgtggcttatgttctggcctacctgacgggcatcatggtgcctgaggcatttgccggcggggccattaccattgcgaacacgaaggcactggggggagccaccttcatggcggcggggaagtcaacagcttccctgacatgggtacagtgctttctgcggggtatcggctgtaactggctcgtctgcttagccgtatacctggctaacgctgctgacgatgtcgtggggaaattctttggaatttggttccccatcatggcgtttgtctgcattggatttgagcacagtgtcgcaaacatgtttttcatcccactggggatcttcctgggcgccgaggtgacctgggctcagttcttcatcaataatttaattcccgtcaccttggggaatatcgtgggtgccgccgtctttgtagcctgcgcttactggttcgtgtacctacgcgactga

SEQ ID NO: 2550 - DNA, 2052 bp, synthetic construct
  source 1..2052: mol_type = other DNA
atggtggagataaaatatgtgccaagtatctgcccgtactgtggcaccggctgtggtattaactttgtggtcaaggatggcaagatcatcggcgttgagccttggaaaaggcacccagtgaatgaggggaaagtgtgccccaagggcaattttggatatcagttcattaaccatccagacaggctgacaactccgctcatcaaagagaacggtgagtttagagaagcctcctgggatgaagcgctggatttggtggccagcactcttaagaagtatgctgacactgatcccaataagctcggattctatgcatgtgccaggtctcctaacgagaacatttacataacacagaagctggcacgggctggttgcggaacccagaatgtcgaccactgtgcacggatctgtcacggccctactgtggctgggctcgccacgaccttcgggtcaggcgcctcgaccaatgggtatgacagtatcgaagaggctgacttcattttttgcatcggcagcaacaatatggaggcacatccactgttcggacgcaaaatcatccgcgctattaaaaatggcgccaaactggtagtagctgacccccggtttactcccacggcaaagctggcgcatgagtacatgcagtttaagaccggcactgacgtcgccctaatgaacgggatgatcaagatcatcattgagaatggcctgcaggatgatgagttcattaaaaaccgaacaaaaggctacgaggaaatgaaggaggttgcgatgaaatacgaccttgacaaggttgctgagatcaccgaagctgaccctgagcagattgagcgggtcgctctcgaatatgcgcaggcggagaatgccgctatagtatactcactgggcatcacagagcactcccacggggccgataacgtcatgagcaccgccaatctcgccatgcttaccgggaatgtgggcaagattggtggcggagtaaacccactgaggggacagaacaacgtccagggcgcctgtgatatgggtgccttgcccagcgactatgtcggataccagaaagtggccaaccctgaaatcacaaagaagttctcagacgcctatcagatcgaactccccaccactcccggcctgacactggtcgagatgatgaacgccgcccactctggagacctcaaggtgttatacatccacggtgaggaccctgttctctccgatgcagatattaaacatacaaaagaggcaatagccaacctggagatgctgatcgtgcaagagctatttatgaccgacaccgccgccgaggcagacgtggtgttacctgctgcaggttggggggaacaggaagggaccttcacgagcggggaacgaagagtgcaatggttgcgtaaggcccaagaaccacctgagggaacaatgcttgactggaagatcatggaggaaatagccgtgcgcatgggcaggccacgcgaactgttccactacgaaaacgcggctgagatttgggaggagatccgagagctcgcgccgagttactacggaataactcacgagagattactcaagcccgagggggtccactggccctgccttgacccagaagatccttgcgagccactaatgcacaaggataaattcgcacaccccgacgggctgggtgtgttccaggcattggagcatcgcggcccggtcgaggtggttgatgatgaataccccctgctgctgactacgacacgtatcttgttccattatcatgccgccatgacccggcgctgtgagacccttgataaggaagtgcctacaggatttatcgaaatcaacacggaggacgccgcagaaagaggaattttgaacaatgagatagtgaaagcgtactccagaaggggagaaatcgaaattcccgctcgggtgaccgacgacattaagaaggggatcgtcaacattccgatgcactttaccgaatgcgccgctaatatgctgacgaactccgatagcttcgaccccaagtgcaagatggtggaactgaaggcttgcgccattcaagttgaaaaactgtga

SEQ ID NO: 2551 - DNA, 1209 bp, synthetic construct
  source 1..1209: mol_type = other DNA
atggcggttaatgtaaatgatatgttttatgcatattccggcaatgaagcaattaaggaaaaaggcgaatatggtggggtcgtcactaccatcatgaagtacctgctcgaggaagggatcgtcgacgccgtggtggccgtcgaagaggccgctgacctttacgacgccaaaccgattctaataaccgacccagaagatgtgatcaagtcggccggatcactgcactgcggtacactgaacttagcaaagttcgtgtccaagtacctagacggcgcccgcgatatgaagattgccgtgaccacaaagccctgtgatgcaatgaccctgaaggagttgatgcgaaagaggaaagtaatcgaagagaacgtgatcatgataggcgtgaactgcggaggaaccatgcctcctgtacccactatgaagatgattagggacgtgtatgaactggaccccgccgatgtcatcaaggaggagattagcaaaggaaagctcattatggagaccgccgagggcgagaaagcaataagtattgatgaactcgaggaggagggcatggggagacgcgagaactgtcagcggtgtacaatgaacatcccaacaaacgccgatctcgcgctggggaattggggagttatcggcgagcttgcaggaaaggcaacattcgtggaggtttgctcagagaagggtgctgatatccttgataaagtgatagaagcgggcctgattgagacccaagaaccaatcgaaaaaggagtgacaatccgtgctaacatcgacggcatcatggttaaacaagctatggcccagagagaaaaagactttgctggaacgtccggggacattctggaggtgtttgctgagtacaaggaagaatttagcaagtgcatgaaatgttacggttgccgggaggcctgtcccctctgcttctgcgacgactgctgtctggaggccgaaggtcctgaatgggtcccgggcggctatacgcctgccgcgcccttcttccatctgacccgcatggtacacatggtggatgcttgcactaactgcgggcagtgttctgaggtttgcccttgtgagatcccagtcagcaaggtgtgggctactgtgaaccagaaggtccgggacatcttcgggtactacagtggcgtggacaatgaggagccattgcccttcacggagtttgggcccaaaagctacaggcagtactga

SEQ ID NO: 2552 - DNA, 708 bp, synthetic construct
  source 1..708: mol_type = other DNA
atgagaattatttcaattgtgggcctcaaaaatacggggaagacttcgctgacaagcaagatcatcaaggagctgaccaatcgagaatttaaggtcgcttccattaaacattcacaccaccagatggaaatggatcacgagggtaccgacacctacaagcaaatggagagtggctctgacttcgtggtgggaattggaggccgcacctacttcaacatcaacgaacggctggacttggagcggattctattcctgataaagcttattgagaatccggattttgtggttatcgagggattcaagagctacccttatgccaagatcgcaacctgcaaagaggtggaagacgaatacacaatcaaaacggtcaatagctttgagatcacagatgaggagctgctcgatcttgtggacctcatcgaggaaaggtcctatgacatcctcgataccttattcgtctccgactgtggctataatgacgccagtatcataggtcaggcttttgcacagggaaaactggactataaccccgatactcaggcggaggttaacctggccatcgatgggatcaacatagggctcaacaagttcgtcagcaactacattaagcagactgtattgggcatactgaacccactgaaaatcaaggaatacggggtggaagacttcgagaatattgacctaacaatcaaaaacaaaaaggattga

SEQ ID NO: 2553 - DNA, 186 bp, synthetic construct
  source 1..186: mol_type = other DNA
atggcctgcaacgatgatttcgagaacaacgtgacgctggcaatcaatggcaatgacattgaactgaacaagtttacagacgacattatcaaagagaccatactaggactcctgaaggcgatcaaaaccagcgagtacggggtggatgaagtcaaggacgtagaaatcactataaagaatgagtga

SEQ ID NO: 2554 - DNA, 936 bp, synthetic construct
  source 1..936: mol_type = other DNA
atgaaggataaagtgcgggacgattacgaaaggccaattatttcactgcggattagcataaccaaccgctgcaatgtcaactgcatatactgccaccacgatggcatgctggacagctccagcgaaatgactcctgacgaaatctacgagatctgcagaattgcaaagaaactaggggtggagaagatacgcctatcggggggcgagccactggtgcgccccgacatcgtggaaattgtagagaaggtcaacagcctggacttccgtgacatttcaatcacaagcaacgggatattcctggacaaattggcaggtcctctcaaggatgcgggacttgacagaatcaatgtcagtttggacacacttgatgaggaaacctacaaaatgatcgtggggaaaaacgttttagagcgagtcaagaaaggaatcattgaaagttgtgccgttggtatgtatccagtgaagataaacatggtcgtgatgaacaacatcaacaacgatgagatcatggacatgtttgagtttaccaagaaacacggcgtgatcctccagcttattgaaattatcgagtccgagagctgtgatgacaatgacttcaattccaagtaccactaccccctcgctgaatttgaaaagcatctggctgagattgccgatgagataaaggtgcgggagttcatgcaggataggaaaaaatatttcatcgacggcggcgagatcgaggttgtgcaccccgtggacaataccaatttctgtaagaactgtacgcgcttgcgaatcactcccgagggcaaaatcaagccgtgcctgctcagaaatgataatctggtaaacctgattgaatttatccgggagggagcctctgatgaggagctcatcgacatcttcctgaagggaatccataatagggaacctttttataaggaagagaactga

SEQ ID NO: 2555 - DNA, 6930 bp, synthetic construct
  source 1..6930: mol_type = other DNA
atgaaaatccagcgcggtatatatataatactgaccttactggtgctctttagcctgtctgccgcaagcgccgcagacgacctgacagacgacatcattagtgcggacgagaatgaagagcttattttagatgagaccgtcatcgacgacgtttcaaacgccaatgacaactacgacgaagagctgattaaggcaaatgacgagaaattcgtctatgctggaaatgattcagatgagttaagggaggacccagggacctattccgggctctctagcgagattggcgcaggaggaaacattgtcttgacacacgattactatacttacgattccggcgacaccatcataatttccattagcaacagtgtgatcgacggtaatggggcgatcatcgacatggccggaagcactatccgagcattcaaagtgaccgcttccggcgtaacaattaaaaacctcaccatcaagaacgccaatgtgaccacagatgatctaggcaacaccgacgatgagggcgccgcgattgacttcgaaaagtccgggaccattgaatactgtaacttcattaacaactctgcaaacgctgccggggcagtctacttttataaagataacagcaaagccataaattgtaacttcagctataaccaggcggtatactctgggggtgcagtttgctttgaggaaagcgggactatcgaaaattgtacgtttgtcaacaacacggccgtgtatgatatccttggaggcggcggggccgtttgctttaacggtacagggaatgcgataaattgtaacttcaccaacaacaccgcgcaggggtacttttcctgggctggcgccatttgctttaacacaaatggtaacgcgatcaattgtactttcactaataataaggctcacgactctggaggcgcaatcgagatctacggcaacgggaagctggagaactgcagctttgacaagaactcggccaacgacggtggtgcagtcaagatttatggcgccaccaagatatcaaactgtaactttacggagaacaaagcagcagagctgtcaggggacggcggcgctatctactggaacgccagcgctggcaagttagagaactgcagtttcgctaagaactcagccttccacggaggtgccgtgtcctttgaggaagatggcgaggtaacaaactgtaactttaccgataacctcgccggcgacagcggcgccatctggtttacagcggatgggacggtagaaaattccacatttatcaagaatgaggcatgggatgagtacggcggcggaattgtcttctatacctccggggatgtcagaaattgtaatttcacggataatgaggctgataagcagggtggggcagtgtactttaacggcgcaggtactgtcgaaaattctaacttcaccaataacaaggcacaggatggcggggccatcttcttctccgaggacagtactgtcaagaactgtatttttgtgaagaattgcgctactgacattcggtctgataggtactttgagaggtgcaaatatgtattctacaagaacggggaggtgaccaactccagctttactgaaaacaatgcgacggagggtggcgccattcttttcaagggcaatggcaaggcaacagattgtaattttaccaataactcggctaaatttgggggggccatcgactttgagagccatgccactgtcgaaaattctagcttcaacgggaacaaggcctcctctaacggctccgccatctggatgaaccgtgcgggaggcattgtttccagctccgtttttgtgaacaaccgcgccaacaccggaaccatatttttccgcaatgataattccacttcccatttgacaatcaacgacaacattttcctgaataataatggtgttgcaatctacttcgataaaaacgactctgattccaataccgattacaactggttcggaaacaatgcaaccaattacgacatcgcccccgtggccaacaatgctgagataaatacttggctgttcctgaacaccacggtcaacccggatatgatttcgattctggactcactggacatcgcgtttaaactgtacgcttacacgccttctgaggtatccgaatatgacaacatccggttgaaagcggtcgacttgaccttgaccccaacaaacggaatcttcaacactaccaagacggagctgggcaagactgttcagtacattcccgagagtgatggaatcggaacactcacagcatcaatcgagaatgcctcctacactaccacactgaaaatcacagatggaaccacattctttgacctggattatatcatcaacgccaataataacaacacgattgtgttggatcgggactacacctacaactcaaccttcgactacaacttcacagatggaatagtcattgatcgtcctgtgacaattatcggcaatggccacaccatcaatgccgctgagatggtcagaattttccatattcaagcagacaatgtgaaaatcaagaacatcaccttcaccaacgccatcagcaacggatacgggggcgctatctactggcagggcgccaatgccaatctgtccagttgtctttttgagaataatagcgctgtcatggctggggctgtagcgttctatggaagcacgggcagtatcgtttcggattgcagcttcatgaataattccgccaacaacgggggcgcaatcatgtggcaggtctccgacgacagcgtggtttctgattgcagtttcatgaataactcggccatacagggcggggctatctactggagcagtaacgatggggtggtgtctgactgcagttttgtgaacaattccgccgtgcggaacgggggagccatatactgggaaaaaaataatgggaatgtgtccggctgtatttttgtgaataacagtgcggacaacggtgccatctatttcaataatcagaactttggtcaaaatctgacaatcaatcataatatcttcctgaacaatgatgccgtggcaatctatttcgtgcgcaacgactccgcctccaatgcagattacaactggtttggaaacaatgccacgaattgcgatatagcgccaacaagcaacaatatggagatgaatacttggctgttcctcaacgccacatccgaaccggaaggaatttctattcttgactcatgcgacatcatcttcaaactttacgcttacgctccctctggagtcagcgagtatgacagcagccggctgaaggagatcaacctcaccgtgactccaactaacggaaggatcaatactacccaggccaaactgggagaaaaggtgcactacactccggagagtgccgaatgcatgctaacagcatcaatcgaaaacgccttctacactaccagattgaagatctcagatggcaccacattccgcgacctgaacaatctcatcaaccgcaacgacaatgacacgatcattctcgacaacgatttcatctataactcacttttcgacagtaagtttaaaaatggaataaatattaaccgacccctgacaattgtgggaaataattataccatagatgctaccggaatggcaagaatcttccgtattcaagccgacgatgtagagatcaacaacattacattcgccaacgctaagatagacggcaatggtggcgctatctattggtattccggcgctagaggtattgtttctgattgcagttttgtaaataattcagctaagatgtacggagctgctatctattggaacggggcgaacgggaacgtgtcggattgcagttttgtgaatagcactgtgactgatgaacacggcggggctatctactggcacggtgccaacggagtggtgtcagactgcagtttcgtgaacaatagcgctaagaaatatggtggtgctatcttttggaacgccgccaatggcgttgtgtctgattgtatcttcgtgaacaattctgcgaagagctatgatggcggggcgatagtgtggaacgaaggtctgaacggtgccatttctgattgcagttttgtgaacaactccgccaatgatgggggtgccatcttatggaatgaagctgctggcgggactgtgagcaattgtagtttcgtaaacaatagcgccaacaagtccggggctgctatctactgggactccggggccaggggggtggtttcggattgcagttttgtaaataattcagcgaaccgcagtggcgctctctactggtttgctaatgacggggttgtgtctgcctctatctttgtgaataactccggcgacaatggggtgttgtacttcaacaacaccaacaagcgaaacctctcaatcaacgacaatattttcctgaacaatgacgtcgtggcaatttattttgtgaacagtgactccacttccaacgcagactacaactggttcggaaataatgccagcaactttgacactgagcccctgaccactaacgtggagattagtacttggctcttcctgaatgctacagcagacccaaaccccgtggagattctgaactcaagcgatatctcatttaagctctattcatataacgccacaggaatatctgattatgacaacagccagctccagcccgttaatctcacattgactgccaccaagggggacgtcgatagcattgctaaactgggggagactgtcatatacaacccaaccagccttggaactggaagcgtcacggcaaaagtggagaacgtcgcctatagcatcgagattaacaacatcaaatccaatcctaacctatcagtggaatccgatgaacttacatacggcaacaacatagccattgcgctgaattacgagtcggctgctaccggcaaagtcaatatcacattaaaaggcaagaagtccgattacacatttgcagacctggacctcaatgaaaccatttcactgggaattttagccgcggatgagtacgaggtcatcgttgaatactcccgagacgagatctacaccaacgcaagcgcccggggaacgcttaaggtcaacaaagccaacagcacactgacagtcagtgacattgaatttgattataaggatatgggatcgggggagattagcttcactaacgccacgggtgtggaggccaaagtgataaatcatgatgaggccattgtgttcgttagaggaaatacgattacggtactgaaccttagcgccgacagctacatactggaagtcacaactattacggacgaaaaccacaatgaggtgagcaagaatgcaacaataaccgtgagaaaggtcaactcgaccattaatgtgaacgacatcgtcctgtattacggcgagtccatcaacctggctgtaaccactgacggggccattggaatatcggccgatatcgacggcgagaacgtggagctcaacgagaacatcgtgacaatcccagacgatctcgagtctggaaatcacacactgaccatcaccaccgtgcctaacgacaaccataaggaggcaagcaaaaccgttaatatcgtcgattgcaggatcggcaatatcacggtggtggtggatggcgttgaatactctattcccgctgtaaacggcaccgccattacaaccaacatgccggaggagatcgagaagctgaaagagaacatcactgatctgacgggccagctcgaagaggcacaaacaaacgccaccaacctggctaacaacctcacaattgctaaccagatcgtggacaaacttatcgcccaattggaagaggcacaggccaacgcgacccagacaatcaatgacttgacgcaccagctgaatgaagcccagaccaatgcaaccaaaatagctaacgaccagacaaatgccaaccagatagtcgacaatctcactggccaactgaacgatgcccaaaccaatgccaccaagattgctaacgacctagaaaatgccaaccagatcgtggatgacctgacgcgccagcttgaagaggcccaagccaataacgatcagaccatcaatgatctgacgcatcagttggaagaagccaaagtgaatgccactaagatcgcgaacgacctagagaacgccaatcagaccgtggacaatctaacaacccaactggaagaagctaaggtgaatgcaactaagatagctaacgacctcgaaaacgctaaccagatagttgacaatctgactgaccagttggaagaagccttggccaacgctacgaaaatcgaaactgttgttgtcgacgggaaggaataccctatagagtatgtgaacggcacggcaacagtcaccaccaactctaccggtcctcagaacatcacgcacgagcggaaagccacccagatcatttataaggacatggaaacaactgctatcgacacgaaagttgacggccggatcggcaagtacttcaacgtcattctcaaggacagtgagggtaacattctggcgaataagcctattcaaattggattcaatggcaaggtctataacaggacaactgacgagaatggatctgctaagctgcagatcaacctcatcaaagcagacatctacacattcgctatctgctacctcggcgatgacgactataacggtagcttcgtggtgtcaaaaatcaccgtcaaggcgcagaagggcactctaaccgtgcccaacaaatcttacaaagcaaccaccaagaccaagaccctgtcggcaaccttcaaggccgccagtgggaaagtgctggccaataagaaagtgtcattcgttgtgaatggcaaaacctattctgccaagaccaacgccaagggtgtggcgaccgtgaacgtcagtctcaacaagaagggaacatatagcttcgttgccaagttcgcgggcgacaacacatacgccgcagtaagcaagaaagcaaaacttaccatcaagtga

SEQ ID NO: 2556 - DNA, 450 bp, synthetic construct
  source 1..450: mol_type = other DNA
atgccaaaacacatcgtgtctggcctaaaatatctggaaagtgtcgagctccggaaaagggggctgtcccaaaaggagatctcaagcgagatcggggtggacagaagtaccatctcgcactacttgaacggccgcaacatctctgccgatagcatcgagcttgctaaagttatcttagagctgaaccccaaggatttcatactgattgccagggtgctctttggagattacaacgaaattcggcagctcattagcatcttcaatatgaatcattacgacccgcagatagatgacgggtgtattggttgcggactgtgcgtcgacttgtgtgaagtgaagtccatcagccttgactcactgaaggcaaagattaaccctcgatattgctgtggctgcctcatgtgtgtggaagactgccccacaaattccataaagattctggaggtatga

SEQ ID NO: 2557 - DNA, 1104 bp, synthetic construct
  source 1..1104: mol_type = other DNA
atggtcaaaaacataaaggaaacagagggcaagaacttttgcattaagcgctcacttggcgaagaaagagtattgtctttcaaggatcacgtctgcgtcgggtgcggactctgtgaagccacctgccccgtggaggcgatcagcctggatgaggtggctcctatcgaacgcaagtatgtggacacgtatttcagtgggcatgagaagatagcccagaactatgcccttttcacaaatgataacgagatcaaggccaagctggacatttgcgaggataaatgcgttctctgcgggctgtgttcgggcgtgtgcccagcaggtgccctggagctggcgattgatggcgtgtccataaaagagaatgaggcttacccccatctggtcacgtcagcggaaattgatgaagacaagtgtttattctgcaagaagtgtgaagcggcatgcccgagggagtccattactatcgaccggaagctgcccaacagggcagacctcgtgaccggtgagatcgaagtggatgaggaagagtgtatctactgtggcgcttgtgctgagctgtgcccggctgaagctatcgtggtggacaaggcgaccggcgaggagagcatagtcattgacaaggaaaaatgcgtgtactgtctcgtgtgtaagaaagcatgtcctgttgacgccatcaaggccgtgtgccggtcctgctcctacggcgagtacgacctggaccccgccaaagcagcaatcacagggaacgccatcattgattctgagacctgcatcaaatgcggatggtgtgagggagtctgccctgctgacgccgctaccgtaaaacaggcatttaagggaaccctcgagatcgacgaggaaaagtgtgggacctgtggagcctgtatcgacgtgtgcccatgcaatgtcttgagctttccaaaaagcactgggcctggcgacagaggaacgcacctagttaaagaagaggattattgcatccactgtggtgcctgtgccaaggtatgccccaacgaggccctaacagtgactcgaactgatgttgactacaccccaacaagtagcaaaagttggattgccgctttcgaagccctgaaaaattga

SEQ ID NO: 2558 - DNA, 231 bp, synthetic construct
  source 1..231: mol_type = other DNA
atggaactgaaagtcgatcaggacaagtgcctcggctgcggcgtctgtgtgatcgcctgcccggtaaacgccagcatcagtccagagaacgctggaggacacgggtccaagacaaccgaaaccattatgatggtggagaatggctttatcaaactgttcagcgtggacaagtgtgacaagtgcgggacgtgccagatgttctgtcccactgaggcaatatggctagagtga

SEQ ID NO: 2559 - DNA, 537 bp, synthetic construct
  source 1..537: mol_type = other DNA
atgcattacgccaatacttatctggagaggccggtggtgggagatctggaaaacgtggcccaggaggggacgacaaaggtcctcaaatgcatgctgaatacagggtctgacatatatcagggagcttgcaagaagcgcggctccaccctgaaggaggagtataagaacgctagcggcacctgttacatggacccacgggacatggtgaaactgggcgtgaaaaactgggacacggtccttgtaaagactgactatggggaagttgtcctcaatgccgccaagtcacgagatgcgcctcacgagggtaccatcttcgtatgtaagggcccatgggccaacacaatcgtcagccacgagacctactgctgcagtgatcccacatacaaaggtattcacgcgactgtggaaaaaaccgatagaaaggtgctactcatggcagacttgatgcggtgggcatacaaaaagtacgttgatgaagaagatgacgacgtgatcgagaacatggagtccttaggagagaggcccgtgtacaactga

SEQ ID NO: 2560 - DNA, 1392 bp, synthetic construct
  source 1..1392: mol_type = other DNA
atgacatatgagccccccgtcactgattacgattatattgtcgagaattgcacgtgcgcattttgcggctgtaattgcgacgatctggattttttggttaaaaacgggcacgtggtggccgtccgccatgcatgccgacttggtgcaagtaaggtgatggaggatatggaccaaagattactagtgcccatggtccgcaatgaggaaggagtgcttgaagaggtggactgggacaccgcgcttgacactgcagctgagtacattgccaactccatccgaccggtgttctacggctggtcggagactagcacggaatgtatgaaggagggcgtggagctgggagaatacatcggcgccgtgctcgataaccaggccacaatctgccatggccccagcctacaagcgatgcaaaatgccgggtaccccatccagacccttggggaggttaagaaccgggccgatgtgatagcctactctggcagcaacgctatgaactcccacccaagacacctggcaagatatgctgccttccctcggggatacttcagacagaggggcaggtttgatcgaaccgttatcacaatggaccctaaattctcagacactgctaagatgtctgacaaatggattgggttcgaacagaacggtgactacgggttctacaacgccttaagggccgtcctcaaaggcaaaaagctgcagtctgaaagcgtgtccggcataccagcagaagacatctatgaattggccgcggagatggaggctgcagagtttggggtgctcttcttcggtctgggcctgacccataccctggggaagcagcggaacattgacatcgcgataaagttggtacaggacctcaacacaaacagtaagtggggactgacgccaatgagaggccattttaacgtaaacggctttaatatcttcatggcttatgagaccggttgggcttttggggttgacttctgccgcggatacggaaggtatatgatgggtgaaacaaatacaatcgacctgctcgtgaggaaggagccagactgtttcatggtgattgcagccgaccctggggcgcactttcctaacggagctaatcagcacctggctgacattcccgtgatccagatcgatattcactggggaccatccaccgagctggccgatgtcgtcctgcccggctcattcataagcgtcgaatgtggaggtaccagttatcggatggacggcgttcccatctggatgaaaaaagccatcgacaaaccggaaacctgtcgggatgatgagtggattgtgcgtgagttgaaggaacgcgtcatgaagctgcgcgaagagcctaatgtagccgatgagtacgtgccgaatgaggggctcgcctgcctcctggataagtga

SEQ ID NO: 2561 - DNA, 1719 bp, synthetic construct
  source 1..1719: mol_type = other DNA
atggagtatatactcaagaatgggattgtgtacgaccctgctaatgaggtgaatggcgaaaagatggatatctgcttcaaggatggcaagatcgtggaagacgttagcgctgacgccgaggtgctcgacgtcacggataaaattgtcatgccggcgggtgttgatccgcacgcccatgttgccggaccaaagctagtggtgggtcgactgtaccggcccgaggatgagcgccggggagtggcccagaagacaaagacaaccagagccgaggctggcttctctatcccaagttgtcctaccactggctacagatactcacgcatgggatacggcaccgtgtgtgaagcagccatgcctcctctcgaggcaaaacacacacatgaggagataaacactattcccaacattgacattaacccattgcccctctttgggaacaattggtttgtcatggaatatgcgcgcgaaaaccgtattgacgatctcgccgcattcatcgcagccatgctgcgggtcagtaagggatacggggtgaagatcgtaaacccatgtgggagcgaggcgtggggatgggggatgaacgttcacggctatgatgataaggcgccatactttgacgtgacctccagggaagttgtccgggctctggcaaaagccaacgagaaattgggacttccacactctatacatatccatcccaacgatctgggccaccctggaaatgttcctactaccattgcaacgttagactcaatcaaagacattgcaaaatcaacgaagccctcagcgtccgtaagggatcagaccatccattgcacgcatctgcagttccacagctacacaggaaatagctggaaggatgcagcctcgggggcggaggagtgcgctgacttcattaacaagaatccatatgtaacatgcgacgtcggtcaagtgaccttcgacgagaccacaacaatgactgcagatgcccccatggagtacgatctgtttaagattagcggcctgaaatgggccaacaaggacatcgagtgtgaaaccgccgccggcatcattccctgcatctacagccctaagactccagtgagtaccctgcaatgggctatcgggcttgagctgttcttgcacattgaaaacccatggcaggtctgcctaaccacggaccacccgaacgccggccctttcatcagatatccgaagatcatctcctggctgatgagtgctcccaagaggatggagatgattgacaatggtgaggtgcataaatgggcttccaagcggactggcctggctggtctcgaacgagaatacgacttttatgaaatcgccacaatctcccgagccgctcccgcccgcatccacggctttgctgacagaggcgcccttacccccggctacaacgccgatatagcagtgtatgacatcaaccccaatgactttgacccctccagggacccggaaggggtggagaaagccttcagcaatgcttactacaccatcaaagatgggcagatcgtggtgaaagatggggacattgtctctacaaagcagagccacaccatctggaccaatgtcataggatacgaagaagaggagaaacaaatcatagacagcataatgcctttcttcactcagtactattcggtcaagtgggaaaactatcaggtgcacgaccactatgtgcctaaccccactgtcgtggatgtagaggccaaatga

SEQ ID NO: 2562 - DNA, 867 bp, synthetic construct
  source 1..867: mol_type = other DNA
atgaagactattacttttgatcagaagaaaacttcgtcaattgctctggaatttgatgagttaatcacagataacatttatgcatggaccgaggaggacttcgccgaatacaaggtgcccataggaaattctcggttcccaatcaccgattacttcgacatcaccgttgaaggagaggccgagagtccggcggaggtgaagatgattctcaacggcgattgtaaccgcgtgaagtacatcggctgcaagatgagcgccggggaggtcgttgtgaacggggacgctgacctgcacgttggagcagaaatgagcggcggaattgtgaccgtgttcgggaatgtagccgcccatgccgggcgggagatgaaagggggaaaactcgagatcatggggaataccaaggagttttgtggcgcatcctatatcggtgagtggagaggtatgtccggcggagaaatcatcatccatggaaacgctggcaagcagtgcggcgaatgcctggtcggtggtaagatccacgtgttgggggactgcgatattctcgccggcattcacatgacgaagggcaccattgaaatcgacgggaatgtgaatcggtggcctggcggccagatgaagaacggtaatatagtcatccacggaaaagtgggccgccttcttgaaggcttcgtagagcagggaatcgtcacagaccccgaactggatggagtcacgtatccaggccgatacatcgagtacaaaggggacatagcgctgaacggtaaagggacactgctaatcgatgctgagaaaaacagggacagactgagcacatggattgaagaagacgacgagtataacgcaataagggagtaccgtgaccaatga

SEQ ID NO: 2563 - DNA, 303 bp, synthetic construct
  source 1..303: mol_type = other DNA
atggtcaaggagatcctcatggaccccgacgatattatagaatacgtgcggaatgaggtgaaagtggacgatatattcgaactgagctataacagggtgtttgccccaggcacggtgcttgggatcaccccggaggacgaggaaaccggggaaggactgattctgagcttacagctgaacggcgaactcctaaaccaggccgtagacattgacctgcatgcagttaaggatgagatcatcgaggcgcgccacctccctggcggagacgaggataaattgatcgtcatcgaggctacactgtga

SEQ ID NO: 2564 - DNA, 303 bp, synthetic construct
  source 1..303: mol_type = other DNA
atggtcgacaaggaactgacaatgacgtctgatgaggttctcgactacattaagaataacttcaaggaatttgataaagtggatatcgcatacaaccgggtgagcgcgaagggggacatactaggcgtggatctcagcgactataaaggcaaacccagttgcagggtgatgatcgccctggatggagagatcatatccgacaccattgaggtggacttcgaggagtataaggaagacatcattgagctgcatcactggccaaaagacgaatcaaaggaatccgtctacatcgaggtaatctga

SEQ ID NO: 2565 - DNA, 1038 bp, synthetic construct
  source 1..1038: mol_type = other DNA
atgagtgagaagttcctgaaagtcaacatccagaaggaactgaaagaatttgagctggacattgacttcaagctaaacaaggggtgtctgggcattctcggcccgagcggatgcggtaaaagcatgaccttgaagtccattgcagggattgtgaatccagacaccggcatcattagcctaaagatggatgaggagaacatctattttgattcggaaaaaaagatcaatctaaagcctcagaagcggaacgttggctacctgttccagaactacgccttgtttcccaatatgactgtggaggaaaacatcgggatcggtgtctccaaggagaaaagggagaaaacggtgtctgaaatgataaagagattccaccttgaaggacttgagaagcgctatccccgacagctgtccggaggccagcagcaaagggtggcattagctcggatactggcctacgggcctgatgttatcctgctggacgagcctttcagcgccatggacaccttcctcaaggagcagctccgaatagagcttgtgaacagccttaaggactttgacggattcagtgtgctcgtaacccacgaccgggacgaggcgttccagttctgcgatgagctgatcatcttggataaaggcaaaatcattgccaagggggaaacgcacgaaatctttgaaaatcccaagaaactcgatgtggccaggctgacaggatgcaagaacacatctagaattgagattattgatgactaccatctcaagtccctcgactggggcctgacactggaggtctctgagaagatcagtccaaacatcacccacattggtatcagagcgcatgactttgctccagccaaaaaagatgaagtaaattcattcgacactgaaaattcaagcctcctggaaatgcccttcgagtgggagataactttagcaaacggcctgtggtggaagcgcgaaaagcaaatccgcgagcatgagtttgtcgtgccggaccacataaaagtcgatcccaaaaatacaatcttgctggaggaatga

SEQ ID NO: 2566 - DNA, 1695 bp, synthetic construct
  source 1..1695: mol_type = other DNA
atgtcagagtccgagcaccggatgatcgagatcctcaggatcttaaatacccatgagaagcccataggcagcaaggtgatagccgacgaactcaagaccaaaggctacaaccttggcgagcgtgccgtccgctatcacatgcagattctggatgaaaagggatatacagaaaagcagggatactctggcagagttatcaccgagctgggcaaaagcaagctggagaagggcctcatctacgaccaggtagacttcacactgtccaaattcaaggagcggatctatctcaccgactttgactacaagaagaaggaggggaatgtgatcgttaacacttcgaacatccttgagaataaggcgttcgacatcattaaggaggtatttgctgcaggggtctgcgtaagccccctgataaatgccaaaaagactgaaatcaacggcaaaaagggatatgtgatgaaaacgatctgtggtacgaccatcgacggagtcttcctgaagaacggcatccctagcatcccgcaatatggcgggctggtggatattgaggattactatccaactaagttttcagagctgatctcctataggaaaacctccatcactccattggatgccttcattgcaaaggggatgacctctgtcctcgaagtggcggagcatggtaccggcacgattcctgccaacttcagaatcattccggagagtggtctagaaaaagctaaagaaatcttcgaaaagctggagaaagcaggcattgggggaatcctggaaatcggcgaaatctctgagaacattttaggaatcccagtgccagagggtatggttggcatatccatcattggaggcatcaccccattctgcgccgctcaggagatgaactataaggtggatattaagacgggtgaggaatttatcaactacaataagctaaaagagttggaatcctcgaagcacaagataaagcacgctaaaaaggtggattacaagaaaacacccttcattcttaccaaatcactgaaccgcgtgaatcaggtcgactatgacattgaaactggtcacggcaacatagtgtccaacatttcatacctccagaaggaagaccttgacgatgcaattagcattatgaaaaagacatacaaggcactccccaagtacatgaatagtcacttcagtatagtggaccatcccgatgacaaaagtaaagtggggatagctacagtctgcagcctgagcattgatggcatcctcatcaaaaacggcattatgagcacccctcaatacggaggactgctggagctggggaagccccctctgtttgtggagatgatttcgtacaacgggagcagtatcgacccccataagatcttcatctttaaagatttgacccagatcgccaagcgaaaaaaccctaagaaaatccttgcctcaatcaaagaggtgccctacatcgccaggcctgagacagaggaaatattggagaagataagcaaagaagggttttccatttttaaggttgggaaaccacgggaactagtctacaatgccaaggtggataattataacttcgggattgttacaggaagcgggttgaatctcattgctgcaatcaaggagaaaggaatcaatattgaagcgaaggccgtggaaactgtcctgccgatagaggacatgagcctgatttacgagcagtga

SEQ ID NO: 2567 - DNA, 1347 bp, synthetic construct
  source 1..1347: mol_type = other DNA
atggaaaagcgcatccaaaatattatggagagaatgaaggcagacaatatcaagtttattcgcctccaatttgttgatctgcatggaatcccaaagaatgtgagcattccctgcgagctggacaacatggaggacctgttcactgatggcatcctctttgacggctcatccatccctgggtttgttgggatcgagggcagcgacctcgtcctgaagccagatatcagcacgtattcacccctgagctggcggcctgaagagtctgcctcctgcaggttcatatgtgacatctataatcctaacggcgagccatttgaaggggacccaagaggaatccttaaaaaagctctggccaaaatcaaggaagaaggctacacctacaacataggccccgagcctgaatttttcattgtcgacacagacgacgacggctaccccattcctcacgatacagcaggatactttgatgtagagccggtagataaggggactgacttccgaagggagatcactaccaacctacaggaactgggctttgaagtggaagccagccaccacgaggtgggttccctggccaagacgaaatcgcattcaagctccgatgacgcgttaaagacggccgatgcggtgattacattcaagcaggccatcaaggcgattgtggcaaatatggctgacttcgacggcttcgactaccgcgtgactttcatgccgaagcccttctttggagagagcggaagtggcatgcactgtcaccagagtctcttcaaggatggtgagaacatcttctatgatgaaaacagtgaaacagggctgtcccaggaggctatgtggtttattgggggtttgctgaaacactctgccgcaatcaccgcggtgaccaaccccatcgtcaactcgtacaaacgattggttccaggatatgaggctccagtgtacatcacatatgggattcagaacaggtcaaccctgataagagtgcctgccgcacgtggaaaagccacccggattgagtaccggagccccgaccccacatgcaacccctaccttgcattcgccgtcatgcttgaggccgggatggatggtataaaaaacaaaatcgacccgggagagtctgtggagatcaacatttatgaattgaccgatgaggaaagggaggagaagggcatagaactgctcccttccagtctatgggaggcttatcacacctttgaagagtccgagatcatgaaagaagctttaggcgagcatatattcaatgctttcctctctgccaagtatgaggaatgggatgaataccgggtccaggtgttcaattacgagcataagaaatacctgaattactga

SEQ ID NO: 2568 - DNA, 12564 bp, synthetic construct
  source 1..12564: mol_type = other DNA
atgaatgataaaacaaacgattttttcagtgagtacctcagcggactgtgtctggacttcgatgaatccaccctcatcgcccccaacaagaatggggaaaaggagaaatgcatcatcgagaagtcggaatacgaaattaaaaaagacaatctggtgggattcgcaaagtccaatagcatttccatcaatgagcttatactggccagtctcacgctgacactgaacaaattcaacttttcaaatgagaccctgatcttcaatcagaacaacgtgccctttgctgccaagtttgaaaaccggcaaattagtatcagggagttcctcgagaaaattcacgagaactacatcaagaccttggaatttgacgagtatttcgataaggatgaccttcctctgaatccggagttttattttacgttcgatgaggatttaaaatcggacgctgaatattccaattatctaagcattgtggagaatgacgaaactgttagcctctttctgtcttacaacgacgagttatatacaaaggagttcatcaatctattcatatcaagcctggaaaaaatcctggaagaaatagccacttcggacatcgataagacaaacatctgcgacattgctattgtcggtgaaaacgaggatctcatcttcactgaagtggaaatgcccctgatccaccggcggttcgagaagcaggctgtggagaagggggatgagattgccctcgttgcaagcgacgccacactaacctacaagcagctggatgaaaaggcaaacgtcattgcaaatgccttgatcgcgaagggagtcaagcccaagagcaacgtcctggtgatgctgtcacgcgatagcaatctgatcgcttccattctcggcatccttaaggcaggctgcgccttcattcccatcgatcctgaataccctcaggagagaataaactacatctatgagaacagtcaggccgactacattattgccaacgagtctggagagaagtctctcgacattgaagagctgcttaaggatggcaactcagacgatcctgagctcgatgttgaccccgacgatctggcctacatgatctacacgtccgggtccaccgggaatccgaaaggtgtaatgatcagccacaaaaacatctgcaaccaggcttcaaatcccaagtccacttatgagagtctgctttgcatcaccaccatctcttttgacgtgtctgttgacgacatactgacctccctcagcaatggattgaagttggtactggccgatgacgtgcagatcaaaaacatccccgcgctaatcaagctgattgatgaaaacaagcctgaaatcctggagatcaccccttcaagaatggggtcttatctggaggtcaaggagttttgcaacgtcatatcctgctttaagtgtatcttcattggaggggagaaattttcctcgaaagtttacgaagatctgcggaaatatagtgacgctgtcgtctataacagttacggccccacagagacaacaatcacctccaacaacaaggcggtgaccgacgtcaacgacctgactgtggggcttccccatattaactacgtcaccgatgtgcgtgacattgacggcaaactggtccctgatggtgtaatgggggaactgtacattggcgggaccggagtcggaaaagggtactacaacatgccagaaaaaactgccgaagtgttcctgaccatcaacaacattccatactacagaagcggagactacgccattaagctgcccaacggcgagatcgacattaaggggcgaatcgacaaccagatcaaactccggggcctccggatcgagatcggcgaaatcgagtctaacgttggcaaatacccaaatatcaaacaggctgttgtggtgattaaggagatcaacgataacgaacacctatgcgcttattacactgccgatgaggagatcgacagtgacgatttgaaagagttcctgaaggaccgcctgacgcgttacatggtgcctaccgtcttcatgcagctcgatgagatgccacagacaccaaacggcaagacagacctaaaacagctgccagtgccacagcttaaactgtcatttaccctgccagagagcgaaactgagataatcctgcacgaaattgccagctcaatcagcaaaacaaaggagtttggtaccaccgacgatttgtacgcgattggattcacttcattgacactgatgaaactgaacgcccgcatctacgaggagatgggggtgaatctggacatcatttcgctcctgaatgaccccacaattaaaaatatcgccaaggagatcgagaacaacgacatcctggacttgaatggggtaatagaatcctctaaggatatggtgtattatcccttgacagaaaatcaaatgggaatctattacgagtgcatccagagcggcgagcttgcacaatataacctcccatccgtgatacgcttcggcagtgaaattgatgccgaccgcttacatgacgccatcatcaagaccatcgaggcctatccttatctgaaaacccgcattgtgctagagaaaggtaaagtgatgcttaagcgggacgatagcatagatatcgatgacatcccaattatcaatgtggatagtatttccgatgagcagatcgaaaaggagaacctaaagctattcgatctccataatgaccagttattccgcttcaagatctacaagactcctagcgagaccattctgttctccgacgtccaccatatcatttccgacggtgaatccttagataagctctttacaaatatttccaatgcataccagggaatcgagatcgagaaggagaccatcaacggttacatcaacagcataattgagagtgagaatgagaacagtgaaaaatacgagctgtctcggaagttcttccaggacaagctcacgcaagaaattgactccactgtactcacgccaaacctcaacggcaactttgaggaggggatcttaaagagcatctccaaaaacatcgactccgaattggtcaacaggttttgcagtgaaaacaggataacccccaatgttctgttcatggcagtcaccatgctcaacctaaacaagtacaccttcaacgacaaaactctgatcacaaccatcttcaacgggcggtccaactcatcctacatcaacacacaggccttgctggttaaaacccttcccatcgtgtcaatcaatgacgataggaccttgtcatttaaggagtacctcagctcggtcaacgacatctggatggagaccatcaaccattctgactatccttatactaagatctctgaggagttcggactcaaacccgagtttttctacgcctacaacaaccttgatgcggaagaaattgccattgacggcaagacttacaaagtcaaatacctcaaatcacttgaggtcaattataagatctctttggaagtgaacgagacttgggacaatattgaactcttcctggagtacaacgaccaactgtacagcgcagactacattgacaccttcctcaattgcatcatcgatgtaataaaccagctgatcgaatcggatatcgaagaactgagcatcggggagatagaattgggtaagggtatagagacccccctgagctttacacctgttgatatgcctattctgcataagcgatttgagaaacaggtcactgataaaggggacgaaaccgctctagtggccagtgacgccacactgacttaccgccaactggacgaaaaggcaaatgtcattgcaaatgctctgattaagagaggagtcaagccgaaaagcaatgtgctcgtgatgctttcacgagacagcaatctgattgcttctattctcggaatcctgaaggctggctgtgcattcatcccaatcgatccagagtaccctcaagagagaataaactacatttatgaaaacagccaggcggactacatcatcgccaacgaatctggcgagaagtctctggacattgaggagctgctcaaggagggcgacttcgaaaaccctgatgttgacgtgggccctgatgatttggtctatatgatttacactagcggatcaactgggaacccgaagggggtcatgatcagccatgaaaatatctgcaatcaggtgtccaaccccaaatcctcttatgatagtctgctttgcattacaaccatatcttttgacgtgtctgtggacgacatactcacatctctctccaacgggctgaaactgatcctcgccgatgatgtgcaaatcaaaaatattcctgcgctgattcgcttaattgatgagaacaagcccgagattttggacagtactccttcccgactggcctcctacctcgaggtaaaggaattttgcaatgtcatatcctgtttaaagtgcatcttcatcggcggggagaagttttcggcaaaggtctacgaagatctccgaaagtacagcgatgctgtcgtctataacagctacggtcccaccgagacaacaatcacctcaaacaacaaggcggttactgatgtaaacgacctgacggtggggcttcctcacattaactacgtcactgacgttcgggacattgacggcaagctgctgcccaacggggtaatgggtgaattgtacattggagggaccggtgtgggaaaaggatactataacttgcccgagaaaacccaggaggtgtttctcactatcgatggcattccctattaccggagcggcgactatgccatccaactgcccaatggcgaaatcgacattaagggacgtattgacaaccagatcaaactcagaggactgagaatagagatcggcgagattgaaaccaatatcggccagtatcccgacatacggcaggccgtggtggtgatcaaggaaatcaacaacaacgaccacttgtgtgcttattacactgccgatgaagagatcgacactgagaatctaaaagagtttctgaaagatcgcctcactcgttacatggttccgactgtgttcatgcagctagatgagatgcctcagaccccaaacggcaagacagacttgaagcagctccccgagccccagctgaagttggctttggtgatgcctgagagtgaaactgaagagagactctacgacattgtctcgtctctggtggatgccgacgagtttgggattacagacgacctgtacgccattggatttacctctctcacactgatgaaactgaactccatagtctacgagcagatgggggcgaatctcgacatttccatcctgttcaatgagccaaccgttaaaaactttgccatagagattgacaattccttcgagaaggattctggcctggaggagctcatcgagtccgccaagggcttggaatactatccgttgactgaaaatcagttagggatctactacgaatgtatgcagaatccggatgtgatcaagtacacgatgcctacaaccgtacggtttgacagtgacctggatgccaacagactgaagcaggcagtcattgacactatcgaggcacacccatatatcaaaacccgcattgtaaataatgatggggaactgaggcagaagcggtgtgatgacgtggcaatcgacgatatcgagatagttaaagtcgatagcatcagcgatgaggacatcgtccgaaatgacgtgggtccgatctctatcgaggacagtcagctgttcaagttcaaaatatacgagacccccgatgagatcgtcttattctcagatttccaccatataatcacggatggagtctcccaaaacaacctgtttagagatatagccgatatctacgaaaacagagaaatatccgaggagatcatcgacggatatatctacagtctgctggaaaaagaggccgagaacagtgaaatatatcaatctgctgaggcatttttcgacgacaagctgacgcaaggcatcgaatccacggtgctgactccagacctgaacggcaaccctgacgaggggaaaatcaaaaatctgtcctacgcgtttgatagcgaactgattaatgagttctgcaacgacaattccataagcaaaaacgccttgtttatggccggcaccattttaaacctgaacaaattcacattctctgacaagaccctgataaccacaatattcaatggaaggagcagtccaagctatttcaatactcaaggatttctcgtaaaaaccgtgccgttcattatcaataatgaaaaccggcaggcctcactgcgagacttcattaaatccatcgaccaaagctggaaagataccctgaccaacagtgcatatccatacattaagatagctgagaagtatcaactcaagcctgagtttttctacgcttaccacgagtttctagagtctgatgagatgatgataaacggcaaggagtacattccacaggaacttgcgggggtggacatggtgaccgttgagtccaaaatcaatctagctgtgtacgataatggtgacgagtttaatctcattctcgaatacaacgaccagctctacagtgaagattacgttaagacattcatagaatccctgaagagcattttggtgcaattccttgaaaacgatatggacaattaccgaatctgtgatgtcaaactgaaggacgacgaggaggtgcacgaatttgttgatgtggaaattccattcatccataagcggtttgaaaagcaagtggatgaggctcccgaaaagattgccttaatcgcaagcgatggctcctggacctacggtgaactcaaccaaaaggcaaatcgtgttgccaacgctcttataaacaaggggatcaaagccaacagcaacgtcctcgtaatgcttccaagggacagcaatctcatttcggctatcttaggtgtcctgaaggccggctgtgcattcatacccattgatattaactatcctcgaggcaggatcgattacattttcgaaaacagtcaggcagactatcttatagcagataggggaatcgaaaactcaattgacattaacgagctcctccaggaggagaatgccagcaacccccaggtggaaattgacccagacgatctggcgtacatgatctacacgtcaggttctacaggtaatcccaagggagtcatgaccagccatatgaatatcacaaacctgttctccaaggatgaggggagtgttatttataacgcttattcaaagatgaagaggacgctcgccctttcaaccgtctcttttgatgctttcctgcttgatttcatgccactcaccttcggtttggaggtggtgctggctaacgatagtgagataaagaacattaaggagctggccgaactcgtgaagagagagaaaccggattcactcacattctccgcaccatcgcggtttaagcagtatctggagtatgaggaatttgccaaacaagtacccgacttcaggtatattggccttggtggcgagatggttccccaggacctaattagccgactgctggagtatcctaacctggagctgtacaatatttacggcccgacggagacaacagtgacatgtaacacccataagcttagtgatgcggagaatataactgttggcagggccctccacaattgcatcacggaagtcagggacatcgacggcaaactggtgcctaacggagtgatgggcgaactgtacatcggagggaaaggagtatctagaggatattacaacatggaggagaagaccaaggaggtgttcctatctattaatgacatcccctactatcgaagcggtgactatgcaattgagcttccaaacggggatttagtgattaaaggaagaatcgacaatcagatcaagttacgcggactgaggatagagcttggtgaaatcgaatccaacattgcccgattcccccacatgaagcagatcgtggtggtgattaaggagatcaataacgctgagcacctgtgcgcttatttcacagctgatgaagagatagacatcaagctcttgaagcgctacctgggaaataagctgacggaatatatggttcccaccgtatttatgcagctggacgagatgccaatatctcccaacggcaagaccgacattaagcgcctgcccaagcccaaactgaatctggattacgtggaagccgaaggggagacggaggaaaagctcgtggagcttgtttcgtccattgccaacacaaccaacttcggcaccacagacaatctatatgaactgggcttctcttccttaacactgatgaaattgaactccatgatcttcaacgaaatgaatgtgaatatcgacataacgtcactgtttacaaatccgaccatcaagtcccttgctgacaagatcgacaataatatagaatttgaaatagacatcgatgaaatcatcgagaccgccaaggatatggattatttcccactgaccagcaatcagatggggatctactacgagtgcatgcagactgaaaaaatcaaatacaccatgccatatgcaatccgcttcgaaagcagcatcgacccctataagctgaaggacgccgtgatccgcaccgttgatgcccatccatatctcaagacaaggattatcaatactgatgatggcaagatactgcaaaagagatgtgacgacgtggagatcgaggagatcgaaatcgtcgaaatcgattctatcagcaacaggcagataatggacagggacataaagcccattccattggatgacaatcagctactcagatttaagatctacaagacacctacagagaccatcttgtttgcggatttccaccacatcattaccgacggcgtgtctcaaggcattttcttcaatgacctggctaaggcatacaacaatgaggaaatcgaggctgagaagattgatggatacgagtacagcctgattgaggagaaaatctcccttagcgaggtctcagagaatttcttcaagaagcagttcagtcagggcattgagtcaacggtgctaactccaaatatgaatggcaatccagacatcggcaacattaagctcatttcagaccaggtcggctccagttttgtcaggcacttctgtaaggactatagcataagccccaacgttttatttatgggcgcgacccttttatgccttaacaaattcacattcagcggcaaaagcctgattaccaccatcttcaacgggaggtccaactcaaattatgacaatacgcagggaatgctcgtgaaaaccctgcctatcattgtaaatgcggaaaatcgtgacatgatggtggaggattatataaaactggtggataaggcctggaaagatgcattgacccacagcaattacccctacacaaagctcgctgaggattatcagctgaagccggagttcttctacgcattccacgagtcgctgaaaagtaaagtggagcttgacggccggacttacgaggcgattgaccttgacggtacggtgtcaaccgactataagataaacctggatatctttgacgacggggagtttatcacactgtacctggagtataacgaccaaatctacacagaagagtatgtgaatcagttcatacgtagcataaaatatatcttgttccagttctttgtgcatgatatggataaattgcgtataagggacattgagttggttgaaggggaaatcccagagtttgaagagattgacactccgatcatccacaagcgctttgagaagcaggttgttgaaaagccaggtgacgtggccctggttgccagtgacgccaccctgacttatggggacttgaacgagaaaagcaacaggattgctaatgccttgatcaggcggggcgtcaagccccgcagcaacattctcataatgctgaagcgggatagcaatttgattgcttccattctgggtgtcctgaaggccggatgcgcatacgtgcccatcgaccccgaatacccttccgaacggatcaactacatttacgaaaacagccaggcggactatatcatcagctacgagacgtcagagaatagtctgaacgtttatgagcttctggaagaggagattgtggtcaaccccaatgtggaggttctgcccgacgacctcgcctatatgatctacacgtcaggctcgaccggcaaccctaaaggggtgatgatcagtcacaagaacatctgcaatcaggctcagaaccctaagtccacttatgatagtctgctttgcattaccaccatctcttttgacgtctctgtggacgacatattgacatccctgagcaatggcctgaagttgatactggctgatgacgtgcagatcaaaactctcccggagctcatcaagttgatcgatgagaataagcctgaggcgcttgagatcactcctagcagaatcggctcttatcttgaactggaagagttctgtaatgtgatttcttgtctcaagtgtattttcctgggaggcgagcagttttcggccaaagtctatgaggacttgcggaaatacagtgatgccgtggtctataacagttacggtccgaccgagaccacaatcacctcgaacaacaaggctgtgacggacgtaaacgatttgactgtagggcctcctttaaaaaattacgtcaccgacgttcgcgacattgacggcaagctggtccctaatggggtaatgggggaactctacattggagggatgagcgtgggaaaaggctactacaatatgcctgaaaagacagaaaaggtgttcttaaccatcaatggcatcccatactacagaagcggcgactatgccatccaactgcccaacggcgagattgacattaaggggcgtattgacaaccagatcaagctcagaggactgagaatagaaatcggtgaaatcgaatcaaacattggcaaatatcaggatatacgccaggctgttgtggtgattaaggagattaacaacgtggaccacctttgcgcctattacactgccaattgcgagattgactctgatgacttaaaggagtttttaaaggaccgccttacgaactatatgataccgaccgtgtttgtgcagctggatgagatgcctcagactccaaacggcaaaacggatatcaaacgcctgccgcagccaaaggtggagctgaattatgtggctccgaaaacaaggctggaacatgagatctgtgccatctttagctctatcctgaacatagagacagttggtgtagaggacaacttcttcgaaatcgggggcacatcacttattgcttcaaaactgattattgagcttctgaagcagggctatagtgtacggtatgacgacatcttccgcaacaaaactcctagagcactggcgaaactgttgtctggtgaagacatcggcgaggaggacctggatctcacggacgatatcatcaaaaactacaattacggcgaaatcaatgagcttctccaggagaatacctgggaaaacttctttgacggggagaatctggaattgggcaatgtcctattgacgggagcgacaggattcctgggaatccatatcctatatgaatttatcaagagtgaggaaggaaagatctattgtatgctgcggaaaggcaagtttgattcctgtcaggaacggctgattgatgtgatgaacgactactttgatgaggatttcactgatctcgtcggctcgcgcatcattcccatcgaaggggacataacggagatcgacgacttcaaacagcttgaggacgagcccatcgacacggtgatcaattcggccgccctggtgaagcactatactgccgatgattatatcttcagggtgaatgtcgatggcgtgatcaacggacttaaatttgcccaaactagaaacaacataaagtatgtgcagatctccaccatcagcgtgctgtcctcatactccctcaacgaagaggcctacccgaaccaggaatacgatgaacgcacactctactatgagcaggacctagaaaacaaatacgtctgcagcaagtttctcgctgaacgggcggtgctgcaagccgccacgaaagggctccccgtaaagataatcagagtggggaacctcatgagccggtatagcgacggtgtgttccagaagaactacgacacaaatgcatttctaaataacattaaaaccattaaaaaactcggagctatgaaccccgcaatggctagtgaaaaggtggacatgagtcagatcgactacgtggcaaagggaatccttgctttgtctaagaccccagagaaatccagggtgttccactgtatgaacaatcattatatttcccaccgagacattgtggatgcactgaatacctacggttacgggattgaagaagtggatttcgaggaatttaaacagatttacgagcagaacatgaatgagaacatccaggggatcatcacggccgattttagcattgatgactttgacgaggaggacgatttcgaggagaatgtggaaattgagcagactgttgatattcttcactcgttaggatttgactggcctgaagcagatgaagagtaccttaaacgactgtttgattacctcaacaagttcgattactttgaatga

SEQ ID NO: 2569 - DNA, 1620 bp, synthetic construct
  source 1..1620: mol_type = other DNA
atggccctgaacatagctagcgtcgtggatgccagtttcgtcagcacctttatcggacacaacgcccaggcggctctccaggtcctggagcctctcgttctgttaattacaatcttcgagtggctgttcggactgggaggccagattctggccttgaataaaaaggcggaatttgacgaggggggcagcaaccattatttcacaactgccatgcttgcaacaatagtgctaagcgttctgatcctgttggtatgctttctgtttaaagattccctgatcaacctcttgcatcccactgctggagccctgccgtacgttaacgcatacagtccttatctgttcatcagtttcccaatcgcgaccatcctcggagtcctgtgtcaatttattcgggtggacgggcagccgaactttgcttcaggcgtaatcattgtggcaaatatcatcaacatcatcctcgactacctcttccttggtgttttccacatgggcattgaaggggcctcccttgccatgatgatcggttacgcagttggcctgctctgcacgctgaagtatcacttcgattcaaaacggactttccgattcgttttctccgagctgaagtttgggacttggatacgctcaaccattgaaattatcaagatagggcttccaggggccagcatgggcttctttaatgtcctgctgatctatatcatgaatctcattgtgggcggcgtcctaggcgagctgggcctcgacatattcaatgtatgcgtggtggcactgcttttaataagcattctgatcatgggattcgccgaaaccctgtcgtccatcgtgcctatctactatgcccaaaacgacttctacaaccttcaccatatcgtgcgtaacagtatcatcatcaccctcgtctgttcggtgatcttcacggcattcctcctgatctatcccgatgggctcttgatgtttttcaagcttcaccagaccgctaatgatggtctggtggagaatgcgattaggatttactcattggccttcatacccatggccttttccactatgctcctgttctattacgaggggatcgagagaacggtggaatctggaatcattacagtcatctctgagtttcttggacccctcttttttacatacctactgtatccattcatcggcataaccagcgtctggctatctttccccttagggtttattctaagcattgtggctgtctccatttatgtgaaggtggttgagcggaaagacagcgagtactcaggtctgtttttcattaggaggggcctcattgagaaaacacgcaactacacgttagaaagcaagaatgatgctgtgaaatctgaaatgtttaatcacctgaagagtctgaatgtggacgattcgtctattgaaaccttggacaagatcataggtaccatatttgattccaacaatgagaaagtccatgtggagattctgttgattgactacggcgacaagattgtgatcaacatgaaagacgagggcaacagagaagtgatgaaggacatcgagaagtccttttcccaggacaagatcaaagtgagtgaagtgttgggattcaacaacgtagaatacctgatcgatggggcctga

SEQ ID NO: 2570 - DNA, 750 bp, synthetic construct
  source 1..750: mol_type = other DNA
gtgccagagcgctacaaaggctttgggtactgggatatagccacccgccagatgggcatcgtaagtaaaagccagcagacaagatttaaagatgcgaaagtcgccgtcattgggtgtggaggcattgggggagagaccatcctgatgctggcaagaatgggcatcggcgagctgatcatcgtggacaaggatgaatttgacttatccaaccttaacaggcaagcgatgagtagcattgacaccctggggctttcaaaggccgatgtgagcaaggaaaaggtgcggctgaccaacccctacacaaaagtcactgccatcaacgaatttatcaatgaggataatgtggagtacttcaaggactgcgatgtaatcctcgacgccttggacaatctctacacgcgagtgatcctcactcggttcgcaagggaaaacggcattccttacgtccatggcgccatccacggaacaaaggggcaggttacagttttcacaaaggacaccaagtcctatgaagagatgttctcgttgccaagcctgggtaaggagctgggagaggagacgaaagaggaaatatcaaaactcactaagggtgtgccgcccgtgattggtcctacccccaacattgtggggtgcctggaggcattcgaagcttataagttgattacgggcatcggagaggtcacctatgctccaaagatacttaatttcgacctactcaacctggagtctttctccgttctggaactatga

SEQ ID NO: 2571 - DNA, 1170 bp, synthetic construct
  source 1..1170: mol_type = other DNA
atgaaatacaggacgctcggcaaaaccggggaaaaggtgtccatcttgggattcggcgccatgcgtctgcctcacttcgaaacgaatgatcagatcgatgtcaaaacatctgatgaaatcttaagttatggaatagataatggcataaatatcattgatactgcttattcatatcatgcaaataacctgtccggcaaaggcaagtgtgaagagtacatcgggaacttcctaaatgagcactcttaccgcgacgaggtgttactgaccgcgaaaatgccaagctggctgatagagaccaaggaggacatggagaaaatcttcgagagccaaatgaaggatctgcaaacagattgtattgacctgtacatgctgcatagcctgaatgaagactactggaaaatgtatagggagattggtgcatttgaatttatggacagtctgctcgaaagtggcaaggtcaagcacattggtttttccgcccatactgagatggattggatcgtggacatcgtagatgactacgacaagtttgagttcggccttacccagttgaactatctggacgagcggtaccagtccggcagggagggggtggaatacattcacaagatgggccttggtaccatgattatggaaccactgcggggggggcgactcatccagaacatcccccaggacattatggacctctgggacacggccgaggaaaagagaactccccttgagtgggcctttcaatacctctggaacatggaagaagtcgatacagtgctcagcggaatgaatagcatccagcaggtcaaggaaaacattgagatagcaaacaagtccgagataaactcaatcagcaaaaatgacctgaacctcatcaaggaagtggcgtgggagtacaagcagagaaagggaaacgactgtacagggtgccagtactgcatgccatgccctcacggagtggatgttgccggatgcttccgcgagtacaacattgctaaaatgctgaacaacccggctggttcggccatgcactatttctcattggagagcgacacccgcgccgacaaatgcatccactgcgatgactgcctatatcattgtccccagatgatccacatctcggaggacctgaagaaggttgatgagttctttgggcggaaatacgactatttctga

SEQ ID NO: 2572 - DNA, 1497 bp, synthetic construct
  source 1..1497: mol_type = other DNA
atggtgaagcgcatccctgacgaagaacagattaaactgggcatccgaactctcgactttaacattcccgaggatcatatctcacgttttgttgtggacttcatcgacgagtattaccctctgcttgggatcaaagagaataagaagaagaaggggcgggacagttttcccgtgaaagagatgttaaaactccttatttacgctaaaatcgagcacatcgatagtatgagattccttgccgacatggtgaagtaccatgacgtatataaattcgtgggaaatggtatttgcccttcggagcgatcattgcagcgctacagggagaaatacggcaaatattacaacgagctgctgaaagccaccctcaaaaaagcttcagatgtggattacactgatttcaacgaagtttccattgacgggaccatcaaaaaggcatacaacagcaaaaataaggtgatcacagagaaggaaactgaaattctgacccggtacttcgaaggcggccgggttagtcaggaggagctagataagctccacaaaccggcccgagagatcctggaaaacaagaagatcagcaaccaggaaaagctgtacctcctcgatgacattaaaacacagttcacgctgagcggtcagaagagcgtgcccgtaaccgacatagaagcccggtggatgaagagcaagaaaggaaactcccaaataagctataatatccagtctgcagtcgattacgacaccaagatgatctgcgcgatcaacgtcgtacaagcccctacagaccattaccagctgccaaaaatcgtcgataaggccataaacaacacaaacgtgattccccgcttcgtcctggcagatacaatctacctgaatgaggagagcttgtcctacctcgcagacaatcaaataaatggagttattccagacaggaagcaatccaaggaaaagatcggacgcctgaacaagaacccatatcacaaggatcacttcaaatacttcccggaaattgatgcctttgagtgtccagagggccagattatgtactttttcaacaaatacactgagaagaatgatgacttggacaagcccgacaagattaagcgcctgtattccaattatggtgcttgtaaggcttgcaattgccgggagaactgcctgtcgtccacccagacccacagaacgatcaccgagtatggcgggagtctaaagaaggccatgtgggagaaaatggaaacggaggagtataaggaggaatatgcgaaaaggtcatctgtcgaaggaccctttggcattttgaaggaacagttccacattgagagcgaggtggtgatcgggaagacaaagactgaagagagaatcctacttgacgccgtggcttataacctgatcaggctctttaacctggaacaggaaataaaaaatgacaaggaagatatagtggacttctgtgagaaaatcagcgtccaggagaagttagaggtcagagcgaccatattttga

SEQ ID NO: 2573 - DNA, 246 bp, synthetic construct
  source 1..246: mol_type = other DNA
atgaaaagaaccattaacgaacggtgggagctgtggtacaaccgcatcctcccatacattataatcttcgattttatactaatcacagtgtccctcattctcaatgtgagcgagccgacgatggcccacattgagcatttcgacttgctggtctgcatcatccttctgggcgaatttttttatttcttatacaaggcacccagcaagaaaaagttcctgctggacagggacatcttctgtttttga

SEQ ID NO: 2574 - DNA, 270 bp, synthetic construct
  source 1..270: mol_type = other DNA
atgccggtcaacttcccaggcaccattctcggatacctacgcatgctccggcttattagggtgatcagctttgccagaatggggtcctttgaagatttcttcaagaagacagagttccacaaaatcattatcgcaatagcgatcattataatgacattcacggctctgttttacgtgtttggtaccagctacaatcctttcgactatttctattttgtcatcgtggccctgaccactgtaggcttcatcgacaaacccctgaagaagtga

SEQ ID NO: 2575 - DNA, 333 bp, synthetic construct
  source 1..333: mol_type = other DNA
atgaacaatattgcctaccttctgctggcaatcctctttgaaaccagcgccacatctctgctgaaggtcgctgagggcttcactaagcccttgccaaccattgcatcaatcatactgtacatactctccttttacagtctcagcaactgcctcaaaacagcgccgatcggcgtcgcctatgccatttggtcggctttgggaatcgtgctggtgacgattgttgggattatcgctttcaaacagacccctgactgggcggccatcctgggactgctgcttatcatcataggcgtaggggtgctaaacctcttctccaagatgagcttacactga

SEQ ID NO: 2576 - DNA, 387 bp, synthetic construct
  source 1..387: mol_type = other DNA
atgacgatcaaacggaaattcgataagctgcccccatactgccagtttgaaaagaatctgaatttgatcaagaacaagtggaccgtgtacattctcagagacatgattttaggcaagaaatacttcagcgacttcaaagaggacaagccggaactgtccaataaaatcctaacccagcgccttaaggagctggaagaaaacaacatcatcgagaagaacatcaaggataatgagacaagctatcacctgactgagaagggccacaggcttcaaaacatactctacgagctcgccattttcaacttggaagaggaatatcatggtgaggaactggagaaaataaagaaagagtttgagcagctgaagtatgggggaaaccagaaatga

SEQ ID NO: 2577 - DNA, 801 bp, synthetic construct
  source 1..801: mol_type = other DNA
atgaaagaaaaaatatttatcaacggaaggggcggatgtgggaagagcacattcatcagtctgattgcaaaggagttgagtaagaacaataaagtgttaattattgatatggatgagggcaacctcggcctgaacaagatgctgaacgtggacgtggcagacactagcttgatggaatactatgggggcagagacaagatcatgggtgagatccttaaagtcggtatcaagggtatggttttagaaaaaatcaacctgaaggatgacgctgccagtgacagcatcgatattctggacaatatgaagctgtcagatctgccctccgattacgtgacctggaacggaaatatagggttcatcgaatccggcaaaatcaacgaccctgatgagggctgcgcctgcccgatgggaaaccttacacgggacttcctaaatcacattgagctgcaagacaatgaagtaatactcgtcgacaccagcgcggggatcgaacacatcggacgcggcgtaatcgagagcgcggacaagctcatttcaatcgtggacccatcaagcgatgccattctcctcgctaataaaatcggcagcctgtcgaaagaggcctccaaggagtatatggtgattctgaacaaaattgacgaaaatacgaaggatctggtgttggaacagctagatgacgacatatctgtcgtcggggagctggagtacaattcccatatagctcagagcaacctttcccagaaggagattaacctcgaggaggttgagggggaaatcaaggagatctgcgccaagatctga

SEQ ID NO: 2578 - DNA, 828 bp, synthetic construct
  source 1..828: mol_type = other DNA
atggatttgctcttttacgtggtgttgctgttgatcggagggtgctttgcaggtttcatggcaggcctcctcgggattggcgggggaattgtaatcactcccatccagtattatctgctgaccagtattggctgcgaccccaagacgtccctaacggttaccttcgccacaggacttgccgtgatctgcgtcacgatgatcaacagtacacggaagcataaacagaacaatctcattgtgaagcagcacctaaaaccaatgatggtcttcggctttgtcggggccatcctgggtgccgtcatctctcagtacatagatgttgaggtgctgaagattctcttcggggtcatatgtatcgtgagcacagtatttcttgtgctcatcaaaagtcctacctcgctggacaatattaaaaccgacgctggattattctactctatcgcctttgcgtgtggtctggccagcggcctgattgggcccgccggaggcgcctttatcataccgattttcgtggcatatcttaggtacccaataaccaacaccatcggcacaacttcagcactgagcatcgctaccaccctcgcgggggtgatctgctacattgtgttaggctggggcgttcaaggactgccagatttctcactgggttacgtcaacttgctgcagttcgtgttccttacaatcactagcatcattgtgtccggatacgctgctaacctctccaagaaaatcaatcctactaagctgaaggcgctgcaggtaatcgtcatttcctatattggcctgcaaatgatgggcgtgttcgacatcatactgagcatcatatga

SEQ ID NO: 2579 - DNA, 219 bp, synthetic construct
  source 1..219: mol_type = other DNA
atgtataaggtgtggaaaaattgcattgggtgcggcgagtgtgccaaggcatgcgacttcaacctgatacagaccttcgacgactacatcctgatggatatcgagaagtgccggcattgcagcaaatgtgtagaaacgtgtcagaacaacgtctttacaaagtccgtgatcttcaagcactttctatacctcctgtactataagattaaaaaaagctga

SEQ ID NO: 2580 - DNA, 408 bp, synthetic construct
  source 1..408: mol_type = other DNA
atgaagatcgccattcgatactacagcaagacggggaataccgagaagctggcagaggcgataggtgaggcgatcggggtggctccgaaaacaatagatgagcccctcaacgaagacgtggacatcctgttcctgggaaacagtgtatataacgccggcgccgactcaaaggtcaaggaatttctcaagaatatcgacgtgaatgtgggctcgattgttaatgtctcctccgcagctcttatcgagagcacctacaagcagattaaaaaagaagccgagaaatgtggcctaaacatggatgacagagaatttcactgccgcggacagttcaaattcgtgcaccgggggcatccaaacgaggaagatatcaacgaggccgtgaacttcgctaagagcattgtcaggtga

SEQ ID NO: 2581 - DNA, 546 bp, synthetic construct
  source 1..546: mol_type = other DNA
atggccaagtatatcgtgataaatggcagcacacgcaaaggtaactcatacgcaatcgccaacttcatcaaagagaaaattgatggagacgttgaaattttcaatattaaagataaggagatcggcttttgccaagctgataacgcgtgtaaggccaaggacgaatgcatagtgcaggatgacgcctacgatctcatcaacgacctggaggagtgtgacggggcttttattatcaccccaattttcttcggacggctcccgggcatggtcgatgcgctgattgacaggttctattccaagttcaatcccgctaaggagatgaaggccccagacgaaagcaagaagatcgggatagtgttcagctacggtggaggggaggcagactacacgcccgtagccgaacatgtcgcatttgagttcggcgtgctaagatttggggcccacaaaaacgtgatgtgcagtgaaaacaatgatcctaagggctttgaatcgaaagacgaccagcagagccagatcaacgagctgatctcctgggtctgcgagtga

SEQ ID NO: 2582 - DNA, 702 bp, synthetic construct
  source 1..702: mol_type = other DNA
atgagtgagagtgatgagataatcaagagactggaccgcattgaaaacgagctgatcacaattaaggagaacaattacaatcaaaacctgcagacagccatcgagagcatccgagacacctactctaatagcatcaagaagaactttgcagacaacctgggggagaagtgtagcgaattttatctccctaactgcaaaaatgaagagtgcaaacagtttatcgtccaggagttcaaggaactttttttaaatactcaggagaccgacctcaacaaacttaatgagcagctggacgaaaaattctactctgtgtgtggcgtcgagtgcagtccatgctacaacaacttcaaggaatacttcttcgaagagttgaagatgatcaactccattaatgtgagctatgagttgaacgagaatgagccgattgaaaagctcgatgtggatatgctgatttccgatgtatttgaacccttatcgagcaagcaaagggttatcataatagagtccctctacgtggaaaacaaatcatatactcaactttcacatctgacgaagctacggggaggaaacctactgttccacctggagaaactccaggacgcgggcctgatcagccagaagcaggaccggggcgaatacctgctcaccaagaaagggtatacaaccctgtccttgattaatcagttccagaaactgatgtga

SEQ ID NO: 2583 - DNA, 1896 bp, synthetic construct
  source 1..1896: mol_type = other DNA
atggaaataatcgatttgttcggcgcggcgcttacaggagtcaaagaacagaacgtggacttgctgttcaagtcaggcttatacatgctcatgtacaccgtcatcagcatgatcgccgtgtatgtcatctctttcctcaccacacgggtggcttcaaaaagcgcatatacggtccgggagaaaattttccacatcctgatgaacctcccccgggaggaaattgataaattcaaaattagcgggctcgtgacaaggagcaccagaggcatgtcctccgaacagggatttatagtgatgatcctcgagcagctgatgctgattcccgttaccttcgtggcaatcgtatatgagatcgcgctgattgatggcacttacgcacttttcttcttaggatttattggtgtgctgtctgcaatcatcatttttcgaatgaagcagattgtggagatctttttccgcgctaagaagacatatggtaaactcaacctgctcttcctgtccaagatcaatgacatagctggcaggattcctttcaacaaacaggagtacgaggtcgaatttgaaaaggcctgtgagaacagctacgataagaatgtcatctatatcaaaagtcaatgctacctcggaccaatactgatgtggggcctgtatgttatcgtcctggttaccctggctatggtgaactccggatacaccattggattcgaaacggacagtgtgattgatagcttcattatcctggtgtatgttgcctacttcatcactacgctagctaacattcccgctctgattgaccgatggccacgggcctatgccacttctgtgcggttggaggaggtcctgaatatcgaagataagatcataaagtccaataccaatgacaacctgaaggagatagagatcgtggaggaggacattgctcaagaggctaagggcatctgggatgaacgaaagggcatctctgaaaaattcactgcactcttaaaagaggataaggccaaagtaagaatttcaatgattctgctcacgatatccacattgtgcatggtgtacgccccaaaggttgccggaaagacagttgaccttctggcttccaattggaatagtacgaatgaccctgccatctacatcagtctggccctgctgctggtgttgtattcagtaggctacctgttcaagcttccgcccaagagaatcatgggggccacaggtgaaaaggtcgcatacgatcttagagtgaagttatttgacaagctggatgccgttggttccgacttcattcaggagaactcgaagggcctcgtgctatcccgcctcaacaacgatgtgatgaacatcagggagtttgtgagctctaagtttactgagatctatgcgcagatcctatttatagtctttgtaatagtgttgattgtgatgacagacttcaggctgagcctgatatacctggtgattctgccggtctacgccgtgtgcttttatgtctgtgacgtcaaatctaaaaactactacgatgggcaccagatgcagctcgggcgccttatgagctattttgaaaggggcctgtcgaaccgtgacagcttccatgagaaagggtttaaaaaaatgaatcagactgtaatcgactactacgtcaaatccaagaacgttaccaacttcatggtgcccgtgacaacccttctgaccaatatcagtaagatcaccgtgtatatcgcggggatctactttttggccggtaatgagatccagatcgggaccctcttggccgtgatcatgtacgggcaacttctcaccgaccctattaagaagctaagtagctcgatggccactattgaaacctcattctcaagcatcaaacgcatatttgcaatcattgactacaagaacgacaagtga

SEQ ID NO: 2584 - DNA, 1044 bp, synthetic construct
  source 1..1044: mol_type = other DNA
atgcccgaatttaagcttattgagaagctgctctacaagagcgaacagaacgatatcgaggctgagtttatcattggaaacgagactctgtggtcgagtcagaaggtgatcgcggaaatatttggcacgacgtccgccaacatttccatgcacttctcaaatatcatccaggaaggggagctagacgagaaggaagtaagcatcagttccaaggacctgtttaaagacaaccccaatttcattaagaagtccctcaaaaagagcaataaccgagggaggccccagaagtggtataacctggacgcaatcatatcgatcggctaccggattaacagtaaggaagcaacccagttccgccggtgggccaacaaaatactcaaggaatatatgatcaaggggttcgtcatcgataaggagctgctgaaaaaggggggaagatttacagaagactacttcgatgaactgctcgagaccatacgagaaatcagggcttcagagcgccggttcaaccagaaaatcacagacatttacgcaactagcttcgattataacaaggatgcggacatcacaaaggagttctttgccacagtgcagaacaagctgatctttgctatcagcaaccacactgccgccgagctcatcgagaccaggagcgacattgagaatcctcacatgggcttgaccacctggaaaaaagcaccaaatggaaagatccttcaatccgacgtggtcatatccaagaattacttgaatcaaaacgagcttagcagattaaatagtctggtcgagggtttcttgaatctcgccgaatcacgcgccgaggatagaatcccgatgggaatgaaagactggaaagaactgctggacgactaccttaaactgcgcaggctgccaattctggttggcaagggtaagatatctgctgaggaggccagagaacatgtgctcgagaaatatgaaaaattccgggtggtgcaggatgagaacttcatttctgactttgatcaaatgattttagatattaaacgtctagagggcaaatga

SEQ ID NO: 2585 - DNA, 135 bp, synthetic construct
  source 1..135: mol_type = other DNA
atgaagctggtcaaacggaaccagaagctacacgacccagacagcccgctcctgatcggggatgtgaaagacggcgacgtggtaaatgaggtgaacgaacccagctacatagatctccagaccaagctgttctga

SEQ ID NO: 2586 - DNA, 333 bp, synthetic construct
  source 1..333: mol_type = other DNA
atgaacaacattgcgtacctgctacttgccattctatttgaaacctccgccacgtcactgctcaaagtcgctgagggattcactaagcccttgccaacaatcgcctccatcatattatacatactgagcttttacagtctcagcaactgcctcaagaccgcaccgatcggcgttgcctatgccatctggtcggcattgggcatcgtgctggtgacaattgtagggattatcgctttcaagcagacccctgactgggcggctatcctgggacttctgctgatcattataggcgtcggggtgctcaatctgttcagcaaaatgagcctgcactga

SEQ ID NO: 2587 - DNA, 387 bp, synthetic construct
  source 1..387: mol_type = other DNA
atgaccattaagagaaagtttgacaagctgcccccatactgccagttcgagaagaatctgaatttgataaaaaacaagtggacagtgtacatcttaagggacatgattctgggcaaaaagtatttcagcgatttcaaggaggacaagccggaactgtccaacaagatcctcacgcagcgcctcaaggaactggaagaaaacaacatcatcgagaaaaacatcaaagataatgagaccagctaccacctgactgagaaaggccaccggcttcagaacatattgtacgagctcgccatcttcaatcttgaggaggaatatcatggtgaggaactggaaaaaattaagaaagagtttgagcagctaaaatatgggggaaaccaaaagtga

SEQ ID NO: 2588 - DNA, 801 bp, synthetic construct
  source 1..801: mol_type = other DNA
atgaaagagaagatatttatcaatggacgcggcggatgcggcaagagcacattcatctcactcattgcaaaggagttgagtaagaacaataaagtgctgattattgatatggatgagggaaacctcggcctcaacaagatgctgaatgttgatgtagccgacacgtcgttaatggagtactatgggggaagagacaagatcatgggtgaaatcctgaaggtggggatcaagggtatggtgcttgagaagatcaacctgaaggatggcgctgcctccgatagtatagacattttggataacatgaagttaagtgatcttccatccgactacgtgacatggaacgggaatatagggttcattgagtccgggaaaatcaacgaccctgatgagggctgcgcctgtccgatgggcaatctgacccgggacttcctaaaccacatcgagctgcaggacaatgaagtcattctggtcgacacctcagcgggcatagaacatatcggcaggggagtaatcgagagcgcggacaaactcatcagcatagtggacccctcaagcgacgctattctactggccaacaagatcggaagcctgagcaaagaggcctccaaagagtatatggtcatcctgaataagatcgatgaaaacactaaagatctcgtgttggaacagctggacgacgacatctctgtcgttggggaactggaatacaatagccacattgctcaaagcaacctttcccagaaagaaatcaacctcgaggaggtggagggtgagattaaggaaatctgcgcaaaaatttga

SEQ ID NO: 2589 - DNA, 828 bp, synthetic construct
  source 1..828: mol_type = other DNA
atggacctgctgttctatgttgtgctgctgctcattggcggctgctttgccggtttcatggcgggccttctcgggattggcggtggcattgtcatcaccccaatccagtactacctgctcaccagcattggatgcgaccccaagacgtccctaacggtgacctttgcgacagggctggcagtgatctgcgtcaccatgataaacagtacacggaagcacaaacaaaacaacctaattgtaaaacagcatctcaagccaatgatggtcttcggctttgtgggggccatcctgggggccgtcatctctcagtacatcgacgtggaggtgctgaagatcttgttcggtgtaatctgtattgtaagtactgttttccttgtgctgattaaatcccccacctcccttgataatatcaaaactgatgcaggattattttactcgattgccttcgcttgcggtctcgccagcggattgattggacccgccggaggagcttttatcataccgatcttcgtggcatacctgaggtatcctataaccaatactatcggaacaacttcagcattaagcatcgccaccacactggccggggtgatctgttacatcgtgctgggctggggcgtgcagggcttgccagatttttcattggggtatgtcaacctcctgcaattcgtgttcctgaccatcacgagcattattgtctccggctatgctgctaacctctctaagaaaatcaatcctacaaagctgaaggcgctgcaggttatcgtcattagttacatcggccttcagatgatgggggtgttcgacataatactcagcatcatatga

SEQ ID NO: 2590 - DNA, 219 bp, synthetic construct
  source 1..219: mol_type = other DNA
atgtataaggtctggaagaactgcattggctgcggggagtgtgccaaggcatgtgactttaacctgatacagacattcgacgattacattctgatggacatcgaaaagtgccggcattgctccaaatgtgtggagacgtgccagaacaatgtattcaccaaaagcgtgatcttcaagcactttctctacctactgtattacaagatcaaaaaaagctga

SEQ ID NO: 2591 - DNA, 117 bp, synthetic construct
  source 1..117: mol_type = other DNA
atgaagctcgtaaaaaagaaccagaagctacacaatccgaactcccccctgctgatcggcgaggtgaaagagagcgacgatgtcaaggaagtgaacgaaccaagctacatatattga

SEQ ID NO: 2592 - DNA, 804 bp, synthetic construct
  source 1..804: mol_type = other DNA
atggagatttttaaggtggtctgcgaattaattattccaatcctgatctttggcgtgctatttgcagttggcaagttcatccatgtcagacttctgaatagtaagagccggattttaaatccaggagagtatttccccgacgaggaactggagacactgaagcaggtttattatctggtcatgatgctgatcttctttgcctttatcctctacatcatgatagtgcaagccaatgaggtattcgcgattgccgtgctccagattctggtgtcagtctacgtcgctcttacgctggactactcctacttgaaaaacaagatattgttcttcctcctggtgcccttcgaagctataatcttcctggtgttcaacgatttcctaatgatttggccgatttatttgatgcacatcctggtatacgcgtacttcatcaaggtatacttcgataaatttaggaagtacactgagacaaacgggcttggaataacaatcatcctactcttcgccatagtgtttatcagcttcattatcaccctctttgtggaaggggtggagcctctcaacagcgctgtcatggtgtcgaacgcatttacctccaatggttatgcaatcctggggaactcaggcatcggcaaactcaccagtttggttctggtttggagcggatacatcatctctggcgtgggtactgccacgctcaccgccgccattatgatgcgccacaaccagaagcgggagaaagagcttaacaaacgactggacgagctggaatccctgattaagaatagcaataacaaagaatga

SEQ ID NO: 2593 - DNA, 1965 bp, synthetic construct
  source 1..1965: mol_type = other DNA
atggaaattattaaggggaaggagattccgaaaaaaagtctcaagcgaagtcttatcgtgtttattgggaacatgataggaatctacctgatcagtattctgggtctgggcgtcgaaattagccagacgggggacatattccttctggtcttgttcctagggatagtgaacgctatcctctggcccattctgacaagaatcgctatgccctttcttgtgctgaccttcggtataggttcactgatactcaacgggctcctgcttcagctgctcgccccaagctttggcatcgagatcaagggggccgctatgattctggctcccctaggaatggcggccgttaccaccgtgctatctagcttgatcacaattaatgatgacagttcctattacaggtccgtgttaaatgatgccaaaaagaatgccaagaatgaggtcaaggattacccaggcgttataatcgttgaaattgacggactcgcctataatgtgctgtgcgaggcagttgaaaagggggacatgccgactctgaaaaaaatgattgagagcgaagactacaatctgcgcatgtgggaaacggacctgtcgtcccaaaccggggccagccaggccggtatcctccacggcaacaacgaaggcatcgtggcattccgatggatagaaaagagcaatggcaatcagatgatgcagtgctctggaatcagcaacgtgcccgagctggagaagagaattagtgacggtaatggattgctggtggagaatggagccagccggtcgaatctcttctccggagacactgacaacgtgatcttcactttctccaagatcatggactttggaaagctctacaacaaggcttggtacagcgtattctccaacccaagcaacttcgcacggattgtctcattgttccttgccgatattgtgcgggaaatctggtcacagatcacgcattccatcaaaaacattaggcctagaatcaaccgtgggatcgcgtacattccaacccgcgctgccacaaacgtctttatgagggaaatcaacacttcaacccttatcggagacatgatggtgggagatgtggatgttgcatactccacatatttaggctatgacgaaatagcccaccactctggggtccgagacagtgacgcatggatcgccttgaggcaaatggaccagcagatcaagcacttgaccgatgcaaacaaatattctccccgcgattatcaattcgtgattcagtctgaccacggccagacaaacggcgccacatttacccagagatatggtcagaccttcgaggacttcgtaaagtccttgctccccgaagacatgaccatgtttgccaagatgacttcaaatgacgaccactttgtaggggattacactccttttgcacgcaaagataaaaagatagagaaggagaaggaggaagctaaggagctgagtgactcggaggtgattgtcctggcttcgggtaacctggcaatgatctatctgacccagtggacgaaccggttaagctatgaggagctgaacagctacttccctgagctgatccctggccttataaataacgagtacgtaggttttattctggtgaaatcccaggagcatggcgatctggccattggcaagaatggcacatactacttagacagggatgaaatcgatggggagaacccccttctcggcttcggcgacaatatcgtgaaacacctcaaacggaccagttcatttgagcatacaccagacatcctcgttaactccttctatgatgaggaggcggatgaggtctgtgcctttgaggagctggtgggcagccatggaggagcgggcggcgaccaatccaagccgttcatcctctacccttcaagctggaatgtcagcgatgatgaaatcatcggggctgaaaacatctacaaactactgaaagagaacctggcggaactgaaaaagtga

SEQ ID NO: 2594 - DNA, 828 bp, synthetic construct
  source 1..828: mol_type = other DNA
atggagataatggaaatcattaaagattctttcctattcccctctaaaaacttaggcaccttctccatttacgtggtattgtcagtcctcgtggcaacatttacctttggaggaatcttctcctatttattggggttcattggcagcgagtacattcttatcggcggcctgaccctagtcttcgccatgcttattggctgggtgatgtcgggctatgagatcagcatcatcaagtctgggatcgacctggatgatgaagtgcctgagtttaagtggtgggacaactttattaccgggttcctgaacttcatcgtggccatcgtgtactttatcatccccgctttcatcgtgggagtggtcggatatctgatcaatatcaatgacaagcttatggcagtggctcaggagattagctcactctatccaaatattttcctcacaagttccccggatatcgcatttgaggccctgagccaggccataatcgaactgatagtgcctctggcgatcctcatcattgttgccctcatcgtatttgtcatctttttgttcctccaatccatggctgaggccagactcgcaaacacggggagtttgagtgaagccctgaacatttttgaagccgccaaggacataaagcggatcggtgtccgcaaagtcattatagtcatcctgctggttttcgtgattattggtgtgattgggatggttacatcggttatctttaactacgtgcccactctgagcatcctgtcaattatcataagcccataccttgtattcttcgctcagagggctactggcctgctgtactccgacatagcgtga

SEQ ID NO: 2595 - DNA, 462 bp, synthetic construct
  source 1..462: mol_type = other DNA
atggaacctaacaaagtctcaggaatactgtccattatcctgggactgattttcatcatcttccccctggtcagtagcggactcgtgagcatcatgatcggcgtgagcctgctattcctcgggatagccagtattctcacagagtttagcgccctcaacataatcattgggatcttggccatcattttcggtctactcttcattttcaacattgacgcgttgtccttccttctcgggttccaattttacattatcgggatcttgatgatcctgattggcgtggcaggtatctttgccggagagggcgtttccaagatcgcttcaatactgattataatcttaggggtgatcgcacttggccttggcggcttttcgctgacccagccgatctttgctgccgtgctgattggcgtggctctgatcacgcagggagtacggctgtatgtcgcgccaaagaattga

SEQ ID NO: 2596 - DNA, 1521 bp, synthetic construct
  source 1..1521: mol_type = other DNA
atgaacgagaccattaaggaaaactcttgggtgcccttgatcgtcgtggcccttgcttcctttatcgtcgctctggacgctacattcatgaatgtgagtatttcacaggttgttgtggacctgaacactgacgtcagtacaattcagtccatcatgtccttttatactctcatcactgcagcatttatgctcttgagtgccaagcttcaggacatagtggataagaagaagctgtttcttatcggcacggctctgtatggcgtaggtacattcaccgcaagcataagctcgagtgcgggcatgcttttcgtgggatgggccgctatcgagggggtggcgggggccctgatgatgccggcaaccgtgtccatcatatcgggaacatattctggtgaaaagcgtacagtggctctggcgattgtaggcgttatgggtgcggtggcagccgccgtgggcccactcttcggcggggtcatgacaacctttctgtcctggcgctacggctttgcagtggagttgataatcgtgttcgtgatcctgatattcagaaatagcatacctcacttcgagcctaccgaatctaggagcgacctggacatctcaggcgccatcatttcatttatcggcctggtcctgctggtactcggtatcctgagcctatctaaggacttcaccaccagcatcggcataattgtagtcggcctgattgctttagtggcctttgcctactttgagatccggcgaaaacgcaacggcaaagtcccattacttgatatggagctatttaaggacaggaacctgcgggtaggaacgatcatcttgctgttatcttaccttgcaatgggggggggcctgtttgcggtgtccctcttcctccagagcgtcttgcagctcaatgccttcaatactggggtgactacgctgccactcacgctgggcctcctcattttcgccgtgttggctcccagcctgacagaaaaactcagtcacaagaaaattatggcaatcggatgcatcatggctatcattggatgcctcatgttgagttaccagtttagactggatacaaccctttggacactgctgcccggattgctggtgttaggggcgggactggggttcatcatggccctatgtactgatatttcactgagcaatattcctgctgaatcccagaacaacgcctcaggtgtcaatagcaccggtaccagcctgggggagtccatggggaccgccgttatcggaattattctgatcctcggagttatgggcgggatcagcactgccgtcgacacctacgcccccgatcattcgggcgacgagcaattccagctcgaggtggccaattacttccaaaaagtggccactatagatgatctgaaacaggactccacccttgtcgacgttgcaaacatcatcattcaaaacaccatggctttcgtgatgcaggtcaccgccctcattatgggagtggttttcctgctaacgctgcggctaaaggataacaagatcaaacagtga

SEQ ID NO: 2597 - DNA, 1251 bp, synthetic construct
  source 1..1251: mol_type = other DNA
atgagcaatgtgaaagacatgtctctcgcggatgaggggattcgcaagatcaagtgggttcagaagcatatgcctgtgcttgagcatattaagaagcagttcgaggaagaaaagccttttgagggaatcactattggttcgtgtctccacttagagcccaaaacggtgaatctgggtttgacccttcaagctgggggcgctgaagttgcaatgacaggctgcaatcccctctccactcacgatgatgctgccgcaggtgccgcagctctcggcctgcacatatatggctggcgggaacagactgatgaagagtactatgaggctatcgacaatgtgctctcccacaagccagatgtaatcatcgacgacggagcagacatgataatgtacctgcacgagaaacgcccagagctattggagaacatcaagggggcttgtgaagagacaacaaccggtgtgcaccgcttggaagccatgcatgcggacggagcactgaagttccccgtcatcgcagtcaacgacgcctacaccaaatatctgtttgacaaccggtacgggaccggccagtccagcctagacgcgatcatgggaacgaccaacatgctgatcgccggtaaaaacgtggtcgtctgcggatacggctggtgcgggcgtggagtcgccagtagagccgccggactcggcgcgaacgtaattgttacagaagtcgatccaatcagggcacttgaggcccgaatggatgggtaccgggtgatgaaaataagggaagctgtgaagatcgccgacctggttgtcaccgtgacaggaaacatagatatcatccatggcgatgacttcaagtacatgaaggacgggtgtatgctcagtaactcaggccacttcaatgtggagatcaacaggggcgacctggaggcccaatcagtaagctgcgaggaggtgcgagaaagcattgaaatgttcaccatgaaagacggcagaaaaatttatctgttagccgatggaagactcgtgaacctggccgcagccaggggccaggggcaccccgctgagatcatggacatgagttttgctgtgcaggccctgtctgccaaatacattgtcgagaatgacttgagcctgggggtggagaaggccccggacagcattgatgatgaagtggcccggctgaagctgaaagctatgggcatagaaattgacgatctttccgagcgccagaaggattatctggcggactggagagagggtacgtga

SEQ ID NO: 2598 - DNA, 666 bp, synthetic construct
  source 1..666: mol_type = other DNA
atgtcctatttccgctatatcgacaacggagaaggccccaccaagctcttcatcggcggagtgcacggggatgagggcaagcatgtcctgcctttgatcaagctgctaaaacgggaggacttttcctcagggcagatctacatttacaattttgacaggactccatatatctcgacaatccatcgcgagttttaccagagcgagcaaggcaagaaaatactggatttggtcgattactacaagcccgacttttatacagagcttcacagctataacattaagcactttgatagactcacttcactggacaggcttgacagcgaagggattccgcccttaatcgattgtggtcagtacgtgctctgcagtagcgtttccccactgatccgacgtaagcacttcaccaaagaagcaatatgccagacgctggagtttcctatattccgcggtgaagacctaaagctgagtgacgacgagctcctggaaaaatacgatttcgattatgacctctctgtgaaggagtacatggccttcctcagactgattaccctgagcaagaatagggatgacttcgagaaacgggtgctgaaggactacaagaaacaggctgatcttgccctgaaatacgtaaaaatcatttacggattgaacttcccacggtattga

SEQ ID NO: 2599 - DNA, 987 bp, synthetic construct
  source 1..987: mol_type = other DNA
atgggggtgaagtttaaggatatagtgacggccgaagagatcaacctcaaggatctggagggccgcactgtagcgatcgatgcttacaacaccctgtatcagttcctctctggcattaggcagagggacggcagtcccctgatggacgcgaatggcaatgtgacatcccacctgagcggcattttgtaccggaccgcttccatcgtggacaaaggcataaaaccggtctacgtgttcgatggagatgtctcagaatataagacaaaaaccgttgaaaaacgacgggccttaagggaagaggccaaccagaagtatgaagaggcaaaggcagcagggaacattgaggaggcccggaaatacgccatacgcagctccagattatcaccatacattatcgaatcctctaaaaaacttctggagtatatgggcatcccctacgtgcaggccaaaggggagggtgaggctcagggagcctatatggtgaagaacggagacgcttgggccgtcgcttcccaagattacgactgcctgctcttcggagcccctcgtatcatccgcaaccttaccctgagcgggggactatcgaacctcgagtaccttgaactggacaaggtcctcacagagattgaccttagcagagagcaactggtggatgtggccttgatggtaggaaccgacttcaacgaaggcatctatggcatcggtgcaaaaacggggctgaagttgatccgacagaatagtctggaagacatcttggttcagaaggggattactgacgtggaggtggagccagatgagctgagagaaatcttcctgagccacgatgtcaatacagactacaagattaagtttaagagcgcggacaaggaaaaactctgtgaatttatgtgcgaggagcatggtttctctgagactcgggtcctcaatgttgcagacaagctaaaaaagctgagttcaacccagaagtcgctggaggactggttttga

SEQ ID NO: 2600 - DNA, 564 bp, synthetic construct
  source 1..564: mol_type = other DNA
atggcaacgacagacaatgacatcaacgtacgactgattgagaagattaaccaggtggaggaaaagtacaatcagaactttagcaacacgcagaagatcctcatgaccactgacggctcaatcactgccattttagatgtgctgtatggaaaaattgctctgaagaccctcgagcaacatttcgaagaggcaaccgccgaaagcgccaagctggtcaatgtggatgttggcgacgaggtcaactttcgggaaatcatcatgcacaaggacgaacagccactgatctacgctaaatcctatattccccttaaacgcctgagcaaagagatcaaagaggaccttgtgcgggccgacatcccgataggtagaatactgaagaaataccacattgagtcccgcagggagataaacattatcgatatggaaaaggccaacgacaagttgattgagatctataatacagatgaggacttcctcgcgagggattacacaataatcaaagatggggaaattctaatgtggatcaaggagtacttccctatcagttacttcaccgaaatctga

SEQ ID NO: 2601 - DNA, 1254 bp, synthetic construct
  source 1..1254: mol_type = other DNA
ttgaacattacagaaaagatcctatctcagaaagcaggccacgaagtcgagccgggggagatcattgaaattggcgtcgatctggccatgtcccacgatgggacttcacctcccgccatcaaaacctttgagaaaatcacagataaggtgtgggacaacgagaagatcgttattgtctttgaccacaacattcccgctaataccatcggctctgctgagttccagaaggtggcacgcaacttcatcaagacccaaggcatcaaaagccattacattcacggagagggtatatgccaccaggtgcttcctgaaaagggccatgtggagcccgggatggtgatcgtcggtgccgactcccacacatgcacatacggtgccttcggagcgtttagtaccggaatgggtgcaactgacctagccatggtctacgcaactggaaagacgtggtttatggttccggaggcgttgaagatagaagtggaagggagcctgaggccaggcataacatccaaggacctgattctgaacataataggagagatcggcattgccggggccacctacaacactgccgagttctgcggggagaccatcgacaatctggacgtggaaagccgaatgaccatgacgaatatggccattgagatgggcgctaaaaacgggatcatggagcccaacaaggcaacgatcgagtatgtgtgcaatcggaccggcaaaagcaaagaccagttgaacatcatcaaaagcgacaaggacagcaactatctcaaggagtacctcttcaacgtagacgatatggaagcccaaatcgcctgtccaaatgatgttgacaatgtcaatcccctctcaaaagtggagggaacccatatcgaccagggctttattggcagttgcacgaacggccggctcaatgacctggcgcaagctgccgcagtgctcgaaggcaagcaggtgcacgacgatgtaagattaattattatccctgcatccaaggagatctatcagaaggccatggatctgggttatatcaaaaccttcctggatgctggcgcgattgtgtcgaaccccggctgtggaccatgtcttggaggacatatgggggttctttccgaaggggaaactagcatcagttcgacaaacaggaacttcaaggggcgcatgggtgatcctaattcaagtgtgtacctggccaatgctggggtggtagctgcctctgctgtctccggattcatacagaacccagatagcctgtga

SEQ ID NO: 2602 - DNA, 1179 bp, synthetic construct
  source 1..1179: mol_type = other DNA
atgcagtattatatcagtcccttcaacaaggaagaggagtacaaattccccaaaaacattactatctatgatacgacccttagggatggcgaacaaaccccaggggtctgctttagtaaggaagacaagctggagattgctagaaaactggaccaatttcgcatccatcagattgaggcggggttccctatcgtgtcaagccgtgaagccgatgccgtgaaggcaatagcaaatgaaggcctggacgcacagattatctgcctcgcccgaacgaaacgggcagacatcgacaaggcgctggactgtgatgtggatgggataatcaccttcatgggaaccagcgacattcacctggagcacaagatgcacatcaaacggcaggaagccctgaatatttgcatgaaatccattgagtacgctaaggaccatggcttgttcgtcgccttcagcgctgaagatgccacacgcactgacctggacttcctgaagaggacctactccaaagcggagagctacggggctgacagggtgcacatcgccgacacagtcggggctataactccccaaggcatcactttcctaatcaaagagcttagaaaagtcaccaatgtcgatattgccatgcactgtcacaatgactttggtctggctgtaataaacagtatctacgggctgctcgcaggcggttccgccgtgtcgacaacggtgaatggcatcggagagagggccggaaacgcctccttggaagagctggtaatgtctctaaagatcttatacggaaaggacttggggtttaagaccaaatacattcaggagctgagcgagctcgtggcggaaaagaccaagcttggaatcccttataacaagccagtggtaggtaagaacgtgttccgccatgagtctggaatccacgtggatgcagtgatcgaagagccgctcacatatgagccatatctccccgagcttgttggtcagaagcggcagctcgtcctgggcaagcattcaggctgccgggctgtgaaggccaaactcgacgaatgcggctttaaggtgacaaacgatcagctgtgtcagatagttaagaaggtcaaagaaagcagagaggagggcaaatacatcgatgataacgtgtttaaagacattgttcgaagcattgatgccaactacgttgacttatga

SEQ ID NO: 2603 - DNA, 546 bp, synthetic construct
  source 1..546: mol_type = other DNA
atgatcgaggtggaggtgaaagctaagattaataacttcgaagatatcaaggtcaagctgaacgaaatcaatgccataaagactaaaacagaaaagcagatagaccgctacttcaacagtccggtaaatgacttcgcaaagaccgatgaggccctcaggattcgggaaaccaaaacagaaaagtcccacaacttgtttataacctataagggccccaagatcgactcgaaaagcaagactcgagaagaggttgaaatgaaaatcgaagacagcgacaaatgcgcaaaaatcttcgagaatctcggtttcatcgaagtgcggacagtcaagaagaacagagagtactttaagctggagaactttgagattagcttagatgatgtggagggccttgacccatacatggagatcgagattgcgctggaggacgggtccgattataacgaagcccaagacaaaatcttcgacctatttgagcagctgggaattacggatgggttcgagaggacctcatacctggaactgctcgaggagcaggacaaatga

SEQ ID NO: 2604 - DNA, 546 bp, synthetic construct
  source 1..546: mol_type = other DNA
ctgaccgacgtggatataaagatcgagaacatcgtggcgtctgctagcattggtaaggacatcgtgctgacggaagttgcaaaagccctggagggagtcgatttcaacagagaacagtttccagggctagtcttcaaactccaggaccctaagactgccgctctgatttttagttccggcaaactggtgtgtacaggcgcgaagtcgatcgacgattcaaagctcgccattaagaaaacggtcgacctgatgcgcactatcgataccgagatcccccacgagtttgacattaagatccagaatatcgttgcctccgcaaatttacagtccacacttaatctggaggcagtggccctggagctggaaaacaccgagtatgaaccagaacagttccccggcctcgtgtaccggctcagtgatccgaaggtagtcctcctactgttcgggagcgggaaggtggtgtgcaccggcgctaaaacaaaacaagacgccaggttgggagtagagaacgctaaggcccgacttagcgagttggaccttatatga

SEQ ID NO: 2605 - DNA, 2064 bp, synthetic construct
  source 1..2064: mol_type = other DNA
ctgattaaactggtcgtgttcgacctggacaatgtgatcatagacggcgagggcatagacgagatcggaaaactggtcaatatcgaagaccagatcgcaaagatcaccgagcaggccatgcagggggagatcgacttcgagacatccattaaaaaacgggtgggtctgctgaagggagccagcaccgatgacattaagacactggccaacgaaatgccactaatggagggcgctgaagagaccgtgtccagcctgaaggagaatggctttgacgtcgctatcataagtggcagttttgacattatcgccgacatcattaaggagaaactcaatgtggacaatgttttcacaaattcactggtggaagaggacgggatcttgacaggtgaagtgactggaccattggtttccgggtcaaaagtcgatgtgctgtctaagttcattgaggacaagggctattctctggaggaatgcgtggctgtcggagacggagctaacgacatctccatgattgagtccgcgggatacggcatcgcattcaacgccaagccggccctgaaggagaacgcagacatcatagtagaaacccgcaatcttacggacgtccgtgacgtcattattaacctcaactctgagaacacggaggagggggccgacgtggataaggaggtggaaattgaaacagaagtggttgagagcaccgatgtagtggtcgagaatcaggaagaacaggttgcagatgcaaccgaagaagtcgtggaagtggaggaagccgaggaagccgttgaggaggcagtggagaccgaggaggaagcagtggaggaggaaactgtggaggctgaggaggaagccgttgaggaagaagccgaggaggctgtggaggccgaggaggaagccgaggaaatcgaggaagccgccgaggaggaagcagaggaggcgaccgaagaagaagctatagaggaggccgaagaggaggctgatgaagaggtggtggaagaggccgaagaagaggtcgccgaagaggaggccgaagagatcgaagaagcggtggaagaagaggctgaagaagaagtagctgaggaggccgcagatgaggaagtcgtggaagaagccgcggaggaggaggcagaggaggctaccgaagaggaggcggcggaggaagaggccaaagaggaaaagcctaaaaagagtaagaagagcaaaaacactcttcccgagcccgacttcgagctcgccgatacgatcgagggcgtcagagcccaaaaagatgagcgcgaggcaaagattgcccaggttgcggacgagagggaggccttcaatcgcgaagcgaaggagcagcgtaaaataagggacgaacttaacactgagctgaaactcaacctcgcaaaggccatcgagtttcgggatcagcggaacgagatcaaccgcgaggttgaggaaaacaagcgagctcggaacaaagtaaatgaagagattaagaatctcgagtggtcgagcgggaagaaggatcggatcaggatagagaacgaaatcaagaagatagataaaatcatcgaaaccagggtgctagacatcaaaaaggagaatcagctagtaaagacggctaacgatctgcgaaagcagctggcagaaattacagaggacaacaaagtgaaggaagaggctgagaagctcaaaaagcagtcggaggagtaccacgcgaaagtggtcgaactttccgagcaagcccaggaagcccacgaacaaatgctgtcatactttaggaagactgatgaaatccgcacagccgcagatgaggcacacaagttattcatccaagctaggaagaacgcctctgccaagcatgaagaatttaaagtcattctcagtgagattcatgtgatcaataaacgattgggcagcaacagagccagaagaagaaaaagcgagaagactagcaatgctcccggtaaacgcaatcgggaggagaaagagaaggctgaagctatctttgataagttcaagaacgggaaaaagctgtcaaccgaggagcttttactcttgcagaaatatgatattaactga

SEQ ID NO: 2606 - DNA, 246 bp, synthetic construct
  source 1..246: mol_type = other DNA
atggacgacattatggacctggagaataaaaaggatgacaaaaaccagaacaaagaggagatcatagaatccagcgaaaaggaagtgaagatggaaatctgttatacctgcgggaaggagttcgatatgaatagcgacgagggcgcacattaccactacggcgaataccccatgtgcggctattgcacaaacttctttggattctacaaggaggatatgatggggggaaaggccaaaaaggagtga

SEQ ID NO: 2607 - DNA, 2226 bp, synthetic construct
  source 1..2226: mol_type = other DNA
atgcacgaagtgattatctcagaaaaaccaaagagcgctgagaagatagcaaaggcactgagtccaaatgcccagaagaaaaaatacaacagaaagatcaactattgggaatttgaagaaaacggcaaaaagaccactgtcctcagcgccgtgggacatctgtactcactgacttctgccagtagccgcgacagattagggttcgacctgacttgggttccagcttatgaggtggaaaagcaaaaatatacaagggactacatcaatgctattaaaaaactctcaaaaggggcagataagttcgttcacgcgtgcgattacgatgtggagggcaccctgatcggctacaatgccctgaaatacgcctgtggaaacaatgccgaagcaaaggcaagccggatgaaattttcaacgctgactaagaaggatatcgtcgaggcctacaatacgatgagggacattgacattagacaggtggatcacgggattgcccggcatatgctggactattactatgggatgaatatctctagtgccctgatgaaggcggtacgggcctctagctcacggtttatcagcctgtccgccggtcgggtccagactccaaccctctctattttagtggatcgcgagaaggagatccagtccttcgtgccggagccctactggatgatcaaggccaaatctgactacgacatcatagcagaccacgtcgaggggaagatatttgacgaagagcgagctaaaaagatctacgccgactgtcagggggctgatgcggatgtgacaagtgttaaggttacagaatccattcggaaacctcccattcccttcaatctgggcggactgcagtcggaggcccatactgtctttggattctcgcccaaaaggactcaggtggcagctcaaaacctttatgtgggaggatacacatcctaccctcgtacatcatcgcaaaagctgcccgaatccttggatttcaaaaacatttttgccgggcttgctaaagaccctgagtttaagaagcatatcttcgaccttcctgccaagctgaagcccaatgaagggaaaaagacggatgccgcgcaccccgctatacaccccacaggcgtcttgccttccaatctatcagcagatgaggcgaagatctacagcctcattgtgtaccgattcatcagcgtgttttccgaaaactccaagcttgagaccatgaaggtcaacttgaaggtggcagatgagaagttcaccttctccagaaaacgcgtcagttacgaaggttggctaaagcactatccgtttaaaaagcaggaaaacgacgccttcccgcctataaacaagggcgaccagctcaaaatccacaagatcctcgttgaggagaaggaaaccaaacctcccgcccggtataacgaggctagtcttatcaaggaactggaaaaaagggagttgggtacgaaggccacccgggctgacatcgtggccaagctgtatgatagaaaatacattgaaggcaagaagatcgaggtcaagcctttaggcatcaacatcatcgacaccctgaacgagtactgcaaggacctgacaagcgaggagctaacccgagagtttgagagggaactcgagggcatcgacactgacaagtatacaaaggagcagattctcgaaaacggggagaaagaagtcaagaccattctggctgagatcaaccagaacaagaagcaaatcggggaaaagctttacggagcatatcaggagaccaatgtggtgggcgagtgcagctgcgggggaaaactgataaaacgctatagcccaagaacgaagaacaccttcgtaggctgctccaatttcccaaaatgtaaggtgacctattccctgccaaaaggcgcgaatatgctcaagaagacatgccccacctgcggtttgcccatgattagcattaaaaaggctagcggaaaaggacgagaccatgtctgcctggatagtaactgtggcaaggacgtgagcagacgccaggctcccgaggttgtgggtaaatgtccggagtgtggcaaggacctcctcaaacgtagcggccgctacggggaatttgtaggatgctctggcttcccaaggtgccgcttcacctgttcggtggatgagttgaacaacctgggcaaagataaaaataaggaggatgtgaaagagaataagggtgttagtaagaagatagtaaggtccgaggccaaatga

SEQ ID NO: 2608 - DNA, 2703 bp, synthetic construct
  source 1..2703: mol_type = other DNA
atggagaaacaacaggtaaaaacaattttgaagtcagtggtgatcatagccatcctgctcatcattgtgtttggccttcgcgctcagtccgtcgatattggaggagttcccaatgaacttaaatcacactacgtcgacgagaacgggcttccgtacttcagtgaaatggacagctacttcaactacaggatgaccgagaactatatggatcatggctactttggtgacactaaggtcaacggtaccggctgggacatgcatagctacttcccctcaggcagggccgttggggattatcagccgatgatcgcttatgtgacttcgttcctatacggaataataaatatgttccaggaaatgtctcttctggaggtggcgttttggacgggggccattgtgtcctcacttgcggtgatccccacttacatattcacacgccggattacaaacgactatggagcaatcgcggccagcttgatcgtagtactcgggccaaactacatttcacacacattcgcaggatttttcgatacagacatgttcaacataaccctgcccctatttttcatactgttctttgtggaggctctgaaaacggataagctaagttacagaatcatcttctccttactggccgtggctagcatcgcgctctattccctttcctggacaggctatatgttttatgttgccgtcatggtcctggtgatgatcgtgttctttgttttgtgcttctacttcaatattgagattttagagccatttaagaactatggcaataagctggaatggctgatcaatcagaaggaactgtttgccacactcatcgtactggttgtcggcctcatcggcttactcttggccgtcggcgtcggcggaatcatcgaaggtatcaccggccttacaggcggcttcaccctgcaggccggggctgccgacgtttggcctaacgttctgatttccgtggcggagatgcagatacccaatttggtgactggaggactcgtgggtagctttctcgctaacaccggtggagtagtcaacggggtgggaggaatcgtatgcttattcggggtgctgattgtcttgtacacttttgttcaaagattgttcaggctcaactctgtgaaggtgaagggagacaccgccaagcctcacaaatccaaacgaaaagccacctctgttcgcaccgaacagaagcgattcagcgtgtctttaaaagacattggcagttttggcagcaccgatgagatcaacaaaagcaaaagacacaccgtgctctacctgagtctcttctttgtgtggattgtatcctcggccattgcagtcacgcagggcacaaggtttatccaggttctggtagtgccgatgggtatttgtgcagggatattcgtcggatatgccgtcgactatgtcaagaataatgtggacaacgataaggtgctcctgctgattgccgtgatcgcatccatcctcattgcccttcccatcactcaaatcgcttacggcctggataatgccatgactatcgggttggtggtcttggttattctgctggccatttcagccatcgtgatctatgcgaaaaaatccattaaggactccgatgtgtcaatcaagaaggctttggtggtcgtgctaatcacgctcgctctggtcagcccaaccgtgtgcggcgctttccaaaccactgccgccaccgttccaggaagtagcgaccccatgtggtttgctatggattatgtgaaagagaactcgaccaatgacactgtcatcatatcctggtgggacttcgggtacctattccaagtggcatctgaccaccctacctctttcgatggggggtcccagacaggggatcgggcatactgggtgggcaagtcactgactacgtctgactatgcccagtctaaaggaatcctgcagatgttggcaactacagggagcaatgcatccatgctactgtccgagtacacaggcagcaatgtgacggccgtgcacgcactggatgagaccctgggtaagagcagatctgaggcgcaaaagatcctgacaagcaagtacaacctgacgaatgaccaggctaaggctgtggtcaaacagtcccatccaagcaatcctaacaacgtgagcttcgtgctgagtagtgatatgatcggcaaagccggatggtggtcgtactttggctcgtggaactttgacaccctgaacagtaccaactatcaatactacatggctaacgactacgtgcctatcaagcagaacacacagggaaacattacaatcctgaatgagagcggcatcatataccaggccgtggtcaaccggggcaagaacgggaccaacgagacgacagctcagatggaaaccatttgggacaataaccgtagtaaaattgacctcaacggcaccgaatataaccccctgaaggcaagcaatctcatttgtatcgaaaacagttatcttactgtgaacaagaccctgaataaggacggtaattacaccctgtaccttctggggtccggggatgattatacggccatactgatggataataatcttaaggacagcgtctttacccgcctcttcctcctggggggtatcggtcaggacactttcgagctcagtaatatgcaggatggtgtaagcgtttggactctgcgggacggaagctcaaactctgatgacgcaggctcacagtga

SEQ ID NO: 2609 - DNA, 1095 bp, synthetic construct
  source 1..1095: mol_type = other DNA
atgacgatagaggagaaaatcaaagcgattgaggaggaaatccaaaagacaccttacaacaaagctactagccaccacataggcaaattaaaggctaagatttccaagctcaaggaagagcagatcaaaagaagtagcggcggcactaaaggcgagggcttccacattaagaaaagcggagacgccactgctgttctggtcggcttcccatctgtggggaaatccacattgctgaacgaaatcaccaacgccgaaagtaaggttggcgcctatcagttcacgacactggaaatcattcccggggtcatggagtacaataatgcacagattcaaatatttgacatcccaggaatcattacaggtgctgccggggggaaaggtagaggaaaagagatcctgtcggtggcccggacggccgacctgattattgtggtcttggacgtgctcaaccctcagcacattaatgtgatcctcaaggagcttcgaaatgtaggggtgcggccaaatgagaccaagccggatgtgcgcatcaaaaagacacgaaaaggtggcgtcaacgttagctccaccgttcctctgacctacctggacgaaaagaccatcaggtcaatcatcaacgagtatggaatacacaacgcagatgtcttatttcgcgatgacgtcaccatcgaccagttcatcgatgtgattgaggccaataagtcctacgttcccatgatggtgctcctgaacaaggtggatctggtagatgaacattacctaaacgaaatcaagaaggagcttcctccattcatcccgatcagcgcagacaaacagctgaatatagaagccctcaaggaagagatatttaacaatctgaacttgatcagggtatatctcaagccccagggacgcaaagcggacatggaagaccccctggtagtgaaaaaagggagcaccgtgatcgatgtctgcggaaagcttcacagagagtttgtgaagaacttcaggcatgcaaagatttggggcacttcagtgaagttccccgggcagaaggtgggtcccgaccatgtcgtggaggatgaggacatcctacggattattctgaagaagtga

SEQ ID NO: 2610 - DNA, 603 bp, synthetic construct
  source 1..603: mol_type = other DNA
atgagcatctcagacaagatcgaggagaacaaagtaatattcatctccgggacgccctgcaccgggaaaacaaccatcgcgactaagctaaacgacttcttgaccaacaatggattcaacagctattttattaagataaacgatttcgccattgaaaatgacctggttctcggcaaggacccagacaagctgtacacagtgatagacattggccggctggatgaagtcttaaacaaggagatcaataacttcctggatgagaactcatcggatgactctaagatcgtcgtggtggaaggacacctgtcccacttgtgcaatggtgccgataagatgattattctccgcctgaatccggaaaaactcctcaaaagactggaagagaggaagtatagtgagaacaaaatccatgaaaaccttgaagcagaggccttggctgtctgttctgcagaagcttacgacctttacgatgataaggccagtgagattgacactacaaataaaagcgtggacgagaccctggagctagtgcttaaaatcatcacgggggagctcgagtcccctgttggcagcgtggactttatggattggtttctgctgtga

SEQ ID NO: 2611 - DNA, 372 bp, synthetic construct
  source 1..372: mol_type = other DNA
ctggcccgcgggaaaagaccaaagtggatgatagatatcgcccaggaacgcatggacatcctgtttaaccgagcagagaaagaatataagaagaacccggagagatcccaccggtacatcgagctggcgcgaaacattagcaagaaatacaatacaaagattccccagccatggaaccggagatattgtaagaagtgctacaagttcctcgtgcccggccacaactgcgccgtgcggctaatcaataatgaaattaacatatattgtggcgagtgcggacatgtcatgaagatcccttacatcagggaaaaaaagctcaaaaggcgcgctaagattgacagctacaccttcaaaaaaagggactacgagtga

SEQ ID NO: 2612 - DNA, 216 bp, synthetic construct
  source 1..216: mol_type = other DNA
atgaccatcaacatcggaaaagccggcgtaaacgacaatgtcattgaagagattaagcgccagctaaagtccaaccccataatcaaactgcggttcgccaagaatgtcgcaagaaataaagacgatctgattaacagcatcgtggagggcacaaagagtcaactcatcgacgttagggggaacgtggctgtgatatacaagaaacagagccactga

SEQ ID NO: 2613 - DNA, 441 bp, synthetic construct
  source 1..441: mol_type = other DNA
gtgacaaccgtatttgacgtgcccgccgagctgttgataaacacggtggcggatgaatttaaggataataacgacaagatcgtggcccctgaatggacaaagcttgttaagaccggggtgcacaaagagcggaaaccagagaacatcgactggtggtacgtccgctgcgcttcaatcctcaggcgggtctatatcgacgggcccgttggagtccgaagtctgagaaccttctatggcgggaaaaaagatagaggcgtgaaccccgaaaaattccgcaagggttccggctctattgtgagggtagccctacatcagctggaggacgcaggatacgtggagaaggtcgacgcaggccggatcataactccgcagggacgttccttcctggataatactagcgctgaactcattaaggacattccagagctgagcaagtactga

SEQ ID NO: 2614 - DNA, 372 bp, synthetic construct
  source 1..372: mol_type = other DNA
atgagcgaactcgacgaattacggaagaaacggatggctgaactgcagcgacaggccgccatgaacgccgacccgcagatggcacagcagcaaatggcgcagcagcagatggctcagcaacaactcgcacaacagcaggagatggaggcccagctgaagcaagccatgcgtcagatcctgaccccagaggcgcgcgggagactcgacaacctacgcctgaccaagcccgagttggtgcagaacattgagatccagctgttgcagtccgcccaggcaggaagcctgaggggcaaggtcacggatgagcagcttaaagtgctgcttaagaatctcatgggccaaaaaagggaaatccacataacacggagatga

SEQ ID NO: 2615 - DNA, 582 bp, synthetic construct
  source 1..582: mol_type = other DNA
atgaaagcctgcgtactgtatagcgggggcaaagacagttcactgatgggatacatcctcaaccagttaggcttcgacgttgaactggtcacggcaaatttcggggtttacgattcatacattccagcttcgaagtctgctgagtccattggcttgaagcacagggtgctcaacctggacatttccatcctggaaaaggcggtagacatgatcctagaggacgggtttcctaatgagggcatcaagtatctccacgaggccgtggtcgaggaagtggcaaaccattacgatctggtggccgacggtacaagacgggatgacaagacccccaaactcaataggaatcagatccggagcctcgaagaccgcaaggatgtccaatacatgaatctagatagtttcggctataagaccatcaaataccttgtgggaaacctttttgaactgaagcatgagaagagcaacaaggatacaagctccgactacgaggtggagatacgattgctgattgaccagaaaggtgggaacagctctgaaatattcccggagcactatcagactaacgtggtcggactgaaatga

SEQ ID NO: 2616 - DNA, 156 bp, synthetic construct
  source 1..156: mol_type = other DNA
atgagcaggaacaaacccctagcaaagaagctcagaatggccaaagccaataagcagaaccgaagaatcccaatatgggcttatggcaagacccagcggaaactgaggtaccgtccgaagcctcggcactggcgccgcaacgacctgaaagtgtga

SEQ ID NO: 2617 - DNA, 261 bp, synthetic construct
  source 1..261: mol_type = other DNA
atggcagaggagctcgaaaggacatacgttatacccctgcggaaggtgaaaaatgtcaaacgcacgatacgagctccgcgcgccattagggaagtgcagaacttcctaatgaaacacatgaaagctgaggaggtaaagattgacgcgagcatcaacgaatttatctgggagagaggcatccagaagatcccaagcaaggtgaaggtgattgccgtgaaggatgaggaggggatcgtccgggccaccctggcagaaaactga

SEQ ID NO: 2618 - DNA, 678 bp, synthetic construct
  source 1..678: mol_type = other DNA
atgctgaaaagaattaacctgaccggcaaccctaatctgggcgtctacatatctgtgaacgatgaaatagctattgtgcccttcaatgtgcctgtggaaatggaaagcgtgatcaaagagaccctggaagtcgacatcatcaagacgtccatcgccggctcaaacctaaacggcgtgctggcgactggaaatagcaatggatttcttgtttccccctttacatatgaccgggagatcgaactcttggaatcagccggcataaatgtggccaagcttcccggcaaatacaccgccatcggaaacatcattgcggtaaacgattatggggccctcgcagggccgaacattggggaggagacaatcaaggtgattgaggatactctgaaggttccagtaaagatctacccatttgcagacactaagattgtgggtagtgcaagcatagttaccaataaaggagctctcttgcacagggacacaatctcggaggagatcgatttcattgaggacttcttcaaggtggaggccaacattggcaccgtctgcaaaggaatgccactcgtcggagcttgtgggatcgccaattcccagggggtcatggtgggggaaagtacgacaggtcccgagatggctcgcatcgaggagagcttaggcttcctggactttggtaacttctga

SEQ ID NO: 2619 - DNA, 225 bp, synthetic construct
  source 1..225: mol_type = other DNA
atgatcacgaagaactacagagtgaagggcagctttgtgatggggtccgaaacacaagtcttcaccaaagagctccgcgcaataaaagaggaggacatttatgaaaagctgtactctatcttcggaagtaaacaccggataaagaggaatcagatcaagatcgattcaattgaggagatcagcgacgacgaagtggaagatcccatcgtacaggccattctgtga

SEQ ID NO: 2620 - DNA, 438 bp, synthetic construct
  source 1..438: mol_type = other DNA
atggaagaccagcagaaactgcagcaaatcctgagccagcttgaggtgtacaagcaacagtcggagctctacaagacccaaatcgatgccgttcaggcctcacttgctgagattaaaatcttggaaagcacactggacgacatcagtggcaaagacaccatagagacactggtgccgctgggggccggctccttcatcaatgcagagattaagaacgaagataaggtcatcatgagcctcggtagtggggtcgccgtgtccaagacttttgccgaagccaaggagaccactgctgcacagaagaaagagctggaagagaccctcgataagttattcgcagatctccagcagataacggacattgtagctcagctatctccccaagccgagcagttgatggcgaaagctcaggcgcagatgggacagccactgtattga

SEQ ID NO: 2621 - DNA, 1731 bp, synthetic construct
  source 1..1731: mol_type = other DNA
ttggcagggatcaacctgtttagtagcctgaagaagaaatttgctgacgccagtagcaaattacgcaataaggtagaggaggaggctaaagacgaggataacatcgaattaatcgaagagtccaaggatgaatttgacgacatcgacgaagatctcatcgagtatattgacgaggaggatgaagatgacgattgggacttcgacgatatcgataaagaagataaatcgaaggaagagcctaaggaggagtcgaaggaggagagcaaagaggaaagcaaagaggaaagcgtagaagagacagttgacgaggcgatagaggaagtcgaggatgtgtccgccgatgaggattctgacgaagaagtaaaagatagcgatgaggagaaaaaggactctgaagagaaggattcaaaggataaaaaagagaaatccggattcttcagcttcttgaagcggggtaagaaagaagataagaaagaggatgaggaggagattgaggattctaaagaggaggaagtgcccgaggaagaggtcaaggaagctagtgatgaggaagtgccagaagaagagacaagcgaagaggagtcggaggaggaagttcccgaggaggagatagaagagagcgaagctgaacccgtggaagaaacggttgaggaggaggccgaagagtctgaagctgagccagtggaagaggccgtggaagaggaagccgaggaaactgaagaagccaaggaggaaacctccgaagaggatgaagaagagaagcctaagaagaagcggtccctatttagacgcggcaagaaagacaaagagaaggactcagaggaggagtttgacgctgaggaggccaagggcaaagggggattcctcagcttcatccgggaaaagacgatcagcgaagatgacgtggaggacattctattcgaactcgagctgggccttctggagagcgacgtggccatggacgtgtccagtgtggtggtggattcagtcaagaacgacctggtcggccaaaagattaaaaggagcagtgacatcgaggaatacacctatgaagccctgaaaaaggcagtttacaacattataaacatcgagggcaagtccatgaccgagctgcttgaagagaaggtggctcagggagagcctcttgtcgtcatgctggtcgggattaacgggacaggcaagacaactaccataggcaagctggctaacttttacattaagaaagggtacactcccgttatcgcagcctcagacacgtttagagccggggcgattgagcaggtggcctaccacgcagacaagctgggggtcaaattgatcaagcatgagaaaggttcagacccggcagctgtcgccttcgacgctgttcagcacgcaaaggccaaaggcaaagagttggtgctcattgacactgccggacgaatgcagacaaataccaatcttatggacgagatgaagaagatcaggagggtgtccaagccggacctggtggtgtttgtcggcgacgcgctgaccggaaatgacgcaaccgagcaggcccgtaagttcaatgaagccattgacatcgacggagtaatcctgaccaaggcagatgcggactccaaaggcggcgccgcgctgagtgtgggttacatcattcagaagccaatcctcttcctcggaatgggtcagtcctatgatgacatcaaggaatatgaccccgactggatgctcgagcaaatattctcttga

SEQ ID NO: 2622 - DNA, 1695 bp, synthetic construct
  source 1..1695: mol_type = other DNA
atgaatctcgacagcaacgttaagaccggattgatcgtggctatttcgataatcttcctctttgtgctctcactgtttattactagtgcacccacaggcgtggacaattctgcccggttcggaattttgacactgcttcctccccttatagcgattgccctcgcctttattaccaaagaaaccattctaagcctattcgtgggagtgttcgtgggcgagtttatggtgtcagtcagcgacctgaacatcatcagctcggccgtgaatgcctttctggccatgggggggcaaatcatcagttgtatggctgatccatggaacgctgggattgtcctccagtgtctgctcattggtggtgtgatccagctgattacaaaaatgggaggagcaaaggcgctggcggatgccctggctaaacgcgctgacactcctcgaaaagcgcagctgattactgaatttctgggactgtgcgtcttctttgatgactacgctaactccctgattgtggggcctatcatgcggcccgtgatggacaagctaaaggtgtcacgcgagaagctggcatttgtagtcgacgcaacggccgccccagtggccgggattgccattatctccacctggatcgggctcgaaatcagcctgatcacgcagggtttcgaatcaatcggcatgaatgtgagcggcttcggcatattccttcagaccatccccttcaggttctataacattttaatcctcatattcattgtgatctctgccgttaccctgtacgagttcgggccaatgaaagaggcagagaagagggctcgtgcaagaaaagccgatgaaccggttaagtcgctggaagcaaccagctttgacgatgtcaagccggtcgagggcataaaactgtccgtgtggaatgccatcattccaattgcagtcttaattatcggcgctcttatagcattctactggagtggttacacgaccatcttaggcggtgaggaccaggcgctcattcacttaatgaagaccagccccctttccttcaacgggatctttgaggctctgtctgcctcagatgcctccgtagccctcttccaagctgccttgctggcttccattgtagcgatcgtgatggcagtgctccagaagatcctgacgatcgaggaggccattagcgaatggattggcgggatgaagacaattgttatcactggcgtaatcctgcttctcgcgtggtccctggggggcgtcatcggcgacataggaactgccgattacctggttggcatattgaaggacacaatccctgtgttcatcctgccaaccttgatctttatcctcggcgccttgatttcctttgccacaggcacgtcctatggtaccatgagtatcctgatgccccttaccatccctctcgcttgggctgtgaaccccgatatgggatttgttatcgtctgcactagtggggtgctgactggtgccatcttcggggaccactgctcaccgattagcgatacaaccatcctatcctctatgggcacaagctgcgaccatatcgaccacgtccggacacagatatactatgccatattcgttgccagtataagcatcatattcggatacatcccagcaggatttggcatcccctggtatatcagcatccctgtcgctattgtagtggatgtgagcttgggactgagaaggtga

SEQ ID NO: 2623 - DNA, 1332 bp, synthetic construct
  source 1..1332: mol_type = other DNA
atggccaacagtaatcagtctgagtgggatagtaacattgcctttattttggcaatgattggtagcgccgtgggtctgggaaacatttggcgctttccaaatgttctatactcccacggtgggggatcattcatgattccttatatcgtgtccctcttcctgctgggaatttcctttgtactggtggagtatgctgtggggtacagattcaagtcctccctaatcaaggtgctatacagcgtcaaaagcaaattggagccagtcgcctggtttatcgccctcatcgtctttctcatcaccacgtattacatttgtgtggtgggctgggacctgatatatgtggtcctgagcttcacaaaggcatggggctcaaaccccgacctgttcttctctagcatcgtccttcagagcacagattccattgaagggctgctccatattgtgcccatggtgtttatatccgtcctggctctgtgggctgtggcatggtacatcattcagaaggacttaaatgacggcatcggtaaggtgagtaagttactgctgcctctccttctgattattgttgtgacaatcgtgctgttctcactgaccctgcctggcgcttcgattggctacacccagatctttactcccgattggagtgccttgactgacctgaacgtgtggcttgcggccttcggccagatcgtattctcccttagcctggggatgtccattgcactgacctacgccagctaccttccggagggcagcaaactgacggacaatgctttaatcgttgcctttagcaactctggatttgaaatcttcaactcgatcgggatcttcagcatattggggtttatgaccttgaacacgggcatcccatttgatcaactggttactgaaggaaccggcttggcatttgttgtgttccccaaggtattcaatataatgggaccctgggctactatcatcgggccgctcttcttcctatgtattctctttgctggcgtaacctctgtgatggccctgcttgaggtggtctgctacagtatctctgaaaagttcaacttctcgcggaggaagtcagccacaattgtctgcattatcggctttatagttagcgtcatctttaccacaagtgcgggaagcatgatcctcggaatattcgatgccttcctcaacaacatcgcgctcctgtttgcagtgcttctggagtgcatcatcttcgggtggatctataatttcgacaatctcatagagacactgaacaacaattcaaatataaaggtgggcaaagtctggaaaaacgtcattaaattcatcctcccaatctgtatctgctga

SEQ ID NO: 2624 - DNA, 2649 bp, synthetic construct
  source 1..2649: mol_type = other DNA
atggatgatgaaactaacaacaatcagtggaacagttcaacaagcttcattctggtcatggtcggcagcatcatcgccttggcagggatttggcgcttttcctatctgatttatgaaaacggggggggcagcttcctcatcccatacatcctggccatcgtgatcatggtcatccccctgctggtcctggagtttggggtggggttcaaatacaaggccagcctgccacgtatattctacaacatcaagtctgaatttgagatagtggcctggtttatccttttcctaatattcatagtcctcatctgctacacttgtatcatgtcctgggaccttatctacatagtcctcagtctgtttaaggggtggggcaacaaccccagtgtgttctttacaaccaccctccttcatagcacctctaatccatatggcctcacgtacctggtagtgcctattggaatcggcctcatcctgatctgggccctgatatatttcatttcgcgacgagaaatcaatcggggaatatcattagtgaccaagttttccctggcactgaccttcgttctcgtcatcatcctaagtgtctttgccctgcaactgccaggaagcagaacgggccttatggccttgttcaatcccaactgggagtatctcctggactacaacatttggctcactgcattcgggcagctgatattttcctacggcctggcctacggtatcgccagcacctactcctcctaccttccagaggacagcaagctgatcgacagcgcctgggtgattgttctcatcagcctaatcttcgaaattctgatgtcggtgctcatatttgccctgcttggccacatggcgttgggaaagaacatgcccattacaagcctcgtgagcgacagcttctcactcatctttgtggtgttccctaacgtgttcaatgtgatgggcagctgggcaaccattattggtccactgttcttcatggttatatttatcggggggctgggtgccttattcgctctgatcgagcctttggccaatgccatctgcgagaagttcatttggactaaggacagggccatcaagacattggtcttggcaggactctttgcgagcttcatattcgccaccggcatgggagagtatttcctcaggattgtagacggcttcatcacccagtttgcaatcattctagttgtgttggtagagatcctggtattcgggtggctgtttgaccttgatgacatccgcaacgtgttaaacaacaattctagaataaagctcgggaagtactgggtctatctaatcaagtttgcgattccgattctgctgattgtgatctggatcttgggagtttacaacctgattatcactggcgaccggcagagccttttggttcagtccattctggctagtatcattgtgattgtgcctctcgctctcacggtggctccatttaatggggagtattcgctgggcagcattacaggaggatataactactttagggacagtggggatgatgaagaggccaaaagtaactcaaagcccgacctgaagtcccggttcacatcacggttcacaagcaaggataatgacgtggataatggcacggaaggctacgaagagaagacctatgtggagaagacaatcgacgactatgagggctacgacggtgtagtggcaatcaccgacgatgaggaggaaaattccagccttaaatccagattcagttgggacaagtttaaaaagtctaaaaacggtaagaacgtgctgaacaacgttgatctgagcgcgaaagagttcgatcctcccagcgacgacgattacgacgactacgagacctacaacagtttagatgacggttatagccaaggcagcgatgactttgataatagtatggacgactatcgctcgaaatctaagtccaagtcgaaatccaagtccaaatccaaatctaagtccaagtctaagtcagaaagcaagtcactgtttgaaaagattaacctgtttaacaaagaccagggagagaatgattacttggatgacaattacggctataactctaatgataattacgaggacgatgattcctccttcgaggatgtcttcgacgactttgattatatcactccgatccgcgaggaagaacctaagtcgaaacctaaaacaaagtccaaaccaaagagtaaaaccaattccaagtcaaaatctaaggctaagggtggaaacaagaaaccgaagttcattagtgctgaggatctcgacggaattgagagtttagacgacctgagtagccagcccaacaagaagcccgctagcaaaaagacgagcgcttctaaaaagaagtcaagttcaaaatctaaaaaggagagcggctctaaatccaaaaaagcgtcagaacccaaggaagagcctaaacccaaggaggaagaaatcgagtacgaggagttctcagacgacttctttgatgacggtgtctttggggaggaaggctacgaggctcttctagacgattatgtggaaccgaaacccaagtccaaaaagaaaaaggcatcttccaaatctgaccagagcacccctagggactccaaaccctactacgattatgaaaagaaaggatcagattcggttttcaatctggatgattga

SEQ ID NO: 2625 - DNA, 732 bp, synthetic construct
  source 1..732: mol_type = other DNA
atgatcaagaatcatctcatactgtacttttttatctcttatcttttcctagtccacttctttacctacctgacaatctccattccaattattttctatcactttcacttcttaagcctgttcgtgcacgatttttcaatcaatcttcatatctacccatacttccagaacatcaagttcataaaagacaaaaacatccccataattatcaaaataggagattatatggacaagaagatgacagttctgttggtggccctattctgcctgctctgtgtcggctcatacctcatctttgaacctgccaggcatatcagctatcacgaggtcaacctcactgacacctgcgttgcaaaggtcccggtaaccgacaaggtgtcctcatataccgacaaccttaacattcactactactccgattatgaaaacgatctgaacatcacaagtttctacgatgtggctcccgagagctcgagccaggggcacctgcgcatggacaatctgaaaaaggaggtgctgggcacggaaaagggaagtgcaggcaatctcacttattacaaaaacaacaatgccgggacctacacaatgtatgtggaagacagaatgtcccataattacatcttgctgtccgctaaggacctgaccattttcacgaatgtatactctagcctcgaggcgcggatcgtggtgaacgagactgatattgacagtttggacagcagctacgcctga

SEQ ID NO: 2626 - DNA, 1737 bp, synthetic construct
  source 1..1737: mol_type = other DNA
atgaacacggccgagattctggtcaatctgcttgaaagggatggaaacgaatttatctttggccaccccggcgaacagatactgcccttttataaggcattgaaggacagctcaatcagccatatcctaacacgccacgagcaagccgcagcccacgctgccgacgcctacgcgagggtgagcggtgagtacggcatttgcataagcactgcaggtcccggtgccatgaatctggtcatgggagcctccacagccttcaaggattccgttccaatgctggtgataaccggcgacaacgactatgacaaaaaggactccgacatctttcagagttttcccataaacagtgtctttgagaatataagcattaaaagcttccatccttacgatgggaaatccgcggtgtacaatatgattgaggcactcattctgctgcataagtttccaaagggtcctgtgcatatcaacctctctagagacgtcttgttggaagagatcgatttcgatagcattgatttgcgcgatatcgggctctcgaatataccctctctgaatctcaacgatagcgacatcatcgagaacttcgaccttttcgatgattccctcgacaacctctatgacttctcacagaagctctccgctgatgtagacatcactattcagtcagctattaaaaagttaaaggactcgagcaaaccattagtcatcctaggaaacggtatagtttggtcaaaagccactttcaaattgagcgacttcctgagtaaaacgatgctgcccgtggtgaccacataccactccaagggaatcgtcagtgaccacgaccggctgaaccttgggatcgtcgggcttaggggaaacagcctgagtaattacgcttacgagaacagtgactgcatcctggtgctcggggccaaactcagcgagcgaacaatcggtgcttccgacttcgacatcgccaaggagaagatgatccacgtgaacattgacgagaattgcctgaagggcaaaatcaatatctgcatggacgttaacgagttcttggactgtcttctggatgaactggatcaagataacggaacctttgattatgatgacggctggatcgacgagatctactccaattacgaggaactgattgtggggggaatcgaagaggtggaggaaaacttcaatccactccgaccgccctacgcgatcaacagaatcatcgacgcgttcaaaggcgcctacttcctaagcgatgcaggaacccacacgacctggaccactctgctcgcaaagagcgatagtttcggcaagcttctcttttcaggcggctttgggcctatgggctacagcctgccagggtccattggggtggccttcgccctcaagaagcgcggaattgacgaacgggtgctggtcatctgtggggatggcgacatccagatggtaattcaggagctggctacaattcgggaatatgacctgaatattgatattttcataatcaacaactcccagttaggcataatcagacaatgggaggagaccgtgtatgacttcgataagtatcaggtggaccttattaaccctgactttgctaaactagctgacgcatatggcgttgattctatgaaggtggaatctaaggaagacctgcagctggctattgagatgtcgctggattcaaataaggcctttttggccgatgtatgtgtttgcgaagagaatatccctatgccgaaaaaatga

SEQ ID NO: 2627 - DNA, 348 bp, synthetic construct
  source 1..348: mol_type = other DNA
atggatgggctggaaatcattaatagcttcaataaggagacaatttacgagtttagcgaggcttttaccatcttcgaagacgagatctacttcatattcaaagtggacatcatttcaatcaatgcaaacccctccaagacgaaggacaaaaacaaaaataagaacaaagagaacaaggacaacaagaaggcgcaacggatcataagtcacctggaaatcgagccaatagcctatctgctaaaaaaggccgaaaatgaagactatcagatcgaggccattgatgaaaaatacaccgagttcattggcaaaaacaaggataagctccttaaggagtttctcaaccagtga

SEQ ID NO: 2628 - DNA, 849 bp, synthetic construct
  source 1..849: mol_type = other DNA
atgatcctgaatcttatcttgattatactcatcgccctgattatcattttctcaatcatcctctacaacggccttaggatcattctcaccgtggaaaaggagaaagcagaagcccggtacaaactgaagataaccctgcttaaaatccccatttttaccaaagatagcagcgaggacaaggctacagagtccgaagaggagaaagaagaggatggggaggaggaggagtcgaaagacaaaaagggcctgatggagaagtacaacgagattaaacctatcctaaaggagctcattaaatcaaagaaagagctgaagaaatatctgaaggacatcctaaaaagcatcgatatcaagaaactcgaggggcacttgatactcggccttagcgactctttcaccacagtcaagatagcaagttggatttggagtatcggagcgatcgttaacagtaaaaagccagtgagcctgactgtggacccgcgctttacagagatcatcacggatttcgaaggacagttggaactgaagataaatctcctgaagatcatattctacagcctgatcctggtcagcaagaaggacattagagagttgatcaaggtaatttacgcttacaagaaggccaaggataaggagaatgaagaaaaggaaaactccaatgaggaactgtataagaaggaaaaggacactgagattaaagagaacagcaaggaagaattatataaaaaggaaaaagacactgagatcaaagaaaactccaaggaggagctggacaaaaaggagaaagacacggagattaaggaaaactccaaggaggaattagataaaaaggaagagaaggagacctga

SEQ ID NO: 2629 - DNA, 516 bp, synthetic construct
  source 1..516: mol_type = other DNA
atgattgacgaagagccgattaaaactaccgtcgaggaattacggaagctgattcacattagcaactatatcggagacgccattgagactgaagacaaactgctgatccccgtgtccaaggcggcagtaggatttggcataggagagcagaaggctgataattcccttgccggcaccggtgccggtgtaagcgtggagcctattaccatggtggtcgtgtcaaaagggaatagtggggtggatgaaataaggacaatcaacctctctaaaggcaaccagaccaacaagacactcaacgaaatcgggctaatcctgacggatgtcttgaaggagttcctcccatccaaaggcaatgacgactacatcgacgttgatgacgtgagtgaggtggatatccaagacgcagacatcaaggaaaaggtcgaagatgccgtggaagagtcggacctgaaggagaaggttgaggaggaggtggaagaggctgaggagagcctgggcatcgaaatagatgactga

SEQ ID NO: 2630 - DNA, 1167 bp, synthetic construct
  source 1..1167: mol_type = other DNA
atgaacgagatattactcatgctcccaggcccaacaactgccgacccccgagtcctgcaggccatgagcaaagctgtggtaaaccaccgcggagacgagtttggagagatctatacagaaacaaccaagctcatgtctaaaacattccagacgaagaatgatagctacatcctaacagggagcggaacttcggccatggaggccgcagtctcaaacctggtcaatagaggagataagatccttaatgtagtaggcggaaaattcggggagcgttttgcagacatcagcaagatgcatggcatcgagtccgtgcagctggatgttgagtggggcaccgctgtgactccagaccttgtggaagaagccctggagaaagacgaagacattaaagccattaccatggtgcacaatgaaaccagtaccggggttgccgcacccatcaaggaggtgggagaagtgatgaagaaccacgatgcactgttcattgtggacacagtgtccagtctaggaggcgactatgtggatgtggacaaataccacattgacgcctgtgtgaccgggtcccaaaagtgcctcgccgcacctccgggccttgccgcaatcacattcaatgacgatgcctgggccgcctgcgaaaaggtggaggacaacaattactacttgaacatgccgaaataccgggctaacggtaataaggaccctgctcaaaccccttatacgcccagtgtctcattgatctatgcactgaaggcggcgctggaggttctccatgaggaggggctggagaacagaatagaacggcaccacaccgccgctgcggctagcagggatgctgtgaaagctctggggctcgaactcttccccgatgaggctgtgtcctctgccactgtcacggccgtcaagatgcccgagggggccaatgacgatcagatcaggggcaccatgctcaacaaatacaaggtccagttggccgggggccaggaccacctgaagggcaacatattccgcattggccatatgggtgtcattaactatcaggaactggctatcacgtttactgcacttggcctgaccctgaagggcttaggactggttgaggatgcaggtgccggtgtggcggctctggcgaaccattacatcaagtttaagctgttggaaaaagtttga

SEQ ID NO: 2631 - DNA, 1101 bp, synthetic construct
  source 1..1101: mol_type = other DNA
atgagtttcagaacaaaacgggtgatcatctccaccctgttggtaatgatatacgaattttttctgatgaaataccttttccttctctttggcggattggatgacatctacctgctgctcctcacgattctgttcggtatactcaatatggtgcccatgttctttgaggaaaagaagtccaggcctatcacccgtcttctggatacgatatcaggattctggatatggatgagcctcttttacctgttcgtcattctgatcatctacatcggcggggtctacattgattggccgttttatattatagtcattctcgttctcctggttcccctgctgaccgtgtactcctatttccacgcccacaagatcatcattcacgagcgaaccatccaaatggataacattaatgaggatatcaacattgcccacctgagcgacgttcacttcggcagcacacggcatgataagatcattagggatcttagtgacaaactcaaggagctgtcagattattgtgacttggcgatcatcagtggggacatcgtagacgggtcctctgctattgaagaggacgattttctaccccttaaggacgtgaacatgcccatagtcttcaccccaggcaatcacgacagctatctggatatcgaggacgtcttcggggcctgcagaaatgcaggcatcattgtgctagacgatgagggaatggaatttggcaacctgaacatcttcggaatgacattcatcttcggaatgacccgcaagtttgaagagttcgaagtggtcagcacaggtgtattaggggacttcgtgaaggaagacaaggtgaatattatcatcttccatgtgccaaaaaactgggaggacttttcgaaattaggatttgacattcagttgtctggccacactcacggaggccagttccatccactgacttggatctgcgacctgatctggtataaccggggtctgttcaaagcaaacattgggggcaaggacaggtacttgcatgtgacgaccggtgtgggctctatggattacccttttcgctgggggactgatagcgagatagttgtgctaaaactccgcaagaacgactga

SEQ ID NO: 2632 - DNA, 1266 bp, synthetic construct
  source 1..1266: mol_type = other DNA
atgcttaaaagaacagttaaaaagaatggcgacgagctattccctctgggtctgggcgctatgcgactgccaactaaaaacaactcaatcgataaggatctggctcgggaatttatcctgtatgcaatcgacaacggaatcaattacatagacactgcctacgcctaccacgggggtgaaagcgagtccttccttggagacatactgagcctcacagattccgacggcgtgaagtaccgggacaaagtcaaattgtccaccaaaagcccgtcttggatggtccgcagcagggaggactttgacgccttcctcaatgagcagttacgccgactgaaaacggactgcattgattactactatcttcacaccatcgatttaagcatactggagcgtctcaagggactaggcgtgtacgagtttctagaaaaagcccggtcagagggcaagatcaagaacatcggcttctcctaccacggcgcaccgaacgagttcaacgacctgattgacgactatgattgggacatggttctggtgcaatacaattatctggatgtgaatgcacaggccggcattaggggaatccggtacgcatacgagaacgacgtggctgtattcattatggagcctctcaagggcggtatcctcgcgggagaattgcccaaggaagttgacgggctgttcaagggggtcgattccaataagtctagtgtggattgggctctgagttgggtcctgaaccaaaaggaagtcacctgcgtactctccggaatggggtcgatcgagcagatcaaggaaaacatgaacatcgccgagagagtggaagtggacagtctgagcgatgatgaactcgccgtgctggagaaggcgcagggaatcttcaactcaatgatgaaaatcaattgtacaggctgcggctattgtcttccctgccccaagggggtaaacattccagattgctttaacatttacaatgagaaatatttgttcaacaaaaaagccttcggtcctattcccggggccatggtgaattactatatggtggtggggggaataaccaataagcagtcaaatgcgggtctctgcaaccattgcgggaggtgtaaaagattgtgtccacagagcctggacattccaagccacctcgatagtgtgaagagcgaatttgagaagttcggcttcaactatcagattaagtttattcgcaatatcgctatgccctccataaacaagatctctaaggtctttgacgtctttaagcattcgtga

SEQ ID NO: 2633 - DNA, 4308 bp, synthetic construct
  source 1..4308: mol_type = other DNA
ctgtacatctcagagatcgagattaaccagaacattatcctcaacacggagggcaataaaatctatctaaacaactcccctaaaagcaatatccacgataactggttcggaaacactctgctgaactacgatgaggtgccatatgaaggctgcaccaattggattttcctgaatggcgaaagcaaccaggtctccctggagaatccgatcagctttgagatcaccttcaccttgtcctctttcaataagaataccaagaagattagcaactacgatgatcggaagcttcccttcaatctcaccgcacacgcagagcacgggatcttgaatccgaacagtaatctgctgggtaaaacaactatctatgaaacagagatcatcaatgttgagcggataatcggaaatattgcaaacatagattcggaatttgagattatggagtttctggtcacggacggaaccaccttctacgacctgaaccagctcatcaacaacaacagcaataatgaaatcaatatcagcggcaattacacatatcacgatgatattgactttgagtttaaagaggggatcaatgtcaaccgcagcctcatcattaatgggaacggattcaccatcaacggcttgaactcctcacgcatcttcaatataaacggagacaatgtcacaataaataatatttccctgataaacgggaatggatatgaggacacctacgactccgacggaggtgccatctactggaaaggggctgacgggaccctgattcagagcaacttcacaaacaacagcggatacaatggcggcgccattctctgggaaggagacaatggacggattataaacaacaccttcaaaaacaacagcgcgttcgatggcggaggtgccatcaccataaccgtggagcgaggtatcatcatcaacaacacattcaccaacaactcggcatcctacgatggcggcgccatctacttgatcgcatccagtggcgagatcattaacaacacattcaccaacaacagcgggtataaaggtggcggaatgatctgctacgcagataacctcagcatgatcaacaacaccatggagagcaacattgcttccgacgacaatggtggcgccattctctgggagggagaaatagggcgtataatcaacaacaccttcaaaaacaactacgcctctgaagagggtggggctatcagcatcagaggcgagatcggagagataattaacaacacattcacaaacaacaacgcctcctaccgaggtggtgccatctccattatcattacgagtggcgagataatcaacaacacattcactaacaacagcggatattcgggggggggcattctttgttatgggaataatgtgagcataatcaacaataccatggagtcgaacattgcttcctacgatggcggtgccctttacgtcagcatggactatgccatgattattaacaacaccatcaagaacaacaacgcgtccgacaatggcggggcaatctactgggaccggtataagggaattatcagcctcaacaccatcgccaacaataatgctaatcatgggggcgcaatctactatgagggctactcttcaaatctgaactataacatcatcttaaacaacaagaatagcgagatctatttcgacaatgtgagaacgttcaacggaagcaataactggttcgggaacaatgctagcaattataatctgaaccccaacacgagcttcgaatacgacaacagcccgaatgtaacccttagtgactggctctttctgaacgggacagcaaaccctaagatagtgaacgcctttgaaagctcccagatcttgttcaaattatactcctatgacgggatcttgatctccgaatatgacaattccctcataactgacaccaagctcaacctgtccgccgaaaggggaagatttgacaagacaagcgccagtttcaatgagcccatcaactacacggcaatcgaggggggccgcgatacaatccggggggctatagataagtcgggctacagcataaatctcaccaacaggagagtgtcctcaaaaattgccatggatactaaggagataaactatagccgcaatgcttcaatcaagcttaattacaacgactttgcggggggaaacgtcaccatcagactaatgggcgagaataacgaatacctctttgaaaacatgaccctgaacaagaccatattccttggcgtcatcaatagggactcctacaacgtacgcatcgaatattcaggagataggtcattcctcgaggagaacattagcgaaagccttattgtgaacaaggctggtaccaaaatagtccccacaaacgacacaatcgacttgggcatcggagagaactcaaaagtcaactacacgttctatgttattgatgatgaaggccagtacataactaaccccgaggacattggcaacattagcttcaagtcagatgggagcgccgtcgaagtggattcaaagactggggagattaataccattaaggaagggactgccaacatcctcatccgcttccagggcgacgaaaaccaccttgattccaatgcaagtgtatatgtaattagcagtaataaaatcaggaccaaaatcaccgctgagaacctcaccaccgattacaaaaaggatgactacatcattgcccgactgaccgacctcacagggaaacccatcgccaacgccaagctgattgttgagcttaatggcactaataactatacaactaattcaaagggcgagattaaggtgcccaccaaaggcctggattcaaatgagtacatagccaagatcatctacgaaggagacgaatcctaccgattttccaacgcgtccgtaagactaatcgtgaataagctaaacaccgagattactgccaataatatcacgactatctacaacatcacgaaggagctggtgattagactcaaagacgtcaatggcgacccagttagcggggttgagttgacggttgacctgaacggcatgaataattacacaacagatgacaatgggcaagccattgtggaaatcaaaggattgattcctaacaattacacagccaagatcacctttgaaggcaatgggaactacaacaaggccagcacagagagcgatattgagatactgaagattcctagcattttaaatgggaccgacatgactgtgaactataaggaggataaatatttgacagtttctctaaaggacaaagataacaagcctatccataatgccagtatctcagtggagctggagggtattaaaaactacacgaccaattctgatgggcaaatcaaggtgccaacatccagtctgcctgccaagaaccataccgccatgattcgttttgaaggcaacgagatttacgaaaaatccaatgctaccgcgaagatcactgtgaataagatttccggcaaactgactgcgagcaatgtcactgcccggtatggcgacaatcagaacctcgtgattagtttaaaggactcgaagaaaaatccattaagtggttttaaagtgtctgtggacctaaacggcaagaagaactacactactgactcttcgggccagatcaaagtgtcgacgaaagatctggtgccagacacgtataaggcaatcatcgtctttgcgggaaatgagaactataccggttcgaatgccagtgcatccgtgcggataaatcggatcaataccacattcaaatacactaacatgaataccattgcttttgattcaaatatcgaaggtcgtattggagaatatttccgcttccaactgctggatgaagatggcaagccattgtctggcaaacaggtgtttattggatttaatggtgtgaagtacaataggacaaccaatgaaacaggggaggccaggctgcaaatcaacctgaagtacgtgaaccactatacctttgcaatagctttcctgggagacgactattacaagggtagcttcaacgtggctctgatcaatgtgactgaacagattcccgtgctgagcactagtgctaaaacatataaatcaagtgcgaagaccaagacgctgacggctactcttaaatcatctaggggccatgtcctggcgggcaagaagattagttttacactgaacggcaaggtttacactgctaatacaaacagtaaaggtctggcttccgtaaaggtctctctgagcaaaaagggaacttacagttttacggtgcagtttggaggggacagtacttacaagaaggttacgaagagtagcaagctgacaatcaagtga

SEQ ID NO: 2634 - DNA, 1392 bp, synthetic construct
  source 1..1392: mol_type = other DNA
atgaaattcaagaaatacctgttcattctgcttatagctctgatttgcatcatcagtgtctcggccgtggctgcatctgatgcgaatgaccctattagccaggacaataaccaagggctcgttcttgaagaaacaaatcaggatctgtcgatcactaagactaaagagatagtggaatcaagcaccaataaagaaattagcttggaagacaacaaggtgatttctaaggaaaacaagaagacaagtctgaaggatgaggagacagactcattcaccaatctaaataacctcatcaacatcgacaaccccaacaaccacacgattagcctcaattgcgattacgtcctcctggaagaggactgcacctacattgacactgagatcctcagttcctcaaatctgacaacatcccacatcctcagggatgagggcagcctgcccattgacctgaacccaaaaacctacaaggcccgcttaatggtggaaaactccaacgaccaatccattgaggtgatcaaaaccacgaatatagagggatcatcattctggctcctgaaccagaccataaacaataactcgaacagtgagatcacacttgatagcaattacacctttaattccagcgcggattccggatttatcaacgggatatacatcaaccgctccctgaagctgaacggtaacggcattaccatcaacgggctggatgaaggacgaatcttcatcatcactgcagacaatgtgaccattaccaacgtcaattttgcaaatggcaaatctgacaagggaggcgccatcttgtggcttggcaaaaatggaaacatcagcaactgtaactttacagacaatatggcaacgtctggtggagccatcttttggggaaataccaatctaacggactactatagcaacggccagggggatgacggcaccatcatcaactgtaatttcattgggaacgaagcccagaaggggggggctatgttcttccataccggcggagccaccataaaagatggttgcaccttccacaacaatactgggggccaggagggtggtgccctgttttggctgaactatggcggccggatcgagaataactgcaatttcacgtttaacactgccaaaggttctggcggcgccatctattgtccccaggtagagatcctcaacaactgcattttccagaacaacactgcccaatccaagattgaggagaggatcatgaagggagggggcgctatctatttacagaagggaggaacagttcgggactgtacattcataggcaatattgctctgaacgacgagagcgatggtttgagattctataaggggggggagccatttacattgaagggcatgcccccgtttccaactgcgcctagttga

SEQ ID NO: 2635 - DNA, 4176 bp, synthetic construct
  source 1..4176: mol_type = other DNA
atgaaactaaagcggtactcgtacataattatgatctttcttgtttgcatgatcagcatctctgccatcagtgctgccgatgactcatcaatcgctacggacgattccaacaagatcatcaatgataacaacaaccaggacattgtgctggaagaaaatgggccctcaacaaatatcgctttagaggacaagaactataaaattgagaagccacagctgaaggagaatagcccaggcaactttaccgatttgaattacctcataaatgaggatgaaaccacccgccataacactactatcactttggaccgggactacatcggcggtgagaaaggcataagaatcgaccgtcccctcatcattgacgggcaggggcatacacttaatgcctcccaaaataacagggtcttccacattacttccgagaacgttacccttaaaaacatcattttcaccggcggtcgatccgactacggtggcgctatttactggcaaggcgacaacgggaagattatcaactgtaactttacttacaacacagccaccaagtatggcggtgccgtgttctggggcgacgacgagtttgaaggtaccgctgaccagaccatcgctaaggatggaattatcatcaactctaatttcatctccaataaagcgaatgtagggaatggggaggcctgggagaatggcggaggcggagaaggtggtgcagtttactggtatgccaacaatggcaccatctgcaactcctacttccacaataaccgggccggtggacagggaggcgccatcacttggaaaggtaatgatgggatcatttgcaataacaccaacttcaccgccaatagtgcaggagattctggcggtgccgttttctggagaggagataacgggaccatcagcaataactgtgagtttaataataatatagcctacggtcggaccagtgatggcatttccagagggggaggagctattttttgtcatggcgagaatggtaagatctcgaactgctcttttatggaaaacagtgcgaaacctgaaagtgaaagcggtaaaggggggggcgccatttatgctgagtacaacactttcatcacagattgcattttcataagaaactctgccgattattacgggggtgcaattctcatcttcagaacaggtgatgtctatcgcaatatcttcatcaacaacactgccttaaacggcaacacgataacattaaaaggaatcggccactcaaccatcacaaacaacattatcctaaacaagaccaatgcaatctactggaacgaatccgactacaccatcgaggctaattggtttgggaacaacgctacccaatattcagaaccgtatgaatactcccagacctggttgtttctgaacgccacagccaaccccaaccctgcgccattcaatattcccacggaagtgaagttcaagctctggctctacaataaaaagacgaaaaaaatcacagaatatgacaattccctcctgcccactatccaacttagcttgtcgcaaacaaaggggagcattaacaaggagaccgcagggctggatgacccgatcaactacacggcaaatgaggtggggaccggaagcataactggaaaaatggaatggatcacagatagcatcttctttgagatcgtgaatgaccctaaacttgaggtgtctgtgaatccctccgagatcgactacggcgacaatattaccctccacctcggatatgaggacgaggctacaggaacagtaaacatctcttttaagggcagtacccacgagaagactatcgaaaacattcctctgaacaagactatcaccattaccgagtccattctgcccgacgagtacaccgtgactgtattctattcaggggataatcagttctcacgcgcaagtaagaccgcagatgaaaaactgaaaatcaatcagaagaatccgaatatgacagtgacatcctatgagatctacgttaatgacactaacggcgtcatgttttccattaagctcgataaggacgccacagggaagatcattctcacaggggacattggcagggagatcaatctgacggagggcagcattaaggacgggaaacgcattattgaaattaagaacaatggttttgatctgggcaagtacaatgtcacattttcatatcctggcgatgagatctactgggagtatgaaaccacggccctctcagagattaaagtcatagagaccaaaataattccccagaaggaggaaatcgtgctgatcattggcgacaagtcaaagatcaactataccataaatccaagcaacgccgttggagatgtcactttcaccagcaatgacactaacgtggtcaaagtgaatggaagcggggatattgaggcaatcgataaagggcaggccaccatcacaattaaattctctggatcgaaagactacgcccccagcaatgccactgtgaacataaccatcggcagggaaatggctaagctgacggccgaaaacattacggtgacatataacgctgagggctaccttaaggttgccctgaaggatagtaagaacaagtccataagcggagccattctgattgtcgacctgatcaataagacaaattacacgaccgactccaacggcgagataaaagtccccacaaagagcctggctgctgggaactatacggcaagcatcgaatttgagggcaacgataagtacctgccagcgaacacaaccgccggcgttaccatcgagaaggataatccgcgactgacttcaaacaacatcacaaacaaataccacactgaggattacctgatcgtgagcctgaaggacagtgccagcgggcctatcagcggtgccgagctgactgtgtacctaaatggcagcgaaacctataagacagacggaaacggacaaataaagatccctacgaaagacttgctccctaacatatatgtggccaacatctcctttgcgggcaacgaaaactacacagaggcgaacgctagcgccagcatcaacataactaaactagataccaggctgaatgccaccgacacaatcacaaaatacaacgtgaataaggacatgatcgtcaccttgaaggacattgatggaaacgccatcagcggtctgaacatccttgtagatctggacggggtgaaaaactacaccacagactccaacggagaggtaaaagtgccaaccaagtcattggctgctggcaactatacggccaacatcgccttcgaaggcgacaatatctatattggctccaatgccaccgcaaaggtgaccattgagaaagagagcaccgagatctcggctacaaacgtcagcgcaaagtatggctcaaaccagtccatgatcgtcacgctgaaggacagccagggcaatccaataagcggagctaaggtctctgtggagatcgatggcaagaaggactacacgaccgactctaatgggcaggtgaatgtgccaagcaaaaacatcgttccagacacgtacaacgcgaccattacttttgctggaaatgagaactacacctcttccaacacatcggccagcgtggtgataaagcgcgtcaaaactgcgctcaactacaccgacatgaataccactgcgtttgattcgaatattgaaggacgagtgggagagtacttcagtttccagttgcttgacgaatatggaaagcccttatccggcaaacaggtcttcattgggtttaatggggttaaatacaaccggacaactaatgaaacaggcgaggcaaggctgcagataaacctgaaatatgctaacaattacactttcgccatagcattcctgggagacgagaactatagcgggagcttcaatttcgctattatcagtgtgagcgaacagactcctagcctgtccacaagccccaagacctataaggcgtccgccaagaccaaggcactaacggcaaccctcaaatcctataagggaacagcaattccggacaaaaagattactttcacggtgaacgggaaaacctatagtgcgaacaccaactcaaagggcatcgcaactgtgaacgtaagtctcaacaagaagggcacgtacaacttcaccgtccagtacgccggcgatagtacttacaagaagattagtaaaagtgaaaagctgacgataaaatga

SEQ ID NO: 2636 - DNA, 789 bp, synthetic construct
  source 1..789: mol_type = other DNA
atgaaaaatatcctaatttccaatgatgatggggtgatgggtcctgggatactggcttcaaagcaggcccttgaagggctcgccaatgtggttgtcgtagcaccccaggaaaacaacagcgccgtgggccgcaaagtcaatatcatgaagcatatgtacctggaaaactacgagctcgctgatgggagcatggcgtacggcttgtctggaactcctgccgactctgtgaatgtggggatcaactatgtgtgtgacgaggtgccagatctggtggtaacaggaattaacccgggcataaacatcagcagactgcagataaccacatccggaaccgtctgtgcagcgatcgaagctgtgggtctgggcattcccgccattgcatgctcactgttcctcgacgacgactgcttcaaacaggatgatgagggcaactggtatgtggacaccgactactcctttgctcaaaaaatcctggcaaaactcgtcaagaaggtcttggacgagggcatgccagacggcgtagacctgtttaacctgaacattcccagcaagcccctgtcggataagatcaagatcacacgacttgccgacagcatgctgaagttcaacatcctagagcgggtggatgacgacggcaatgacacggtcatgaatgttccggaactgattgaggactacgaggagggaaccgatggatattgcctccttgtggagcggaggccaagtttaactcctctcaacgttcacttcggtgccgaaatcagtaatttggaagattgggagttttga

SEQ ID NO: 2637 - DNA, 735 bp, synthetic construct
  source 1..735: mol_type = other DNA
atggacatcaatgaatgggaagaatggtatgaagagatcctcaacacctttggctttcggagggaagatgatgagaagactgcggacctcttggacgaaatccttgcagatcatggattcctcaccattgatgagttctatgatgagatcatgctgaagaaggggtacactgacaagtttatcgtcttcggagcaggccctagcctgaaggagcacataagattcctcaaggaaaactacgacctgagcaaatacatgctggtaagcgccgatggggctacaacagccctgttggaagaggatgtcgtgccagatatagtggccacggacctggacggcaaaatgtccgacctgttgacggccaactcactgggcagttactttgtgattcacgcccacggaaacaatgaggagcttattgacctatggacaaccagctttaataaaatcctggggacaacccagtcggtgcccgtaggcaatctctataacttcggagggttcaccgacggggaccgagcaatgttcttcgtggtcgagctgggtgcgaaagagatggttctagctggaatggactttggcaccgttgtcaccaagtactcccggccgaacatcgagggtgagacgggccccgccgacgagataaagactaaaaagcttattttcgctgaacgcctcttaaactggatcagggagaatgaggatgtggaagtgattaacctgatcgacagttga

SEQ ID NO: 2638 - DNA, 627 bp, synthetic construct
  source 1..627: mol_type = other DNA
atgaaagagatcgagttcgaccttaaaaacaaccccttttataacttcctctcgagtcgctacagcatgtccgcacggctgaatgtggagaaaatgtggaattactcaaaggaaaacgacctctccttcttcacactgagcctggcggccttaatcaacagtctgaacgagatccctgaaatgagacgaaggatagtgaatggcaaggtcattgaatacgactatctggatgcagtttgcccgataatggacgaggatagcggtatctacaaggagatgcgggtaaaagcgccccagcgctttgacgagatcctggattggcatgattatgtccaagagcacgaaaggaagattctaaacggaaccgaagacgcttttgaggtgaagactaccgaaagagacgagctgaatattgccaacttcagctgtattccatgggtggattttgattcaatcactaactgcaccgcctcttccaaccagattcagccattgatcacgtggggcaaggtcaacgaggactacgaaatgaccgtggccataacagttagccacatcttcgtgaatgggcgtgagctcgcctacttctatcagttcgctcaggacaattttaataatcttttttga

SEQ ID NO: 2639 - DNA, 1119 bp, synthetic construct
  source 1..1119: mol_type = other DNA
atggccatagaggatattttgatgttcgacgagacaatatttaatgacatcaatgcattcaacccagactatatgccccctaactataactttcgggacagtcagatggaagggatggctatggctatccgcccggccatcagaggggggcgtcccaccaattccgtcatactcggaagttgcgctacagggaaaacgacggcaattaaaaaggttttcgagctggtggaaaagactacagacaaagtggtgtgcgtttacatcaattgtcagcttcacactactcggtttggaatcttttcgcaaatccacaaaaagatttttggacaccagccccccgagactggcgtgcccttctcacgcgtgtacgaaaaggtgatggataaactgtcctcagatggaaaatctctgattgttgcctttgatgacgtcaactatctattccagacccctcatgcaaacaaggtattctacgatatcctgagggcctacgaggaatatgaaggggtacgcaccggaatctttgcgatcctctcagacctggagtttcgattcgcccttgacaagaatgtaaacaccgtcttcattccacaagacattgtgttcccgccttacaactacagcgagatcttcagcatcctaaaggatagggctaaggcgggcttcttcccaggtgtggtctctgacgagatcattgaagagatcgccaaccagacctacgaggtcggtgacctccgggtgggcatcgacctgctccgagtgagcggtaacatcgccgagtccaatgccagcagaaccatagaattggagcatgtggaagaggccgttgcaaagcagggctctgtgaatctgatggagacaatcaatagtctgaacgacctggaaaaaaccatgatcaaggtcctcattgatagggacgaggtggtgacagcaggcgccctgagcaaggaatttaaggagcaggctggcgtcagctatgcgacattcaacagaaccctcgaaaagttggaatttttacgactggtggatacccgctacacgggcaaaggggtcagaggcaactccagggagataattcttcggttctccccagaggatattaaacggtgcaacctgtga

SEQ ID NO: 2640 - DNA, 192 bp, synthetic construct
  source 1..192: mol_type = other DNA
atgatggtcagtcacaataacagaacgtgtgacctgcggaaaaagcagaatctccgcgacccgctgaccttcaacaacttgaggataaacattaaggactgcatggtcatcttcgttgtgttcacagtgctacttctgagcatcctggcggtatccgcagcccccagcccagattttatgctctgggtgtga

SEQ ID NO: 2641 - DNA, 474 bp, synthetic construct
  source 1..474: mol_type = other DNA
atgatcttaattcactgcggggcaataatgagtgaaaacaatcagagggagaaaaaattcgaatactttgaagtgactgcagacattggattttatgcctacggcaacaccctggaagaggcttacgaaaacgccgcgctcgctatgtttaatgtggtgactgacatagacaaggtgaaaacgagcgaaaccagagagttcgaggtcgagtcagaggatttggtctcccttctgtacgactatctcgatgagttcctgttcctacaggatacagaatttctgtttttcagcgagttcaaggttgacatcgacaaaacagaggatgggtataagcttaattgcatcgcctccggcgaggagatcaactgggacgtccatgtgccccgcagcgaggttaaggccatcaccttccacaagatgtgtgtaaaaaaggaagatggtgtgttcaagctgcgggccattctcgacctgtga

SEQ ID NO: 2642 - DNA, 1449 bp, synthetic construct
  source 1..1449: mol_type = other DNA
atgtccatcagggagagtttggtcaaagttagagaaaatgtgtgggagctgccaagtgactacaagaaggagatgcgggttcctggaaggatgtaccttgatgacgaagcggtgaagaccattgaagaaggtgctttggagcaggtgagcaatgtggcctgcatgccggggattcagggggcctcaatcgccatgcctgacattcacttcggctacgggttcagcataggcggcgtcggtgcattcaactataataacggggtggtaagtcccggcggcgtgggctttgacattaactgcggagtacgaatgctgaggaccaacttaactgaagacgagatcaagccgcaccttaaggagctgacagaggttctctttaaaaacatcccaagtggtgtgggcagcaaagggcagatacgccttaaggacaacgagatcaatgaggtcctggattatggggcctggtgggcagttgagcgtggcttcggctgggaagaagacctcaaattcctggaagagaatgggcggatggaagaggccgagtctgaggtcgtaagcaaaaaggccaaaaaacggggcgtgccccaactgggttcactggggagcggaaaccacttcctggaggtgcagaagatcgaggaggtctatgacgataatgtggccaaggcatttgggctagagcctggaaacgtgacaataatgatccacagcggctcgagaggctgcggacaccagatctgtagcgattacttacggaagatggataaggcttacagaaactataagatcaagctcccagacagacaattggcctgcgcccccattgactctccagaggccacaggatacctcaaggcgatggctgcaggcgcaaactacgcttgggcaaaccggcagatgatgtcccactgggtcaggcagtcctttgaagaggtctttaagcgagacgcagaagacatgggaatgagcacgatctatgatgtggcccataacatagccaaaaaggaagtccacaaggttaaaaattcccatatggaagtgctcgttcaccgcaaaggtgccacgcgagcattctgtcccggccgccgcgagattcccaaggaatatagagacgtcggtcagcccgtcctgattcccggaaccatgggcaccgcctcctacatcctgcatgggactgatgtggcgatggaggagaccttcggctcaacggcccatggggccggaagggtactgtcccgcaccgcggccaaaaagcaatacactgcgaaggatattgaaaaagagctgaatgataagggaatccatgtgaaagccaattcagctcctgtgctcgctgaagaggctcctggtgcctacaagaacgtggattcggtggtgaagacctctcacgacgctggcatcgctaaactggtggctaaggtcgtgccactagcagttacaaaaggatga

SEQ ID NO: 2643 - DNA, 774 bp, synthetic construct
  source 1..774: mol_type = other DNA
atgattgccattatagggggaagcggtgtcgacgagatcacagacatggcagaatcaatagagaaaaagatagtggataccgagtatggctctgtccaggttagcctctttgagattgaaggcaaagaagtggtgttccttccccgccattcggaagggcacacctgtcccccacacaagatcaactttaaggccaatatcatggccctgaaggagttaggggtgagccagatcctggctacaaatgcagtcgggtcagtggatctggagattggcccgggaagcatcgtcatccccgacgacttcctcgacttcacggtcaaccgagaccggacgttctacgacgatgatgtggttcatatcgacatgagcgagccttactgcaaccggctcagaaatgccctgctagagaacagtgactgtgtcaacggcggtcttgtagatggtggaacccacatttgtacagaagggccacgcttcgaaactccatctgaaatcaggatgtttaaaatgattggcggcactgttgtgggaatgactacactgcctgaggctgtgctggcgagggagaaggagatgtgctatgcttccatcgccatcgtgtccaactactgcacctccatcgccaagcataaactgggcgtggaggagatcatcgaaataatggccgtaaaaaaggaagaattgattagtctcctgttcaataccattaagaacctgcccgtggactacgattgcgagtgccaccacgcattgggagatgcggagttttga

SEQ ID NO: 2644 - DNA, 627 bp, synthetic construct
  source 1..627: mol_type = other DNA
atgaacatcaaagagctgtttatagagtccctaaaagacaacaagaagctgataataggcctctatgcgttttttatcatagtgttcatcgccgcttggattataaccggtccgaaaatgcaggccattgccagcaatgtcacggcaatgaacggtcctgggggcgcccagagctccgcgatcgaactgttcatccacaacgagctgggcggaatcattacataccttgcatcagttttcttcggcatcgctgcaattgtattgctcggatacaatgcattgaatctggggagtattggccaattattcaaccatttcatgcccaatgggggcatcctgtacctaatttacctcattccccacggaatctttgaaattactgccacagtccttcagtccgcagctggcatcctcttgttcctcttcatttggaggttcatcaaggccttccggagtaaggataccaacggggcctcagacgcctttgagatgaccaaaaagacactgatccagagcatcgtgcttatggtgattgctaccatcctcctgctgatcgccgctccaatcgaagcctatttctcgactgcgtttagcgagtttatcatggggtttctgggactgcgctga

SEQ ID NO: 2645 - DNA, 393 bp, synthetic construct
  source 1..393: mol_type = other DNA
atgaacgagtttggccagctgcagctcatctggattaggagactggcccgcgaaacggggcgcattaccgcacttatagaagcgggaaacctgagtgtgatcgatttggtccggtataaaaagagcattagctcaatggatggcttctgtagatttgtgatcgagagccaagattgggatgatgtacggcgaatccccgagatcgtggaggatgttgaggaaaagctcttcctgcacttctacgaaatgatcgacaggttcgacggcgagggagctcatctcgacttttccaaagaggacgaggggaagatatgcctaaatttcgacgacgcctccttagaggacattgtctttacaatcattgacgacgaagacatcgatgtgttcctgtga

SEQ ID NO: 2646 - DNA, 204 bp, synthetic construct
  source 1..204: mol_type = other DNA
atgcggaataacctaaagatctacagggcaatagagaatattacacagaaggagctggctgatgaactcggcgtgagccgccagaccattgtcctcatcgaaaacaacaaaaacgatcccagcctggagctggcctttaagatcgcccacaagttcgacgtgaaaatcgaggacatcttcattaatgactccaacaaaaagtga

SEQ ID NO: 2647 - DNA, 300 bp, synthetic construct
  source 1..300: mol_type = other DNA
atggagaatctactcaacttgaagtatacctgtaaggactgcgatttcacctggatcacgctgaacggcgagcatagcatatgccccaagtgccactccgaaaacatcgacctgctgggcgaagtgaaggacctggatattgaggccatccttgctcacaacaaaatgcgggggggatgttgcgggagcgcccgcggcaaaggtcccctcacatgcggaaaaccaatgcctgaccacgcaaatccaaatattccgcaccataaccacaataagaaaacttgttgtgggtacaacgagtga

SEQ ID NO: 2648 - DNA, 1068 bp, synthetic construct
  source 1..1068: mol_type = other DNA
atgaatgtaagtgacctcaaaagggaccactacatgctaaaggggcccctggccaaacagggctatgactggtggtggcattccctcactgcatacaacaaggaaacaggggaaccaaggcccttctttatagaatactttgtgtgcaatcccgcgcttgctgaggatgagcctaccctgggccaagacccgaaaaacattgaggccgggaaaaagccatcctactgcatgctgaaggtgggagcatgggggaaagagccaaagcagatccacaatttctattccatgaaagatttcgaatgtcccgatgacaagttggatgtgaagattggagagttcagcctgaccgagaaacacatgaccggctactgtaaggtcacagaggaggaagcccgcgaccatccggagtacatgtgtgatgcaggcgagatgaaatgggacttggacattgacaagcagatcacgtttaacgtgggatatggtgctaacactctcttccgcaaattaaactcattcgaaatgttttggcatgctgaaggaatcaagactcagtacagcggaaccattgagctagatggggtcgagtacgaggtgattccagaaaagagcttcggctacgccgacaagaactggggcgccgactttacaagcccttggctgtggatctcctcatgcaacctcacaagcctcatcacgggagagaagctgaacaactctgccttcgaggcagggggcggcaagcctaaggcttttgggataagcctgcctcgaaagcttctgataggcttctattatgaaggaaagatgtacgaatataacttcgccagattctggaacatggtcaaagttgatttcggcttcaaggaaggtgaggagctgaatgaatggtttatcaatgccagtaataaagactcgaagatggagatgaagctgtattgcaagagagatgagatgttgctctttaattacgaagcgcccaccgggaagaagctgcacacccggctttggaatggtggtaacggctttggcgagatcaaactgatgaaaaaaggacggcacatcgattga

SEQ ID NO: 2649 - DNA, 690 bp, synthetic construct
  source 1..690: mol_type = other DNA
atgttgtggacagattttatcgtgctggcgattgtgtatatttacgtggttgcaatttttatcctgtctgagaaggtcctgaagagcaggcccgaggtctcgcggaagtttttacacatcatggtagggaatatgatatttgccatgccattcttcagcgacccttggattatgcttctgttcatcaccctgccggtgactgtggccctattcttcctgacagagtactcccctatccagattgaaaacagcgtgaccgaatccggccatgccttaggcctcctcttttatgccctgatctggtccatattgctcttcgtctacccaatcatgctcgatcccaactacctgtggattgtcgccatggccatcgttcccctggtatatggggacggcttcgctgctcttgtgggaggcaaatgggggacaatcaagtaccacgtcttcggcggagagaaaactgtggtcgggtccctggcaatgctatctgtaacggcagttcttagcgtctttgtgtgggtgttctacagttcaatcggatacactctcccagagttgaatctgtggtatattttgctgatatcagcagtggccaccctgtgcgaagctctcagttacggtggtgtggacaaccttacggtgcccgctgtgaccagcgtgctgtactatatcgttgcgaccgtcctctga

SEQ ID NO: 2650 - DNA, 1059 bp, synthetic construct
  source 1..1059: mol_type = other DNA
atgaagcatcgcctgaacctcgataataaggacccaaattatattctcctgaaagagatctttaaaattatggattcccgcaagtccaagagtatcctggcctcctacggcttcaaaaaccttaatcgcacaatatttacctttaaaattatattcatcagtatgttctttggaattgacattcccttcatcctcaacgagctgaaatccaaaaaggagcttcgcaagtacttcaatattagcgaggtgctgactgcagaccaggtgtataagattttctcagaaattaactctgagaagctcattaagtgcctgaacaggatcttgaacagcaggaacatggtgaagagaagaggaaagaagacctttatcgtggatgcgacccccgtggacgtggatatcaacttccacaggaataagaagacaaaagaacatctggaaaaaatcaatctcaagtggagttatagctcctctaagggttactatattgggttcaaggctactgttgtactggattatgactcgatgaatcctgtttgtattcttgtccactcgggggctccaaacgatgcaaagctgttcgaggagatcctggaaaacctccagaaacggcgaataatccggaagggggacacattgatctttgataagggctattacagctacaaaaactaccagatcggtatcagcaagtacaagatcatccctttcatctttcccaaagagaagttcagccggacccgattggacgacattttaacttacctcctagccgtcttcaacaaaacaaagcggatcatgaaagagaaacgtctttacaatagcttaaagatggaattgatgaagaagatagactcctgggagaagttcaagccaataaggggcaaaattgaggactttttcaaactgctcaagcagggcctgaacatgagagaaatccacaaatacacgccgaaaagtgtcgaaaaaaccgtctatctaaatgtgtttctgggagccctgatcatatcacagggcttttactcaaaaacggccatccaacaactgtctgagaactga

SEQ ID NO: 2651 - DNA, 2208 bp, synthetic construct
  source 1..2208: mol_type = other DNA
atgactgatgtggagctgaaaatcaaagttgcagagaccttgtcgcaaaatgacgtgggcaaaaacattgctaagctggatatggagtccatgttcaagctcggcctgaaggacggcgacattatcgaaatagtcggaagcaaaaacactgcagctattgccgtcgctagccagtcggatatggaaacaatcatcaggattgacgggaccacccggaagaatagtggtgcgtcaataggcgaggaggtgaccatcagaagagccgacgtaaaggaagctaaaaagatagtcctcgccccgatcgatgcccgaatcaggattggtggtgactttaacagggccttcgcaaatcaggtcatggttcagggcgacctcataaacactggcatcaagacaccccaaagacgcgtgagcggcagcggattcttcgatgatatctttgatgaccttatgaatgtgcccggaataggggccatgagccagatcaagctggctgtggtgagcacaagccccggcggggtggtgaaagtgggccctaacactaaactggagataaacgaagagcccgtggacatctctaaactggagggggtgtccaatctcgtggacatcagttacgatgacattggcggtttgaaggaggaagtcaagaaggtgagggagatgattgagatccccctcaagaaaccggaactcttcgagaaactggggatctcccccccaaaaggggtcttaatgcatgggcctcctggaacgggtaagaccctgcttgcaaaggctgtagctaacgagagtgacgcccacttcattgtaataaacggtcctgaaatcatgagcaaatatgtgggcggctctgaggagaacctacgcgaattttttgaagaggctgaggagaatgccccctccattatcttcattgatgagttggatgccattgcgccaaaacgggaagagacaaacggggaggtggaacgcagaacggtggcccagcttttaaccctgatggatggtctcaattcccgggggcaggtggtggtaatcggcgccacaaaccgaccggattcactggacggcgctcttcgccgtcctggacgctttgaccgggaaattgaaatcggcgttccagataaggatgagcgaaaggagatcatggaaatccacacacggggaatgcctctggccgaggatgtggacctggaccagatcgcaaatacaacccatggatttgtcggggcagatctggaggccttggctaaggaagccgctatgcgagttgtcagacgaatcattccggatctggggtccgacgatgagattccccccgaagtcctggaaaagctggtggtaaccaaggaggacttcaagtccgcccaaagggagatccagcctagcgcgctgagggaggtcctagtccaagttccaaatgtcacttgggacgacgtgggtggactggacgacgcgaagcaggaactgaaggaggctgtcgagtggccattgaaataccccaacaagttcaaggagtttggagtccggcctcccaaaggcaccctgctctatgggattccagggacggggaagaccatgctcgccaaagccgtggcaaatgagagtgaagctaacttcattgccatcaagggacctgagctcctctctaaatgggtgggagaaagcgaaaaaggcgtgagggaggtctttagaaaggcccggcagactgccccgacggtcatcttctttgacgagatagattcaattgccagctcaagaggaggcgaatccggcgactcgggcgttaccaaacgcgttgtaaatcagttgctgacagagatcgacgggctggaagagctagaggatgttgccatcattgcagcaaccaacagacccgacatcatcgatccaggtctcatgcgcccaggacggttcgaccggcacatcaaggtggacgcgcctaacgaggacgcccgcctggcaatattcaaggtgcacacgaaagacatgccccttgcgaaggatgttaagcttaagaaactggccaagcgtgccgaaggatacgtgggcgctgacattgaagccgtttgccgtgaagcagcgatgctagccttaagggacgatattgaagcaaaagaggtgtcagcgaaattctttgacgaggctatggataaggtgaagccaaagagcagtaacgaggaagagttgatccagtacttctga

SEQ ID NO: 2652 - DNA, 840 bp, synthetic construct
  source 1..840: mol_type = other DNA
atggatcgccacgtgattgaggctctgggtagggcccggataacggtggagaacgggaaggttgtggatgtaggagagcccatgatcgaatactgccccttattcgacaagcacaggggtatcaaggaactaacaaaagaggaaatcgaaaaaaacatccaattcagaatcgacgactttggaatgtgtaccaaaaaccggcaattgcgccttaaagactttctctcctttggcatatcggagatcctgtccaccttgctggacgagaatctgatcgactgtgcagtcatggtttgcgaaggctgcggaactgtcctcgtaaccgagagcgagatggcccagggagtgggaggcagagtcagcggtctggtggaaacaagtccaatttcccagagctttatttggaagagtttcggtcaggatcgtgtggtggacagcgagacggcccgcattgatcaggtggatggcctcagactggccattgacaacgggtacaagaacatcgcggtgacaatctgcctcgccgaggacggcatcattcttagggaactggagaaggaatatgaagacattaatgtctacatatttgcagtccattcaacaggcctcggccgagaggaggccgaaatcattttcgacaccgcggatgtggtaactggctgtgctagcaagcaccttcgagacatcggaaaggagctaaaggtcttctctgtggggacctcaatcccaatcttcgctgcaagcgataagggggaggagttcattaaactgcggctggataaaataggggggcccaaaaagaagactggcaattccaaacagcctaacccgctggtttga

SEQ ID NO: 2653 - DNA, 636 bp, synthetic construct
  source 1..636: mol_type = other DNA
atgtcaaaagacgtggtgctgatcctgtcaggcgggctggactctaccacattactctacaaactactgaacgagggaaataacgtcactgccctcagtttcaactatggccaaaaggcggccatcgagattgagcgcgccagtgagatatgtaaaatgaacgatgtcaatcactttgtgttcgatatccggaacattgtagacttgctttccagcagccttaccgataaggacaacgacaacgtgcaggagccaaaaagcaccgtagtgcccagcaggaatacaatcttgctggagctggccacggcctttgcaataagcaacaacctggaggaagtttattacggggcaatcaaggcagacactggcgactatcccgacaccacccctgaatttctgaagcagatcaacgaactaaataaggtgaataattacgagtacatcccagtttgcgctcccttcattgatacagataaaaaggatgtggtcaagctcgcgctcgagctgggcgtgccgattgaaaagacttggtcctgctacgtcaacaatgacggaacgccttgtggggagtgcttctcctgcaagtcgagaatagaagccatcaaagaagctaaggaggaactcggtattgagtga

SEQ ID NO: 2654 - DNA, 360 bp, synthetic construct
  source 1..360: mol_type = other DNA
atgctaacactggtgagtgaacaccggatatacggctgccacaaactcaaggaccagggggggaaatgtacacaatggcatggacaccagtacagggtcatcctgacgctgcaggcaccctataaggatctggactatcgcaacatgatcatggacacctatgacattgaagccatctttaacgagttcattggcgtggatcatttgaatctgaacgagtttatggatagcgagaatccaaccatggaagagatgagcaaattcttctacgacggtcttaaggataagatcgaatgcctcgtctccgtgggcgtatacgagacccctgagactggagttacctacactccgatggagtga

SEQ ID NO: 2655 - DNA, 609 bp, synthetic construct
  source 1..609: mol_type = other DNA
gtgatcaaaattaaagtctcggaaatcttcacaagctttcagggcgaagggccttacatcgggacccccgcaactttcctgcgactgtacggatgcaatctgaactgcccatggtgtgacacggatatctccacctacgagattctatccgtggacgaggtctttgagatcctcatgacccaaatggagtttaacaatatacgcatactggtgatcactggtggagagcctacattgcagatggaagagctgaagcggctcattaaggaaattcccgacgagattaagatccaaatcgaaacaaacgggtcaatctttgaatacgttccagaaatcgattacgtgataagtccgaaggaagataaggagaccgtatttaagaactattacaaatatgataacgtgttcttcaagttcgttatttgcagccaggaggacattgacgaggtcatctatctcaaggataaatacaattatgacaaaaccatctggcttcagggcgagttcagcaaggacggcgaaatggccgacctgataagggagaacttcccccacttggagaacgtgaagctgtctgtgcagacgcataaatatttaaatcagagatga

SEQ ID NO: 2656 - DNA, 423 bp, synthetic construct
  source 1..423: mol_type = other DNA
atgtacaaaaagataatactaccaacggatggaagtgaatactcgaaccgggaaattctcagagctaccaagctgctggctgaggacggagaagtcatcatcctgtccgtcgcaacagaactccgaaagaccgccttccagcgcagcaaggacatcgatagggccaacaaggagagtattcaagaggccaaagagtatgttgcagccatgaagaaaggctttgatgacagcgtaaatgtccggactaaagtcgttgtgggcttccccgcggaagccatcaaccaggtggcagaggaggagggggctgacttgatcattatcgcgtcttcaggtaagcgcgggctgcacaggttcgtgatcggcagcgtggccgagaaggtgcttaaagactccgagattgatgtgctcctggtgcatgactga

SEQ ID NO: 2657 - DNA, 582 bp, synthetic construct
  source 1..582: mol_type = other DNA
atggcggataaaaaaccgaccgcagagaactggcccgtggtaagtggcgattacattgtcggagacccagagagccctgtcgctgtcaccacactagcttcgcataatgaagacattcctgcagccgctggcgccgccatagccggcccctgcaagaccgagaacctgggtatcgaaaaggttgttgcaaacatcatcagcaatcctaatatccggtttctcatcctttgtggggccgaggtgcagggacacatcacaggtcagagtttcaaggcgctgtacgagaacggctgcgaccccgagaagaagaaaatcacgggagccactggcgcgattcccttcgtcgaaaacattccaatggaaggggtggaaaggttccagcaacagctcgagctggtggatatgattgacaacgaggacgggggagcaatcactgccaaggtgaaggaatgcatagagaaagacccaggggcttttgaggaggattctttggtgattaagatcgacgaagagcgctattccaaaaagagctcattcgtggagtcttcatccgagagcgaaaaaatagaatccgaggcctga

SEQ ID NO: 2658 - DNA, 450 bp, synthetic construct
  source 1..450: mol_type = other DNA
atgaaaaaagagtcgatcttcaatgacgaggtgagcctcttcaattccatttatgtaatgcacaaggcgtttgagaagttcctcaagacccacgtcaacgatctgaatatcaacaaggccgaatctaaatttctaggcgaaatctattacaacgaagggataagccagagggagatcgctcgaaacctgtttgtgtcagaggccaatattgccaagacatacaagatactggagaaaaaaggatttatctataagaaggtggacgaaaagaacaacacccggagacagttatacttgactgaaaaaggcaaagagagcttcgaagaaatcatcaagctttacgaagagtaccatcacttcattctgagtgattacacggaggaggagatccgcaagcatgaggagatgatgaaaggtattgcagacaaatccctcaagttcctgaagtga

SEQ ID NO: 2659 - DNA, 771 bp, synthetic construct
  source 1..771: mol_type = other DNA
atgaagaattattttgacataaaggataaggtcgccgtggtcaccggcgcttcgagcggattagggtggcagattgcccaagcctacgccagccagggtgctaagctggcgctgttcgcccggcgagaagagaggctgcaggagaacgtaaaggagatcgaggacaagtttggcactgaggttatgtatgctgtgacagatgtcggagattatgatagcattacggcctccgttcaaaaagtgatggacgcatatggaagaattgacatactcgtgaacgccgcggggatgggcaacaacaaaatggtggtggaccagtcaaacgaggaatgggcacgccatatccacatcgaccttacaggggtctactacatgtgtaaggctgtgggcgaaatcatgattgagcaggaatatgggaagatcataaatatcgggtcaatccacagtcgggtgatcttccctggcggaggtatcagcgcatactccagtgccaagggggcagtgatgaatctgaccaaaaacctagctgtcgagtgggcgaaatacaatattaccgtgaacgccatcggccccgcggtatttgaaacagaactgacggttgactccattgagatggacggattcatggatctcattgcagcttactgcccagccggcaggttggggaaaccgggtgagctggacggccttgccatctacctcgcatctgacgcctctagcttctgcaccggccagctgatctgcgtggatggtggatggactgctatatga

SEQ ID NO: 2660 - DNA, 1275 bp, synthetic construct
  source 1..1275: mol_type = other DNA
atgactcagatgactgaggctaagaaaggcaacgtcacccctgagatgcaagctgttgccgaatttgaacgagtggatgtgggcaagatcctaaacggcctggcaagtggtagaatcgttattccaaagaacatcaaccgcgacacaaaggcgtgcgggatcgggcagggcctgacaaccaaaatcaacgcaaacatcggatctagtagcaaaatcgaagacatcgacctggagattaaaaaagccaaattggcagtggactttggtgcagatgccatcatggacctcagcacaggccccaaattattggagttcagggagaggataatggactcagtggatgtggccattggcacggtccccatctatgaggccggggtcgtgacattaaataagggcaacgaaatcatcgacatggatgaggacgacattttcaattccataatccatcaggccaaggatggggtggacttcatgacccttcactgcgggatcaatcaggatctcgtctataaacttcaagaggctaaacgtatgatgggtattgtaagccgcggaggaacattcctcgcttcctggatactccacaatgagaaggaaaaccccctgtactcgaactacgactacctcctggagatcgctctggaatatgatatcactctctcactgggcgacggactccggccgggatgccagtctgatgccaccgacacctcccagattcaggagcttgtgaccttgggcaccctggtcaagagagcacaggaagcgggagtgcagaccatggttgaagggccaggacatgtgccccttaatcagatacgcgccaatatggagattcaaaagacactgtgtcacggcgctccattctacgtactggggcctattgtgacggacctggcccctggctacgatcacatcacgagcgccattggcggagcgattgccgcatccagcggcgccgacttcctatgttatgtgactccggccgagcacctctcactgccctccctggaggacgtgaaggaaggggtcatcgccagcaagattgcggcccaagccgctgatgttgctttgggtctggacaccgcatgggagaaggaagtggaaatggcacaggcccggaaaaactttgattgggaaaagcagtttgatctggcctttgatagtgtcaagccacggcattacaggaataagtgtgagctggacgatgacgagatgtgtgctatgtgcggggagtactgcgcggtaaagatagctaaaggtgacttctga

SEQ ID NO: 2661 - DNA, 1653 bp, synthetic construct
  source 1..1653: mol_type = other DNA
atgaaatacgaggaactggtgaacgtgtatgaggccctgggggctacgacaaaacgcctggagaagaccgagatcctcgcagactttcttaaaaccgtggaactagaagatttacagaagattacgctcatggcgctgggacgtgtgttccctccttggagtgaggaggaacaggggattggcgacaagctggtgatgaaagctgtaggcgatgcggtcggcgtctcggtggcagtagtggaagacgcaatcagagacgaaggagacatcggcgccgctgccgagaagctgtacggcaaaaagacccaaatgactttcttctcacagcccctgaccgtgaactttgtctacaatcagctgaggaaattggccaaaataacgggaaacaggtccacagccaaaaagatcagcaacatcttggaactgctgagctccgccagcgctctcgaagcgaaatacatctgccgaaccatactggaagaacttcgcatcggtgtcggtgagggaatcattcgggacgcaattagccaagcctttggggtggataaggcccttgctgagcgcgcgcatatgcttacaaacgatctcggcctggttgccaaggttgcaaaggaggagggtgaagatggccttaagaaactcagcctgattcccggcaggcccgtcaagccaatgctagcccaattgagcgaggggatcgaaataagcatcaacgaaatggggtgtgccctgtgtgagacaaagtacgatggaatcaggatgcaggttcacaagaaggacgacgagattacaatattcacacgcagactggagaatgtgactatggccttgccagaggcagtggacctcatccgggaagctttcccagatgaggacttcattgccgagggtgaaatcatcgccatccgggatgggaagccgactacattccagaacatcttgcagcgagtcagaagaaaacataatattgaagaggctatggaaaaggttcccattaagatctatctatatgacctgctctactttaaggagcccaccattgacgagccgatcatcaagcgtcgggagatcctggaaagcgtggtggactgctcaaaccccaatttggccctcagttcccttgtcaaggtagggccagacaacatagatgatgcagtggatctgttcaataagtcaattgaggggggacacgaaggaatcatgattaaagactgcgatgagccctatattcccggcatccgcggcaaaaaaatgctaaagctgaaggcggagcctgagaccctggacgccgtcgtgatcgggggagtgaaagggatcggcaaaaggggagactttataggctcgtatgtgatcgccttacgagacgagaatgaccagctccagccgattgctcacgtaggaaccggtctgtccgatgatgacctggcaaacctcacggaaaagatggaggccctgaagatcactgagaagggcaccagaatcactgtgcaccctaagatcgtctttgagatagcttactccgagattgtcaagagtccagagtacagcgctggttactccctccgcttccctgtggttaaacggataagggacgataaaggcgttgacgacattgataccattgaacggttagagagtatgttcaagggctga

SEQ ID NO: 2662 - DNA, 399 bp, synthetic construct
  source 1..399: mol_type = other DNA
atggagctcaacgacgaaatcatctttaaagtggcactgatcactgcgctggtcggaatgatcgggatgctagcctttgcctcttatattgaacccaaggagataaccatcaatgaaattacacggaacaacattggcgagacagtgagcgtcagtggcgttgtggagagtgttaagttatcctcaagcggaagctcctgcttcctggagctcaacgacgggacggggaaaatcaacgtcattgtgttcgaatcggtgttggtggagcttaaggatgctggcaacgacctgaatgatttcaaaggtcacaatatcaaggtggtaggcagcataaccgagtacaagtctagcatggagctgatcctggccaactccaattcaattaaactcgaatcctga

SEQ ID NO: 2663 - DNA, 213 bp, synthetic construct
  source 1..213: mol_type = other DNA
atgtatgagaaggataaactagtgctgccaaacatcattaaggaggagtttgactgcatcgagctgaatgaagacaccatattcgactgggccatcgaagatgacaagatcatcctgaaaccccggaacatcgtcacaacggacgacatcatcgggattatagatgatgacggaggcgaatgggacattgataacgagatttacagcctctga

SEQ ID NO: 2664 - DNA, 234 bp, synthetic construct
  source 1..234: mol_type = other DNA
atggggttcctagcatcatcgaagatctacggcgactaccagatagatattcccaaggaggtgatagaggaatttaatgtggagagagactccatcatggagtggatcattaacgaagacggacggatctccatcaacttccgcaagaaatatagcattaaggatctggtaggcgccttccacctggatgacgaagtcagcagcgtggacctcaaaaggagtctgtacgagtga

SEQ ID NO: 2665 - DNA, 1365 bp, synthetic construct
  source 1..1365: mol_type = other DNA
atggtcgagaaacgactgttcgggacatttggggtccggagaaactgcgaaatgatggtgttgactcctgagttcgcatcccgccttgccgcaagttacggaagtattgtgcaggggaccgtcgccatcggcggagacaccaggaccagcacgccaatgctgaaacacgcaatcactgcagggctcctctcttccggctgtgacgtggtggacttgggaatcctccccacgcctgctatccagtacgcagttcgcaattattatgatgggggcattatcgtaaccgctagccacaatcctccaaaatacaacgggctcaagtttgtggacgaatttgggataggcactcccgatgatatggagatcgaggtggagaaactatacttcgatgaggagcctatccgcgcttcttgggataagattggtgaagtctttacaaacgagtcaatcatcaaggaatatattgctgagacgctgaaaagagtggatgtggaggccatcagggcgcgaaagcttaaagtggttgtggactgcggttcaggggcaggcagctacaccgccccctacatcttgaaggaactgggatgcgaggtaaccacactgaactgtcaggctgacggatttttcccaggtagggaccccgagccaatagagccgaatctgcaggacctcatcgccacagtcaagaaccttggcgccgacattggccttgcccatgacggtgacgccgaccgtaccatttgcatcgacgagaaaggcaacttcatactgggcgataagaccttcgccctggtggaaaagcacatgctgaaggaaaacgggggcgggatcgtggtcaccactgtagccaccagccaagccatttacgacatcgccgaagagttcggcggtgaggtgatcgctactgctgtgggagacctgctggttgcccggaagctgaaggatacagatggcctcttcggcggagaagaaaacggtggactcatcttccccgacttcatctatggacgggatgcggccatgaccgtggccaagatactcgaaatactggttaaggaagataaacccttaagcgaattggttgccgagctgcctgtctactaccaggaaaagctgaagattgagtgtccagatgaccagaagcaggatgtcatggcgaatattgcaaatgagattaaagacacaacggactttgagctggacacaactgacggcgtgaaaatcctaaaagaggacggctgggtcattattcggccctccgggaccgagccgatattcagatgctttgctgaatcggattccatggataaggctcaagagatggcgaactggggaatcagtttagtggagaaatataagaattga

SEQ ID NO: 2666 - DNA, 804 bp, synthetic construct
  source 1..804: mol_type = other DNA
atgatttccgacaggcagaaaacattgctcatccttatcctcgtgctggttctggctttcgcaataatcttcctaggatactccatctccttaggcaacaatcagaccgccggtgtcaagctcaatgattcgaataagatttatattaaccaatcttacccggccgagccgatccccgacgcgaaaattgacacaagcggggttaattcagtgctgcttgggcagaacgaactgggtagcgtcgagctgctcggcccattcggcaactccgatagcgaaatcaagatagcctatagtatcgggatgcacccctgggaaagtaaggtccacaaggctctgttcgataccgtcctcgctaaaaacagctctctgaaatactgctattacatctataagataaacgtgaccaactacaatactgacgacgagggccggatggatgggcagctgctagcgcaggagtttgtggcacctcatatcattaatggcgattatgacttgtttctggacattcacagcaacaagggaactgtcggaggcacctacgagcaaactaactttgcctttgcagtggggcaggatgaaaagagtgaggcctttgtaaagaaaatcctggataagatgccagaacttgtgtactacttcccagccgaccagtcaagccctccctacatcaccctccccgtagagcaggccggaacgcctacggtgaattatgaaacattcagctatgaggacattaacacaacctacgatctgatcgacaaattggttgacgtggtggacaacctggagttcaaatga

SEQ ID NO: 2667 - DNA, 714 bp, synthetic construct
  source 1..714: mol_type = other DNA
ctctgcgatttgatcctgaatctgattatcaaaatcgatgatatcatgattatcaaaaactattctaacgaacccactgacgaagcgaaggtcgactcaagtctctatgacgcccagcttatcggagaaaacgacctggggaccgtacacctgcatggcccattcggaaacgaggagtcagacattaagattgcgtatctcatcggcatgcaccccctggagagcaaggcacaccgcgctctctttgacacagtgctggacaaggatggggatctgaattactcctactacatctacaacatcaatgtgataggggagctggacgaggcaacggagggtcggatggacggccagcttctggcccaggagttcgtcgcccaccacataatcgaccgaggctacgatttcttcttagacattcatagcaaccgggggtctaggagtccaggaacttatgagataagcaatttcctattcgccccaggctttgatgaagagtctagcaaatacatgaacgtcttgctatcgaagattgatgaattggtgtattacgccccggaatacagaacctcccctgaatttattacagttcccgtgcaaaagtccggtatccctacactcgtgtatgagacctactcctatgagcccatcgagctcacctacgagctgagcgaaaaacttgtggatgctgttgacagtctggactttgactga

SEQ ID NO: 2668 - DNA, 1137 bp, synthetic construct
  source 1..1137: mol_type = other DNA
atgccgattatgtccttcggcagtcagaacatcaacatcattacaaataagaaagccatgaccataaggaaactgtggaaaacccctcttaagaaaggtgataggctgcactgctactggaatctcgcttcgaaggaaaagaaaaaaatcttcgaggctgaggtcacagaagtggagaccattaccttcaaggagctcaaggataacgatgagttggccagagaggaaggctacgaggactccaaggagatggtcaaggaatttaaaaaaatgtatcccgacagaatcgccgacgacgacctcttccagataatctatttcgaaaagctggacatcaacaaatggaaaggtgaaaagattgatcagaaggagatgatcacccagagggccgatatcctctttgatactgggaaatacgacaagagtgtactatgctacaatgctgccctgaagatagacccaaatgatgtgtacctgcttaacaagaaaggagacaatctcggacgcctcgaccggtttgaggagtctattgaatgttacgacaaggccctggaaatagagggggacaacgagtatatctggaacaataaggccattgccatgcttaactctggcaatatagaggaagctctggtggcaagcgatggagccttaaatgcaaacccagacaatcccgtggtcctctactggagaggcttcatcctggaaatcctatcagaatttgataaggctctggaggtttatgacaagctaatcacaattgatgacactaaccctgaggtatggaacgctcgcgggaacgtcctgacggacatggaccgactggaggaggcattgcaatcatatgacaaggcgttggaactgtgcctcgaggatagcgagattgacgcaagcgcacaaaaccggaaagggaacgcgcttctggacctgggccggtttgaggaggcaatccagtgctacgaccgcgccatcgaactggaaccactcaacacgagcttcctcctgaacaagggagttgtgttgatggagattgataagttcgatgaggcggaaatcctgtttactaaagtgcttgccttagacccctccaatgatgatgcccgagtgctgaagttggagtgtctggaaaatatgtga

SEQ ID NO: 2669 - DNA, 723 bp, synthetic construct
  source 1..723: mol_type = other DNA
atggaatacggtgcgaccattacttctagcatcgaatatcctaagaagatgtcgttcgtcatcttcctcgcaaagtgtccgctgagctgtccttactgcagcaacagcgaactgctctacggcggcgaggaaattagcctggaagagatcattgaaaagatagacgattccgctttcctatccgatgcagtggttgtctccgggggagagccactggtgcagctcgaggatacgattgagatactgaagtacaccaggaaaatcgggctcaacaccaaactggacacgagtggcgtctatccaaaccggctgagaaaggtgctagaccttggattggtcgactacctggccatggacgtgaaggccccctttaacaagtataaagaggtgatccattcagacattggggacaaggtaaaggaatcactggatatcgccaatgaatacgatgatgttttcctggagtgcaggacaacctattgcccagccttacttgaggaggaggacctctttaagattgtggatgaagtggagtgtgacctgtacacaatccagcaattccgcaaccggtgcacattggatgagagtctcgacggagccgaggagcccaacccccacaatatgcgagaaatagctcaaaaaatcaaagaattgcaccccaatcaggacatcaacatcaaaactgcggagtttggccagcagaaaatcgagcttgagaattga

SEQ ID NO: 2670 - DNA, 1125 bp, synthetic construct
  source 1..1125: mol_type = other DNA
atgaaagcccgtaaagccgtggaggaaattgatccatatgtgcccggccgaagcaaggaggagatagcgcaggagtttggggttaagaaggaggatataatcaagctcgggagcaacgagaatccatgggggccctcccctaaagccctggaagcaatcaaggaggagctgaataacatcaaccggtaccccgaaagtgacgtggagctgctgaaaaaggagttcgccagatacagtaatgtcaagcctgaaaacattattatcggcggcgacggcgcggacgagatcctcgacaccctcgccaagaccttcattgaaaaaggcgacgaatttatcgtgcccctgccgtcgtatatgtactatgagtttctattcaagccgtacggcgctatccctaactatgcgaagtggaatcttgaaactaacacactggatttagacagcgtgctggatgccatcaatgaaaaaacgaagatgctgttcctttgcagtccaaacaatcctactggcgccttgattacacaggacgagtttcgcccaatcctcgagaaaaccaacaagtcccgcggtggtgtctgtgatgcaatagtggtaatcgatgaggcatatgtggaatacgcagagggaaccaacgttaatctccttgaggagtatgacaacattttcatcatacggacaatgtctaaagtcatgggactggctggaatgaggattggctatggaatatcaagccccgaaatcattgaatacatgcataggataaagcccgtattcagcctgaccaagctctcctatgtggctgccttagctaccatccgggacacggagtacatcgaagagtcaatcaaaaagggtattgaaagcagagagtacctgtacaatgagattaacaagatgaagagcgtcaaagtcttcaagtcctactcaaacttcatgctaatcgacatccacaacacagggtacacggctgccgagctgacacgagagtttatgaaaagagggatgattgtgagggactgcacttcctttaagggaatcgatgaatactacttccgcattagcatctgcaccttggaggaagataaaaagttcattgaggccatgaaagacatcttgaatgaatga

SEQ ID NO: 2671 - DNA, 477 bp, synthetic construct
  source 1..477: mol_type = other DNA
atgaaactcaaggaacccgtgaaaatattcccgggtgcgcaggtaatcggcgacgtggagatcgatgaaaactgttccatttggcatggggccatcataaggggagacgtcgggcccatccggatcgggaagaactcaaatgtccaggacaactgcgtcctgcacactagtgccaatttgacccttaagattggggataacgtgacggtgggacacggagccgttgtgcatggctgcgaaatcggcgacaatgttctgataggcatgaatgcaacaattctgaacggtgccaagattggcaaaaactctatcgtgggggctggagcagtagtcagcgagaataaggagtttccagagaacagcctgattctaggcgtgcctggcaaactcatcaaggaaaccacacaagagcagcgcgacaacatcgcttggaatgccaagcactacgtggagctggcgaacgaatatgatgagtga

SEQ ID NO: 2672 - DNA, 1320 bp, synthetic construct
  source 1..1320: mol_type = other DNA
gtgaaagccctgatcctgtccgccggggaaggtactaggatgagacccctgaccctgacaaaacccaagacaatgctccctgtcgcgggcaagccgatcatccagtataacatcgaggccctgcgggagtgtggcgtgaaagacattcttctgatagtgggctacaaggaggaaatggtgaaaaattactttgatgacgggagcaaattcggcgtgaacatatcgtatgccacccagaccaagctggaaggcactgcaaatgcaattagctacgggaaagacttcatcgaagacagcctgatcacgcttaacggggacatcatcctcgatgaggagattctcagggaaatcatcgaggactacgaggagtctggcgccgatacattaatggtcctgaccgaggtggaagatccaagcgctttcggtgtggtggaattggatggcgagaaaatcacaaacattgtggagaagccgaagaaggaagaggctccaagtaatttggtcaacactgggatatatatctttaacaaggacatcttcgacaagatagacaagactaaagtctcccccaggggagaatatgagatcacggactccctatccctccagattgaagatggcaagtttgtaaaaggccacaagaccgagaaggaatggatggatattggaaagccctgggagctcattgagatcaacgagtccctcctcaacaatatcaaaggggaaatcaaagggaccgtcgaggaaggagccaccttgcatggcgaggtattccttgatgagggaagcctgatccgttctggagtgtacattaagggtcctgtgtacataggaaaggactgcgacataggccctaactcatatatccgcggaaactcatacttcggcgacgatgtccacattggaaacgcggtggagatcaaaaactcaattattatggaaaacaccaatgtaagccacctaagctacgttggggactctatcctgggcagtaactgcaatattgcagctggaaccaacattgcaaacttgcggtttgacaataagaccgtgaagttcaatatcaaaaataaaaaggtcgacacgggcagacgcaagctgggggccattgttggggatggtgtgaagactgggatcaatagtagtctttcccccggagtgacgattggtacacgagctacaatcggttctggcgtcctgttatacgacgatctgccatcggacatgcgggttctcctgaagcaggagcatataattcagaacaagaaggaaaatggccaaatccgcctggaggaagttgaggaggatatgaataaatga

SEQ ID NO: 2673 - DNA, 162 bp, synthetic construct
  source 1..162: mol_type = other DNA
atggtcaaatacgtatgcatgcactgcgagtatacgtgggacagcgagaccggcgatgaaacatacaaggtgccagcaggcccgatcgaagacttccctgatgactgggtgtgcccccagtgtgcggccgggatagaaggaattatcaccgaggaggactga

SEQ ID NO: 2674 - DNA, 1347 bp, synthetic construct
  source 1..1347: mol_type = other DNA
atggccaataaaaaattattcgggacttccggcatccgggggaagatcggaagcgaagtcaccagcgagttggcactgaagataggaaagtcattagccaagtacttgaacaacacggggaaggtcgttatcggctatgacacccgtacgaccaaccgcatgctggagcaggccatcactgcaggactcatcgagcacggcgtcgatgtaatcaagatcgctatggttcccacaccgctggtgggctacgccaccattaagctaggtgccgatgctggaatcatgcttaccgcctcccacaaccctagcgagtacaatggaatcaagctctggaatgcgaacgggatggcttatacacctgagcaggaggaaaagattgaggagatctactacaacgaggacttcggcaaggtggaatgggacaaaattggaataatcagccataatgatgagattaaaaagcaatatatagatgatcttctggacattgtagacatcaagccgggtctcaaagtggtcatcgactgtgcctgcggggcgggcagcgagctttccccagtgttgtttagaaaagcagggtgtgaggtgatcaccctgaactcccaggttgacggcttcttccccgggaggaacccagagccaaatatagcgaacctgtccagcctgatgaaagcggtggtggcaaccgaaagtgacctgggcattgctcacgacggtgatgcagatcggatgattaccgtcgatgagaacggtaaggtgtcagactttgacaagcttctcgctctggtgtccaagaaattcgggggaacagtggtgacaactgtagatgccggactgtgcatggatgaggctatggaagaagtaggcggcaaggtcctccgaacaaaggttggcgacgtgaacgtggctgaagtgatgatagaagaaaatgcaagcttcggcggagagccctcggggacgtggctgcaccaggacttctgcatgtgccccgacggcatcctcagtgggctgagaatggccgagatcgtgtcgaaggagggaaagctaagtgagctgctcgcccagttcacggactatcctcatatgagggaaaaggtcatatgcagcaaagagcagaagattgccgtgatggagaacatggaagagctcctgaaaaacgcctttgatgatattaaggaaatcaatacaatcgatggcatccgcctgagctttgaagacggcagttgggtgttggttaggccctcaggtaccgaagactacgtccgcgtgactctggaagccaaaacccaagagaaagccgaatttattcgggacacttgtgtcaaaatcattaaagagaatatttga

SEQ ID NO: 2675 - DNA, 1239 bp, synthetic construct
  source 1..1239: mol_type = other DNA
atgaagggcatgattttggttatggacgggttgggtggccggcccctgaaggagctgaacaatcaaactacactccaggctgccaagacccccaatatggataaaatggctgaaagggggataaccggaataatggacagcatcgctccggggatcataccaggcagtgacacagcccacctgtccctgttggggtatgacccctacgaggtctacactgggcgcggcccttttgaagccagtggagtcggagtggatgtgatacccggtgacattgccttcagatgtaatttctccacttcagatgaggatggaataatcaccgacaggcgcgcaggccggatcagagaaggcaccaaggacattgttgacgtcctcaacacaatggtcattgagggctacgaagacattgagatcattttcaaggaatccacggggcacagggcggtgctagtcctgcgcggggagggactgagcggtgaggtgagcgatgcagaccccaaggtggaaggaaacaagcccaaagaggtaaagggcctggacggaagcccagaggccgataagactgcagacatcctgaacaaattagtggtcaaatcgtacgaaatggttaaagatcatcccgtaaacctgaaacggatcgaagagggcctgccacctgccaatatcatcatcccgcgtggtgcaggagaagtgcctgaggtggagccaatcaacgagaagtacgaggtcaatagcgcatgcattgccgagacagggcttatcatgggcatcggccgctttgctgggatggacatcattgaaatggaagatgttaccggcggggtggacaccaacctctacaatatccgggatacgatcgtggatcaggtgaacaacagtgagcatgacttcttcctggtcaacattgacggcgcggacgaggccggtcacgatggaaatgctaaagacaagcttgagtttatcgaaaaggtggatgagattgtaatgagcgagcttctgaagctcgaggacatttatatcttcctcaccgcggatcattccacaccgattagcgttaaaaaccactcaggagacccagtgcctataatcatcaacggccctgaggtgcgagtggacgatgtcaaggaatacaatgaatatgccgtggctaaaggcggaatgtgcagaatccgaggtgcagatgtgatgaacattctaacggacctcatgggctatgcccacaagtttggggcctga

SEQ ID NO: 2676 - DNA, 699 bp, synthetic construct
  source 1..699: mol_type = other DNA
atgaaggaagccctcatgataaattggggctacgtggtgctgctgtttattctaggggccattagctataaacgaaaaagcctcgacatgctaggtgccctcattatgattttcatggggataaccatcatcttctccgcaggagtgtcatggttcatcctgatcgtgctgttcttcattttaagcatcatggccacgcgcttctccaagccatacaaaaaggaaataggccagtacgaaaagacccggactgcaaagaatgttatctctaacgggttggtggccttcctgatggctgccttcggcagctactatctgccgttggctggcggctttatcggagccgtagctacggctacagccgacactctcgccagtgagatcggtgtccttcaggagcctcggctgattaccagctttaagaaagtgcccgcgggcacagatggggccataagcattctgggcacatccgcagcgattgtgggggcaggaatcatcggaatcgcttcatttctgcttggcatcatgcccgatccactgatagccatcaagatcagtgtcatctcggggaccgtcggctgctttattgacagtatcctgggagcagtcctcgagagaaggaactttattaacaatgagcacgttaacttgcttgctaccatctccggagcgataatcggtatcatttctgtaatgtga

SEQ ID NO: 2677 - DNA, 579 bp, synthetic construct
  source 1..579: mol_type = other DNA
atggccaagaaacagaggcggcgcgtgcgggacacttggaaagagaagagctggtacacaatcaaaactcccatagcattcggggaaaaggaaatcggtacaacccctgccagggacccagagcttgtgtacggcaggactgtagaggtaacaatgcgagaactgacaggagacttctccaagcaatacatcaaactgcagttcgaagtcgacaacgtcgccggagacattgcaagtacgaaatttaccggccacaagaccactacggattatgtgcgtagcatgatccgcagggggaccagtagaatcgacgcccccgttattgtgaccacccaggatgaacggaagctcaaactccatgtcctagcggtcaccacgcgccgggcgaagtcatcccagcagaagtacatgcgagagaccattacagaactggtgagcaatgtcgctagcgagaagacatttgatgagctggtggagatatcagtgaacggcagactcgcctccgaggtttatcacaaggctaaaaaaatctatccgttgaagagagtggagatcattaagtcgaaggtgctggattga

SEQ ID NO: 2678 - DNA, 804 bp, synthetic construct
  source 1..804: mol_type = other DNA
atgtgcgagatatttggattcagctcctctagggaagaggaactgaacgattacttaaagacctttttcagtcactgtgaggagcacccccacggctggggactcgctattcttgactcggacaaataccaaatacggaaagaaccggtcaaggcccgaagtagcgtcatgcttggaaacatcctgttaaacccaatcgtctgtaaaaacatgctggcacatatccgcttggcgacgatcggcaacctggatttctataactgccatccttttgtgaagaaagacaatagcgacaggagatggactctcatccacaatgggaccatcttcgactgccaggatctgtgtcggtacagtacagaagaggagggggagaccgacagcgaacgcatattgctttacatcgttgatactatcaataactatgagtctgtaaagggcgagcccctcagcctgaaggaacgttttgatattgtgtccagcctgattaaaggcatgtcctgcaccaacaagctgaacctcatggtgtcagatggtgagcagatctacgtgcacaccaatctaaaggattccctgcactatctaaaaaaggaccattccattttcgtgtcaacacagcccctcgacgacgacgactggaaggaggttccactgaataagactttttcaatcattaacggggacgtgctgtttgaaagcgattcccatagtaatgaatatttcgaaacagaggaacagctcagattcattgagaaattcctggagagcttgaagacggactcggatgaggagtacgcctggtga

SEQ ID NO: 2679 - DNA, 726 bp, synthetic construct
  source 1..726: mol_type = other DNA
atgtgtaaagatggtatcagcgatgaggcactccgcgaaaaactgtaccaggccttcctggagcctaccaaaaaggacaaaaaggaatacattggcatcgaaatcgagatgccaattatcaatctcaacaaggaagcggtggacttcaaagtggttcacaaggtcaccagggatttctcggaggagtttgacaactttgagcttgaaggaatagattacgacgggaacatctatgccctccgggacaaggccagtgatgacattatttgctatggctgctcctataacaatatagaatttgccatgggcaaggaggagaatctgttttctgtgaacgagcggttccttaaatattactcctacttcaaagataagtttgaagagcacggtcatacattgactggaatgggaatcaacccatacagaaagtacaataatgaggtgccgattcccaatgaacgatatctgatgctgttccatcacctaaagagctccagcgactatgtcgggatggagtttcaccagtaccctgcttacggcatgttctcaagcgcgtctcaggtgcaactcgacgttccctatgacgaattggtggacaacatcaacgtcttctcaaaattagagccaatcaaggcactgctgttcagtaactccgtgttttggaagaggatgaagacgatcttcgctctggagataagctacgggaacagtgtacccatggcctga

SEQ ID NO: 2680 - DNA, 654 bp, synthetic construct
  source 1..654: mol_type = other DNA
atgtacaaccaggagtttgaggacatagacgagctgcttagttatttggagtccctgaatatctactgcgtaatgagagacgggttatacatcaactttccttcaatggggctgaaggagttcttcagcaaggacaagataacaggagaatactattgcaagggagaatacaagaaacgggaatttgaaccctcgctcgatgatatccaatacctgcgagcttttaagttcatcaatctcacgtttcgcggcacaattgaatacaggagcgtgtgtactcagccgatcaaggattccatgtcagtggcggccttccatgtcggtttaaagcacaaaaccgatgagctgaacgagctattcctgaaatccggcatttataagaacgactgcgacgccaacgagctgcggaaactattgatcagacgtgaaatcccagatttcgttgatatggagaagatttatggcctggccctcaaggtgctcgacctggcaaaagagggattgcttgaacgggacctcggcgaggaagtgttcctggacagcctttacgacaacctgaacaataggaccaatcccgggaaacgcctcctggacagtctcgatggtggcaaaagcctggaggagatcattaaggagtatggggaagtcgagtga

SEQ ID NO: 2681 - DNA, 1425 bp, synthetic construct
  source 1..1425: mol_type = other DNA
atggacaaaattttcaacctgtcgcagatcaaaaacaatttgagctccgagcagctaaaagaaggaagctttgggattgaatgggaatgcctgagggtcaaggaaaatggagagctctcactgagtccgcaccccgagatcttcggagataagctgacaaacccttatattacaactgacttttccgagtcccaaatagagataatcacgccagccttcgataccattgatgaggctttctccttcttctccttcatgtctgacctggtgaacagttccctatccgacgatgagtacctgtggttccagtcattgccctgcatacttcctgagtctgataaaatcccgatagccaaatataaaggcagaggcctcggggaagaaagcatggagtaccgaaagggtctggctaaaaagtatggccttaaaaaacagctcatcagcgggattcactttaactttagctttaaggaggagctcatcgaaagcttctacgacggtgtcatcggagacaaggagaagatctcatataaggaatttaaggacagtctgtacctgaagattagtcggaattacattcgttatgtatggctcatcatctatctcactggctgttcggtggccgtgcataatagctttactctggattgccagaaattgatgaatcataaggacaaccaggggagcgtctacagtgaccgcgggcctagctttagaaattcctcctgcggctacaagaatttagagcacctgtatccaagttacgccagcgtggaagagttcaccagggacattcagtcatttattgataacggacacttatcggaggcaaaggagctgtacacgcagatccggctgaagccccgcaacccctcagaccttctcggttccctgaacaacaacggcatacagtacctggagatcaggacactggacatcaacccattctacaaatgtggccttattaagaatgatatgaacttccttcacatgttcatgatctacctcctcattaaggaagagtctgactatgaaagctggcaggaggatgcgctttacaacgaggagaagaccgcagaatgtggatacgaagatggggtgaagctgatcaaggacggcaaagaggtcgtattaaaggattgggccctgtctatcttggacgagatggagatgatggtggagtccttgaacctcgaaaataagtctgttatagagctcatgaagctgaagattatcaactcagacctgacctacggtaggcggctggcgcggctggtggaaaaggatgggtatatcgaaagccaactgaagctcagcagaaataacaaactacgcagtaaatacctggttgaagagaccaatttgctaaatgacgagcgattcaaagaatatgtgcccatcgctcttcaaggcctgagcaaatga

SEQ ID NO: 2682 - DNA, 339 bp, synthetic construct
  source 1..339: mol_type = other DNA
atgcggatagcagtggccacatccaacggcgaggacgtaaatctacacttcggtaaagccagttcactgtatatctacgagtacgatgaagagaacgatgaaacgagcttcattgaacacaggactgtcgagatcgaaaaggacagcaaacaccagaaccccaagatcattaaggcactggcggactgcgaggtcgccatctgtgaggaatttgggttcaaggcctctatctttgctgaggatgctggcctgaaacttgtgaaggacgagggaaccgtggaagaggtgctcaagaaatacaccgaccatgtgaagttcctcaagaatgttaaaatttga

SEQ ID NO: 2683 - DNA, 1572 bp, synthetic construct
  source 1..1572: mol_type = other DNA
atgaaaatgatcaagcagacattaggcctgaatgtggaggataaaaaatactacctgaagctcattatagaggctgtgctgatcggtctgttcagcggattcattgtgtccctgtatcgacttggcttagaccactccgaaagcatcctgtcctacatcctgaagtatatccagggagacttgaccctaatagttctctggtttgtcatactcgcgatcatggggctgatcaccgcccttctgatgaagtgggaccccgactctctaggtagcggaatccctcaggtcatgggagaggtgaaaggttactttgatgtgacatggtggaaaacgctcatcgcaaagttcattggaggaacccttacagccctgggaggcctgtcccttggtcgggaggggccctctgtccaactgggcgccatggctgctaagggggtatcaaaatacctcccaaacagtaagactgacgaaaagcggctgctcgtttgcggcagcggggccgggctggctgccaccttcagcgccccgctggcaggattcatcttcacactggaggaaatcaacaaggggtttgaccgcagtatcgtccttgtgggtctggtgtcagcagttgtggcggtgcttgtctccaatgtctttttcgggcagagcccaatctttccctttacctccctgaatctgcccttggaatatttttggctattaatcgtcctcgggatagccattggcatcttagggtacatctacaacgtagggatgatcaaggccgctgaaatgtgggataaactaagtttcctccctctcgagataaaattcatcattgttttcctggtgacgggcattgtaggcctcttcttgcctgaagtgctgggcggcggatactctatgatgcatctgatcgagctcagcttgcctccactgtctgtcctcattgtcctgttgattggcaaatacctgctgctgatcttctgcttcggctcaagcgcccctgggggcatcttctacccggtgctggtaatcggagcgtatatcggtgccattttcagtgccatcgtgattccaatatttggtctgaaccccctgatcgcttacaagttcattatgattagtatggctgcaatgtttgcaagcagcgtgaggactcccataaccgcagttgtccttattgccgaaatgacaggcgttacaaattccattgtggccatgatagtggtggtcatcctggcgtatatcattccaaccattctagacaacgatccgatttatgagaccttgcttatgagactcctcaagaagaataagggcatcgactttgataagaccaaaagcgtgttggaagagtatgtggttcccatggactgtgcattgatcggcactaaaatctgggagctgcctattcccaagtcggctatggtggtgtcagtggtaaggtccggaaacactctcatccccgatgagaacctcgagctgaagtatgccgatgagctttttatcattatgaatcagaacacgtacccagaggacaataacaagatagagtcgttgatttacaacaactggaaagaagaatga

SEQ ID NO: 2684 - DNA, 1308 bp, synthetic construct
  source 1..1308: mol_type = other DNA
atgaaaataggcattatcggcggaactcggggtttagggagaaccttagcctggtacctgaaggattttgacttcgacgtgacagtgacaggccgggattccatagtgggagctcaagttagcgaagagattggggtgaaatactcaaacaacaacaagaagatagtgcaggacagcgacatagtaatcatctccgtccctatctccagcaccgaatcggtgattgaggaactggcaccattcatgaaagacgggagcgtgatgctagatgtcacctccgtgaaggaagggccaagcaaaaagatgaaagaatgcttgagcgaaggagtggagttcatcccaacccaccccgtcttcggtccccggacaaccgacctgaagggccagatcattgtcctcacgccgattaaaaagggcaaatggtatccccgcatctacaagttcctagaggataagggaatgaggatcatcgaaacgactgccgagcaccacgatgacatgatggggatcgtgcaggtcctgactcacttctcctacatcagcacagcctcagcaatcgaaaggctgcaggtagacctgaaggacacccaaaactatgagagtccgatctacaatctcatgatcgatacaattgcaaggatcgtttcccagaacccttaccttacctactcgatacagcatgagaacaaaaagggcgagaaaatccgccaggccctgtttgattcaatgagtgaactgaaggacgccctgagcaaagaggacgaagaggaatttgtggagattgctctgaaggccaccaagcatatgggagacattcagggagctttgggtcgaagtgacaaggcgatcaatgccctcactcaagaatacaacatcttgctccagtccattggtgaggaggtggggcttaagcacatctattctgatacaatccacgttggaaagatcaaaaaaatcgatttggatttcctgtatcttgaggatgagaacgggaaagtcaagaagctcaagatgtctaatgtagcgattctgagtgagaaggagctctttgagtggaaaataaacaatcagaagacctactcaagagacatcagcgccatgtttacgaaaaatagcaatccccatatcattaaagacacccttaagctgatggaagacattattgacgtggagattattgatatttatgatggcgagcctgtcaaggaggaccagatcagctatacttttaagatagaagctctcagtatggaggcaattaagaactgtcgcgacatcctgataggcttcggcggcatcagccgttga

SEQ ID NO: 2685 - DNA, 1062 bp, synthetic construct
  source 1..1062: mol_type = other DNA
atgaaagtgacttccgaagacgagagcaaaggcactgtggagctgtttcctgagacgctggacgacttatggcacttgtcccatattgtagctgaaggggacatagtctactccaagactacccggaggatacaggatacaagcggcgatctgatcaggggagaccgaggggtgaaaaagacattcaccctcggcattagtgtaaaaaacgtcagttttcaccttttcacgggcaaactgagaataatcggctcaattgtgagcggtccggaggagttcgttcccctgggatcacaccacaccatcgaggccaagctgcacacgcccatcacaatcaaaaaggaacgctggtccagctacgccttaaaacggattgagcgagctatcgaagcatcgaaaaaactatccgccatcattgtggttatcgaggatgatgtggccgattttggcctcatgagacagttcggaatcgaatattatgggccaatcatgggcaacgtcagcggaaagcgcataatcgacaagaataggaagaaaaacatcgaaaagttctacgaaaagatcgtggactacattaacaaatttgacaacattcaaaccattgtccttgcagggcccggattcttcaagaatgacttctttaagtacctcgagctgaagcacaaggatctggctaaaaacaccatcatagaatcgacagggtcaggtggccgtgtgggcatcaatgaggtcctgaagaagggcaccgtggaaaagctggctaccgagaatcgcgtcgcttatgaaatatccgccgtagatgccattctgaaggagatcgcgatgaatagtccactcgtggtgtatggcaagaagcaggtccatgaagccatcaatatgggagcaattgagaagctacttgttctggacaacctcgtgagaagtgaaaacatggaggactctatggatatggtggagaacatgtctggggaggttctggtgatcagcagccagcatgaggggggtaaacagctcgaggccttgggtggaatggcagcgaacttgcggtacgccatttcttga

SEQ ID NO: 2686 - DNA, 957 bp, synthetic construct
  source 1..957: mol_type = other DNA
atgtttttcgaactgttaatcgtgttcctgctgtgcttctttggcaccgggatcgtatcaatcgtgttccgtttcttgggaaaacgaggatacatgggtaacctatatgaaacagtcaggggcgggacgccccgcgcggtagggatcgttccttttattcttatctccctcttcatgcccagcggatttaacaacctggtgttggtgatgggtctctgtgccctgatagatgacatcatcggccgcaagacaatcgctaacctccccattgagatcggtcagctagcaagaggaataggcatgctgtgcgtaataggccttggatatcccatcatgggggtcagctccattttggttgtcctgctgatccagcccatgaatatcgccgatatgcagccgggcactgctgcagctacaaccattataatgagtttcttcactctgctggcggttgtgatcatgcaagtcgggcctgtccttgagattcatccatactactacccattgctcgtgctggtgacatgcctagcctattgcccgctcgacttcgccggaaagatcatgatgggggaggtggggaaccacacctttgcaatctctctgggcatctgtttctacgctctcggcggcttcattggtacgctgattctcttcattgtgaccaccggcctgattgcctacctgcggcggtataatctctcgaggttccttattaataaactgcacattccaaaccctactttcggagacttatttatggatgtcctgacgggcggcggtctcggggacttatttagaaagatcctcctgaagagcaaccagtatgacgtggataatgagatattgatcgcccttggatttcgccggctgctgtacaatccatactcccctaacctggaaaaagtggtgcagaaggacagtagaaccaaacgggccgaccttcgaaggttttactga

SEQ ID NO: 2687 - DNA, 546 bp, synthetic construct
  source 1..546: mol_type = other DNA
atggcggatgtttttgacgtcattaagaacagacggggcgtccgagcttacaaagacgagcaaattgacgacgaggatatcgagaagatcttgcaggccgcaatcatggccccgacggcaaggggagaggctccatggcattttaccgtagttcagaacaaggagctactggatgagatcaatgactctgtccacagcatactcacaaattcgggtgatgagcttctcgaagcaatcgctgcctccggccggaatgtaatgcacaacgcccccacagtggtgttcgtgagtgccaaatcagatgctactaatatgcaggccgactgtagcgcagccatcgagaatatgctcctggccgcggaaggattagacattgggtcctgctggctggggcttgtcgcgctgttcttcagcgtggaggaaaacttgaaaaagctccacatacctgaagggtacacccccctgtacggcgtgtccctgggctataaggtggaggaaaacgaacccaacccacgcagtgacgtgctggtgaactggctgaaatga

SEQ ID NO: 2688 - DNA, 1374 bp, synthetic construct
  source 1..1374: mol_type = other DNA
atgaaggagactaaaaaaatcaagaacattgtcattggcgccggccctgcaggtagactagcttcatttgaactggggaaactgggtgaggaaaccctgctcattgagaagaaatacattgcggggacttgccttaacgaaggctgcatggttgtctgtgccttgactgacatcagccgcttctggaagaactgccagaggttttccgagatgggactggtcaatgggctgctggagttgaactacaattccatatgtgagaacattaagaagacccagaagttcctgcgtaaactgaaccaggaagagaatgaaagcgtgagcaacaaggtgctctatggggaagctagtgtggaagtggacgaagacgagaagatcatcgtgaccgtgaaattggacaacgacaacgagcttcagaaggaggagtacaaggggaaggagacactgtcctttgaggccgagaatctcctcattgccaccggcgccaggccattcatcccaaacatccctggagccgaatatgccctgacaagtagtgatgtaattaacctcgacgaagtcccgccgaaactgaacatagtgggtggaggaataatcgcaacggagctgtcgaacatcttttccagcttcggaagcgaggtaaaaatcatcgcccgcagcgagattctaaaagacctcgagcctgagatcaagagttatgtagtcaaaaagatcatcaatgatgttgagatccacgaaaacaccaatgtcctcaagattaacgaggactcaatcgaaacagataatggtgagtttgagggcaagacgctcatagccaccggacgggtgcccaactccgaaatactaaaaggccttgtggacctgaatgaagacggttcaatcaaggtgaacgaatttttccagacaagcaaaccccatatctacgcggccggggatgtcaccggcgggataacccttaccccctatgctcgaaaggagggcattagcgcagcgcggaatatggctggatacttgaataaatttgaagagatgattgttccccaatctctgacgctcgatctggacgtgagcttcactcaaaagacggacaaagaggcagacccagataagattgaggatgtgatcatccccggcctgggcgggcctcacgccttctggcggatcttaaggggagaaacaggccttacaaagatctcactgaataccgaaaccgatgagatcgttagagccagccagatatccccatccagcattgacgatacagcttacctggcattcctcatgaatttgggcattaaaaaggaagcattcgatgacttcttagaggtgcacccctcgactgatgcttactataagatcctgaagatcatgtga

SEQ ID NO: 2689 - DNA, 267 bp, synthetic construct
  source 1..267: mol_type = other DNA
atgtgtatcgcggccccagcgaaaatcgtggagatcgacaccgaaagcaacatctgcgccgctgacttcgggggtgtgaggcagaatgcaaaattggatctcctccccgatgccgaaattggcgattatgtcctgattcacgcaggatacgccatagaaaagctatccgaggaggccgctaaggagagcctggagagttggaacgaacttatggaaatgctggacgaggaggaccgggagcgcgagctgcagatgaacggcctgtga

SEQ ID NO: 2690 - DNA, 495 bp, synthetic construct
  source 1..495: mol_type = other DNA
atgtgtgaggaaatcaagctcctgaaggatctgggctgcccggaatgggtgattgaacactccaagggcgtttcacggaaagccgtgcaaatcgcgagcaacttcgacgacgtcgacatcgagttagtaagagttggtgggctgttgcacgacatcggtcgatccaaaaccaacagcattgagcacgcagtcattggagcaaaaatagtgtctgacctgggctatagccaggagatagtcaacatcgtggaaaggcatattggaacggggctaacagaagaggatgctaaggagttgggactccctatcaaggattacactccccagacacttgaagagaagatcgtgtcgcatgccgataatctgttcaatggggccgacgaggtggatgtggacttcaccatcaacaagtggaagcgcaagctgggcgaaaatcacccaagtatcgagaaaataaaagagattcacgaagagctcgtcggccggtttgagtga

SEQ ID NO: 2691 - DNA, 909 bp, synthetic construct
  source 1..909: mol_type = other DNA
atgaaagttatctgcacagtggacgagtccctctacaggcccgaagtcgttagatggcgcgaaagaatggccatgatggagcctttaggggaagtggtggtagcgctgccctgcagtatgaagaagccatattccaattcacagtcccatcagaaattcaaaagagcgaccaaaggctatcaagaagtgatagtgacctcgccattcgggatttgtccgcgtgaaatggaaaacacattccccatccagtcatacgatgtgacagtctctggcgattggagctttgacgaggtgagaatcagcggtgagctcctgcgggactacgtaggcgacaagcctgtcattgccaacgtgcatggcggctatgaagaggtgtgccgagaatacctggacaactgcgtgtatgtctgtcaggatggacggcccacctctcctgattcaatctaccacctgcgagaggagctaaaaaagtattctaaggtcaaacacagggataaggtgctaaacgagttgcggtccattgcaaaataccagtttgggccggaggcctataagataataagcgacgatgtggttgctaaggggcgataccaccggactatctacagcgagggcaagcaactggcccttctcaaccgcgacattgggctgtacactctcaatttggaaggtggccgccgcctggcagagcttgacatccacgtggttgagatcgattttgacctgaagaccaatagtgtcttcgcccccggaatttccaacgctgatctcagcatcgtgccaaaggacgaggttgtagtcgtgagggacggtgaagtggtcggggtgggaaaggctgtcctgacgggaaaagagatgattgagagcacgagtggaatcggcgtaaagatccggcacaggaagaaatga

SEQ ID NO: 2692 - DNA, 288 bp, synthetic construct
  source 1..288: mol_type = other DNA
atgtccgaggaactggcgctggctgtgaaagacgcagtgtctgtagttaacgacccgcacatgggcgtcagcattgtcgacatgggtattgtgcagtccatcgccatcgaaggatcaacagccgagctcgtgatcaagccaaccaaccccggctgcatgagtgtgacgcgcattgcagcgcaggccaaagccgaagctctaaaggttgaggggatcgataaggtgaagataataatcgaggggcatgtcatggccgacagcctgaatgagatgctcaaccgggattga

SEQ ID NO: 2693 - DNA, 504 bp, synthetic construct
  source 1..504: mol_type = other DNA
atgtgggaatcccttaattcgaagttcagcaaatatccggcacgaatgactgtggctcagaagatgttcgagctcgggctcaggatcggtgaggacaataagatctactgcggaaacctcaagatcagtgactctgctttggccgcagccgccaacgtggatcgcagagtgatcaaaagtaccgtgaatgtaatcgtgcaggacgaggatctttttgaggtcttctccaacatcgtccccgcaggcaccttgctgaaaaacattgccaagaacctgggactaggggtcgttgagatagaagcgggagaagaaagcgaaggtatcctggccgccgtcgctacaacaatgagcgagcacgatatagacattcggcaagcgtacgccggcgacactaaattcgagggcaaccccgtgctgacgattataaccgaaaaccctattccaggggagctgctgaatgagtttattaagatcaatggcgtactgaaggtgtcagttttatga

SEQ ID NO: 2694 - DNA, 1074 bp, synthetic construct
  source 1..1074: mol_type = other DNA
atgctctcagacccaataatccaaaagaacttcccgggaacatttgaatttgaggaggccatggtgatcatcgattgcctcaaggaatggcccaaaagccgcctgtgtgacgataaagcgattgcacggaaggccgctaagaccatcgacatcgacatcaagacagtgagggacgtgcttgctctgctagaggtcaacaactgcgcctacaatataaagatcaatgagctatgcattaaattgattaagcattaccgatccggaaaactgacgcacaagaagattgccaaaaagctgaagatagatgacaatattgttgaccagttcattgaagagaatgaatcactcctggaggaaactaaaaagacctattcccaggagactttaatggctctgaacgatagtttcaatgacttcatcaagggccgcaaaccccttaaaataaataaggatgaagaggaagacaacccagatgaggattccaaagacgaaaaggctaccgatgaagagttcaaatctggggaggtagagattaaagaggaagtggaagaaaccaaagaggaggaggaggtagaggaagagaaacctgctaaaaagagaacagtgaaccagaagttctggtatctcacctttgacgaggtcatcgattgcctgaagaacggctatgccacagacgaagaaataagcgagaaaatcggttgcaagctgaacatcgtccggaaaatcctgtacagcttatatgacatgcacctggcaagctacaagagggataaggataaggaaacccagtggtatacttacgattggaagttcaacgaaagcgagtacaagaaactggagttgaatatcgccagtgccgagcttaagaagctcaacgaggatctggaatacgaggcgaacaacatgttcttcatctgtcctgtgggccactacagactcgactttgaggacgcctccacggtcgagtttatctgtcccgaatgtggggcagagctggagtttgacgacaattcggaggttgtggaagccttgaaggaccagatcgcatacattgaggaaatgatttctgagtga

SEQ ID NO: 2695 - DNA, 903 bp, synthetic construct
  source 1..903: mol_type = other DNA
atgaccgacaaccccaactataaagaggccgaaactgagcaggggcaggtttacaagtacgtagagatcaggggatatcaggtgatccctatcgagacacattacatcaagcctaatgaaagcattgactttatgattgatgacatctccaaactgtgtaagtccggcgactacctagtaattgccgaaactcccatctcagtctcgcaaggcagattggtggatgaagcagactatacgccatccctgaaggccaagttcctagccacatattggagcaaatacttctggggatacgtcctgggccctattctcggcataaaggagagaaccattaaaaacctgcggaaactgcctgaggagagcaaacgacacaaggaggtggtcctccagctgtatggttggaagcacgccttaaagccagcttcggaggcgggaatcgacctgagcaacgctccggggacttgcgtgtccctccttcccgagaacccagaaaaggtggccaaggaaatcagcgaaagcctgatggagaagacaaaccaggatgtcaccacgctcatcatcgacacagatgccacctatcgccgcaagaacaaatacttcaccggtcttcccatcgcaatagatggcatcgaagcggataagggggtttttggctacgcgctggggcaattgagcgagaatatgggcagtaccccacttgggtgcagtagggaaatctctgtggaggagggaataaaaatagccaatattgctgaagactaccagaaaagtctgtctaccgcaatggagaccatctacagcgcaaaggacgtgctcaattcagacactcccgaggtgacggtcgagtccttggattcaattattcacacaccggctgtgctggttcggaaaattgaatga

SEQ ID NO: 2696 - DNA, 570 bp, synthetic construct
  source 1..570: mol_type = other DNA
atggagaaatcaattacctactttgaaaaccccggggctgagaatactgacgcagtgatcgaattggtgcgggagagactcgagggctcaaacatcaaatatgttgccgtggcaagctccacgggggccagtgccctcaagctgaacgaagctctgaaggacctcgatgtgacaatagtgaactgctcccaccacgttggattcagggaaccaaataaggcacagatcagtgctgaaacgaagactgaacttgaggagaagggcatagtcacattcatcgggagccacgccctaagcggtgtgggcaaaagcatttccaaaaagtttgggggagtcaccccagtggagatcatcgctgccgtctaccgcaccttcagccagggaatcaaggtgtgtgccgaaatttcgatcatgttagcagatgccggcctggtacctgtaggggaggagattatcgctattggtggaacaggctctggcctggacaccgcggcggtgctgaccccggccaacatgactaatgtcttcgacatgaaatttcatgagattatagccatgccccgaccctga

SEQ ID NO: 2697 - DNA, 1170 bp, synthetic construct
  source 1..1170: mol_type = other DNA
gtgaagtttatagacgatgcaatcaaggaaagcgaggagtccattgaaaagactgcctctcccaagaaatcagatgacgagctggataaggagctgctcgacatcatcagtcgcagtcgagccaagattatcgtggtcggtgcgggtggcgccggcaataacacaatttcaaggttgacagaaataggtattgagggcgccgagacaattactgtaaacaccgacgcacaagacttgttctactcccaggccgataaaaaactgcttcttgggagacagacctgtggcggtctcggcgccggcggagagcctgccatcggcgaggagtccgcggaagagagtgaggaagacattagggcagaattggaaggggctgacatggtcttcgtgacctgcgggctcggtggcggcaccgggacgggcagcgcgcctgtgattgctaaggtggctaagaaggccggggccctcacggttgctgtggccacaatgccattctctgcagaaggggttaaacggcgggagaacgcagaaatcgggttagagaaactccaagaaaatgcagatacggtaatcgtcatccctaatgataaactgctggaagtggctccaaacctgccgctaaacaaggcattcatggcttccgatgagatcttaggacgggctgtgaaaggaattaccgagctcataaccaagccaggcctcatctcgctggacttcgccgatatcagttccatcatgaagggctctgggatggctatgataggtatgggagagtcggagtccggggacagagcaatcgagtctgtccacgaagccctgagcagtcccctgctggacattgacatctccaacgccaagggagcccttataaacatttcaggaagctctgacttgaccctgcaggaggccgagaaaatcgtgcagatcgtggccgaccgtctggacccggaggcgaacattatttggggagcccagatcgatgaggaactgcagaacatgatacgcacaaccatcgtggttagcggagtcaaaagccagtataattccagctcaagcggcagcgatgatggcgaatttactgacatcgatgattttactgatgcggacattcttggggaggacacagctcccaatgaccccctggacgaatttctagacggaatcttctga

SEQ ID NO: 2698 - DNA, 180 bp, synthetic construct
  source 1..180: mol_type = other DNA
atgaactaccaggaggaactcagcgacttctggaaacaatgcaagcgggtcctaaaagtggccaagaagcccgaccgcgaggaattttttgatttcagcaaggtgaccgcgatcgggatagcaattatcggcgtcattggtttcgtaatcgtgctcttcggccagctgctgggactgtga

SEQ ID NO: 2699 - DNA, 492 bp, synthetic construct
  source 1..492: mol_type = other DNA
atggaagacgataagaatagcatctttgctcttaaaacgtccgcagggcaggaaaggactgtagccagactgctgggtatgaaagcggataagcctggcgtcgacattaaggccatcgtggtgcctgagagcctcaaggggtacatcattgtcgaaagcgccacaaacctagatatgaagaacccagatatgaaggtgcgccacctgcgcggcatcgtaggggcaaaacgagacggaaccatcgacccatccagtcagataaccctggaagaggtcaagaagttcttaaagccacagcccatcatcagctcaatacagaagggcagtattgtggagctggtgtccggccccttcaaaggagagaaatcaaaggtggtccggctcgacgaatcgcgggaggaggtggttctcgagttgattgaggccgcggtgccgatacccgtgacagttaaagctgaccaaatcaggatcattaaaaaggaggccgactga

SEQ ID NO: 2700 - DNA, 483 bp, synthetic construct
  source 1..483: mol_type = other DNA
atggccaaggataccgtggaagtgctgctcgagggcggaacagccacgcccggacccccactgggccctgccattggcccattcggggtcaacatgatgcaggtggtagaggaaattaatgaaaaatccgctgacttcgcaggtatgaaagtccccgtcataatcactatcgactcaaacacaaaggagtttgagatcgagattggaacgcctccaacaactgccctaattatggacgagctgggcatcgagaagggcgctcacgagcccggtgcggaagttgcggccgatctctctgtggaacaggccttgaaaatcgccaggatgaagttcgactccctgcttagcaacgattataagagcgcaaccaaggagatcatggggacctgcgtgagtatggggataaccgtggacgggaaggacccgcgggatgctcaaaaagcagtggacgctggagaatacgacgatatcctggttgagtga

SEQ ID NO: 2701 - DNA, 639 bp, synthetic construct
  source 1..639: mol_type = other DNA
atgacacaagagatcatagatgcggtgaaggaggcaaaagaacaagccaagcccagaaacttcacgcaatccatcgatgtgatcatcaacattaaggatctagacgtcagaaaaccagaaaaccgattcagcgaagaagtcgccctgccccacggccggggaaaaccggtcaagatcggtgtgatcgccgacggggagctcgccctgggagcaaagaatgctggcgtcgacgttgtgatttccaaagaggatctgcaggagtttgggaaggacatcaaggcagccaagaaagtggtaaactcggtggatagttttatagcccaggccgacatgatgccccttgtcgggcgcttcctgggccggatcttggggcctcgtaacaagatgcctaagcctgtgccagctagcgccaaaatcgagcccttactcgagcggcagcaggcgaccattaaagtcggcgtaaaacagcagccatctattcagatcctggtgggaactcaggacatggatgacgagaagttggctgaaaatattgaagctgttctggcagttctcgaccgcaatctggagaagggcaggaaccagataaagagcatgtacatcaaagcgaccatgggttcagtggtgagggtgatttga

SEQ ID NO: 2702 - DNA, 1008 bp, synthetic construct
  source 1..1008: mol_type = other DNA
atggcacacgtggctgaatggaaaaaagaggaagtgaacgaactgaagggcatcatcgatagcgctgaggtcgtgggtattgtgaacctactgaacatacccgctcgacagcttcaggagatgcggaaaaccctgtccgggaaggccaccatcagactctcaaagattaacctcatgaagctggctctggaagattgtgtaaatgagaaagccaacattactgagctaagcgattatatggaggggcaacccgcactcgtgtgcaccgacatgaatcccttccgcttgtacaaaatacttgaggactcaaagacaagcgcgcctgcaaaagccggcgctatcgctcctgaggatattgtggtacccgccggagatactggcttcccaccaggaccgtttctcggggacctgcagcagataggagtcccggcaaaaatcgacaagggaaagattgtggttcaaaaagacacgacagttgtcgaggcgggagagcccgtcccaaaggccgtcgccgctgcgctgaccaggatggacatcaagcccatggaggtaggcatggatctcaaggcggtgtacgaggacggttccatctttaaggcagacgtgttggccatcgacgaggaagaaacctttgccgatattcagaatgcatttacacgggccttcaaccttagcgtcttcagcgccttcccaaccagtgagacaatatccacaatcatcagtactgcccataccaaggcgtacaatgtggctattgaggcggctattcctacgggcaagacttctgatatgctgatcgcactggccaacgctaagatgctcgccttagctggcgaactggcctcggacgcaatcgacgatgaaatcgccaataagttagccaacgtggccgttgccgccgcccctgtcgtggaggaggccgaggaagaagtggaggaagaagaggaggaagaggaggacaaaagcgaagaaacggcagcactggggctgggcgctttgttcgggtga

SEQ ID NO: 2703 - DNA, 312 bp, synthetic construct
  source 1..312: mol_type = other DNA
atggagtatatatacgcggccatgattctgcacaccacagagcaggatattaatgaagaaaacgtgacgaaaatcctcgaggcagctggcgccaacgtggacgatagccgggtcaaggccctaatcgccgcactggaggacgtggacatcgaagaagccatggagacaactgccatggccgccgctcccgctgcagcagcgccagtcgccgaggcagccgtagaagaagaggaggaagaagaggaggaggaggaggacgaggaacaggccgccgcagctgctaccgcggggctgggcgctctcttcggatga

SEQ ID NO: 2704 - DNA, 726 bp, synthetic construct
  source 1..726: mol_type = other DNA
atgatttgcccggagtgtggggcggaaaatcaggacagcgcaaagttctgcaagcagtgcggcacttcgttaaaccctgtggccacaatgaagaaaaccaacagcgatgaatcaaggcccatcaagtcaggtatttttaacgaaaacaactcgtccccctcctccttcgaggccaaaggatcgggtggggacaacaaaaacctcatcataatttgcctgacggtaattatttgtgctgtgttgatcgccggcggcctgatcttcctctcaaacgggtcaaacaatggcaacgactccagtgatgttggcaattccataagtcttccagacaattctgtgaatcagaccgatgacagtcagaatcaaactgacaccgaacccgctcctaaaaagagcagcgtgtcagacatgaagatactgagcggaagcttcacaaccggaagctctctaagcgataagacttggtgttccgtctacgtgggagagaagtatgccggcgaggatgtgaaaatcagcgtcctctacagccgggatggctctgacctgaatcaaggaaagatcgtgcccaaaaacgttgggtccgacggcacagtcagcgtgccaagtgcagatgcgtttaagtactacccagaccacgccctggtaaccatctatgatagcaacggtaatgtcctggacacccaggaggtgatcatgagtgctaaatccgggacgcagacattttga

SEQ ID NO: 2705 - DNA, 606 bp, synthetic construct
  source 1..606: mol_type = other DNA
atggagacgaagaaccttatcatcatttgtgccacagtgatactcgcggttgtgatcgtgctgtccgctttcatttacgtcaacatgggcaatgagactcacataagtagcaacatcgccgatactctgcagaatggcgacgagatcgtggtcaagctcgtggacaaggataataagcccttggtaaacaagaccattagcctgaactttaaagacgagaatgggaagggcaatgccgttagctacgacctgctgaccaacgacaaaggtgaagtctattataatgtcaacctaacagagggaaagtatgtgttctccgcagattacgctggagaaacattcattggctcatcaagtttaaacaagagcgtagaggtgaaaaaagatgtgaaaacggcaaacctcagtagcacagatacgactaaaaccgccaagaccaagacctacacagattggcaggaagactacgagaccggacgctatgacgaggacggaaatcctatctataggagcataatgagcacctccgggggccaatacgagccggggatctacgaatgctactggtcggccaacggtccaatctccgaacggagaattgggtga

SEQ ID NO: 2706 - DNA, 348 bp, synthetic construct
  source 1..348: mol_type = other DNA
atgaaatgcccggtgtgcggctgcgagaacccagatggctacaaattctgtcatgattgtgggaaccctttgatcatgcccgattatgacgaaatgaataacgactacccctctttcgacagcaagaagctgatcattattggctacataatcgctatcctattcggttggggaacatttatactgagtgccatttttggctcatatggatttatcggtttcatcgggctcttcttcccaggattcatgctgaacagcaaggactccaatatcaggaagcacgcctacatccagcttgcaattatgattgtggggatactcgcgacctttctggtcctgtttcggtga

SEQ ID NO: 2707 - DNA, 726 bp, synthetic construct
  source 1..726: mol_type = other DNA
atgaacaagaagctgaaaataatcctctatattttgctagcgctcatcatcattatcgcaggaatcagcctttggtatctgatggattacagtccggcaagtgccgacgctaattccctgattaacggtacatcagaggtttcagtcagtaaaatcaacaacggattgttcctagatgggcccggcaatgacagcgctgtcatattctatcccggggcaaagatcgagtacaccgcctatctgcctttgctgatcaatctgtcggctgacggtgtggattgctttctggtggaaatgccattcaatcttgccttctttggcacaaacagtgccgacgagatcattaataacgcttcctataactattctaattggtacattggcggccattccctcggcggtgtcatggcgagccggtacgcccacaaccactttgacaaaatcaaaggcgtgatactcctggcagcgtaccccgccgattccctcgagaacgggtcggtgcttagcatttacggatcaaacgacaagtccttaaataaggaaagctacgatgacgccaagaagtacatgccaagcaacttcactgaatatgtgataaaagggggaaaccacgcccagtttgctagctacggcaatcaaacgggagacggggtagccaccatctccgcctaccagcaggaaaatgagaccattaaggatatcctgctgtacatcaacggcagctga

SEQ ID NO: 2708 - DNA, 2733 bp, synthetic construct
  source 1..2733: mol_type = other DNA
atgcttaaaatatttgaggatctcggctataagaaacagatatgcaagacttgtgggcaagagttctattcacaagtggacagagacacatgcggcgacgctccatgtgacgaatacggattcatcggcaatcccgctactgacaagccttatgatctgtacggaatccaagagacgtttcgcacgttcctagaaaaagagggccacgaaccgattagtcggtaccccattctcgctaaacgctggcgggacgacgtgttcttagtgggagcttcaatattttgcttccagccctgggtgaccagcggtctggtggaacctccagccaaccccctggaagtggaacagccctccatccgcctgaacgatgtggacaatgtcggccgtaccggcaggcacatgacctgctttacaatggggtcacatactgtcatcaacaagcctgataactttatctattgggaggatgagacaatacgcctctgccatgagttcttcaagtcaatcggaatcaatacagaagagctgacctttatcaagagctggtggaaaggtggaggaaacgaaggcccatgttatgaggtatgctgccggggggtcgagcttgccaccctcgtcttcatgcaatacaagaccctggaaaacggagacaaggaggagattcccatcaaggttgtggacaccggctacggcctggagaggatcgcctggattagccagggaaccccaacggcatacgacgcctgttttgcgccggtggtggataagctgaaggaaatcaccaatgtctccgtcaacgaggagattttagcgcggaacgccgagatcgcaggaatgatggatattgaggatattggtgacatccgggaccttcgccaacaggtggccgacagcttaaacatcagtctggaagagtacttggaaaatgcagagcctatggaagccatctacatcatcgccgatcacacaagatgcctggcatttatgctggccgacggcatcattccctccaacgttaaggaaggatacctggcaagactcgtactgagaagaactatccgattcatgaaggagctggagatggaagagtctctatctgacatcatggccattcagctcgacttcttgagggaattttatcctgaaatcgccgagtcccaggagcacatcatgaacatcatcaaccttgaagaggagagatacgccaaaaccatagaaaaggggaaaaagactgttaagcgcacaatcaaacgtcttaaaaaagagggaaaaactagcatgcctctggagacactgattgatctgtacgacgcgcagggcatgcctccagaaacggtagaagagctcgcatcgggagataaggactttgaggtctttgtgccagataacttctttacaatcgtcgcggatatgcacgaagaggataaggtggctaaaaaagagaccttcgagctcgatgttccagagactgagcttgacttctacaaggacatctatcagaaggaatctgatggaacaatcattgaagtcgtggagaaagatggcaacctcaacattattctcgaccgaaccatattctacccggaagggggagggcagccgtcagacatcggtataatctctatagaaggcaccatctatgaggtggtctatgcggagaagttagatggtgttgtgctgcatcgaatagccacaaaagaggatgaggacgtggcttccctggtggaggacctgcggaaatacatcggaacggaagtccatatggccatcaattggaataggagaataacccttgcaaggcaccacaccgggactcacctcgttattgccgcggctcgcaagattctaggccagcacatctggcaggcaggtgcccagaaggggctggcccggagccggatcgacctggctcattacaaacgaatcaccatcggggaactcgacgagattgagaaactggctaatgagtatgtgatgatgaacattgacctcgacatcaactggctaagccgtgacgacgccgagaagaaatatggcttgatattgtaccaggggggggtcgtgcccggctctcaaatccgcgtcgtgaagattcccggcatagacgtgcaggcatgtgccggcactcacctgtccagaaccggcgaggtagggcccattaaaatcaataagactgaaagggttcaggatggtgtggaaaggattgacttctcggcaggtctcgccgcgattgattccattcagaacgacaaggcaatcatcaaggagagcagtgatgtatttagtgtaaccaatgaccagctgcctaaaacctgtgaaaggttcttcaatgagtggaaagcgcaaaagaatgagatcgcccgactccagaaggaaattgccaacctgaaggtcagcacactggccgagaatgccttcgaagttaacggcttgaaagtgttgaaggaaatcctggatgccaacattaaagagcttcagaagatagccacggactttacagacaatgacaaggttgacctggtcttcatcggtaacaacgaggggaagattgtggggagcgcatcgaagaatgctattgatagtggagtgcaggtgaacaatattattaaggaggctgcttccctattgggggggggcggcggcggccggcccacgctggctcagggggccggtccaaacgcagataagatggctgatgctttggatctggccgtggagctcctgaataaatga

SEQ ID NO: 2709 - DNA, 2448 bp, synthetic construct
  source 1..2448: mol_type = other DNA
atgatcaaaaagataacgattctgtcagtgattctgatcctgtttctggcagtttcaacggtggccgccatcgatgtggatacgaacgataacttggacgatgggagttcctcgaacagcgacttaatcagttctagttcactggactcgtccagttctgacgatgtgtcctccggttcgagtgaggtgtctagttccgacgaatcacttgatggcaacaatttgtccgatgggaatgtgtcctcctctgacgagtcggtgggggctgacaatttgtcggacgggaacgtttcttcttccgacgagtccgtgggggccgataatctctccgacgatgagtcatctagcgacgccctctctgaagaactgcccaaaacggaaacagtcattaaagcagacccaatcaattataactacgcttcagtgaaaggactgaccatcaacctcacagattcggcgggtcttgcgttatccaacaagacccttactgtcaaggtcagtgctctcaacaagacgtccaacctgactaccaattctaaaggccaggccatctttaagctcagcgcgtctgtgggatcatatgatgtgtttattagtttcactggggatgagagctatgccccctccaacgccagttctaaaatcactatcaaaaagtcctcaaccaagatcaaattgagcaacattcacggctatctgacgatttcaaattacgtgagtgtcacactcctggattctgccggaaagcccataaaaagcaaatcagtgacaatccaggttaacaaggcaaaatataacgtcaaaacagacagcaaaggcatagcgaaagtcaaggtggccaataagattggcacgtactccgtgaacgctaaattcagtggagacaagaattactacgccagcagtaatagctccaaactgaccataacaaaaatgaaggtgtacatcaaggctccctctgtgaagtactacatgacaaacagctctgctccttacctcacaattaacctgacgaacgtgaaaggcagtccacttgcaaaaaagaaagtctctgttaagataggcaaaaagacttatacactgaagaccaacagtcagggcatcgcgaaattcaagttcaccaagaaagtgtcaagctataattgcaagattaattttaaggccacctccaatttctatggtgcctccgtaaatagcaagatgactatccaaaagatgccaacctccctgaaggcccctagcgttagcattaactcaactaactatggaaaagtgctaataagcctgaaggacggcaagggaaaagccttgaaaaataccaccgtcaccgtaaatgtcactgaactcaagaaggtgttcaccctaaagacaaacgccagcggagtggccacatttagcttcaacggggagaagacattcaatctgaaaataaagtatgcaggaaacaagaattacgccgccagctctgtgagttctaaaatcaacgtgaaacagattaaggtaaagctcagcgacgtcattggggcctcacgggtgctgattgactacgtaaaccgcaccaaggacttgccttcaaatgtccagtacaataactataacttcaccgtcactcagcttacctatctcgcttcgaaggcagttaagaatatcaacaataagaactacggcgacatcgtgctgatttccgtgccaaaaagctacaagtcctcgggtgagatctacgacacagtgtataagaaggactttgtgaagatagcaaatagcgttgtcggtagttcctacaattataagaataaggagtacgtaagctattccatctacaaggttccctttaaggtatactccatcagctttgcgaaggtgctaaacttctacggcaacaacaagaaattgcctaattattcactctttacccttgcagactttgctaaggttaaagacaacggaggctataacttctacctgacaactgataatattgccggtaagaaatctgatctgaacatgcttaagagcctcgccaagaccctgaaatccatgggatacaacgccgtcatcgtcgggatcgggccggatatccataatgtggcttataggtacggatgtaccggaaacaatagcgtgctgctggcttgcttcggcggcgtggatgtgggatgcatcgaagaatgggctggcgatctaggggacctgaacggccatagcttcgtcaacagctaccagggcgctcacgttctcggcctgtggttcaccaagccttacggggcatccgtaagcctcaataagaaggtcggcattgcgtgggacgcagactacggtttcccattaaacactccggctaaatacatgaagagtcacaacatcagctacatcgagactggcaccgttgcaaacgcctgtaaactgttaagcgaggggaaaatgggtgggccccaactgatcagctga

SEQ ID NO: 2710 - DNA, 1161 bp, synthetic construct
  source 1..1161: mol_type = other DNA
atgaggtacttcatgaattacgatctgatcatcgcccgatacggcgaagtcgccctgaaaagtaaccgagtaaggcgcagattcgaaagtcggttagtaaacaacattaaagcgtcaatagatgcggaagtgaaggtgaaccaggcacgcatctacatcttccccaaagagttcgatgacgcaattgagaagctggagaggatatttgggatcgtgtcatacagccccgctatctccaccaagtccacttttgaggatattgaaaaaaccgttggggaatacgcagagcatttgtacgaagaagggttgctcgacgagaacacgaaatttgcgattagctgccgccgggtcgggcaacacgagttttcgtcacaggaaatggctgccttcgcaggggccgtggtggtgcgcaaatactcttgccccgttgacttgagcaacccagagctaactatctacctcgaagtcagagacggcgatgcctatgtgtatcacgaaaagattgagggtccgggaggccttcctctgggcactcaaggaaaggtcgtgagccttgtctccagtggaatcgactctcctgtcgctacatacctgatgatgaaaagaggctgtcaggttattgccttatattgtgacaatgagccctacacctcgcctgaggctctgcagaacttcaatgacctgatagatcaactcaatctatatgctagcggagccccaatcaagagaagggtggtcaaatatggagagtacctgtccacctgtaaggcggaggccccagacaagatgacgtgcgtgctctgcaagtctggaatgtataagctggctggcaaattggccaagaagcttaatgccgaggccgtgattgacggcagcagcctgggtcaggtagcttcccagacactgcccaacatactcgcaacccgtgaggatcttgacgtgccggtgctcagtcccctgatcggtctggacaagctggagatcacgcggatcgccgagaaaatcggcacattcgagatctccaaacgggatgatgggggctgcaaggccgtgccacggtatcctgaaacaaatgcagacctcgagtttgttaagcaggtcaaggaagagatgaaccaggacgaagagctggaaaaggccttcaagaccattgtgtattga

SEQ ID NO: 2711 - DNA, 627 bp, synthetic construct
  source 1..627: mol_type = other DNA
atgagggactgtagcaattgcaaccgagagagctgcctgttgcagaaggtagcaggcataatcatggtgtttggcagcttatactacatcctggccgagttgatttcagcaggattcttcaatgactccctcatcaacacctatctgtttcacaccattagcgaactgggagttcccgtggccaactctcctctctcctttttaatgaatagtgcctttattctaatcgggattacactgctgcttggttacttcgccaagttccgggatttcatcatcaaatacaagctgatcatttccatcctcgcggtcatcacagcactgggagtgatcatcgtgggcttcatccatgcgggaaacccattgacggacggctatcacagtctgggcgccgtgatggctatccttggcgggaacgtgatgctgattctggtttcaagagctatggccgagtttgaaagctaccagaagatcactttcatacttgggattattgggttcattgtcttttggataatgttcttcaacctagaaagcctctacatgccggtctttgagcgcctgtcggtgtacaccctcataatctggaacttcatgactggtttttatctctataaaaattcctga

SEQ ID NO: 2712 - DNA, 567 bp, synthetic construct
  source 1..567: mol_type = other DNA
atgaacacaaacagattcgaaacattctttgacgcgattatcgcaatcattatcacagttctggtccttaagctatcacagccagcagctcctaccgtgccagcctttctggccctcaatgcacgattcataacctacgccatctgttatttggccctgttcatcatctggtacgataaccataatctcttccaagtagtcgaagagattaacaacacggtccttatcatctatgccatccagatgttcgccatctcgctgctgccctatttcgctacttgggtggccctcaacgtgaacagtattgcagctgagaccatgtttggcatcgactttcttgccatactcattctgtacgtgctgtctatttacgcggtgtatagggcggacccctacaattgcggaataagcaaaaacaatttccgcaagatctattgctacattccgattataatcgtgctgatcgggatctttaataagctatacagcttatactcccggaacatttgtctgcacagcgactgcacggatttgctggcttttctcttcaaaacttccaagacctga

SEQ ID NO: 2713 - DNA, 522 bp, synthetic construct
  source 1..522: mol_type = other DNA
gtgattaccgtgatcgtcctcgagattccaatggccgtcgatgggtcgtggggagctctccttgatatcaaattggaatttattgtgtacgcagtaagcttcatcgtttgctttaacttctggaattacaacaacaatgtgtttagcatggtcaataagatagaccataaggttatctggtcaataggcattgcaatgtttttcctatctctgatcccctatcttactacattcgtggccctcaaccctgacgccttcctgccaagcttcctctacggcctggactttatcatcgtagccattctgaccattttcactataaacgcgctgaagaacagtgacaaagctaacatcgccctgcagatcgctctggcagataatcagccctacgtgacgacaatcgtcttcgtgttgttcgggatgatcgtgggatatttcatttacccgctggcgatcgtgatcgcctgtctgttttccataattaccctctggttaatctcctactataaaaagcacggctga

SEQ ID NO: 2714 - DNA, 1101 bp, synthetic construct
  source 1..1101: mol_type = other DNA
atgaagacaacagtgagcgtgatcaaagcggatattggaagtgtgtccggccactgcgtctcacatcccgcactgatggaaaaatgtgatgaggtgctggctaatgctttagaaaccggaattttggaagattactatataacccgttgcggtgatgacattgatctgatcatgacccacagaaacggcgaattgaacgaagaggttcacaaaactgcctatgatgccttcatccaggccacggaaatcgcccgagacctcaagctatacggggccgggcaggacctgctgtctgacacattctccggcaacgttaagggcatgggcccaggctgtgccgaaatggagtttaaggagcggcggagcgaccctgtgatcgtgtactgtatggataagacggaacctggggccttcaacttgccgatattcaagatctttgctgacccattcaatacagccggacttgtgattgaccccagcctgcatgacggattcagttttgaggtctttgatgtgatggaacacaagaaagtggtcctggactgcccggaagagatgtacgacctgcttgcactgatcgggtccactggacgatacgtaataaagagggtatttaagaaaaacggtgagatcgccgcagcagtaagtaccgacaaactgaacatgctcgccggggagtacgtgggcaaagacgaccctgttgcgattgtgagggcccagtctggcttccccgctaatggtgagtgcgtggagccctttgcattcccccacatggtgagcggatggatgagaggctcccataacggtcccatgatgccaaccagccaagaggaggcgaatccaatcagatttgacggaccgcccagggtggttggcctggggttccaggtcacggatgctaagctagtcgggcccgtcgaccttttcgacgaccctgcttttgatgagacccggcggcagagcgccaatattgcaacctatatccgccgccatgggccattcgagccacaccgcctcccctcggaggagatggagtatacttcactccctggcgtcatggagaagctcgaacctaggttcgaagatatggatgatgactga

SEQ ID NO: 2715 - DNA, 378 bp, synthetic construct
  source 1..378: mol_type = other DNA
atgagcttctgtcctaattgcggagtggaacggaaggaggggtcccacttctgccatcattgcggctacgattacagggaggccaattcaagcgggatgggcagtagctctagttcggactcacaggtgaaccagaatccgagctttaacagccaggtcaaccagagttccacgtataatgtcccaaccaagcagaacccccacaacttcgcgaagatcacagggtacattctgtcctttctgattcccgtattcgcaatcgtgatcggtatctatctgattctatccaaaaacgaggaagtgcacaaacacggcataatcattatcggaatttctatagtggttcaaatcctctctatgatctttatgatgggctga

SEQ ID NO: 2716 - DNA, 513 bp, synthetic construct
  source 1..513: mol_type = other DNA
atgattttgaagacagcacggctcattcttaggccatggaaagaggaggacgctgaatgcctctatcacttcgctaagaatcccaagatcgggcctattgccggctggcccccgcataaaagcgtggaggagagcttagagatcatcaaaactattttcgcgaagaaagagacctacgcaataacgataaacgacaaggccataggatgcgtcgggctgctgttctacccagatacaaaccacaagtgggagaatgagggtgtagagctgggctactggattggagaggaatactggggccaggggctagtcgtggaagcctgcaacgagctcatcagacacgccttcgaagacatcgatatcaacaagatctacgcgtcctttaagtacgaaaatcatcagagtaagcgcgtgcttgagaagctgggatttaaatattattgtgatctgaaaaacaaggactacaccggcgaagaattttatgaaatcgccatgttcctggagaaaaagtga

SEQ ID NO: 2717 - DNA, 192 bp, synthetic construct
  source 1..192: mol_type = other DNA
atggccgacgtggatgtgacggagatacggattatcctagaggacctcagcaaggatcagctgaccgaaatcttggaaaagaacggctacaccagcaagggaagtgaaaagttcctgattaaagagatcatgacaaaaatatcccacgacatcatcattgatgagctggaccagcttggggtcctcgactga

SEQ ID NO: 2718 - DNA, 243 bp, synthetic construct
  source 1..243: mol_type = other DNA
atgaaggatctggagagcgaagaaaagatcgcaattgacatcgccaaactcgaacggaacctgaaccaggtggaggacatcaagttcgagggcaaagagaaggaagtctatgacagggcgatagattactggaatgattccaagtattacctcgagaaaaaagacacccgcacagcttttgggtgcattgagtacagccacggcctgttggacgccctaagaatgatccatggacttatatga

SEQ ID NO: 2719 - DNA, 597 bp, synthetic construct
  source 1..597: mol_type = other DNA
atgctggaaagtctgagaccctttctcaccaagatcctggaacctatcgcctcccgactcaatatcaaccccaacattgtgactattattagtccatttttagctatcatctcagcgtatttctttgctacagggaatctgattggcggcgccctgttcatcctgctgagcgggtttctggatgtggtggacggagctgtagcccgctaccacaaccgttccagcccatttggtgcatttctagactctaccatggaccggttcgccgatgcaatcatattcattggaatcatcttcggcggttattgtaactggttcgttggagtgctcgccatccattcagcaattacagtcagctatgtcaaggctagagccgagagccagggggtggagtgcaacacgggcatagccgagcgggcagttcggttgataattcttatggtgggggcggtcattgccttcatcttcaattcggacataattttcacttactttatctacatccttgtagtgctgtcctacttcaccgtgggccaaagggtgtaccacgtctggaaagagctcaacaagaagaaaatcccgcagcgcaggttgtga

SEQ ID NO: 2720 - DNA, 666 bp, synthetic construct
  source 1..666: mol_type = other DNA
atgaagatattcaaaatgaacccggaaaatcccgacatggatcttatagacgaggccatcgacattatggctcaaggaggtgtgatactctaccctacagacacggtctatggcctcggcgcgaacattttcaacaatcaggcggtgcagcggatctacaagatcaagcaccgcgagagatcaaagccactctctgtccttgtttcggatattgagagcttggagctgatcgctcacctggacgaccattcacgggaagtggtgaacaaatggctgcccggcccttttacgtttatcctcaacaagcagaagaccgtctctccctacgtaagtagcagcaccaaagtgggtgtgaggataccagataataagattgccagggagttggcctccatcttcccaatcacaactacaagtgcaaatattgcaaacgaagagaccctcagtaatccgcacgacatcttaaagcagattggggattgcatcgacctggccatcgatgtcggagacctgaccgggggaaagcccagcactgtgatcgatctgacctccgccaaaccttctctggttcgaaagggcctaatctccaacgacctggaatccattaaagaggatattggggatatggacagcaataaaaacgacatcgatgacatgaacctgtga

SEQ ID NO: 2721 - DNA, 696 bp, synthetic construct
  source 1..696: mol_type = other DNA
atgaaaattctgtctacaatgcaagactatgagaagatatccacgaatagccccctggatgagctcctggatgggggcatcgataagagaactatcactcagatttacgggccgccaggcgtgggaaagaccaacgtttccctgaatattgccgtgaacgtcgcacggagtggaaaaaaggtaatctacattgacaccgaggggggcatctctgtggagaggattaagcagatatccggggaagactttgataatgtcgccaaaaatatagttgtctttgagcccacgtcatttaaggagcaggaagaggatttggagctgatagaagattggctagcttctaacaacagtgaggtggaactcatcgtcctggactcggctgtggccttgttccgggtggaggacgacaagagcagaagccaccttctgggtaagcagatgcagcagctggcgaagttcgcagtagactacgacctggccgtgcttgtgacaaaccaaatctacgcctccttcgaggaagacagcgacgaaatggcgcctgtgggtggcaccatcatccagtataggagcaaaatcatcatcgagctcaaacgggaggaaggaagcagtgagcgtatcgccattctcaagcgccataaaacccgacgcgaaggattagcaattcacttctcaatcacaaacaacggcattgaatga

SEQ ID NO: 2722 - DNA, 1161 bp, synthetic construct
  source 1..1161: mol_type = other DNA
atgatccagaagaagaaatatgccaaggcagccaagatcattccagaagggtacaaatctgcgaatcaattcttcgaatctgtgtttcaggataaagaaatgatttggatggggcagaacaccaatgagctccacatagggcacaatgaggaggtgcacaaggccatgattgactgcattgagagtgacgagtactgtaagtacccgcctccagaaggattcacagagctccagtccctgatcctcaaggatttggacttggaggaccttagcatctacattaacgcgggggcaacagaatcgctgtacttggccatgaacgccgtgttatccgacaccgataacgtaataacgcccgatcccggctatcttatcatcgataatttcgccagccggttcgccggcgaggttagggcggtcaagatctatagtgaagagaacaattataagctgactcctaagctcgtgagagagaacatggatgagaatacccgcgtcatcctgctcatcgatccccttaacccactaggaagctcgtacacagaagaggaaatcaaggaatttgccgagattgcaaaagagaatgatctcttcctgctgcacgacataacttatagggactttgcccaaaaacataccctcgcggcaaaatacgcccccgacaacaccataacctgctacagtttctctaagatatttggtatggctggactgcgcctgggcgctatcgtatcaacgcaggaggtgatcgatgtggtcaaaagcatcatcattaacgacgttggcacaagcatggtggctcaggctggtgcaattgcagccctgaagacgaagcctcagtggattgatcgagttaaagacaccacttttgagaaccagaagatcatcaaggaagccgtggatcagtgcgaaggtgtgttcctgccagtctatccgtcaagtggcaatatgatgggaattgacctgtccggggccggcatcgactccgaggacatgtcccaatacctaattgaccgtaaagtctttacaaggcagggaagctacacaagcaacaccttcggccataagtatttacgggtgtcctactcaatcgaccccgagaaggtgaaagtcttcgctcgggagtttgtgctggctgtagaagctctgagaactaaatga

SEQ ID NO: 2723 - DNA, 1776 bp, synthetic construct
  source 1..1776: mol_type = other DNA
atgtcccgcatatctattctagacaaggacaagtgccaacccaagaaatgtaacacggtctgcatgcactactgcccgggcgtacggatggatgaagatacaatcgtaatcgacgagaagactaaaaaaccacttatttccgaagagctatgttcaggctgtggtatctgcaccaacaggtgcccttttggtgcaatcagcgtgattaacctgcctgaggctcttgatgaccctatccatagatacgggcaaaacagcttcgagctcttcggcctgcccagcctcaaggagggcacagtgctggggttgcttgggcagaacggtatcggtaagtctaccatcatgcgcatcctatctggagagctcattccaaacctgggcaactatgaggaggaagccacttgggataaggtgattgagtactacaaagggtcatcccttcagaactactttaaggcgctccaagccggagagatcaagaccatccataagccacagatggtggatcagctctcgaaggtggtgcagggcaatgtcaagaccctgctgtcaaatgtggatgagcgcggcaaattggatgagataatcgatgacctcgacctgaagaatgtgctagagagagacatgcagaacctcagtggaggggaactgcaaagggtggccatagctgctacagtgctgcgggaaggagacttctactacttcgacgagcccaccagctggttggatgtgcgccagaggctgaatgccgttaaagtaattcggtccctggccgaagccggcaaatccgtccttgtgattgagcacgacctggctacgctggatgcactgagtgacaatgtccacttgctgtatggggaaccgggaggctacggcgttgttagtggaaacaaaggtgtgcgcgtcggaatcaatgcatacataaacgggttcctccaggaggagaacgtgcgcatccgaaaacaggccattgaatttagcatccgtccccccacccctgaggatgacggggaggtcttaagcgaatacagcgacctgaaaaaggaatatgacggctttacccttgaagcggaggctggcaaaatctatcacgatgagattgtgactgcattcggttcaaacggtatcgggaagaccacatttgccaagatattggccggcgttgaaaagccaagtgaaggcaacattctggaaaaggtggagatcgcctacaaacctcagtacattgaatcggactttgatggaacggcgcaagacttcctgtttgcgaacgcccccacgtatggatcaaatatcttcaactccgagatcggcaagccactggcactggagaacctcttggacaagaaggtgaagaaactcagtggaggggaactccagcgactggccctcgctgtaaccctgtcccaggacgccgacacctatctcttcgacgagccaactgctttcttggatgtcgagcagagactgattgccgcccgggttatccggaagatagtggaaagcagaaatgcagcttcgctgatcatagaccacgacatcgttttcattgactacatttccgacagggctatggtctttagcggcgagcccgggctgaatgggaaggcatctaaaccggccgacctgcgaacaagcatgaatcagttcttaggcgatttagatatcacatttaggagggataaggaaactaaacggccccgtgtcaataaatacgactcttatcttgatagagagcagaaggagcagggagagtattattacctgaaagaatga

SEQ ID NO: 2724 - DNA, 339 bp, synthetic construct
  source 1..339: mol_type = other DNA
atgaaacaggtaatggttgtccgaacagatatcaagatgggcaaaggaaagatcgctgcacagtgttgccacgccgctataggcgcctacaagcaagcggataaggaaaaaatcagaaagtgggagaatgaggcctacgcaaaggtggtcctcaaagccccgacactgcaggacctttacaacctaagggagattgcccgggcaaacggggtggcctattatctcgtgaccgacgcgggccgcacccagttgccaaaaagcacggtgaccgtgctgggactgggtcccgacgaagacgacgtcctggataagattactggggatctcaagttactgtga

SEQ ID NO: 2725 - DNA, 816 bp, synthetic construct
  source 1..816: mol_type = other DNA
atgaataagataaaaaagcacgagagtaaatttacaaacaacaggctccttaatcccgcggaatatatgccaaaggaggaggttgaaacgttaaagcaggtgtcctacctgatcgtgctatttctcctcttcatcttcttcatctacagtttctggccaatggcaaatatgaagttcttctcatttctcgagattgtcttgatggtttacattgccctgaacatcgactatagcaactggaaaaacaaggtgctgtttttctttctcgtgccttacggcagcatcgcatggttcctgttcgaggagcttaccaacagcctcttcgacatcttccatatgatcattctgttatactttatgaaagtctactacgagaagtttcgggagtacactgagaccaatgggctgggcatcaccatcttgctcctgtttaccataatcttcatttcctttattctgacaatgattgtagaaggagtctccccgatcgattcgatagcgatggtctcaaacgcctttacaagcaacggatatgccgtgctgggaagttccttcggtgggaaattgaacagcatcctattggtgtggagcgggtatatcctgagcggcgtaggcactgctacgatgacagtggcccttcttagcaagcacttcaacaaaagaatcaaggagaacgaaaaaaccaatgaggctcagtatgccgaactgaaggagatgattgaacgcaataatgaggaaattaaagagatcctgaaggagaacaatctggagaaaaagactgaagaagaactggaaaagaagattatagagccctga

SEQ ID NO: 2726 - DNA, 711 bp, synthetic construct
  source 1..711: mol_type = other DNA
atgaactatttaaaccagaactacgccacggtcttcatgggcaatgactttctcctgatcatcgcctccctcatcattatgatcttcatttttggatacggcagcgtcattaccaaggacgtgatccgggggggcaagaaactgcccaagatctacattaaagagtgcaccatctatgggattaagtgtgtgatagtggcgctcatatactctgccgttcaaaccctggttatggtggacctgtcccacagattcctttttccagaatttgagctcgagcatgccctgacagatattaccggtacattacagatgttcacggctaataaccctatcctgatcggcgagtatgtggtaataagtataatcctgacctacatctttgtgttctttatggaaattagccttgcccgcttggcagacgggggaaagctgctggaatcatttaatttgcttgctatcaaacgatgcatagacactattggctggaaaaaatatacaattgattatacaaagctgctgctcgcaataaccattctcacttatctccagtacggattccagttcctgggattcttcgactacatcactgatttgatcttcggcctactagtcttcattatccaatttatcggtattgggcagatctacaagatctacaaaatcaaaaagtacagcaacctggataggccgaccaagaagtcggtgtga

SEQ ID NO: 2727 - DNA, 915 bp, synthetic construct
  source 1..915: mol_type = other DNA
atgagcaataaaaagtcattccttgcaaagatcgaagagattatcctcatgcagacaaagcccgactatatggactcctacgaaaaggtcaacgatctcataaaagagaggttaaacgctcaggagaagccgcctaaaagcgccctgttcaagagcacctacctgaatgggacacagatcttccattatgggaatagccagagcaaaaacctgattgtttacatccacggcggggcctttattaatgaaatcggattccagcatcacttcttctgttcatatattagcaaaaaactggacgcctatgtgatctctccagtgtaccccctcgcccctaagcactcctgcaacgaaacctttaaccaaattactgatctatacaagtccctgatcgaagagaataaatcgaacggcgataataagaataataactacaacaacagtaacaacaataaatccatttacctgatgggagacagcgctgggggtggatttgtcttgagtttctgccagtaccttaagaccgtcaaccttccccaacctgacaagatcgtggtgtattctccctgggtagacatctcaatggatgattcgccctacgataatgagtccgatccgatcctgggtgagataggcctgagagagatagggaagtcatgggccggagaactggacacgaaggactaccgcgtgagcccattgtttggcgacaacagcggcctggcgccaatcctcatctttgcgggagacaacgagatattctacaaggacatcttgaagtactatgaaaagctcaaagaagataacgttgacgcacggctggtggtgggcagtggcatgttccacatttatcccctcttcccttccccagaggcaagtgaggcctttaaggagctaaaaaaagagtttgagtga

SEQ ID NO: 2728 - DNA, 1044 bp, synthetic construct
  source 1..1044: mol_type = other DNA
atgagcaagaatcgaatcgaatggatcgacctcgtgagagccctcgctattctcaccgttctctacattcacgcaacagatggcatctatatcatctcctctgatctgatcccctattggactcctttttcacgcgtgttccagttcatcagtctttttatcggacgtataggagttccattcttcttgatgattacggggtacctattgcttgacaggacctacgacgacgagcgggtcaaaaagttttggaacaagagctgtaagggcttggtcattgtgacaatcatctggtccctgatttacgccgtgagcattcagctggtggcctattccagcatccaggtcaatacgatagaagctggcaacctcttcttcagccatatgtggtatatgcccatgattatcgggatgtacctctccatgcctttcgtcgcgaatgcattgaaaaactttgatccacgcaccattaaccaagccacaatcgtattctcctgcctggccttcctgctgccgttcatttcgatcgtctgcgagatgcaggggcttcagaatgtaaacatccagtactgccttggtttcagtggcggcgtatacgggatctacatcatactgggctggctggtgaagaaggggctattcaagaagtacagctcaaacagcctgaggctgctagccatagtttcgtttattatctgcgtgctcttccaatggtacgcattctctattgacttcagtttctctctgtggtacgagttcccctttatcctcaccggctcttttgcactgttcgagctctgttcccgcagggaaaaagtccggggatttcggggagtggagtttttagccaaatattcatttgctgtgtttttgatacacaacctgtttagaatcatactgctgcctatggtggtgtacctgccatatactgaaccggtgaaagcgattattctgtggatacttttaatcatcaccagttacgccgctgcggttatcatttatcgaatccccaagttcggtaaatttattctgtatatgagatga

SEQ ID NO: 2729 - DNA, 300 bp, synthetic construct
  source 1..300: mol_type = other DNA
atggagttgatcaaaaactataatgaaaaggagctgaccatcgagacgggaaacaagatagatacaaccactgccccagacttcgagaatgaaataatggatgagatgggcaactttgatagcttaactctcgatctcaagaacctcgaatacatctccagtgcagggctgcgggtcctgattcttgtgcagaagaaactgaaagcggacgacatccccttcgtgatcatcaacaccaatgacaacattaaaaacattctaacaatgagcggcttcgacaagatcctgaatattcagtga

SEQ ID NO: 2730 - DNA, 633 bp, synthetic construct
  source 1..633: mol_type = other DNA
atgatcaagctggcctactgcaacgtagaagaacttgacttaaaaagagcgtacagcctcgtctccaagtcacggcaggagaagatcgacttctaccgattcgataaggataagaagctaagcgctggagcatatctgctactcaaaaggctgttgtctgaggtgaatatcaaggactttgagattattatcgaaaaatacgagaagccccgcatagtcgaccacgagaacatatacttcaacatcagccattcaagcaaaatggttctgtgtgccatctccgacaaggaacttggcgtggatatcgaaaacattgatggggaaattgacctgaacatcgccaaaaattttttctataatgatgagtacaagtcgatcatgaactgcgacaacccaagtgatgaatttttcaaatattgggtgctgaaggagagctatatgaaatacaccggcctgggcatgaatctcaaactggactccttcgagatagtgattggagatgagatcaagcttaaggacgacgacagtgacctgaaattcaacctctttgaaatcgaggattataagattgggattgcaagccactacaatgtgtatgacttgatcgagtacgatctcaaggagctgtactga

SEQ ID NO: 2731 - DNA, 1875 bp, synthetic construct
  source 1..1875: mol_type = other DNA
atgaagactaagctaaagcaaattcttatctcattcattgtgacaacgatcttctactttgcgctgtctcagacctttatcactcaactgggattggggagtccacagatcggcctcctgtacgtgtttggcctattgtttggcccttttggtgctctgggtgcaagcctgtctaacgtagctattgatgtttaccatggatacacctttgtgcagatactcccctcagccatcatcagctttggcgtgtctcttctggcctacaagctgtggtactccggctttaagtcggacgagtacactaaacctagactggacacaatttaccacctatgcctctttttggcaagcataatcatatgcgggatgatctactcagtaggccacggaaatctggcttacatcctcatcagcccggatattgaggaatcaatcatcattccatccttcttgaacttcacaaacgtggccttcatcatgggtattgcaggaatttggctgttcaagcggaccaatctcattgagacccctaaaaagtccgagcgtcgattgaacaagaacctctacagactgatcttttcccttttgatggtgatgacaatcgtgtcgttcatattcatcattcggaactcggataatctcaccatcatcactggcctgataatcgtggtggccctcatgtatgcctatatgacgaagcccttcattcacgagatccaagaggtcaacgagaacagcatcattgctaagatcgtccgcaacttcattataatcaccctgatcctgggattctttggagggctcgtttccatagccagctttgactacgttgagacaagcattacgctcaacatctacctccatctgatgccgattctggtgataagcgacatcatcataattctcttcttcattccagggatcattatcctgaaatacattggcgataatgtggtcaagccaatcacctcattctccgaaatcgaagggttcatcaaggaagatgagaagatagaagcggaggggctcattaaggtctatagtgaatatgtcaatgagcagaatgaaataggaacccttgccaggagctataccgagcttatcaatcacaacaacaactatatcgagaacatccagaagatcgagggggaaaaggagcgcacaaatgcggagctggacattgccacaaacattcaggccgctgccctgccaactgaagcaattaaaacagacgcattcatcgtcaacggttatagcaagcctgcgaaagaggtcggcggagacttctttgactattatgagttggatgatggcaatttagccattgtaatcggtgacgcttccgggaaaggcgtgcccgccgctctggttgccatgattacgcaggtggtaatcaagcagacgctgattaacaaccacgaccctagtgaagtgctcttcagtctgaataatcagctatgtgtgaacaatcccgaaagtatgttcatcaccctgtggctcgggatatacaacaaaaccaacaaaaagctgaccttttccaatgccggccataatccgcccctgatcaaggaaaacggcaaattcaaatatctggatatcgaaagcgggatcgtcctgggaataatggaagacttccagtacgaggacgaggagatcaccattgatggcgagctggttacctacactgatggaatcaccgacgcaaacaataacgatggtgaaatgtatggcgaggacaggcttttagaattttttaataagttcaaaagcgataaagaccccatccttcccttattaaaagacattaatgactttactaaggatacagagcagttcgacgacatgactcttctgtacttgaaagtgaacgattga

SEQ ID NO: 2732 - DNA, 378 bp, synthetic construct
  source 1..378: mol_type = other DNA
atgaatagtatgaacttcaaggtggagatcgatgagctccatcggctaaacgagttcatcttaaacgaacttccccatgaggacttcatggtaaatctgattgtcgaagagatctttgtgaacatcgtgaactatagccagacagaatacatcattgttaacctggactacaaggagcctaatctgacgatcgagtttgtggacaacggtatagagttcaatccgctctccaaggaagattatgaggccccagacagcattgaggatgcaaaaatcggaggcctgggcatccacctcaccaaggaaatagcggatgagctggactaccactacgaagacggggaaaatcacttgatgattgtgaaaaaagtcgagtga

SEQ ID NO: 2733 - DNA, 318 bp, synthetic construct
  source 1..318: mol_type = other DNA
atgtccagcagcaaggagtacctggaatatatactggaacagctcagtgagctggatgagattacctaccgcgccatgatgggcgaatacatcatctactaccgaggcaagatcattgggggtgtctatgacgaccgcttcctcgtgaagcctgtgaaatcagcaagggagatgatgccaaacgctaatatggaattgccgtacgagggagcgaaggagatgatcctggtcgatgacgtggaggacaaggagtttctgcgggaacttgtagaggccatgtatgaagagctacccgcccccagaaaacggaggaaatga

SEQ ID NO: 2734 - DNA, 471 bp, synthetic construct
  source 1..471: mol_type = other DNA
atggacatcctcgctaagctgctgaacgacaaactggcgtttgccgaaatcagctacaccatagaagaagcaaaaagtatttctgattcaaacaagatcccaattatgatttgtagcgagatcctaaaggagaatgagccgttcgcccactcctgggacgtcacaagcgactcgatcgccgcgtatattgccagccttctggatgccaagctcctcatcgcaaccgatgtaaatgggatatacacaaaagacccctccctttccggcgctgagctgatcaaagagatcgacgtgaacgagctgctgacgtttgaagaatcaagcatcgatctgatgctgcccagtctcttgattgagtacggtttggattgctatgtcgtgaacggagagtaccctaagcgggtgttatccataatcaacaatgaggactgctctttcgaatatactttcattaggaatggcaacgactga

SEQ ID NO: 2735 - DNA, 162 bp, synthetic construct
  source 1..162: mol_type = other DNA
atggagaaggtcaactgtcagtcctgcaaacaggagattcccctgatcgagccgtatgtgcaattcaattgtcccgagtgtgggaggcctatcgcccggtgcgaaagctgccgcaccttcggccacagctacaagtgcgaatgcggatttgaaggcccatga

SEQ ID NO: 2736 - DNA, 270 bp, synthetic construct
  source 1..270: mol_type = other DNA
atgggcgaggtcgttaacacactgaaggtcatgcccgagagcccagaagtggatctcgaggccctaaaagtggcaattacagatgccatgccggaggacgccgagctgcacgaaataaccgaagagcctatcgcctttggtcttgtagctctcaacgtggtgttcatcgtggaagacggggaggggggcacgggacccaccgaagacgcgatcaatgccatcgaggacgtcgcttccgcagagattactgatagcaggcggctgatgtga

SEQ ID NO: 2737 - DNA, 1251 bp, synthetic construct
  source 1..1251: mol_type = other DNA
atgttcgatctactggcggcctgtttcattggaatcgcaatcggcacaggtacaggcatggtgcccggcatccacgtcaacaccgccggcgccatcatgtttgcatcctcaggctttctgctgagcttcctgtcgcctgaatttctgtgcatcgtaatggtatcaatgagtattgctcacgctctgattgagtttgtgccatcaatgcttctgggggttcccgaggagggcactgccagttcgatcctgcccggacaccgcatggtgctagaaggacggtctaaggaggccatccgaattgtttcagtcggcgggttcggcgcgattgtggtcgtgatattaatgctcccaatattcgccgtggctctgccctttctgcaggatctgagtaagccctacacttggatgatccttacggtggtttcgattcttatgatttacaagctcagcaacggaaggctcgcctttatgtggagcatcctcctgttcgtcctgtctgggattttaggttggattatgcttcagacccctatttccagcggaatcagcctcatgtgcactttcagcgggttattcggcatcagcacgattcttttcagcttgaatgacagcagttcaattcctcaccaaaacaaatactacgatttcgtgatcgacaaggatacaataaagagcatcttcgcaggaggcacggcaggggctatcctgggctttctgccaggtttcggaccagcccagggcagcatcatcgcacagggagtgtgtggaacaagcgcggacggggacgacaccaaaaatttccttctcgccaacagtggactgaacaccagcgacaccctcttttccctaatagctatctacctgattggcaatcctagaagtgggatcgctgtgtacatgtcctacttgatatctgaatttaccttgtctcatttgatgattttcacttttgcgtctctcattgccgtttcaatctccttgattatctgcctgaagctgggggacggcttttccaacctcatgcaaggtgtggattatcggaaactgtccatatccgtaatcctactcatgatagtgattctctatatcttcgccatcatctatgagggtccgatcctgtatctcacccttgcactgatcacatccaccgccatgggtttgctgccccactacctgggggtcagtaaatcccatctgatgggggtcttgatcctcccggctattataatctatatgcagatgttcatgtga

SEQ ID NO: 2738 - DNA, 1515 bp, synthetic construct
  source 1..1515: mol_type = other DNA
atggcgaaaacaatcattccaaaatataaggtttcaaagtttgaatttacagaagaagagagacggactctcgaagagttgcgggagaatctgatcgatctggccatcagcgagagaatgtccaacttcaacgaggacctcatcctaaacgacatcatccgtttcctcgacaatcgactcttcagtaacgcagattacgtgcgcaatatcgacttcgagaaactggacagtttcaacccgagcaaatacaagcacatcggaaatcctaaaaggtattcgcagttctatgcaatattcaaggacgagattgagaaatacaagaacaacttggctcgaaacatgtttcaggagcttatcgggtatggggaaattggctttctgattgatgacgatgacctggaagagattatggtgatcggactcaataagcctgtgtttgtctaccacagggaatacggtatgatggaaactgacctgatcttcaaagaggaggaaaagattttgagcataatcgattctattgcccgggagacgaaccgccgcatagatcagcagagcccaattctggataccagacttcctaacggctcccgtgtaaacgcaaccattcctcccctgtcagccgacggcccaaccataaccattcgaaagtttaagaaagaccccctgacgattgtcgatctgatacggtacaacacgctcaacactgagatcgcatccttcctatggctctgcgtggacgggcttggggtaaagccggctaatatcatagtctccggcggaaccagctcaggtaagacaaccctccttaatgccctgtccatctttatcaatcccaaggagcgaatcgtcaccatagaagacactcttgagctgcaaatcccccacaagcatatcctgagaatggaggcccggaccgtgaacatcgagaatcagggggaaatcaccatagaggacctggtcaagaactccttaaggcaacggcccgataggataattgtgggtgaagtgaggggcaaggaggcgatcactctgtttaccgccctgaacacagggcatagcggattcggcacgttgcacgccaacagttcaagggagaccatcacacggttgaccaatgctccaatgtctgtgccaaagatcatgataagttctatcgatttcatcattatggaaaagcgcatctacaagtcagacggattgtcctatcgcagaatcactgaaattgctgaggtggtgggcattgaggaaggaacaatccagctgagcaaactctttgaatgggatagtaaaaaggatgagttcaagaacctgacaatcttaagcaaaacactggaaaacattgccagcctaaagggcgtgcacattagcatccttaacgaggagtggaaaaaccgcaagaaagttctggactacctggtaagaaatgacattagctctcaggatgatatctcgaaagttctcgaggactactacattaatcccgactatgtcttaaatatgatttccaattga

SEQ ID NO: 2739 - DNA, 552 bp, synthetic construct
  source 1..552: mol_type = other DNA
gtggtgattttcatttttgataaatttttcatccagctgagtgatagcatcatcaatttcctggtatccatctcaaaccttttcctgtcattcttcgataagaataacgactccaaggagaagtgggggaacgagaccaatcagtttgatagcagcaaatacgaggagttgaactattttaacaatttcaagagtgtcaacttaaactacagcgacaattctaactcgggagacgacctaaagaatgagaactacagtttcatcagcaacttgaacctgtctaagatttttaataatgaaaatatcttcgagtacctcgaaaacaaatatctgaacaagcaagccatgttcataacgcccaatggcacaaacgaaaacgaatcaaacaagaacttcctctataatctcaagatcaaactagtggttctgatacttgacaaccggttctttcagatcaggtccagccaggacctgctcaaactgctgttttacgtcctctttaattacaacaaatcctttttccactcctattgctgcatttgtttcttttga

SEQ ID NO: 2740 - DNA, 606 bp, synthetic construct
  source 1..606: mol_type = other DNA
atgtttttcatcttgttcgccctgtttatcctgtatctcccaaaaatccggcatgagaatgattactcatctatcagcaaagaactgccctacgcactccgccagttgtccacggagctccgggctggaaagagcctattcgacgctcttgattcgattgtcgactccgactacggcgttctcagccgcgagttttcaagggtgcttgaggagataaaatatggggaaaccagtgaaaacgcctttctcaatctggagaagcgagtgaactccaaggccttgtccagagtaatctacgagatactagcaagcctcaggatcgggagcaatctgtcccactcactgaacattattgctgaagacgtcaactttgacatgagaatgaagctcaaggaatatagtgagaaactgaacgccttcattatgatttacacctttttagcgatcctggcgccggtgatcatcttgacaatgcttctggccgccagcgtggtcattggcgatatcgtgccaagcagtctgcttttcattctgtacggtctgttcttccccatgataatcgtgttcttagccttcgcaatcaagaaactggagcctaagctgtga

SEQ ID NO: 2741 - DNA, 1509 bp, synthetic construct
  source 1..1509: mol_type = other DNA
atgtacgagcttattaaggaatcaattaatagtgatgagagtgctctcgaattagctaaatccaaaaaagatgtgatctctgtggtcgatgccatatccgatctgagctttgaagacaccatgaaactggggacgcgattcaagaagttcccgatcggctgtgacctcactgaagtggtggttggcacctgtgcgtcggatctggaaaagatggatctcttcggcaactgcatgctggcgaacatgatcggagctcctatacacatttgcgcgtacgcgttctcagacattgcagagaaatacggccagcggggtgtggaaataatggaagaggtctacaatatcacagatgttcccctggacctggaccactttgggaagtacggtgccatgaggttcccaaagcatattgtcggctgcggaggagactgctacaaccagggcccaagcttcaccgaatgcccgcgaggcagaatccacgagcggctgctggacaaggagaaggccgagctggacgacaaggagacctgggtccagctctcctcttccgtggccatcaacctcagcagcgagcagtgcaacgacggccatgcggcccccctggaggaggcccaggacttggcagaccttgccaagaaatatggaaagggccttgaagccatcatgtttgtgggggacggatacgatgagttaatcacaggcttcaccaaggccatcgagatgggtgttgacgtatttgtgattgaggggggacccttcaacaggtgtgaaaacaccaacgaaagctttgctaagacaattgctatgagccgggtcctgtgtcccggaaaagtggtggccacgaacggtgcctatgaaagtgagtgtcgcgcagggctccggtccgggctaaatgtgataattaccggttttcccaaaaaccaccacggatacatgtgcggtttcgagccgggaactgccaggcgcggcaagttcggcctcccacgcgtgatcaagatcatgaatgaggagatcagtgcaggcccaacgagagtacctgtccagcgtgaagagctactggcattgacccacgctgtcaagttggcagggcctgaaaacatctatcctaagacaatcggatcgtttgcaattggggacgcccactgggctacaatccaaaactctaagatgtataaggaaatgtatctgccaaaaaccctggaggagatagctgacagcgtgaatggcaactccgtttcattgcatggggggaggttcgtttcatggcttgtggccaaagagctggataagaaaggcatcgatgagataataatcactgacagcaacccctgggtggagaaagtcagcgtagacaatctccaagaggaactgaatgcaactatcatcagaggccacgccgatgataagggggctggaatgattgctaaggagtctattgtgaccactacaattcctaaaatccataatgccattaaatccaagattccccatgccgtaaatatcatctga

SEQ ID NO: 2742 - DNA, 1017 bp, synthetic construct
  source 1..1017: mol_type = other DNA
atgaaagttgccattctgggtgctggctgttaccgcacgcacgccgctagtggaattacaaatttctcacgagcctgcgaggtcgccgacgctaccggcaaggagaacattagcatgacacatagcaccattgaaatgggtgccgagcttctagaactcgccggggtggacgaagttgtggtcgcggaccctgtctttgacggcgaatttacagtggtggaagactttgactatgccgaggtcatcgcagcccacaaggcgggcaatcccgaggatgtgatgcccgcaatcagggcaaaggtcggagagctcgccgagaccgtgcccaaaccagcgaacggcgcgatccatttcactcacccagaagaccttggaatgaagtgcacgactgacgaccgggaggccgtggcggacgctgactggatcatgacatggttgcccgagggagggatgcagccggccatcatcgagaagttcgccgatgtaatcaaagacggcgcaatagtgacatccgcatgcaccataccaactcctggactgaaccagatctttgaggatctcggcaagaatgtgaacgtagctagctaccacccaggggcagtccccgagatgaaggggcaagtttacatagccgagggcttcgctgatcaggccgctatcgacaccttgaaagatctgggagccaaagcgagagggagcgcattcaccctgccggccaacatggtgggtcctgtctgcgatatgtgttccgccgtgacggcaattacctacgctggccttttatcctatagggatacagtgactcagatcctgggtgctccagcaggattcgcccagatgatggccaatgaggcactcaccaatgtaaccaagctgatggccgatgaaggcattgacaaaatggatgatgctctgaaccctggcgccctgctcgggactgctgactcaatgaacttcgggcccctgtcggaaattgtgcctacgatcctggaatctctagagaagcggagtaagtga

SEQ ID NO: 2743 - DNA, 1002 bp, synthetic construct
  source 1..1002: mol_type = other DNA
ctgatcgaaagtatcttggagaaagccaaaaaccgggagaagctgagccggaatgaactcatccagttatttgaaatcgatgacgaggaaactctgaaggaactctgtaaaattgcctgcgatatccgaaatgagtgttccgacgtcatcaaattaacatccactatccacctcacaaataaatgtcaggttcaacctcgttgcaaatattgcggctttgctgctaagacctcatcgatcgggtattatgacgccttctacaagagcgatgaagagatacgccaagctgcaatgtgtgtggaaagatcaggcattcctaggataagctgttctggcgggcatgggtataaaggaaagcaggccgtaaacgcggcaaagatcgtgaagggagagacctccctggaaatactggtgaatgtcggcgctgatctcacgcaggaagccgtagacgaactgaagaaatacgacgccgatactgtatgctgcaacctcgagacaaccaacgaagacgttttcaactttgtcaagcccggtgagaagctgtctgaccgcatcaacatatgcagaatggtgagtgatgcaggaattgggctgagttccggtctgttgattggcattggggagtcctacgaggatagggtggaccatctcctgttcctgggaagcttcgagagcctggaggagattcccattatgggattcaacccatacgtggacaccccgatggaaaaccaccctccctgcagcatcgaggagcagctaaagaccatcgccatcaccaggatcatgtacccccgcattcggataacggtgccaaccccaacgatcggtcccgagaatgttgagcttcctctgatggcgggagccaacaacttggcaacagtcatccccgaagactacccgcttgtcgtgaagggcgtggggaatccagagtacggcaacctccacgaggtgatttcagtcgtggagaatcttggcctggaggtgcagctacacgcgtga

SEQ ID NO: 2744 - DNA, 474 bp, synthetic construct
  source 1..474: mol_type = other DNA
atggccttcgaggaaagcatcagaaaagctagtatccaatcttatgaagggacacggaagggagacactattgaagagattgaagcaatccagaactatatccgaaacgcaaagatcgtggttcctaacaagaatggcataaaagtagaggtcataaacgaggtgctggccaaattcaacatcccgcccgctgagtacctgcaggtcaacaccaattacgctgatttcagtcgcatgcccgccatcgctaaggcgatgattgccgtggatcagtcagacgcagacctggtcatcgcccggggtcgcctcggcatccccgggtcgggctccttcttggtgtttatggacagcaagtccaggattctaaccgccgccacgtccccaagccacataattcataatcagccactcgaaaagacagtgtacaaggagacccttgaggcgctgaagaaagtgggatttaaagaggagtga

SEQ ID NO: 2745 - DNA, 408 bp, synthetic construct
  source 1..408: mol_type = other DNA
atgaataatcaggattacgacactggtatatccagcgaggttttcaccgtcaaatcaaacatcaaacttattgatatcttcaatctgatcctggaaaagaaggcacgggccgtgatggacctgttcgacagtctcaccaacaaggagacaatccacaacgaaagttccatcataatcattggaacctattttacaggaatcgccattgcgaagtacctctcctacaacgggttcaagaacatcactatagtggacatctatccccatctggagggcttcatcgatagcaacctaggcgatccaattgatgtgaacaaatcgtctaaagggaagtttaaggagaatatcgaattttcaagcgacttgggcctgattaggagcgctgacgtagtcattgacaccacgtga

SEQ ID NO: 2746 - DNA, 441 bp, synthetic construct
  source 1..441: mol_type = other DNA
ctcggaggcatagatgagagccagtccgagtccatttacacaaaggtcttcctcattgaagaccccatagccgaggacaatgatgacttgttgaagaacaaaaacaacatctattctcgcataagcctggtgaacagttataacaagttcatcctgaagaccgaaggtttaaacacaaaaaccagcgggaccatgactctgacgatcgatatccttcggcagagcatgaatgagatcctgtcaagggaaggcgtcctatactgttcatctgaaatgaccttctttgaggagattgtgtttaaggaaaatgacctggataagttctttgaactgatcgggtccccggtaatcaaagtgagtactattgcaccattcgactgcgaggagatcatcaaatgctttattgacaagatctactcggagatcctcattagatggtga

SEQ ID NO: 2747 - DNA, 729 bp, synthetic construct
  source 1..729: mol_type = other DNA
atgtacgccaacgatattttcaatattatagatgaactggtgcctcggaaactggcactgaagaacgacaaattcggctattttgggaagactttcgacaacttcgacatcaaaaacattaaagtcatcctcgatcttcttccagaggatgacctaaaattcgataagggtgacctggtgatcagccaccatccccccctctttatgccaaagaccccaacctacgtggtccactccaactgggacatcgttcaaggaggggcaaatgacgctctcgcctactatctggggctgaagcctatatcaatctttcacaagcagacaggcataggcaggatctgcagttcaacaaagaccttggaccagttcctggccttggtatgttacaagttcggccctgagaatgtgcgcctcgtgcacgatggcgacttcgataagatgcttcggaaaatcgctatagtgtccggattcggcctgagcaataaggaatttatcaaactggccaaggacaggtccgtagatgcattcctgtcgggtgacctgaaccacagtaacgcgatctacgcgaaaaagctcggaatcactttaatcgacgttagccatcatattatcgagatcccggggctatttgccctgaaggagttgctcagacgaaatgaggacattacggtccccgtcgaaatgattgacaacggagtgccctggaaatatattagcgccgatttttga

SEQ ID NO: 2748 - DNA, 645 bp, synthetic construct
  source 1..645: mol_type = other DNA
atgatccaagagatggagaatagtctgatccccaagggcagtatcgatctggtggggttcggccggctaggattgcgcacagggatcaatctgattcaggtgcaccgcggaggtccagctaagatcacagtgattgacggccagaagatcagcgagtcggatataatatttctcctcaaaggggccaaagtcggcacttataagtcagactttttaaaggaaatttccacccactcaaaggatttcagggaagtcgttagcatcacggaggacataacggaggacaacatcgatttgatcacaggcgacgtggtcgtgatcgagatagcgggagggaataccgtgccaactgcagccaagatcattaaaaaagcgcacgaaaacggctccaaaaccatcggcaccgccggtattttcggaattggggacgaagagatcgttgtcgcagacatcagcgagtttgacgactccaaccccgctattgaggagcttcggaaagaaggaatcctggacaaccatctggtgataagcaccaataggttcattcgagatggcatcccgattactccttacgtactcgatgatattgccaacatcatcacaagagaggccctgaagcttctgattgaaaagaacaacgaatga

SEQ ID NO: 2749 - DNA, 609 bp, synthetic construct
  source 1..609: mol_type = other DNA
atgattaccatcgcaacggccgaatgtttcacacatgggattctcgcccgcgagatacacgccctcgctcaggattacgacgatattttcgccagctcctactggggtctggtgaacaaggtccagaaggattgcatcaaggacgcaattctggaagataaatgctccatttttgatttaagggacctgagtgttagctgcggactcttcatcccaaccttggacgctgtgaaatctgtgctgaagatcgagaatccgctagagcccttgacacttatcgacggcatcaaggtgtacgacgatgacggcgatcgagaaatggctatcctgatggcagaggcggccaagaaggtatcggggtcagatatcggaatcggcaccactgccgggatcggctacggtggcatcgccattgtcgacgacgacatcgtcatcagcaccagtagcgacgtttatgcggacctggtgaatgtggattccgacgacctttacatgcggcaaagatctggaatagaaaagactctgaaaatactgatttattacctgaacgataacctcgacattatcaaccagatgaacaacgtgaaaatatataataaatcagagtga

SEQ ID NO: 2750 - DNA, 2169 bp, synthetic construct
  source 1..2169: mol_type = other DNA
atgattttcaccatagagtatgacaagggcacgcgcctgcgagtgcgatgtggtaaggaagcattcaccaaagaggagtcctatggcttagctgagaccctcatcgactatgacttcatagatgaagtgaaggtgtctcaccgtaacgggagcattcttgtcctgtacaatgatcccaaaaaaaggattgaaattctcagaatcataagtaaaatcagccaggacaacctgtacgaaacaaaggccagtgataaggctgctcttgaagagctgaatgacaagttcgcgataaaaattgcaaagcatattctcaaaagatacctctttaagatcatattgccaattcctctgaggaagctgagaatgctgtaccatgcgtcatcctatatctggcgcgggctcgacagcctaaccagtttccgcgctgacgtggcccttctggacggaacagccattacggcctccctgttgactaagaactacaagtctgtggggagcatgatgtttctcctatccatctctgagatgctagaggactatacgatgcagaagaccaaaagcacacttaaaagcagtctggccttgaacatcgacagcgtgtggaaggtggagatcgatgatgagggcaacgagatcgagagccagttccccctgagcaagctggagaaaggagacaagataagaatccggaccggcgcgatcattcccgtcgatggcgtcatcgctgatggggatgccatgatcaatgaagcctccatgactggggagagcctggctgttcacaaggataatggcaaggctgtgcacgccggaaccgttgtggaagagggctccatagtcattgaagtccgctccgtgaacgatgagactcgactgaacaagatcattgacatgatcgaggattcagaggagctgaaggctggtatccaaagcaaagccgagaagctagccgactcgatcgtgccatacagcctggctgccaccgcactgacatacctcattacaagaaatgtgacaaaggcgctctccgtactgatggtagacttctcctgcgcaatcaagctaacaacccccatctctgtcatctccgcaatgaaagaggcctcagacaacaggataatggttaaaggtgggaagcacctggaagcctacgcgaatgcagacaccattgtctttgataagacgggaacattaaccaatgctcacccagtgttggagaaggtcatcccctgtggaaagtacgaccgggatgaggtcctgcgcattgccgcctgcattgaagagcacttcgcccatagtgtagccactgccatcgtgaagcaggccgagaaagaaggattgcaccacgaggaagaccatagtgaagtggaatacatcgttgcacatgggatctcaactacgtacgacggcaagaaagccatcattggaagcaggcactttctcgaggaggacgaaggcatccggtttaccaaaaagcaggagaaacttatcgaggaaaatgcggaggagtattcggtaatctatctggcaatcggtaaaaagcttcagggcatcctgtgcatcgcagaccctgtgagggacgaagcccatgaggtaataagtcagctgaaggccttaggcattgaaaacgttgtgatgctcactggggacagcgaaaacgctgcaaaacggatagccaaggacctgggcatcacccggtataaatctcaagtgctgccagaggataaggccagcatcattcaggagattaaagccgaaggccatcaggtgatcatggtgggggatggaatcaacgactctcctgcattaagtgctgctgatgtgtcagtggctatgcgtaacagcagtgacatcgcaagagaagtggcggatatttccctcctctccgatgacctctacgacctggcgacgcttcggttgcttgccaccggcatgctggacaagataaatactaactacaggcacattgtcatgtttaacgggtcactgatcgggctcggattgctgggagtcattccgccgacaaccagctcactgctgcacaacctgtcgaccatgctcttcggatatcgcagcactaagtcggttctcggtgaaaaagaagaggtcgttatcgatacaaacgtgattaataatgatggtgctttgattggccaatccggcaaatga

SEQ ID NO: 2751 - DNA, 279 bp, synthetic construct
  source 1..279: mol_type = other DNA
atggtcgaccggcatgaaattgtagacaaaatgtatgagaacaaacacacgctgctgttcgtcggcggaattgcaacagccatcgtgggggccaagatcctgaaatcccagaccacaaaggattacgccgcgaagggcatggcgaaggttctcacctgcaagagcgatctagaagaaagcatccaggacataaaggacaatgccgaggacatacaaaccgatgcaaaggctgctcagaaagaggccatctgtgtggatgtgactgaggaggaggaatga

SEQ ID NO: 2752 - DNA, 234 bp, synthetic construct
  source 1..234: mol_type = other DNA
atgatcaagaagctaagcgagctcaaatcaggagagcagggcaccctgagttcctatgggacaggcggggacctggaactgaaaaggcacctgctcggtatgggcttcataaagggcgcagacatcgaggtcgaaaaggtggccccattgggagaccccatgcagattaaggtcaaagggtacagcgtatgccttcgcaaagaggaagcgcggaacatcgatgtggaggtgtga

SEQ ID NO: 2753 - DNA, 2016 bp, synthetic construct
  source 1..2016: mol_type = other DNA
atggccaacctcaagataggcctcgcaggcaatccaaatgtcggcaaaaccaccctattcaataacctcaccggtttaaaccaacacgtgggtaactggcctgggaaaaccgtcgcccaggctaaaggttcctacaaacatagtgggaacgaggtggaggtcattgacctccctggcaactatgccctgagcgcgcatagtattgaggaaattgtgtcacgggactttatcgtagatgaggactcggatgtcatcgtgaacattattgatgctgcaaacatcgagcggaacctgtacctgactgtgcagatgatggagctcggagctaacctggtagtggcactgaatatgaacaagtacgcccaggacaagggctacacaatcaacgcagataagctgtctgagctcctcggagtgcccgttgttgaaattgaggctaatagtgatatagggaaagagcaactccttaaaactattgaacaggctgccgccaaccccgtagactcttctaagaaactggtgtataacaatgaacttaaagagcacctcgctgagctccaggccgtgattgaagaggacaaaaacctacttgatgtgccttcatcttggattgcaatcaagctgctggaaaatgatgaaatcgttgaggagaagatcgaaggctcttcaaagagaaacaatatagtgaatgaaacacagaaggtcaaggaccacttgaagggcatatttggcgaaggctccgaagaggtcatcgcaaatgccaggtatgccttcattgacggactcctgaaggagagcctcaccaagccggaccacttgaaaaccacgataagtgagaagatcgaccgcatcgtgacaaacaggatattgggcttcccgatattcctggttataatgtatgctatgtttgagatcgtgtttacgttcggcgcacccttccaagatctgatcgacgaattttttggaatcctgggggatgccatcatcggctcccttggagagacaatgcttagctccttcctagtcaatggccttatcggaggggttggcggcgtcttggtcttcctgccccagatcattctactgttcctgattattagtttcctggaggattgcggttacttagctcgggctgccttcgtgatggataagctgatgcataagtttgtgggcttacacgggaaggcctttattccaatgctgctgggaatcggttgcggggtgccagggattatggccacccgtaccatggaaaacgaaaaggaccgcttgatcactatgctgattgttccattcatgtcctgcagcgccaggatgcccgtatacttactgcttgtgggggccttcttcgctgcgaatgagagccttgtcatcttctcactgtacctgctgggcatcctggtcgcagtcatcgttgccttcatcctgcgaaagacgacatttaaagaaatggacgctccatttgtgatggaattacctgactacaaactccccacaatcagaggcatcataatgcacacccttgagaagtcctggggcttcatcaaaaaggccggtaccatcattctggtggccagcattgtcatctggatgctgagctacttccccgctggggtggagtacggaagcgccgactccgcaatcggtacgatcgggcaggtcatcgcccctgtgtttgcgcccctggggttcggcgaatggcagcccgcggtggccttgctctttggtctggttgctaaggaggtggtggtcggtactttcagctcgctctttggagtggcagaggagggagccgagattgccgcagcgatgcatggaatctttactcctctaaccgcgtacgtattcatggtgtttgtgcttctctacattccgtgttttgccgccttgggggcaatcaagcaggaaacaggcggatggaaatatccattgctgatggctggattgactctggtggttgcctatgtggtagcgttcatagtgtatatgattggactcgggctgggcctggggtga

SEQ ID NO: 2754 - DNA, 198 bp, synthetic construct
  source 1..198: mol_type = other DNA
atgcaatgcagtatgtgtggctacgagttcgacccactagagggagggccgtgcggcgcctgtggacagtgtaagggctgcaacaaggctttctgccccaggtgcggttatgggaatagcctcagcaccgtgaaggaatttgattacatctccaaactgcaggcgaaactgcgggccttcaaatcaaaggcaaagtga

SEQ ID NO: 2755 - DNA, 627 bp, synthetic construct
  source 1..627: mol_type = other DNA
atgcatatacctgatggttttatccctctctggcagtgcgcgatctactatgtgatcttgatcattgccctgtatttcgccggcaagtgggccaaggccaacctagacgaaaagcgcatacccctgcttgccgtgctcgccgcggggatctttgccattatgagcatgaacatgcccattccatttggcacgagtggccacatggtcggtggggcactggtggctatcgtgttcatggcgccagaggccgctgtcctcgtattcaccgccgttctgttgatccaggccttattcttcggagacggggggattaccgccttgggtgcaaatgtatttaacatggctatcgtgggaggctgtgtcgggctgtacacctacaaaggactgaacggcatcattggaaaatatccgtcaatcttcctgggcgcatggctggcaacactggttgcagctgtggtctgcgcgcttgagatggctattgcaggcactttccccctatccgtgggcgtcgctagcatggccctttaccacgccttcatcgggctcatcgaaggagtgctgacagtgattgttatatttgctctggagaagtacaggccagacctcctcgcctggaatcgggagtga

SEQ ID NO: 2756 - DNA, 294 bp, synthetic construct
  source 1..294: mol_type = other DNA
atggagctgagtaaatccgacaaatatctcatcgtcgtggggatcatcttctgccttgcattagccgtactcagcccgtacatcgccagcggagacccagacggactcgagaagtcagccgaagatgccaacgttggcgaagatgtggaggctcccgtgatggaagctccatttcccgactacacctatgagcctttggagaagataggggagatcggcgtcctgattctaggcgcgctgattacactgattgtggcctggggtatagggtacgcactgaagcggtctgaatga

SEQ ID NO: 2757 - DNA, 831 bp, synthetic construct
  source 1..831: mol_type = other DNA
atggcaattgaggaagtgcggaatttggaggtgatcgcctcgaaggacactatcattcacaacttggagggtagggttaaactcattgccatcctgctgatcatcgtgttctgtgtgttttcagacaggctaatagttccccttgtgctggaaatattcctgctcattgtaatgtacctggcagaactctcctttaaggacagctttaaacgcatcgctctgctcctgccattcggtgggttcgtgatcgccttccagccattcatccaccctggcaatatcatttggcaagggccttatccctggttgtttatcaccgacactgggttaaactggacagtgctcctttttgctcgcttgatcgtctgcctgaccgcgattgtcatcctgagtagcacctccccaatgcaggaggtggtgcagtcatttagaaagctgggaatgcccagagatctggccatgattctcacaatcatggtcaggttcctatttatcttcgtagatgaattacgggacatccgccagagcatgaagtctagaaacttcgatcccttcaataagaaaattccgtataaatggcgggtcaaacaggtgggctacagcatagcgatgatgtttctgaaggcatacgaaaagggagagaccatttatcttagtatggccagccgatgcttcagtgacaactcccgactgtaccatgccaagacgataatcggaaagcacgagtacatatttctagcttgcgtgattggcatcgtcattgtgcttgagctggttgtcctgttctattctggcaacctggattacctgggcgtatccctctctctctga

SEQ ID NO: 2758 - DNA, 1350 bp, synthetic construct
  source 1..1350: mol_type = other DNA
atgtcgctcatttattctattacgagcacaataacccgtaatatcgagaaaatcctacgcgagtccctgttgttcacaatcattttcaatatcctcgagttcattgaaaatcagtgggtcaacagttacttcaagggcctctaccctagcgaacggttcttgagcatcgtgaataagagtaagatcctcaaggaggagatattctcacccctgatcgtactggtcaccttcacgctctttatactgctggcaacggacccggtcccaagggatttgcagaccactataatcatcgctttcctcagcttttttattggcgcgattatctttccaagatttattctgaataatcagttgaaccaactcaacgatgaaacgaacaccgacaacaaagaatcaaagactgacaaaagcaagcagatccccttattcaattcctacgacgtatatagtatcggattctgcctgtccctgattggcattgtctttctgtttttgagcattgcctccgtgggggggctgcccattctaaagtcctcattaagatacagtcttaagcccgcatttacaatgccggtgtttctgattatccccggtatcggccttatggcttcacactatctcaaccagtacaagaataacgaaatcagccgctcccaaaccagattccggttcctggttctgactgcgatcggcatcggaactgtccttacactccagtaccggaccccaatcatcgccatcctgcttatgatgattatcattggatattacggtaaaatactatcagtgtgggaggtcattctgggtgccctgctgggcgtatgtgccatcatcggcattggatatttacgaagcctgaatgagcttgccattagctcgaacacaaatatcttctccaccttaaacagcagggccaacttcaccatgcatgtgctgaacctactgaactatattagcgggaacttcgggttgatgcacggaaagatgatagccagcgccatgcctggcagcgatctggggccacgcatgatggtgggcaaactgattgcttggaggacagaggttactgtgacccctacactcctcggacagatgctcgtggatttcgggaagctgggggtggcagtggagatgtgcctgcttgggttcctcctgggcactggatataaaatagtgaaaatcaccgagaactctttttacatagccctttacggcctgatcctcacctattccatcgtgggtgttgaaaccggaatcctggacatacagatcttggcttacttctttatcagtgcttttatctactttgcagttattctgaaggacaaaggcatccgaatctactga

SEQ ID NO: 2759 - DNA, 792 bp, synthetic construct
  source 1..792: mol_type = other DNA
atgaaaaaacccgggatcttgaataaaattacaatcattgacattctcataataatctgtatcatcggagcagtgggcttcgccgtgtaccacatggttgatgacgactcaaccaaggcttccgcgacctcctttgactactcaaccaacaataagatgctggagacgtatatgaattactacaaagatggaaagatcgtgaccagctcgctgattgggactaaatcaaacaccggcgagaagatcgaaatgaacggcacagtcctatggctgggagacaaccagaacgataaggtaaacatcgagatcaacaacgacggcaagcctatactcgctggtttctacaaagacacgccaaatgcagatgtctttattgaacagatcagcttggagacgaatggggacagctatgccaacatcacagacttcgtggtgagtccaaaggagattaagaatctgaaggaaataatatctaaaattcccaatgataccgaatatgagatcagtaccagcatcgccatcgatgaccttgattccgttactgctcaaaagctcgcaaatgccctgaataaaaataagaagccgtgcattgtcctgaagaacagcggcaccgtaatccttgaagtcaacagggccaaccagactgattttgagattgctgacaacgtgctgggggacttcaaaggtcagacaagcgagatccagattcggatctacaactctactgcccaagattccatagacattcagaatgccttcaacgtgttatccatcgcgaacacaagtcattga

SEQ ID NO: 2760 - DNA, 162 bp, synthetic construct
  source 1..162: mol_type = other DNA
gtgatcgatctcgacgagtgcggtgtgtgtgagaaatgcattcccgtctgtccgaaggaactgattgagaagaaggggtataccatgatcataaaagacggctgcgatgactgtggcatctgcctagacatgtgcccactgggagccatctacgaggaatga

SEQ ID NO: 2761 - DNA, 984 bp, synthetic construct
  source 1..984: mol_type = other DNA
atggcgggcctgatcagcggaattgtggctttgttcaccagctggctaggggtctcgggaacagtcatagggagcgttttcagctcatttctgtaccagttcctgtcatcctactcggccgagaagtatgaggagcgagtgggggaaggaacctccaggaagcccagaaacattggcagcgaaatcgtctacatctttccaatcgtggtcatcgtgataatcgaagtgatcttcatcctcagcgacatgcattatgtctttgataagatctttgacattctggagtatgggatattccagaacaatctctttaggcttatgggtctgggcctgattgctctgggggtgtatccattgctaagctccactaacattgaaaagatcaacggcgaaatcgtgcttgttgccggaatatacctcttcatcagaggcatggtggacatcaatgacttgaccatgcaggtgcataacatgttcttcgccgacttcgacttttttattgcaatcatcgtagtgctggccctggtattcgtaattttcaatgttcttcgcaattctacacaggaatactttaacaaggaagatggcgactacgacgcagtgaatgacgagttcacgcaaaaacggttcagcaagcctcggcggaaatcaaaagcgcgcaagattgacaccagttccttccacaagggccaggagtacaaagagcactacctcaacagtgattttaatgataagggtcacaaccagagtcccaacccggattccaatatggatgattaccataatgatgatctgaacaactaccaaactccccaggaggatctgcctatctatgaagaggagattatttatctccacaatccggaggaccctaacaatccaataaagaaacgcatcttaaaacgtgtcaaccccgacagccactacgatgatgactatgacgagacatacatcattgacgacgccaaaaacgacaacttttga

SEQ ID NO: 2762 - DNA, 318 bp, synthetic construct
  source 1..318: mol_type = other DNA
atgcgattctgtccaaagtgtggcaagatgctcatgcctaaaaacgatattctgaaatgtgcttgcgggtacgaggaaaagatctccgcggaagtagccgagagggagtataagttcaagggcgagaggaagaaagagaataaggtgatagtgacagacaataataacattgcactgccgaccactaagatcacctgctacaaatgcggaggcaccaagggggtgtggtggacagtccagaccagaagcgccgacgaagcccccacgtactttatccgctgcgtcaaatgcggaaacacttggcggcggagcaactga

SEQ ID NO: 2763 - DNA, 894 bp, synthetic construct
  source 1..894: mol_type = other DNA
atgaccacgaacgacaaagtctctgattacatcagctttcctaagacctttgaaagctataggtggtacaagccgattctagtgtttatcatcagtttcattatcaccctgatactcggtgccctgatcgtggcggtgttttatctgatcatgggtcctgatttcattatctccattttcaaagggggagctgagagcttaaacactagcatgaacattttcttcaccgacctgattattattgcattcattcccagtttgtatatcgcgtcaaagatcgttaaggaccggcccttttcctcctatagtagctcacgagggggatggaacttccgcctctactttaaggcactggcaatccccgtaattttgtatattatatacttgggggctgaaagcctcatcctcggatcagaaggcacatctcatttctcgatagcctttcttgctgtgcttttgatttccgtgccactccagtgtatcgcagaggagtatatattcagagggattatcatgcagacactggggtcctggattggcatcccactgatcgccatcgtcatccaggccattatctttactctcggccacggatacgacgccctaggactccttgagaccctggtgctgggtatcgcctacggcttctttgcctggaaaacaaacgggatcgagataagtagcgccctgcacacggcgaacaatttcagcctgggcctgttcatcatgctgggcctggaggcttcaaattccagcttccaactgtacgataagatcggaggcatcgtctacctgatcattctttgcataataatgtactacgttggcaagaaaactgattggtttggtgagatcccagaagactcgcagaatatcggcttactcaatttctga

SEQ ID NO: 2764 - DNA, 522 bp, synthetic construct
  source 1..522: mol_type = other DNA
atgatcgagattcgctttcacggccggggaggacaaggggccgtgacggctgcagaaattctggccaaggccgcctttaaagatgggaagtacagccaggcgttccccttcttcggggtggaacggaggggcgctcctgtgatggcatttaccagaatcgatacagagcccatcaacctccgatatcaggtctacaatccagaccatgtgatcgtgctggacgacggcctccttaatgttgtggacgtctattccggcctaaaagagaacggcgaggtaattataaacactcacgaaaaagtcgagagcgagagtcacaaggtcttcgacgtggatgccacaggcatcgcattggaaattctgggtgtgaacatcgttaacaccatcatcctgggatactttgcgaaaaagaccggggaggtaagcattaattcactgatagaggtcataaaggaaactttcccgggtccaatcggagagaagaacgcagtggccgcccagaaggcttacgatatggcttga

SEQ ID NO: 2765 - DNA, 243 bp, synthetic construct
  source 1..243: mol_type = other DNA
atggtgtccatcgggtgtgccatttatgaacctggcagcacgcgcaagaacaagacagggagctggcggacctttaagcccatcctcgacaaagacgcgtgcgtagattgcaataactgtctgatgttctgcccggagggatgcgtgaacaaggagcacgacatcgattacgactactgtaaaggttgcggcatttgtaaggtcgagtgcccagtgcaggcaatcaaaatggaaatagagtga

SEQ ID NO: 2766 - DNA, 1149 bp, synthetic construct
  source 1..1149: mol_type = other DNA
atggcaaaagaaatcatgaccaccaacagagcagttgcagaggcggtgaagctggcaaaaccccaggttgtgccggtgtaccctatcacgcctcagactacaatatccgagtacctcgcccagtttgttgccgacggcgatttggacgccgagtacatccgggtggaaagcgaacacagcgcgattagcgccacgctgggcgcctccgaagcgggagtgcgcgtattcaccgctacttcatcacaaggcttgatgctaatgcacgagatactgttcgccgctgcagggatgcgagctcccatcgtgatggccgatgccaaccgcgccatttctgctcccctgaacatctggaacgatcagcaggacagcatcgcccagagggacgccggatggatacagctgtatgtggagaatgctcaggaggctttcgacaccgtgttgcaggcctatagaattgcagagcatgaggaggtcatgcttccagtcatggtatgtttagacggatttattctgacccacacagtcgagcctgtcgatctcctggaacaagccgatgtggatacattcctcgagccatacgtgcctaagtttgcatttctggacccggagaaaccaatgtcgctagggaacttcgccgaccccgagtattacacagaggcacgacatgacatgcaagtggctatggacaagtccatggatgttatcaaggaagtaggggcggagtttggtgaaaaattcgggcggacctacggcctgacggagccctacctttgcgacgatgccgagatcatcctggtctgcatgggtagtatggcaagtacagtgcggtatgtggtcgataatctcagagagaaaggcgaaaaggtaggcctcttaaaaatcagggcttacaggcccttcccattcgaggaaattgacgaaattgtcaagaatgccgataagctggctgtgcttgacaagaacttcagctttgggatcgggggagcgctctttgctgacctgaaggccaaatgccacaaggaaacctatggattcatcttgggcctgggtggacgcgacgtgattcctgagtacatagaggaagccgtcgaacttactaaaaatccagtgaaggaggttacttggctcggcctgaaggaggatgaatga

SEQ ID NO: 2767 - DNA, 867 bp, synthetic construct
  source 1..867: mol_type = other DNA
atggagttccctgaagaggaattgctggcacccgggcacagaggctgcgccgggtgcggcgcagcgatcgctgtacgcctcgcccttaaggcactgggcaagaatacggtggtcgcttgtgccacgggttgtttggatgtaatgaccagtccttatcccgaaacagcctgggaagtcccatggattcatgttgctttcgagaatgccggggcagtggcctccggcgtggaacgggcactgaaagctcagggaaaggaagatgtcaacgtcgtggctttcgggggcgacggaggcacggccgatattggtatccagtcactgtccggggcaatggagagaggccacgacttaacctatatctgttacgataacgaagcctacatgaatacagggatacaacgaagcggagctacaccttacggtgccagcacaaccactagtccagccgggaagcagagcttcggcgaggacaagccaaagaagaacatggccttcatcatggccgcgcatggaatcccctatgtggcgactgcctcgatctcctatccggaggactttatgaaaaaggttaaaaaggccgctgagaccaaaggtccagcgtacattcacctccagcagccctgcaccacaggatggggattcaagcctgagcagaccattcagctgggccgtctggctgtggagaccggcgcctggggactctttgagatcgaaaacggcgaatttcgggtgacttacaggccccaggagcgcaaaccggtgaaggagtacctatctgctcaaaaaaggttcaaacaccttgacgacgagcaaattgcaataatacaggagtttgtggacaaccagtgcgaagagctggggatctga

SEQ ID NO: 2768 - DNA, 501 bp, synthetic construct
  source 1..501: mol_type = other DNA
ctcgagaaactaatagtggacaatgagctgtgcgatggctgccaggattgtgagaaggcctgcgcgggagtccacggggtgcctcgaatcactatccatgaactggacggttcttacttccccatccggtgtcagcagtgtgaggacgctccttgtgaaatcatctgcccaaccggggcgatgtcaaacctgggagtggacgtgaccaagtgcatagcctgcggcttctgcgccatggcatgtccgtttggagccatcagcattcagtacagcaacgctcacaagtgcaaccactgtgcagatagagaggagggtcccgcctgcgttcgcgcctgttccaagagggccatcgcagtccatgacattgcaaatgtgatcaaaaggaaacaaagagaacacattgagaagatgtatggcctggacaagcccgctaaaaagaaagggcttctcagtgtaattacaacggacacacgcgctcggaagccattggatggcgaatga

SEQ ID NO: 2769 - DNA, 429 bp, synthetic construct
  source 1..429: mol_type = other DNA
atggatgagctgaaagtcaacccagagctgtgtgtggactgcggcctgtgcgaacgcaattgccctaacaacgccatccgggttcacgacggggtcccactcttctgcatgcactgcagccctgagaaagcgccctgccttgctgtgtgccccaagggagccatagtggccctcggcggggcaatcacaattaagcaggataaatgtatcggctgtggcctctgtcatagcgtatgtcccattggggctgtcaccatcaatgagatcggtcaggccacaaagtgtgatctatgcgcagactacgacacccagcagtgcgtggaagcctgtccgacccatgcgctgactaacgatacggaaaagatcattcacgacaaacaggagaagatatccgaaggatttaagaaggtgcaaactctgttgaaatga

SEQ ID NO: 2770 - DNA, 435 bp, synthetic construct
  source 1..435: mol_type = other DNA
atgaccttcatgaataacggcgcgaatataaaacagttccaactgctcaaattcatcaacgagaactgcaatgatgatcacgtcatttccaagatttcaatcgtgctgcgccgagacaagattgaggccccctactacatgaacacgaaaattagattaagcacatgcatggatggggaggaaaagggagtaatccatgcaatggacatcctcaaccacagcaggaagcacaatctctgtgagtacaaatatgacgaaatcaaaagtctaatctttgacctgttcgatagcgaccacaagtccgaccaggtggaatttagtcagaacgacaaccggttgaagatatcgtttatgagcaagaacgatgaggagttccggaatcttttcgaaaactatcatgaactgtttgagaagatcgacggcctggtggattga

SEQ ID NO: 2771 - DNA, 255 bp, synthetic construct
  source 1..255: mol_type = other DNA
atgtccgatcccctgatcataaagaaggagctgctgttcaatgaatacaccgggcatgaggatggaaactgtctcgagtgggtcgacggccggctaagcaatagcgatgaccaccaccgcatcccatgcaaccttgaggatgcttttgaaatcgcaaagaaacaaaaagccgtgctcgtgatccagccggaatttcaggagcagtgcattttcgccgacttcacaggcgaagagattgacgagaactgggactga

SEQ ID NO: 2772 - DNA, 840 bp, synthetic construct
  source 1..840: mol_type = other DNA
atgatcactgagaagcagatcgaagatactatctatcaattgtacaaacaggccgctatcgtcctcggcgatgatgttaaaagcgccctggaggatgcgttaaaacgggaggacagtgagctggggcagctcaacatcaaagccatcctgaagaacattgaacttgctgaggaaaagtcaattccgatgtgtcaggacacagggctacctatcattttcgtaaagctgggtaatgttcaggtggaaaacctctacgagggaatcagaaaaggggtcgcacgggccacggaggaggtgcctctcagaccaaacgtggtggaccccatcacaagggtgaactctggcaatgtgggcgataaagtgcccatcgtggacatagagctgatagacgaagactacattgaatttaccatcatgcctaagggattcggctccgaaaacaacaatgccttaaagatggctctgccagctgagggcatagaaggtgtcaaggacttcgtcgtggagaccgctcttaaggccggcggcaagccatgcccccccatcgtagtgggtgttggaatcggcggtagctccgatatggcgctgaaattggggaagaaggccctcctgggaaaagtgggagagcgcaatggcgacccaaccctggccgaggtcgagctggaatgcctgaatcgaataaacaaggatggaaaagggcccatggggcttggcggacgtaccacggcactggatgtgaagattctaaagatggacactcacaccgcagggctcccgattggcgtagtcattcaatgctgggcagaccgccatgcgacagcccggttgagggacgactga

SEQ ID NO: 2773 - DNA, 1590 bp, synthetic construct
  source 1..1590: mol_type = other DNA
atgatcctcattataaccggccacctcgcctaccccctggtcaaggagatggcggataaatcaaaaaaggaaacggtcgttcatatcgcagagactcaagtggcggcttttctgacgcccaatcagattattaaggagatccacgagtacttcgaagacagattagacgatattgatctcatcctggtgccaggtttaataagaaaagacacattcctgattgctgaggaatttggaatcccctgttacaaagcctctacagatgccgcagacctggctatggtcctagacctggtggatgagctggaactgtcccagtcaacacccgctgataagctgatcatagaggagaagaagaagcaggccttgaagttcatcgaagacttcgaaaaagacatggagaagcgggaggagctactgaaaaaagagaacaatattctcgtccgcaacctgcccgtgggtgaggatttcccaatgagggtactgtctgagatcgcttccgcccctatactgagcaaagaggacctgattaaaaaggccgagttttttgtcgcctccggctctgacatgatagacatcgggatgattgccggggaggaccgttccgatgagattcccgacctgattgacactctgcggccaatcgtgggagacaggcctctcagtatcgataccctgaacccgaaggagattgaagctgccgtaaaccatgggattgacatgatcttgtccttagacaatgggaattaccacgagatcctgcctttgctcaaggaaaaaaatgttcctgccgttatcttgcctacaaacttctcggaaggctatgtgccccacagtcccgcggatcgagtggcgtcgatgcagaaacttgtggaggcctgcgatggcctggaagtggtctgcgacctcatactggacccagtcaacagcgccagtcttgtggattcaatcatcgctttccacgatttccacgaggtggataaaaagccgatgttctttggcataggcaacgtgattgagcttatggataccgattctgtaggggccaatgcagtgcttgcaggtatcgctatggaactcggagcaagcatcctattcactccagaggagagcggaaagactcatggcagcgtccgcgaactcgccatcgcatcaaagatgatgttcctggctaaaaaccggcaatccattccgaaggacttgggcgttgaccttctcgtattcaaagacaagaagaaaaggtttgacttgaagcaggatgacaacgttcccatcgtgaagcaggaccgaccgatcaagttcgtccgggataaggcaggaagctttaaaatacgcgtggaacacggcattagcgttaaggattcctatatcgtggccacgcacttcaagaagacaaagccaaccattagctttgaaggaaaaaccgccagtgaaatctacgaggagatcatcgagaaagggctggtgaccagactcgaccatgcggcctatctgggtaaggaactcgaaaaggcagaaatcgctatgcttaccgggaaagagtacgtgcaggactttgacctattcaaggaccctgaagagtttatctga

SEQ ID NO: 2774 - DNA, 357 bp, synthetic construct
  source 1..357: mol_type = other DNA
atgaacatcaatggtgatttgatgaataagaagattacggtagacattttgatgttcatcgccatcatagtggaatttctgagcctgcccatcctaatccatgagatcgtgggggtgggcctgctcttcctgattgcactgcacctgaaatacaacaagcggtactttaaaacaataggcaaagggaaatacaaccttaagaggaccctcaaccttatcatcaacatcgggctcctggcgtccttactcattaccattattagcggaatcttctcgagccagaagagcctgaagggcatgaagataggaaatcacaagatttcacacatccataaaagttccagctatctggtctga

SEQ ID NO: 2775 - DNA, 1161 bp, synthetic construct
  source 1..1161: mol_type = other DNA
atgaacgccaatcccaagatcctcctgtacattctcatgatttcggccctgggaatcaacactccactcagcattgtcgggatcatctcccaaatcgcggagtatttcaatacatccatagccattagcgggctctatgtgagcagcttcacctttaccatcgccatctgcggtttgttcatccctgtgttattcagcaaatacaaccggaaaaggacctttgtatccattttaaccgtgtttgctatctcaaacattgccatcatctttactaaaagcatttacattgcctctttctttcgcatcctgagtgccattttttacccggcgttcatctcaatagccctgacggtgtgcgaagaaatcgcccccaaaggagaagaacaagattacattaccaagattctgcttggtatatcaatcgggagcattgtcggcctgcctatcacaacgggccttgggacaatattcaattatcaggtggcaatgtcatggatctttgccatcaacctactttccctgatattgatcatcatcttcttccccaagatcaaaggcaaggctaaaagttatgagatgccgttctccagtctgaagtcgaaggagtttctgcttgctacaattggcataatgatgatgcccatcggcgctagcatagtttataattaccagccatacttcctgcaggttgtcagccacgtctacacctataaactcagcatcttcctattcatttatggactgttctccatctttgggacttggctgggcggcaagctgatcgctaagagagacaaggcgaccattctcattttccagttaatctgtggaggtgtgtttgtgctcctgtacctctttgcaaactatctgattcccgtcctcatattgattctaatatttgggatcttggatggaatgggctacaacctcatccagtacattgagagtagcgtaatcccagacagtccagagctggcaaacggcgtgtttctgagcattcttaatggaggcatcgctctgggcatagccatcgggggtttcttggtggacgggtttggcataatgtccatcttcattttcggagcactgttcttgctgcttgcattcatcatcctgtattacattattggaatcatgaagatgcctctgaagtactcttga

SEQ ID NO: 2776 - DNA, 873 bp, synthetic construct
  source 1..873: mol_type = other DNA
atgacagatgaagaactgaccatcgaagaaatagagaaaaaactggagagtacgggatacatctccaacaaggagatcagcacttcggtctttctaagcctctccctgaacaaaccgatactgattgaaggcccccctggagtgggcaagaccgagcttgccaaagcgctggcccaatctttagagcgggacttcttccgcattcagtgctatgaaggtattacctttgagcagatcgtgggagagtggaactaccagaagcaattgctccacctggaggcgttcaaaggcagcaagaaaggggaagattccatcttcgaggaggacttctttatcagaaggccccttctcacctctttcatgaacgagaagccaagcctgctgctcattgacgagatcgataaggcagatgaagaggttgagagcttcctgctgcaggctttaggtgaaaagcagattacagtcaatgacttggggacctttgaccttcagaatgacttggtggtgatgctcacgtccaatgcccagaggaatctccttgaggagactaaggaccgttgtctgttcctgtatatctcttacccttcagttgaacgggagatggctatcgtcaaagcccgcctgccaaacgcagaagatggcttggtgaaaaaggtggttaacatggtgcatcggatcaggacttttaacctaaataagaaacccagcgtacgagcttcaatcgattgggtgaacagtgtcatgcacctcgataaggactataagaacgtggatgccgccctggaggacagtgtgggggtagccattaagacagagccagacaaggcaaaggtcgtgaaagagatatttagaaacgaatacatgaatgactga

SEQ ID NO: 2777 - DNA, 1161 bp, synthetic construct
  source 1..1161: mol_type = other DNA
atgacagagcgcatcgtccggctgagtaatgacttgcgaaaaaagggcatgcctgtcagcatcaggtccactcagactgccatagatgcctacgcccttctgggggaagatgatctgccaaccctgaaggatgcattccgctcaatttatgtcaaaagcaaatacgacattccaaaattcaatgagtcatttgacggtttcttcaccaaaaagcaggtgaaaaacctcaccgatgagctgaataaatccagccgcccaaacagcatgaaaggcaagttgtcccagcacgaatggaaaatcaccaaacaaaaaggcaaaggcggcaagcagatccagatgggggctgagcaagcgatggagtacttcgccggaagacctgtgctcgaggaccgggacaaggacctggccagggacaacgacatcttaaacagtgacctatcgaagctgaacaagtacgatgagcgtgtatttgagctgtgtgtagagcttggacgaaagattgctaacaagcagtcaaggcgaaagagactggcccggtccaataagattgatatgcggaggaccatgaggcagaacatgaagtacggaggggtcccgatagaccttgtccacgtcaagaagaagccccatcggaagcagcacctcttccttaacgatgtgagcggttcctgcgagtggatcagcagctggtttttcatgctgatgtttgcctgtcaaaagacattcaaagactcgcggatgttcgaatttgataacaggacaatagaaacgacggaatttctcaaagaaaagtatatggtgaacgcgttcgcagaaatcagactcctacgtatgagaaatatgatggtgagaggcacctccaatatgtacactgccttccagagttttatgaaacaggcggacattagcaataagtcttatattatcctcctgtcagattgccgcgattgggctggccccaaggtggacggggtgcccgccagtgtagagctggtttcccaaatgtctagcatggctaaaaagttggttatcctcaaccccgaggacaagaagaagtgggatgtggttgacagttgcgtgtctttataccgcggagcaggggcacaggtgtatgaagtgagcacactgaatcagctggctgagtttgtggccgacatgtga

SEQ ID NO: 2778 - DNA, 918 bp, synthetic construct
  source 1..918: mol_type = other DNA
atgcagtcttgcactaaatgtggcaacccaaagatcataataaaaaaaccggctagcggacaggccctgtgcaaggactgcttcatagagagcatcgagaaaaaagttcgccaaaccatcaagcgggaaaactttatcgataggggcgataaggtgttagtagccctctccggcggaaaggatagtgtcgtgaccctggatatcctgaatagctatcgtgagcgccacatcatagacctctgtgccgttaccattgacgaaggaattgcagggtaccgggaagatggggtggagattgccaaggcacatgccgagagactgggcatcccccacaaggtcgtgtcattcaaggaaagtttcggaatcgacctggacgagatcatggccaaagaaaaccacagaggctcatgcacctactgcggtgtcttcaggcgatggatcatcaatagggctgcacgcgactttggggcgactaaaatagcaacaggccacaacctggatgacgagacgcaggctatcctcatgaactaccttgaggggaacacagaaaacctcgctaagattggtcccaagacagagtcgaatgacgagttgttcacagtgaagatcaagcccctgcgggaaatcccagaaaaggaaatcggtctttacgctattgccaaagggctggatattcacctggcgggctgcccatatgcggaggagagcttccgaatggagatttccaatattctcaaagacctaacgaaggatcatcctactatcatgtatagcaccctacggggatttgacaagatgagacccgccattaaggaagagtttaaatccaattttgtgtacaaacgctgtgagcggtgtggcgagcctagctccaacagactttgcagggcctgtaccttcctggaagagttggactga

SEQ ID NO: 2779 - DNA, 201 bp, synthetic construct
  source 1..201: mol_type = other DNA
atgagctttaagctgaaaatcaaggacaatgtggaggagcgggaaatagatggagagctgacaattaaaaagctgctagacgacctcgatctctccagcgagaccatggtgacgaaaaagaacggggaaatagtcattgaggaggaaaccatcgaagacggtgatgaaatcgagttcatccagatcatttacggcggctga

SEQ ID NO: 2780 - DNA, 720 bp, synthetic construct
  source 1..720: mol_type = other DNA
ctgtctagcaatgctaccggaacacggattcaccagtacatcaaaaaggaaacgggctgttacgacccctatttttaccaaaagaaggagggcaatgagattgcattatcactcatgccaatggtgcgcgagatcctgaaggaggacaacgacctggaaacctacgttaagatagccatcgtggggaatattcttgatttcggcacttttgatttggatacagacttcgaatcactgatcttcgaggggttgaagaaagagttggtcatcaacaaaatcgacgagtttgaagaggccttaaagaaatatgataacgttctttacctagtggacaacactggtgagattgtcttcgataagcttctgatcgaaaagataaaggaatacgatgtggacattaccgtggcagtaaaggaaaggcctatactgaacgatgcctgcatggaagaggccctggaggctgggctggacgagattgccgatctgatcaccacaggctccgactcggtaggcgtggtcgaatccatgatctccgatgagttcaaggagattctactcgacagtccgtttgtgatcagcaaaggaatgggaaattatgagggactgaccgaaatggacctcgacggtcaggacgtcttcgtgctgttctgcacgaaatgcaacgcgatcagcaaagacctcgggctgcccgagggcagccatatcctcagtaaactctga

SEQ ID NO: 2781 - DNA, 825 bp, synthetic construct
  source 1..825: mol_type = other DNA
atgaaattcggttttattgggtttggggaggtctcatataccctctccaaactgctgctggcgctcgactttgagatcctcagttctatcgaaggacgttcccagaaaacgatagacctgattaatagcctggacctgacccttcttgatagctttaaagacgtggccaaggagtcggacgtgttgatcagcgccaacagtcccgatatcgcgctcgatattgcaaaaaactacggcaatctcacaaacggcttcttcctggatttcaataacatttccccaaaaactgtgttcgaaatcgaggatatcttatccgatgacaagttcatcgacagcgcaatcataggcagggtcaactcggacgaattgaacatatacctatctggaagcaaggcccagttcctcttagataagataaagaaagagattggtagcaaagggattgacattaacaagatggactttaagatcaatgtcaagctgatcagtgataagatcggcgacgtttccaaactcaagatgctgaggtcttcatatacaaagggagtgagcgctctgctggtggaaagctttgagttggccgagaagttggatctggaagaggagctgtgggagattcttagtctaactgaaaaccgcgatttcgagagaagctccaagtcacggatcgatagttcaaagaaggcttccaaacggagatatgaggagctcgtagaagttctgtacttccttgacaacgtggacaatgtggacgagagcaagatcatggctcgagccaccaaagacaagttcgaatacctgaaaaaccgcgaaaataaggagtga

SEQ ID NO: 2782 - DNA, 1299 bp, synthetic construct
  source 1..1299: mol_type = other DNA
atgatagcgattagtgccgatttcgatccagtccacaagggccatgagcagctcatcaaaaaaggaaaggaaatcgctgaagagaagaacagtaagctagtcatctacctgaataaaggctatagtgcaaaccacgccccattttttacgccatttgacgcccgctgccgcatggcaaaggccttaggggcagatgaggtcgtgggggtggagggcctgcaccacagactcattctgtcttactccgtgccgattaggctcgcgcagatgcatgaggatggtgttaccgattacatcactgcagccgacattagcctggaagagatcaaaaactatgccgagcgtttcatcaatgaagggagctttcttggaatcccacaggactttccctcccgcaacgtaatacgttggtatgctatcaacgagttcctatcgaagaaattcaaccgaaagattgattttcaccttattcccgaagtgagctctcccaaaaagattagcgggcgattcatccgaaaagagatactcaacaacaatctgaccatctcaaaggaaatcagggaattgcttcctaaaacaagtatcgaaattctggaggaggagattgaaaagggcaatgttcctggaaaaaggaacatgaaggtgcttaagcacaagatgaacacgtattcccgctccaacctgacaaatatcgcctacctgaacggcaaggtcatcaaccggattgtggaagggagattctacaaggaagatgacgagtccatctgggctagcttcagaagggcagactacggtcccgtcatgacccggctggctgcctcttgcattgaggaggaggtcaccaaagacgaagtcctcaagctgatgcgccactacgaatcaaaaggtgtaatccctccggagcaaaatgtggacaaaatcatcgagcgggcgtggtacgtggctttggaggttgacaagggcgtgcccgccaaagaggcaaatgagaagttcagaaagaaggagaacctgaagttgaatcctatgctcagcctggaggccggattgaacctgacaaaattcgaagccaaaaagattcatgaaggcattgaagccaagatctttgtggataaggacaacaagatatcctgtgagatcaaggacaagaagataaaagtaaaaaccgctttaaagctgccatcgatggaggtgacttatctcagatacatactggactcaaggtatatccccgtgagcggagagctcatcaaaaataagcggaatgatttccgggtgaaaataactattcatgactactga

SEQ ID NO: 2783 - DNA, 474 bp, synthetic construct
  source 1..474: mol_type = other DNA
atgagcatcattgcaatctttctaggaataattgtcatcgcgttcccccttttagggatcattgccgcctccgatattctgggcctcagtgtcctgctgctgtccatctttttgctccttaacggtatttctgaagtggagtacaacaccacaaaagggcttctaaataccatcatcggcctgataatgctggtggtcagcctgggactgatcttcaacccaagcatattttcgttcctgaccgctattacgatttacctcgcaggaatcttcctcataatcatcggcctggtggtgattgttggcaaccgggagaataagtacaagttctggatgggaatcattggcattatcctgggggtaatctacatcatcctgggcacttatatccacaattcctttgtgctcggttcattgattggcatatggctcgtggccacagggatcttgaacttactgagtgacgggtattga

SEQ ID NO: 2784 - DNA, 1089 bp, synthetic construct
  source 1..1089: mol_type = other DNA
atggaaattagagagctgacaaaggagatcagagaccgatccatcgaatatgcaaagccaaaggacttggataacctgtcggccagctggtaccaagaggacctcttatatagcggtaagggcaagacaatcttccttattctccctactcccgggtgctcctgggctctgggacccagcggaggatgcactatgtgcagctacatctccgactgctatctaaagccaatcgaaacctccaaaatcatcgagctctttgaaatggaactgggcaaatgggattttgctgaggactacaaaaacggggagaagattgcaataaagctcttcgcctccgggtccttcctgaacccagaggaactaccaaaggaagctcgcaactacatccttcagagattggccgacctggatgagatcagcgagatagtcgtagagtcccggcccgagtatgtgaagaaagagataatcgatgaaatcttcgagatcatcggcgacaagctctttgaaatcagcatcggcctggagacgtcaaatgaggagacccgcttaaacaagattaataaagggtttaacaataaaagcttcgaaagggccattgacaccattaagcagagtaaagagagctatgacatcaagtcaaaagcctacatctttgttaagcccattctcctgtcggaaagtgaggccatcgaagaggcaattgaaaccgcgagctactgcgaaagtattggtgtcgatagggtgtcttgttgtcccgccactatccaccggggaacacttattgaacgtctgtggcgcaggggcagctacaatccgccttggatctggtctacagtggaggtgataaatcgcatccgagagaatgtgaatattccggcgctgatggacacctccgggttcggctcacggcggggcccttacaactgtaagaagtgcaataaagagctgaaacataagataattgattcaaacttcgaccagagccagatagagcacgattgcaactgtaagagtgaatggattgctgaggtcaagttctctaacctgaacaggagtaaaacgcagaccaaacacttgcctctgtactga

SEQ ID NO: 2785 - DNA, 957 bp, synthetic construct
  source 1..957: mol_type = other DNA
atgaaatttggcatagagtttgtcccccagataccactagatgaactcgtgaggctggtgaagatagccgaggacgtcggcttcgagtacgcatggatcacggatcattacaacaataaaaacgtatacgagaccctggcactgattgcggccaatacggagaccattaagatgggccctggtgtgaccaacccatacgttagaagtccggcaatttccgcgagcgcaatcgctactatcgacgagatcagtaacgggcgcgccacattcgggatcgggcctggcgacaaggccacctttgacgcactggggatcgcctgggagaagcccgtgtccacaattaaggccgctatcgccgatatcaccaccctcctcgacgggggaaaaaccgaagcgggcgccgcgttggggggagccaagaaagtgcaagacgcaatccctatttacatgggtgcccaggggccaaagatgctggaaacggcgggcgagatcgctgacggcgtgcttataaatgctagcaaccccaaggattatgaggccgccatgcctatgatcaagaaaggaatcggcgaccaagataaagatttcgatgtagccgcctatacagctacatccattggtactgacagcgaagcggctaaaaacgccgctaagatcgtggttgcatttatcgcagccgggtcaccacccccagtcatcgcacggcacggactgcccgagggattcaacgaacagatgggcgagtttctggcacagggtaatttcggcggagccattggcgccgtgactcccgaggctcttgacgctttctcggtttgcggcactcctgatgagttcatacccaagatcgaagccttggctgacatgggggtgacacagtatgtcgccggatctccggtgggtaagaatgtggaagaatcaattaaattactcggagacgtcattgctagcttctga

SEQ ID NO: 2786 - DNA, 210 bp, synthetic construct
  source 1..210: mol_type = other DNA
atggaaaccaatcggctggaggccttttacgatgcgataattgcaatcattgtaacagtgctagtgttggagctgccacagccggaaacggctaccatagccggcatcctggccctgaaggtgtcctatttcacttacctcgtcagtttcctcgtctgccagagcctggcaatctcaccccttgacatctgcagctgtgagaaaaactga

SEQ ID NO: 2787 - DNA, 315 bp, synthetic construct
  source 1..315: mol_type = other DNA
atgtttgtgatatccctcattccttacttaacaattttcgtcgcgaacaatcccaatagtcttctcagcgaatccctgtacggactggatttcatcctggtggacattatcctctttatcatgagccggtacctgataaagataaacgagaacagcgagtacctgtctgaagtattggaccttaaaaacgcaatcatcattccattcatcttcctaattatcgggttcatcataggctttctgggctatccgatcgccatcagcattgtctgcttgattaccatcgtgaggtcgatcctgtattcaatcaagtga

SEQ ID NO: 2788 - DNA, 483 bp, synthetic construct
  source 1..483: mol_type = other DNA
atgtttattgaaaaacgctgcacaggctgtcgggaaggcagcgcctgttatctgacctgcaccatcgctccatgcagcattgaacatggaaacatcgactactgcttcgagtgtgaggagtatccctgtgacaagtacgatgggattgagctctacgattcactcatcacccacaggaaccagaagaaggatttgcaaaaagcaaagactatcggtatcgagaactatcacaaggagcagctggagaagaaggaaatcataaaccatattctaaacaggtacaatattgccaaccggcacatcttcttctgcctggcggtgaatctgcttgaggtcgacgacctgaagcagatactgaaagactgcgatgagagtacgaaagacatggatctgaaggaaagatccgactatatcaaacacgagttatacgaatttgccaaaaagcgcaatatcatactcaaacttaatacagggcgatactga

SEQ ID NO: 2789 - DNA, 252 bp, synthetic construct
  source 1..252: mol_type = other DNA
atgaattacgtggaggaagcggtgcaactgttcgaggacgggtacatgtgttcacaggccgtcctggaggtattttgcgaagagttcggactaagtcgggagcaggcattcaagatcagcataagctttggcggcgggatgcggaaaggcgaagtgtgcggagcttgcaccggcgccatcatggcactggggctcaaatatggtgatttcgaacgaatggcccagattaggagaaacaagcgctccctctga

SEQ ID NO: 2790 - DNA, 456 bp, synthetic construct
  source 1..456: mol_type = other DNA
atggatgatttgcctgagatgatatcaatctggaacgagattgtcgaggagggcaacgcgttcccccaggaagaagtgctgacattaaagaccggactggactttttcaactcgcagagtcacgtgggagtggcatttgacggggaaattctcggactgtatatcctccacccgaataacgtggggcgctgcagccatatcgccaacgccagctacgtagtgtccagcaaggccagaggcaaatacatcggccagaaactggttctggattccatcgaaaaagccaaagagctggactttctaatcctgcagttcaacgctgtggtcgaggataatttgtctgcaaggcaactgtatgagaagctcgggttcaagcagcttggtgtcattccaaagggcttccggctcgacaatgacgaatttgctaatatatgtccctactacattgagctttga

SEQ ID NO: 2791 - DNA, 660 bp, synthetic construct
  source 1..660: mol_type = other DNA
atgaactaccaagaaatcagtaatatcattaaggagagcctgaaccttaaaaccagccctgttagcgtgaagctgtttgaaaaggagaaggatgcagaagagatcttcgagaagacgaacaagactattcattgccaggcaattattacagcgagtaagggcaaatccttttacgggaccatagacgaaatcgggtgcccgatcggcgcgggaattttgggtctaaaggaactccccgaaaaaatcttaaacggatcgcagttcgacaagatgaatgtgacctcctctcaggaaagcgggaaagccctgattgatagcgtggctaagaacaatcgcatagaggccatcgcttacatgcctctggaggattccaagatcgagcccgacgtggttgtggtcattgccaaaccaaggcagatcttcgatctgatccgggccaatacttatcaggaaggaaaaagaatggacaacagtgtgggcggaacacagtcactctgcggggacattgtcgtaaattcaattcagacaaacgagccccacatctcattcggctgtatcggcagccacatggccaccgagctctccgaggaccaagtcataatcggtataccaatatccaaacttgaggagatcgctaactctctgaatatcatcaactga

SEQ ID NO: 2792 - DNA, 750 bp, synthetic construct
  source 1..750: mol_type = other DNA
atgaaattcaaattcaacacgccactcactgagggcaagataatcaagcgcaacagccagttcaccttggatgtcgaaatcaacgacaacattgagaaggtgcactgtcccacaaccgggcggatcggaaatatcgatctcaaaaacgtcgcgggactgctgtccaagagcgataatcccaaacggaagacaaagtacaccctggaggccatctccatcagcaacctcaacaggaaagataaaaagtggatcggcataaaccagatcgcttcaaacaaatacattgagctgtttctaaaaaatcatctgctcgacgggatgcttccggagtatagtgagatcaagagggaagtgagcctgggcaagtccaaattggactttctggtggggagcacgtaccttgaagttaagactcccctgcagaccctccaaattgagtacgatacggatattaaaacaaagaaggtgagcagcttctcgtcaactgacagattcatcaagcacatcaacgagctggcagacagtcttgagagtaacgaaaaggccattctgctaaatacctttcagtacgacaatcctggatatgaaatcctgaatccaagcacaaattatatcgaagtcagcgaaaatgtggaccgctgcattgagaagggcttggagatatggcaggtaaacatgaagatagaccacgagggtgtggaattactcaaatactggaataccacctccaactttcgaaagattaagtga

SEQ ID NO: 2793 - DNA, 510 bp, synthetic construct
  source 1..510: mol_type = other DNA
atgaagagcaaggataaaattgtcaagtcccttattgaactaatggaaacccacgagtttgaggagataactgtgaaagatatctccgagctggctgaagtgaacaggtcgacctattatcgcaatttcaagagcaaggaagacatcatcaaatacaagttggaaagcataatggacgagtacctgaaggagtttgaaagtaaaactgataaaacaaaagagacgtatatccgaacaattttagagacgttcctcaagcatgaggagttcctgaagatcatacacaagcaaaatcagagctacatcctgcagaaggtgctcgccaactacttcggcgacgtactcaaggatacctctaagaaggaacggtaccaggtctattaccacatcgggggaatttacaactttacaatctgctggattgagaatgacatgaaagacagaccagaatatctggcaaaaatcggcgccgagatcacctcaaacattgagccctacctgcttaaatga

SEQ ID NO: 2794 - DNA, 1059 bp, synthetic construct
  source 1..1059: mol_type = other DNA
atgaagcatagactcaatctggacaataaggacccgaattatattttgctgaaagagatctttaaaattatggatagccggaagtccaagagcatcctggcctcctatggattcaaaaacctgaacagaacaatcttcaccttcaagattatctttataagtatgttcttcggcattgacatcccattcattctgaacgagcttaagtccaagaaagagctgcgcaagtacttcaatatttctgaggttctgactgcagatcaggtgtacaaaatcttttcggaaataaactctgagaagcttataaagtgtcttaaccggatcttaaactcaaggaatatggtgaagcgccgcgggaaaaagacctttatcgtggacgcgacccccgtggacgtggatattaatttccaccgtaataaaaagacaaaagagcatctggagaaaattaacctcaagtggagttattcctcctctaaaggttattatatcggttttaaggcaactgtggtcctggattacgacagcatgaatcctgtttgcattctcgtccactcgggggctcccaacgacgccaaactcttcgaagagattctcgaaaaccttcagaagaggcgcataatccggaaaggagacacactcatctttgataaaggctattacagctacaagaactaccagatcgggatcagcaaatacaaaatcattcctttcatcttcccaaaggaaaagttcagcaggacccgactggacgacattctgacttaccccctagccgtcttcaacaagacaaagcggataatgaaagaaaagcgactgtacaacagtttaaaaatggaattgatgaaaaagatcgatagttgggagaagtttaagcccattaggggcaagatagaggattttttcaaactcttgaagcagggcttgaatatgagagagatccacaaatatacgccaaagtcagtcgaaaagaccgtgtacctaaacgtatttctgggagctctgatcatctcacaaggcttttactccaagacggccatccagcaactgagcgagaactga

SEQ ID NO: 2795 - DNA, 990 bp, synthetic construct
  source 1..990: mol_type = other DNA
atgggctgcatggggttcggggacccggagaacggaatgcacacctggaccctgcctgagaaggaaagcatagaaataattaccaatggcctacacaacggcattaacttctttgacactgctatcgggtaccagaatggcacttccgagcagtatgtgggaaaagcaatccgggaaaacgctagccgggaggaagtggtggtggccacaaagttcctgccccgttcccaggaggatatcggaaataatgtctctgggcgccagcatatccacaatatggtcgagaaaagccttataaatctgggcctagattacatcgacctgtatatctaccacatgtgggactacaacacgcccctctatgatctccttgaaggactgaatgaggtcattgaagagggaaaagttaagtatattggaatctcaaactgttttgcctggcagctggcaaaggccaacgctctggctgaaatggaggggtttgcgaagttcgtatcaatccagggccattacaacttaatcttcagggaagaggagcgcgaaatgatcccactgtgccacacagacaacattgccttgaccccatacagcgccctggccagcggccgattgtcaaggctcccaggtgaagagtctaagagattaaacgaggactactacgccaaactcaagtatcaaaattccgagcagcaagatctcaagattatagaaagagtcaacgagcttgcgcagaattatggtgtgtccatgacagaagtgtcgctggcctggctcctgaccaaagtgaccgctcctatcgtaggggccactaaaatgcatcatgtggagggtgcagttagttccgtggatctgacactgacggaggaggacatcagttacctcgaggaaccctacatcgcgcacgacttggtgggcgtgatggcagacaacaaggttagcgccagtgataacgagaaagtctggattaagcacacgaagaacaagatttga

SEQ ID NO: 2796 - DNA, 534 bp, synthetic construct
  source 1..534: mol_type = other DNA
atgaagatcatagtgttgaagggctccccaaatattaacggttcgtctaatcttctggcagataacttcattaagggagcggaagaggccggccatgtggttggggaaatcgacgctgctcacgccgacatcgccccctgttctgggtgtgtgagctgcggctatgaggggccatgcatcatcagcgacgatatggatatttttcgggaaaaaatcctcgaggccgacatgctggtgtttgtcactccgctgtactactacggaatgtcagcgcagctgaaaatcctcattgaccgcttctgctcagccaacagttccatccagtccagtcacttcaaaagcgcactgataaccgtagcctataatagctccaactggacgttcgacgcactggaggcccactacgataccctagtcaagtatctgaacctcgacgaccaaggcaggattttgggttacgggtgcggcacacccagcatgacaaaatactctgattatcctaagaaggcttacgagtttggaaagagtttatga

SEQ ID NO: 2797 - DNA, 1401 bp, synthetic construct
  source 1..1401: mol_type = other DNA
atgccgaatttcttctccggaggcgaccttatatccaataacaagccgcaggaaacgtttaggggaaaaactgaccgggcgattaagaaacgacccccatggaaggaatacaacctgcatattgtgtgttttgtgctggttgccattagcatggccattggagtgaaggagatccgtatcaccgataccataagtgtgctgttgctgcctctcatttacgccctaatcatgggtctggccctcttcctcgctaagcccattaagtttatagggaaaaagcagtcaaaggtggcggaaggggccatggtattgtttattggcgttctcatcgctaagctggcgatttcgagcggccagtccatcgacatcatcttcaatgtcggcccctccctgatcctgcagcttctcggggatctgggcaccctgatcgcactgcccgtggctctgattctgggattccggcgggaagtaatcgggatggccagttccatttgccgcgaaccgaacctcggggtcattatcgacaagtacgggttcaaatcccccgagacaaggggcgtgctggccatctttgttataggaagcattatcggcacgccttttatcagcttcctaagcagcatatgcatctcgctcattccttaccacccatatgccttcgcaatggcttcgggcataggcagcgcaagcatgaacgctgcagccctggtgcccttggtgcacatgtaccccgccatggctacccagctggaggcctttgctggctgcagtaacattcttagcttctgtctgggcatctacatgtgtatattcatttccctgcctctggctgaaaagttgtacaaatggttatctccaatcataggcaaaggggaggggagaaccatcgatgacgaatacgccatcgagggggtgaaagacgataagtatgcgacatctgaggatctgagctctgggaagattgagagatgggtcactttcctcgtactcttctcaatcatcggcacagttggaaatttcataggttatcacacccccttgctggacgtgttcatcggaatgctaatcatctcaatcatcaccctcatcggaatgtgccttgagcgcataattccatgggatatcccatcaatcatctatatcagtcttcttgggattttcttggccattcctggagtcccaacttcagacatcattattacgtatgtctctcaaattgagttaactacaatctgcacagcatttttagcatatgtcggtatcgccatcggtaacgactgggaggagtttaaaaagatcggttggaaaggaatcatcattgctataatcgtgatttccggcacctacctcggttctgcaagtattgccaacctggtcctgtttgtgacaggcatgatctga

SEQ ID NO: 2798 - DNA, 894 bp, synthetic construct
  source 1..894: mol_type = other DNA
atggcgcggagcgataagaccctcgaggacattctcaacatcattttttatgacaaaccgtccactcaagacgaaatcgccgaaaaactgaagattagtcgaagatatgtgacgcagctgcttaagccactgatcgaggaggacatcgtcaaaagggcctatgtcatcgacttgaacaagtacgatgaaatttacggctcgtcagaccctatcttcaatctcaaacagcattccgcattcttcctcatcgagaacatgctaagcagcatgagcgagcatgtgaaggagcaggtgcagatgagtttcgacgccatcctgactaatgataaggacctggccgaacaggctttaaagctggattttaccacaaacaacatgtacgagaaagtacgcgcgtcggtggagacggtcgttgacgttgacccccactccaagctgtccaagatccttctgttcagcgaggcggcatacaattatgaacgcattggagattacagtggccacatcgccaaatttgtcattaatgagaagactgccgtagacgatgaactgcttgatatactgaaaaagatgcacaagtacgcacagaaatctatcagctacgcaaccgatgcttttataaatgggaacattgactcacgggggaacctaatggatacagaagaaaaaattcacgagacacaacagaaagccatgaacctcatcgccaaccagatggtggagaccagcttcgaggacatagaaatgtccaattactatatctacatatcccgggtggtgaagagtttcgagagaatgggtgatatctcagtggagatcatggacttggctgctgagtttcacaaggacatacccaggccaacaaccccccgtagcttcagggaaaagatttga

SEQ ID NO: 2799 - DNA, 1935 bp, synthetic construct
  source 1..1935: mol_type = other DNA
atggaagggtcggaactgcagaacataaaaggaatcggcgataagctgtcccaaaagattctgctaaacctgggcggagaggaggaactgaaccgggtcataaatgagctggaccttgaacgcttaatccagattgaaggtatatcccagcgcaaggcgattgaaataatgaaccaattactgggcaatcctgcacagaagttcttaaaaagcgaacgtgctattcagctctatgaggaaatcattgaaaaaatcctcaaatactccaatacaaactactctaaaaacagaatcttgttgttagcgcccatcaaggatgagtttattattgccgaaaggctgtcattcgtcatgtcggccaaggagagagtcagcaaactgcctttagatgagctgaacaagctgatgagaaatctccacgagcccaagaatgcaaaggcaaactacgatgccagcaaggcaatacttgttgaatccgctgaggacagcgattatctcatggacctcgggctgaacaaatactacaccatcctaactgcctccgactcaccattcttcaaggaggaaatcagtggctatgagcttgtctattacatctactctgaagggatactcgactttggcgacatgcctaacctcatcatgatcagcaaggaagctgaggactaccagcttgtgcccgagattatcctggattacttcaaggaaaacagggaactcttcgagaatgtttgcaaaatccgaaagatcctaggggaaagcactgtcctggaggatgtagggccggtcctggaggagcttgacaattacaagacccaagagattgacctcgatggcatcgtgcaggaagagaagacctatattgatgaggaacttaaaacgaggatacacaatgtggacttggagggcgatgaggtgctggacctcctgaacaatgccttgccccccaagatagagaaaattttcgacgaaatcctgtctaaatcaaaagagaacatcaaggctaaaagtggaattgacttcgacccattcatcaaaaaataccccatcgaaattgacgatatggagatggagcggatcaagatggagattctctccagcagcgagaacaactattttgacatgaaaatcactgctgccgaacatctggcgctcattaaggagcaggccgaacgcgaggtgaaggaaaccatcgaatttgactttgagtatgccctaggaagtttcgcataccactataagcttaacgcccccgaattttcaaacgaatacgccctcgaaggagccctgcatttggaactatgcctgaaggagacagaggaggacaacgagaatggcgagattcagcggatagactacaaactgaatgagcaggagaacgtggcgctcctgacgggagcaaacagtggtggcaagaccacactcctcgagacgatcagccagatcgcgattctggcccagatgggcctgccagttccggccaacatggctaagatcaaactgttggatgagatttatcacttctctaaaaagcgatccttggatgccggagcatttgagtcgttcttgaatgtgtttatgccaatcgtgacatccgactgtgagaaactggtgcttcttgatgaactggagggtattacagaactggaggccgctgtaaagatcatctcaagctttattgagatgataaaggacagcaattccttcgcaatcatcgtaacccacatggccaatgagctgatgaagtatacagacattcgggtggatgggatcgaggctactgggctggacgagaactataatctgatcgtggataggacccctaagatgaattacttggctaagagtacccctgagctcatcatcaaacgcatgtacgagaactctagtccagaactgaagaaggtgtacggtaagatcctggagaaattctga

SEQ ID NO: 2800 - DNA, 3054 bp, synthetic construct
  source 1..3054: mol_type = other DNA
atgaaactgcctgagcttttagccccggtgggtagtgctgagcacctcaagacggccatcttatctggcgcaaactcgatttacctctctggcgagaactatggtgctcgcaagtacgctgagaacttcagcctgcccgaaatcagagaagcgatcaaatatgcccacttgcataatgtcaaggcctatgtgacagtgaacaccctcatcaaggaaggtgaactgaagaaggtaagcgaatacctgctccagctgtacaaaatgggagtggacgctgtcctggtgcaggacatcgggttgattaatattattaacaagcacattccgaaactcaacatccacgcttccacccagatgaacctccacaacatagagggcatcaaatgggcctacgatcacaacatcaaacgaatcgtccttcccagggaaatcgagatgcgagagctgaaggaaatagtggaatacgcccactcccttggaattgaaatcgagatctttgcacacggagcgctctgctatagttattcaggccactgcctcctctcctctctgcaaggggggagaagcggaaaccgcggccggtgcgcccagccctgtagggagcagtatgagctgtccatcaacaaaagcaaacgcatcagtccaaagaacgaaggaaactaccttttatccccaagggacctgtcactttatgagaacctcgatgagatcgtgaacctgggcattgatagcctaaagatagaagggcgaatgcgcagcaccgactacgtggcaactgtcgtgaagaactaccggaagagacttaaccgactgcgttacgacaagacctcaaagtcgctgaatagaaacatcaatgaatctatcaaaaaaaccaaaaaggggaagaaaggtcggaagagcgacctgaaaaagatagaggataaggagaagattgagagccttaagaagattcagaaggaagagaaccgaaatagcgaggaggaactgggactggtcttcaatagggagttcacggcaggtcatcttattccaaaaaacaatcccatgatcatgaaccggaagaaacctggccatcagggcctgtatattggtaatattcaccggtacaatccccaaacagaggagattcatatcctactgaacgacaacttgattcacattcccgaaaaaggcgatggcatcttaattgaaagcagaatcaatcgcgaaaactctgatgagagaaacaataaatctaacaaaaacaacaagaataagcagaatgagtccaaaagtaataagaaagacaaaaataaaaagaaaattaaaaggatggagaacgatgagaactaccactcgatcattcagacttacgggtttgacatctcctcaaagcctgtcctcaaagattccaaagacaagcattggcggaagagggagaaggacaaggacatagaaggcaaactcctggtgataaaacgcgttagggagaacaaacgtatcccatttcctcttgagaagggctcgaaggtctacctcacaaagcggaactccctgataaacgaagtcaagaatctaaaaagcgacaagtccaagcatatgataaagaaaagcaacctggagctctactttagaatcgacagcgacaattaccctcacttgaaaggaaacctgaaattggacaacgggaaggtgatcaccctgaaaatacgaggggaaatgccctgggaagaggcaatcaaaaagcctattacaaacgagaccatcaaaaagcagctgatgaagatcggagacctcccttactatatcgagaagatcacagtaaacaacaataagagcctattcacccccatcagcggaataaatgagcttagaagagagttttttgacaagctggaagaggaagtgattaattcgtacattcctacggatgaggatatcaagatcgccgaagaaaacatcaaggagttgtctaaggagctggacagaaagatcgatttgaaggccaaagtgaaaagtgagcaggaaaacaatgatctgaagtccaatgccaaactggaaaacaagaacaagaatagtaagaatctctccatctacatcaatagcctcgaaagcttaaaggaaattaacaaaatcaatgatctctcaaatactttgttcaatcgcatctacctggagatcccgccaaatcgtcgcctggacgaaattaccaaggatcggatagagaactacaacccaaacgactctaaagagctgaacatcagctactgtgtgaacttcctaaagtctgcaatcaacttggcccaggaccaagactatgagctcatatggaagctgccagacattgctcataagcagtccaaggagtcaatagtaaagatattgggcattctcaacaaaatgaatctgcacattaatattatgactagtctgatcggcctcgacgattcattaaaagataagttcaagcttgaactttatggaaattatccgctgaatgtgtataatgcttatagtgttatggagctgaaaaactataagaccttgtgcataagtcccgagctgtataagaagaacattgaaaaactgatggaggactattacacaaacaaaaacaatgaggggctgtctgaaatggaaatcttggttcacgggaagattgaagccatgaccactcggaaggagctgatttccaagaaacagctgaagcttatcgacaagtataataagaagatgcggagggataaaatggacatctctagtaatgagttctacctcaaaaaccgcaaggaccagtactaccccatccgcacaagcatcaacgaggacaatctgatcattctaaactcagaggagttctgtctgatcgacgagattgattacctgaagagtattggcatcaaaaactactccatcgactgccggtggaagggcatcgactacattagggatattggaatggtttacagggattccctagataatgatgattatgacctcggtgagtttaaggaaatcatcaataaacattcagagcaactgacgaaggcgaatttcgatatagggctgaagtga

SEQ ID NO: 2801 - DNA, 2586 bp, synthetic construct
  source 1..2586: mol_type = other DNA
atgaccttacccgaacttctcgcgccagcgggcgactacgacattctggtgactgctgtgaatgccggagccgatgcagtgtatatctctggcgaacgctttggagcccgggccttcgccaaaaacttcacactggaagaaattgagaaaagtgttgagtatgctcacctgaatggggtaaagatccacgtgacagtaaacaccctcatcaacaactttgaggttgtggatgttgtccaatacctcttcaaactctacaagctgggggtggacgcagttattgtgcaggatgtgggcattatcgagctcatcaaaacccttatccctggtctggaggtgcacgcctctactcaaatgaccctgagcgactatgactgcattctttgggctgtggagaacggcatctcaagaattgtctttccccgtgagataagcgtggataagatcagggaaatcagcgaaaagctcaaatcctcaaacttgaacatggagcttgaggtattcggccacggagcactgtgctactgcttcagcggcaactgttacatctcatcttataactcgggccgaagtggtaaccggggggcctgcgcgcagccttgtcgtaagcagtacaagctgaaatacaaaaactacaatgtgggaaacggcttcctgctgtcaacccatgacttggctgtctataagggtttggataaaatcgaggaggccggcgtgttctcccttaaattggaaggtaggatgaagtctgcagattacgtggggacgatcgtgaatgcatacagacatataatcgatggagatgagggggactacgaaaaagacctgcatctggtcttcaatcgggagtttaccgatgggtacatcctcaaccagagtccaggccaggtcctaggcagggagagctcaggccacgagggtgtctacatcgggaagatcatcgaaaagaagggtgagcagattaagatttccaaagaaaacaaggactttagtataaaccttgacatcggtgacggtataggcttcaagtacaaggacaaaatcaagggaatctacattgacaacattaaagaacagactgacgattatatcatcctcaataccacacgcaatgtccgggaaggagataaggtgctcctgagctattcgaagtccacccacgataaattaaagaaattccataatgagacaatcaagcagcacatcccattgtccctcgacatttactggaatgaggatctgagcctaaatgtcaccggacggttccagatagaggaaaagggcatcaacaacaagaacataatcgagcgctttaactttaactatatttccgagaccaagtttgagaaggctttgaatagacccattagcaaagaggatatcgagaagcaaatgttgaagactggggacagttccttttatatcaaggaaatgaacattcatggcatgccggagaacactttcatcccgattgggaagctgaacaaaatccgcagacgccttctggaaaaagccacgaatctcctgctggattattacaagccctccaagaaggaggtgagggctacgaataaaaaggtaaatcagttcataaaggaatacaagacgtacagtgacattgatctaagaaaggaaaaactgaacctttcaatctttgttgacagcctggagctgttggagatgacaaggaaactgcctattcataagtactatttcgacccaagtttcagtttcaacagccccgaagagtattttgaaaagattaaggacctgttgaaggaagcttattcaatcgtgggcaattccaacaatccaaataataaatccaaaagtaacgaggatgaacggcttgtgctcgtcttgtcttcctttattagtgatgaagagattgaaaaactgagcaaaatcattgatgagctaaaagaagagggcatttcgatccctattatgtatgacactcccggaatagggaagagcttcaataccgacatctacgggaaccacaacctgaacatctggaacagctacaatgtcaaaaacctctctgagtctggatttaaaagcctgatcctctcgtcagagctctcccacaaggagataaaggaactggtatcaaagtaccagtacattaaaggcgacaaggagaccgacctcaacataattattcaagggaacctggaagtcatgagcagcaaggacgacttttccaatttaaatgatggaaaggacttcatcatcaactctgcagatgactatgccatcctggaggataagaaaagaaagaaattcaaatacaaggttgtttttgactataataagcacagccacttcatcaacaaggactgtctgtgcctgatcgaggaagtggagctgataaaggacacaggagtggattctgtgataatcgatacacgcttctcctcggccaaatacagctctacaattatctctctgtacctgcaggccttaaaggaggacaatacttatgacttatccctgctcaaggatcagattcgaaacatcaccctatcccgactgaatcaggggaacttcataaatggcaggcttcatgagaaagactgttga

SEQ ID NO: 2802 - DNA, 591 bp, synthetic construct
  source 1..591: mol_type = other DNA
atgtatatcgtcctggaggggatcgatggcgccggaaaatcaacccagataaactacctgaaaggatggctggaggataacggcttcaaagtggaaacaattgttgaacccaccgacctcgaggtggggaacctaatccgacagctcctgacgaggagcgacgctacaagtgacaccatgcaaaagactttgggcctacttttcgcagctgaccgccttgtgctcatggataaaatcgagaagctggaaagcgaacgcaccgtggtcattagcgatcggtcgttttattccagtctggtctaccagaagccgcaggattggattcgggagataaacaagtttgccaagatccccgacctggtactcctcctggacttggatgtgaagaagtccgtcgaaagatgcgatggtacagacgagtttgaaaacgaggagttcctgactggcgtgaaagagaactacctggccctttccagagagaatgacaacttcaagatcattgatgcgaataatgggccaaataaggtggcatctgacattaaaaaggccgttgcccctttattcgacatctgtgtagactgcatcaggtga

SEQ ID NO: 2803 - DNA, 207 bp, synthetic construct
  source 1..207: mol_type = other DNA
atggaggaggaaccaatctatgagatgaaactgacaaacggaattggcgaacagatgcttgcacacgtgtttgaaaagttcgatgtggaactgaagcaaacggagttcgggcccaaactccagggcaccaaggaggagctcgagaaggcccaggaatacatcgtcgaaatgatgaagaaaaggctagaggagctggaccggcagtga

SEQ ID NO: 2804 - DNA, 966 bp, synthetic construct
  source 1..966: mol_type = other DNA
atgaacatagaggaaaaaatagagctgatccaggaaggtacactggagatcattgagctggaagagcttaagcagaagctggagaaggaaacccccattgcttacactggatatgaaccgagcggaaaaattcacctggggcatgccgttaccattatgaagctaaagcaattgcagaagctcggatttaagataaagatcctcctggcagactaccacgcgttcttgaacgggaaaggaactgtagaggagatcgcagaaacggccgagtacaataaaaggtgctttcaggggctgggcctggcggatgacaccgagtacatcctgggttcaagctttcagaccggatctgaatatacgaatgatgtgtaccaactcgccaccataacgaccctgaagcgagccaaacggagtatggatcaggtgagtcggcacgacgacaacccaaaggtggcctccgtggtctatcctctcatgcagactgctgacatgtctgcacttaatgtcgatattgccctgggcgggatggagcagagaaaaatccagatgctcgccagggagaacctgccccgcatcggcaaggaggctcctgtgtgcattcacacacccttgatccatggtctcgacggcgacgacaagatgtcctcaagcaaaggcaactatatcgctgtggatgatgacgaaaagacaatcaaggagaaaatccgcaagagctactgtccgcaaggggagatcgaagggaaccccatgattgaaatcgcagacttctttgtgttctcccagcaggacaccttcgtcattgaacgtcctgaaaagttcggcggcaaccttgagctaacaaaagatgagctgcatacaatgtacagcgagggcaaactgcacccaatggacttaaagaatggaatcactaaattcctcattgatttcttaaagccagttagagaatttatggagtcgggcgagtga

SEQ ID NO: 2805 - DNA, 1041 bp, synthetic construct
  source 1..1041: mol_type = other DNA
atgttctgtcccgagtgtggtgccactgacgtggagatggtcgacggaatctgcaagaactgctacctgaagaaattccaactcatggaaattccggaaaacattaccgtcaccatctgtaaacactgcaacgctaaactggaggaaggcaagtggaaagacgagtatattccagaggatgagattatataccgtaccctcgagaacaatatcaagctgaatgatctggccgaaaacgaggagatcgagctggaaatcgaccaaatgcgaggcacaattgccgagtgctacattgaggccgtggcgacggtcctgggggaggagattgtggaaacccacacgcctaatgtgaaaatcaaatactccgtttgtccagactgcagtaaacgcaacgccggatactatgaagcagtaattcagcttcgggcggacaaccgggaattgaaggaagatgagataatcaaggctgaggaaatcatcggcagaacactggacaagcagtttaagaaagacaaattggcctacatcccccaggtggctaagcttaaggagggaaacgactattacatcggttccttaaagtcggctaaaaaggttgtggaacatctcaaagaggagctgggggggaaggtcaaggaaagcccaaggctcatcagcgaggacaagagtacaggcaagggcctctaccggatctggatatcactgcgccttcctaagtttgaaaaagagaatataatcaagtataacgacaagatctacagggtggaggccattgatgggaatcgcattttactggccaacctggaaaaccaggactccctcgcactgaaatggagggagtatgattcaattgaaaagatggagaacctaaatggaatccagaaggcaatcatcactgcaaaatctcccaagagcatccagatcctagatcccgatgacttcagccctttggacctggatatgaatgaaaagctggaaggctttaatatcggggatgagattgatatactcaaaatagagggcagaatcttcattatttga

SEQ ID NO: 2806 - DNA, 408 bp, synthetic construct
  source 1..408: mol_type = other DNA
atggacgattatgaaaacttactaaacagagcgattgatcagctgcctcccgaggtctttgagaccaaaaggtttgagccagtgaaagcctacagcgtcattcagggcaatcgcaccttcatccaaaatttcaaggatgtggccgacagcctgaaccgcgacccccagcacatacttaagtacctgctcagggagttggggacagccggaaacctggagggcgtaagagcaatcctgcaggggaagttcaatcacttcctgatcaacgaacggattgacgaatatatcgagaaatacgtgatctgtcatgagtgcaaccggccagatacgaagatcatccgtgaagaccgaatatttattctcaagtgcgccgcttgcggtgcaaaagctccgctcaagcccctttga

SEQ ID NO: 2807 - DNA, 1998 bp, synthetic construct
  source 1..1998: mol_type = other DNA
atgtcccccactaacaaaaccaaggcatcgctggcacgctttgaagaatttttctctacaatttacaaggacgatgtatttgaggtgctagagaaatatccggacgaaaggagcctgacagtcgattacaacgatttagaaatgtttgacccagatctggcggacctgttaatcgataagcctgatgaggtcattaccacttcacaaaaggctatcaagaatatcgatccattgatgaaggacgctaatctcaatatccgattcgagaatctgactaacaacgtgcccctcagcgacctcttaagcaaatacattggcaagttcgttagcgccgatggcatcgtgagaaaaaccgacgagatccgcccccgcatcgaaaaaggtgttttcgaatgcaggggctgcatgaggcagcaggaggtggagcagacatccagcagccgcattatggaaccttccatgtgcacagaatgtggcggtaggtcattccggctgctgcaagaggagtccaaatacatagacactcagagcgcccggatgcaagagcccttggaaaacctctcagggggcacagagcctaagcagatgctcatggtgctggaagatgacctggtggatgaactgagtccaggagacaaggtcaggattaccgggactcttaaaaccttccgcgaggagaagagcggaaaattcaagaattacatctacgtcaatcatattgagcctctggagcaggagtttgaggaactgcaccttagcgaagaggatgaggctaagatcctggagttatcccaggaccccaacatacatgacaaaatcattaactccactgccccctccatcagaggctaccgcgaggtcaaggaggcgattgcattgcagctcttcggcggatctgtaaagcacctggaggacaagacccggctcaggggcgatatccacatcctcatcgtcggagacccgggtatcggtaagtcacagatactgaagtacgtttccaaactggccccccggagtgtctatacaagtggtaagggcacgtcgggggcagggttgacggcagcggcagtgagagatgagctgggcggctggtctctggaggcaggtgccttggtgctcggggaccaggggaacgtgtgcgtcgacgagctggacaagatgcggtccgaagaccggtccgccctgcatgaggcgctggaacagcagaccgtgagtattgccaaggctggaatcatggctacattgaatacccggtgttcggtgctggccgctgccaaccccaaattcgggcggttcgaccgatacaagacccttgccgaccagattgacttgccttcaccgattctctctcggttcgaccttacctttgtgatcgaggataagccaaacattgaaaacgatcgtaaactggcccagcacattctaaagatacaccagtctgagagcgtgaactatgagatagagcctgatctccttcgaaaatacatcgcatatgcccgtaaaaacataaatccagtcctaaccgacgaggcaaacaaggtactggaagacttttatgtttctgttagaagtgccggggtggaggaagacactcccgttccaattacagcccgccagcttgaagccatcatccgtctagctgaagcgagcgccaagctccagctcaaggacaaggtagaggccgtggatgctcagcgcgccatcaccctgcaaaggaagacactcgagcaaatcggattggacccggagaccggacagctggatattagcagagtggagggcggaaccactacctcagatagggaaagaatgcaaaagattgaggaggaaatcaagcttctggaacaggaatttgaacgagctcccatagacacgctgaaggagaacatgaaagagaaatatgatatgagtcctgagaaggtggaaacgctggtgaaaaaacttaaaggaaaaggcatcatcttcgaaccaagaaatgggttctttaatacggcttga

SEQ ID NO: 2808 - DNA, 393 bp, synthetic construct
  source 1..393: mol_type = other DNA
atgttgataagcgtcctcggagtgattgtcatcatcattatggtagtggcagccgcgtacgttggattcagcgtggtgagctcgagcctaacaggcgggatttcctctggcacacagtacgacgagttagccaccctgaagtccaattgctctagtctggaagcccaattcaacatcaccggcactaagatctacgcaatgcaaaacatcacgctggaacgcgagtttgtcaacgctcaggtggagctgattaaggtgcagaatgatctcgacagtgtggagagtgcgctggcttccgggcagcccgcctcagaagttgacaagcggatacagcagtcaaaagaggatctcaaaatcgctcagcaggcctataacagcctttccgtcaaatga

SEQ ID NO: 2809 - DNA, 642 bp, synthetic construct
  source 1..642: mol_type = other DNA
atgggcagtcgatggcaggtggagaagaagaaagatccctattatcggcgggctaaaagtgaagagtaccgatccagggcctcctacaagcttaaacaactcgacaagaagtacaagatcatcaaagaaggcaacactgtagtggacttaggtgcggctcccggaggatggtctcaggtggccctggaaaaggtgggggaggagggcatcgtagtcggggtggatttgaaccgcatcaagccatttcctgagaagaacttctacggaattagaggggacttcaccaaggagatcgttcaggataagattatggaactgacgaacggcaaagccaaagtcctgatttcagatgccgcaccgagccttactggaattaagacaatagaccatctcaattcagtggacctggtggagaccgttataaaaatagcagacaatatcctggaaaccgagggcaacatggtcatcaaagccttccagggcccagaatacaagcgcctcctggatgaaatcaagcaggactttagaaaagtcaaatccacaaagccacccagcagcaggcaccgcagcaaggagatgtatattgtggggctaggctaccggaagggtcctgggagcagaaagtcgaggaataaagagtga

SEQ ID NO: 2810 - DNA, 540 bp, synthetic construct
  source 1..540: mol_type = other DNA
atgctgatcgggttaataagtgacacccacatcccagatcgcagaatgaagttgccccagaaggtcctggatgcgttcgaagacgttgagatgattctccacgccggagacatcacgagccagagcgtcattgatgatctggaggccattgcaccggtccatgccgttgaaggaaacatggacagggtggtaggggaaatgaaccttcctccatcgaaaatcgtggaggctgagggccataagatcggcatagtccacggagaagtctatccccggggggacacccaacagctctactacactgcgctggaactcggtgtagacatccttgtgagcggccactcccacgtggcccagctggagaagattaagaacgtgatcctggtgaaccccggcagccccacaaatccacgactatcagacccttccgtggccattatggagataaacggcaacgatatcaattttgagtttgttaaagtgggtaatcctgtgtgctctgctctgaacttcttcaaagacaaggcaaataaagagtga

SEQ ID NO: 2811 - DNA, 1092 bp, synthetic construct
  source 1..1092: mol_type = other DNA
atgggaaaggtgagcaaggagaaaatactggagatcctggatggctatgacaaggagaacattaccatagccacgctcgggtcgcacacgtccttgcatattctgaacggggccaaggaggaaggctttcgcacagctattgtttgtgagaagggtagggaggtaccctacgaacggttcgaagtggcagatgagtttatcatggtcgatgaatttaaggacatagtgaatgaagatgtacagcagaagctaagggatatgaatgcaatcgtcattccgcatggttcctttgttgcctacgcgggcctcgacaatgtggaagacaaattcaatgtgccgatgttcggaaaccgggacattctgaggtgggaggctgagcgcgacctggaaagaaagctcctggtcaatggtaaaatacgcatccccatgaaatacgatgacccctcaaaaatcgaccgtgcagtcatggtgaaattccccggggcacgcggcggaagaggatactttgtcgcctcatctcctgaagagtttgacgccaaaatcgacgcgatgaaagagcggggatggatcgaggatgaagatgtggcccaggctcacattgaagagtatgtgtcaggctgcaactactgcatccactacttctactctgcgctgaatgacgaggtggaactgatgggcatggacagccgatatgaatccagcattgacggattcgtgcggatgcctgctaaggggcagttaagcatcgatatcagccctagctatgtggtgaccggcaaccaccccgttgtcatgagggagtccttgcttccacaggccttcgaaatcggggacaagttggtcaagtcggcagccgagcttgtaaagccaggcctcaacggcccattctgcatccaaactctagtcaacgataacctggaggtggtggtgtttgagacaagtgcccgaaccgacgggggtactaataccttcatggagggttcttcctacagttacctgaagtatggcgaaggcatgagtatgggacggagagttgccagagagatcaaaaacgctctcgagaacggggggttcgagaagatcattacatga

SEQ ID NO: 2812 - DNA, 513 bp, synthetic construct
  source 1..513: mol_type = other DNA
atggtagacgcagagaaggccaaacaacccaaggagcgcaagaataaaaactccaacctgcccgacatcgatttcaaggcccttatttttggggccgccgcctatgcattcttcccgctggtggcttatcagtacaacctagacatccttatggtgttcgccgccatagggccactctacatcggctataccgctaagacagaactgaaatccatcattctgggcattgtgggggcgacaccactcttgtatctggctttttcaggcatgctgggcagctacggaagcggtgaaatggcggatataatcatgacggtcggaatcttaggactgggcgcattgatgggctactttgggggctacctctaccgggataggcagagaaataaggccaaagcagggggtattgtggtcgaggacactcctaaaaaagagaagcagtttgaagacaccggaagtgtgaagaagaatgttgctaacctcttcctgcccaagagccgacggaaaaagtga

SEQ ID NO: 2813 - DNA, 375 bp, synthetic construct
  source 1..375: mol_type = other DNA
atggcaaaaatgaacgcggtgatcttaggctttatactgaccctggttgtgtacttgttctttggacggtatgaattttggggtctcctcattgtcgggttcattgtaggatacatagctcacgaagggattctgggcgggatgtggaatgccgccctggcaggggcgttcggcacaatcataagtgccatcctattcatcatcctggtcaccattgggggaactgctatgatgggcttcctcggaggccttgctggctttacagtgagcggcatcacctccctgattgacatcgtgttcactatcatcaagtacatgattgtgatggggatcacgggtgccgtcggtggcgcccttagcggagagaaggagtga

SEQ ID NO: 2814 - DNA, 969 bp, synthetic construct
  source 1..969: mol_type = other DNA
atgatggatctcatttacatattaataatcattatcattgcaatcatcgcatacaaaagcatcaagatcatacgcccttatgagaaaggggtggtagagcggctgggcaagtacaaccgaactgtcgaacgcggcctgaacattgtgattccatttatagagacaatcagaaaggtggacctgagggaacaggtcgtagatgtgcccccccaagaggtcattacaaaggacaacaccgtggtagtggtggattgtgttatcttttgcgaggtcatagacgccttcaatgccgtctacaacgttgtgaacttctaccaggcaattaccaagcttgctcagaccaatctaagaaatatcatcggggacctggaactggaccagaccctgacttcgcgcgagatgatcaatacggagttgcgtgaaacccttgatgttgccacggacaaatggggcacaaaagtggtccgggtggagattcaaagaatcgagcccccaaaggacatcgttgaagccatgtccaaacaaatgaaagccgaaaggatgaagcgagctacaattctcgagagcgagggttacaaggagtctgaaatcaaaaaggccgagggggacaagcagtccaagatcctggcagcccaggcggaagctgaagccataaagcaggtcgcagatgccaacaaatatcaggagatcgccattgctgaggggaaggccagggctaccgagatcacctataacgcgatccacgcgggtaacccgacgaatgacctgattgccatcaagtatctggaggctctggaaaacattgctgatggccgggccactaagatcttcctcccaactgaagtgagcggaatcctcggctcagtgggaggaattgccgagttgttcaaggacgaccctgaagcgctagagaaatttgaaagtatcaaagtgctcgagaatgctaaagagacagcagataacgaatga

SEQ ID NO: 2815 - DNA, 420 bp, synthetic construct
  source 1..420: mol_type = other DNA
ctgtatttggagttttggatcattctggccattatcctcataattggcgagctgctgactggtggcttctacctactttccataggactcggcagcctggccgctgcaatcttcaactacttccagtttagcattacgatccagattgtggctttcatcttagtgaccgtcatttttatcatccttagtaggcccctcttcaaccggctgaatcgcaacacaatcgacaagaagtccaacaccgagagactgattgggttgaatggagaagcgatggaagacattgggcaaaaaaatatcggagcaatcagcataaaaggcgaggtctggaaagccatctcagacgaggagatatcgaaaggggaggaagtgaagatcatcggtatcgatggcgttaagctgaaggtagaaaagctctga

SEQ ID NO: 2816 - DNA, 2598 bp, synthetic construct
  source 1..2598: mol_type = other DNA
atgattaaaaaacagactaaaacgtatagtaagaagcagatttacaagaatctgcatccgttcgtacgcgaatggttcgaaaacagcttcgaagactttacgcccgcccaaaaacagagtattcccgagatccagaagggcaaaaacattctggtcagttcaccaacaggttccggtaagacgctaaccgccttcctcagtgtgattaacgagcttacgaccctggcagacaaaggggagctggaggataaggtttactgcatttacatctctcccctgaaggcattggacaatgacattgagcgcaatctggacactccgctcaaagagatcgagaaaatcgctgggaagccattaaacatcagaaaatctgtacggacaggcgacaccacacagtatcaaagaaacaagatgttaaaataccctccgcatatcctgatcacaacccctgaaaccctgtccatcttgctggtggcccctaagtttcgggaaaagctttcccatgtgaaatatgtgatcatcgatgagatccactcgcttgctgaaaacaaaaggggagttcaccttagcctatcccttgagaggctccaggccttaatcggcgggttcgtcagaattgggctctctgccacggtatctccattggaggaggtggccagatttctggttggctacgaatacggcaccgaaagggattgtttgctcgtggacatcaattacctcaaggaactggacatcgaggtcatatcccccgtggatgacattgtaatcgctgatagcgaggacactcgcctggctacctacgccctcttggatgatttgattatggagcacaagactagcctgatttttaccaacacccgtagcgccaccgaaaggtacgtctacaatcttaaaaagctctatggcgagcacttcaacagcaataacattatggctcaccattcttccctgagtaaggaactgcgcctggaaactgaggaaaagctgaagaaaggcgagctaaaggccgtggtgtcctcgacgtcccttgagctgggtatagatatcggatacattgacctggtgatcctgatcaactctccaaaatcagtgagccgggccctgcagcggattggtagaagcggtcacaggctgcatgagaaatcaaaggggcgtataatcgtgactgacagagatgagctggtcgaatgtagtgtgcttttaaagaatgcaaaggaaggaaagatagataacataaagattcccaaaaactgtctggatgtcctgtcacagcacatctatggcatgggaatagaaaacccatgggacattgactatgcctttgatatcatccgaaaaagctactgctacaaagatctctcacgggacgactatgaggacgtattaagctacctggccggggaatacgtggagctggaagagcgttatgtctacgccaaaatctggatcaactatgaggagaacacctttgggaaaaggggtaagctggcacggatgctctattcaacaaacattggcaccatccctgatcattcggcagtgattgtgaaatgcgacggggaggtcataggaaaggtggaagaggacttcatggaaaagctgaagaaaggagacagctttgtgttgggcggtcgaacatacaagttcaaatacggaaagggcatgaccataaatgtctcccctgcgtctggccctccctcaattccatcttggtactcagagcagttgccccttgcgtttgacctggcagtggatattcaacgcttcagatacatcctggacagcaagttccagtatggccggagcaaggaagagataatggagtttctccacgactacctctatgtggatgatttcgcggctaattccatctacgaatacttcaatgagcagtatctctatgcgcagataccccataagcagaagctccttgtggagtactacacaggctttggagggcgcaaattcgtcatattccatagcctattcggccgaaagactaatgatgcaatcgctagggcggtggcatttctcgccagtgacttcaataagcgaaacatcaccatctccattactgataatggattttatctgagtagtgatggcaagatgggggccctggaggctttgaaccggctgaatcctcaaaacttcgaaaacattctgatcaaaagcctggacaagactgaaaccctagccagccgcttccggcactgcgccgggcgctccctcatgaccctaaggagatataaaggccacgagaagtctgttgggcgccagcaggtcagaggaaagatcctgctcaagcacattcaggagatggacaacaacttcccaattctgaaggagtcccgaagggaagctacagaggactacatggacatcaagaatgctaagcgggtcatctcgtggattgacagcggagagatggaaatcaaaacaatcaatacaatcatccccaccccgtttgcattcaacctggtttcccaaggatatttggaggttctccaccaggacgataaggccgagtttacaaaaaggatgcaccgcgccgtgctcgataagatcaaggaagagatggacaaccagttctga

SEQ ID NO: 2817 - DNA, 852 bp, synthetic construct
  source 1..852: mol_type = other DNA
atggtggagaaactgagcatcgatgaggctattgaggcactgaaagacgaggatgtggcgaaccgcaaactcgccatcaaatcgctggagcacaagagcgacgataagattatcgaacccctgattgaggccacaaaggacgaaaacgcccaggtgagattcggcgctgccgaaatcctaggggatattggagactcagcagtcgacaaacttctggacgaatttaacaaggagtccggttcaaataaacgcttcttggccgttgcactgcagaagaccggcagcgagaaggcagtggatgcctttgctgacgcattgaatgatgaagactttggggtgcgaaaagtagccgtccgggcgctcggagaactgagggcggaagacaagatcgatgccatcgccgaatgcataaatgatgaggacgggggagtaaggacggcggccatcttcgcccttggggatatcggaactgataagtccattcaaatcattaaggatgcaagacgtaaggagaaggacaaggacttcaagaagtactgtaataaagccataaagcaggccgaaaaagtgcagaagtctggcggcaaagtcaagtcctccaaaggtcagccaatgagcacaattaaggagatggagaagcaagaccctgaggctgccatcaaggcttatgaggtgcatgtcaaaagtggcagtaccaaggacaccccctacaagaggctcgctatactgtatcgcaagatcaacgactacgacaacgagactcgggtgttaaaactcgctatcgaagtgctcagcaaagaaaacccgagcaaggttggctggttcgagaaacggctggagaaaatgacctga

SEQ ID NO: 2818 - DNA, 807 bp, synthetic construct
  source 1..807: mol_type = other DNA
atggacatcttcaattatatctttcagatcatcgtgtcggtgttgattttcgcagccatcttcgctgtgggaatactgctccgggataaaatagtccataagctcaatttctttgtaaaccctcagaattacttgcccgaagaggaaatacaaaccctgaagcaggtttactacctgattttaattctcatcctggtggtgtgcatcctaaacttcttctttgacaacaatatcattctgcccaacagtccggaattttacgtcttcaactccttccttgatatcatagtaagtgtgtacattgccattatcatttacgacggctctaaaaaaagcaaaatcctcctgattttcctaattcccatcccaagcattgcattcctcctgttcggcgagtccctgattgagtactgggattttgtccgcattcctgcattgctgtatatcatgaagatattttacgacaagttccacatctataccgacaagtacaacttggagaagtcaatccttcttctcttttcaattgtgttcattagttttatcatcacactggtggccgagaacgaagacccacttaacgccctggtgatggtctccaatgccttcacaagcaaggggtatactattctgggtgaaagcaccatcggcaaaatcgatagcatatttctcgtttggggggggtatatcatcagcggagcggctaccgccactctgacggcggccatcctgatcaagcactttaacgctaagatagagaaatttgacgaaaaattcgaggagttagagaagctgatctccgagtga

SEQ ID NO: 2819 - DNA, 846 bp, synthetic construct
  source 1..846: mol_type = other DNA
atgaataaaatcaagatcgctctgtgtcagatgaacgtggtggacaacaaggacgagaacatcaaaaaggcaattgagatgatcaaggagtctaagaaacagggggcagacctggcgatcctgcccgagatgttcaactgcccatatgagaacgagaagttcatcaaatatggcgagaccctcgaagatagccggacgctgaagtccatatctgaaactgccaatgaggaaaatatctacgtgctagccggtagcgtcccagagcttgtcttaaatgattcgagcaatgagaacaacttgtacaacacatcagtgttctttgacaacgaaggcaagatattgggaaaacatcgtaaggtccacctcttcgacatcgatatcaaggataaaatctattttaaggagtccgacactcttagtgccggcgatgactttacaatcattaagacacccttcgcacgcatcgggattggaatatgctacgacatccggtttgtagagctgtcaagaattttagctctcaacggtgccgagatactgattttcccaggggcattcaacctgaccaccggccctgcgcactgggaacttctgtttaggagcagggccctggacaatcaggtttacgccattggagtggcccccgctctggataaggaggctagctataattcctacgggcactccatcattgtgagtccgtggggcgaagtaattgaagaactggactacgatgaagagctgaaaatagtggaactagatctcgatctcattaagcaagttcgagaggagatccctgtcctcaaaaatcgcagaaccgacttgtacgacatcaacgaaaaatga

SEQ ID NO: 2820 - DNA, 1179 bp, synthetic construct
  source 1..1179: mol_type = other DNA
gtgaagtactgccaggagtgtggtaatgccagctacgacagtgcaccggtatgcgggaactgtggggctaagctcgggcccaagtcagaggccaattctacacccccttcccgggacaagaaagccaaatcgacatcaacgtcttcggaaagctccatattttcaagcaaatccgacggatttagttccaaaataggcaaaaagattggcagtttccaggtgagcagcaccaacacggcagtggaaaataaacaggagagagaagaagctttcctgaagcagacttcaaaaccaagtttcagcaaaactgcaaccgagggttttaagcagaaggataaaggcataaagaaccctgctacaaagtacaatatgccgaaaaaggaagagacggttgatgccaaggctaaggaggcccccaaacgagaggcgcccaagaaggaaatcaagagggaatcccctaagaaggaggtgaaaaaagaggcgcccaaaaaagaaattaagccaaatattgtcaagaaatcagatgaaggttcgtctggcggcattaacctgaaaaagattggaattattgccatcatcatcctaatcattcttctgatcgccggaatcggactgaaccagatgcaaaaccagacaaccgatgaggtgatgaactatacagacggcatcatcaatttcacctactccgggaactggtcagtgtacaacaataccaatgcagattccaacatgaccgaccttgccttcaagactaaggataagactctcattgggtttaccacaatccagagcgacgaaatcacttatgagaagatcttgtccgacgtaaacgacaccgcccattccttaaatggcgagatcctggagtatcaagaggtgaatgtggggggcgtcccagctcaggagataatcataagcacccaagatcagggctattcccgctacctctgcatcctgcacgacggagtctactattgcttcgttgccaacaatgcaaagtctgacaaccagaacttgaccagcctgaataccactgagatccagaatatgatcaacagtattagtttcaaggatgtggtcgctggagacacggcgaacctcgataccagctaccaggaaagcagctaccaagaggagagctacgacaactataactatgaagacacaagcaactactga

SEQ ID NO: 2821 - DNA, 501 bp, synthetic construct
  source 1..501: mol_type = other DNA
atggtcaagaaagaaaagatcaaatgcgacaacattaactacgcagtttatcggatcgacgattgggagaacgattacgaaataaacatcattggaacggcccgggagattcccgtaacccagccgaccctggagcacatgctgaagcagatggatcacatccgccaatccgtgttcgagatcggcgggaaaaaggtgaatggaatgattggcctgtcgatgcagtttaatccatccttcgcctcaagagacattgatgagctaatcgaacaggagcaaaaggagtttgatagcatcatggcggagttgaacgccctcgaattaaaggacgcaaaggatgtgatattcttggacacagacgagtacgtcatatacaaactggagtatgacgggcatagcctgagccccaagccttataatgactacgctaaacagcatcacctcgacgaaatcaaacgactgaaggaactcagtggcgaaaggttcgtgctggagctttga

SEQ ID NO: 2822 - DNA, 726 bp, synthetic construct
  source 1..726: mol_type = other DNA
atgtctaaaattcagcagttgcaggagataataaactcatccgacaatatcgttttctttggaggggctggcgtgtccaccgaatccggcatcccagacttccgctctgaaagcggaatctttaaaagcctggaaaaatacggggatgttccggagaacctggtgagccacacttactactcagaccacacagaggagttctttgagtactacaaggacacgcttgtcttcgatggtgcgaagccaaacccagctcatctgaagttggcagagcttgaagaaaaaggcaagctccgagccgtgatcacccagaacattgatggcctccaccagaaggccggaagtaagaacgtcctggagctccacggaagcatccatcggaactattgccagatctgcaataaggagtatagtctggacttcattttaaaaagcgaaggcattcccaggtgcgattgtgggggtgtggtaaagcccgatgtggtcctttatgaagagcctctagacaatcggattctagcttacgccatcgactacatccaaaacgccgacaccctgattatcgggggcacctccctggtggtgtatcctgccgcagggctcataaattatttccacggtggcaacctggtactcatcaataagagtgagactggctttgattacatggcgaatctggtgatcaacgagcccattggagagacactgtcgcaaatcagagtctga

SEQ ID NO: 2823 - DNA, 573 bp, synthetic construct
  source 1..573: mol_type = other DNA
atggatttcatttcaactctcctgattgcgatcgccctcgcaatggatgcctttagcgtgtccctgacaaagggcttcaccctgaagaacctcacaaagagccaagctctgtggttcggcatattcttcggtggctttcaggctctgatgccggtgctcggctggctaggcggcatccagttagaatggctcattaccaccttcgccccatgggttgcattcatcctactgcttctgatcgggagcaacatgattcgggagagtctctcgggtgacgaagaggatgagaaggacagcgacaagttttcctttaaggagttgacgttgctggccatcgctactagcattgatgcattcgccgtggggatcacctacgcggtgctgaaagtcgacattctgatccccatcataatgatcggagttgtcgcctttatctttacaattatcggactgtatttagggaaaaaaatcggaaattacttcggagacaagttcgagatagtcggtggcgtgatcctgatccttcttggggtaaaaatactcctggaagggcttggaattttggtgctgtga

SEQ ID NO: 2824 - DNA, 783 bp, synthetic construct
  source 1..783: mol_type = other DNA
atgaagtataagatccttgagaaccccaattacaaagaggcgtacgagctcatcgaagaggggctagtgaaaaaagcaaccatgctcctattcgcctgctgtaaggtaagctatgaaggccgtgcactgagtgagctggactacggcgagcgcatcatcatgatcaagccagacggctgcttcttgattcaccaggacaacaaggtggacccggtcaattggcaacctccaaaatcaaaaacaaaagctttgatcaaagatgaaaccctgtacttggagagccacaggcgaaagccccctgaactcctggaagtggaggtgaagaagattcactatgccagatacaacctgatcgaagattacgaagagctggaaagagcgggctacgagaaggatatgggggatatgatttgggacaacccacacatcatagaggaaggattccgcccgaccgtgagggaatatgctacagagcatggtttcattgacattctcggaaaggatgccgacggaaacctgatggtgctggagctcaaggcccgcaaggccgggatcactgcagtgaaacagattcggcgatatctcacggactttgagaatagggagaacaaggaaataagacatgaggaggaaaagcagaaggttcggggcctgcttgttgctcctagcataggtgacgatgcccttgagctgctggaggaagaggggatcgaatttgtctccgtcgagcccccccgggagctgaaaaaggacaaaaaagtcactttagatgcctttaagtga

SEQ ID NO: 2825 - DNA, 1377 bp, synthetic construct
  source 1..1377: mol_type = other DNA
atggaaatgaacgaaaatgtggaaatgattacaggcgaccctaaaaaggcaatcaataaactggcgtggcccctgatagcaagcatgctcttgatctttttaaacaacattatcgacagtatctgggtggctgggcttgggcccgaccctcttgctgccatcggctacgtcacacctctctttatggtgcttgtaggctttggcaacgggatcggcgccggtgcaaccagcctaatctcccggtatatcggcgcggagaagagggatgatgccaacaacgcagcgattcacagcgccatattaagtgtggtggtgtccctggtgctcacggtcatcgcccttctgatcttagagtccctgctgaagctaatgggtgcggggagtgtgctcaaatatgcaatggactacggtgtgattatttttctgttcactgcccccatcctgataccgcctatctttgggggcgctttcagggctgaaggagacattaaacgggcaaccgtgcccattgcccttgttgctgttatcaatatgatcctagatccgatcttcatgtacgtatttggctggggaatttccggcgctgcctttgccacagggctggccccatgtttcgggctttgcatgatgctctactggatattcattaaaaaggacacctatctctcatacaatcgcaaggacttccacaataacctgaacatgtacaaggacatcctggtggtgggaataccagcgagcctggagcagctgatcatggctgcactggcagtgaccgtcaattacatgctcacccttgtgtcaggttcagtggcagtggccgtgtatacagccggatggagaatcatctcgctgggcctcttgccagctattggagttggaactgcggccattacagtcacaggggtcgcttacggggccaagaaatacgagaacatccgtacggcctgccgatactcggttaagctagggctcatttcctctattatcgtatgcatattgctcttcatatttgccgatcagatcgcctatatcttctcttatagcgaggcaagtgctcatctcctgcccctgatcgctggattcatacaactgatgtgtctcttcattctgtatgtgccattcggtgccaccgccggtaacgttttccagggcttgggaaagggaaccacttcctttgtcttgaccacgttccgcgagttcgtcctggtcctggtctttgcctacctgctgggcttcgtattccacatgggagagactggaatttattatggcatgctgatcgggggctttatcggtagcgtcattgcctacggctacattgaatactacgttgatagattgatcaagggcaaggtgaaaggcagcgatatctga

SEQ ID NO: 2826 - DNA, 768 bp, synthetic construct
  source 1..768: mol_type = other DNA
atgcaaaaagtcatcaactctcactgtcacatatacccagataagattgctgcaaaagcggttaaagggatacgcgatttctacgaccttcatatgtccctaaatgggacggtagatgatctgattgaagacggcaaaaaagtaggggtggtgcattatctcatccacagcgtggccacaacccccaagcaggtcgagtcaatcaatgaatttatcagttttgaagtcaacacgcaccctggcctgtttacaggcttcggcaccccgcaccccgatagcgaagacattgagcgggacctagaccacataattgaactggggcttaagggcgtgaaggttcatccagacttccagcagtttgccttgaacgaggagcgggcctttaggatgggtgaggccatcaacgagcgaggactgcctattatgatccactgcggcgacttccgctataactactcgaatcccgagcagttgaggcccttcctggaagagttccccgacctcacagtgatcggagcccatttcgcaggatggagcatgtgggagaaggctaccgaggaactggccggaacccctaatctgatcgtggactgcagttcaagcttatattccctcactccagagaccgctaaggacctcatccacgcatacggtgccgataaggtgctctgggcgactgacttcccgatgtgggagtccgtcagcgagatggaaatgtttaacaagattgatctgtccgaggaagagagaaacacttactctctgtga

SEQ ID NO: 2827 - DNA, 999 bp, synthetic construct
  source 1..999: mol_type = other DNA
atgttcgatgtggagagtattgaagtggagtacttcactctcaaggaatttaaattcaaaaacggagaagtcctgaaggacgccaaagtggagtatatcaccttcggaacccccaaatacgatgacaacggaattatcaataatgccgtaatctacttccacggaacaagtggcaattgccactcggccaagcggctgtgcgagtctatgggcagcggtgatatactggacacagataagttcttcttcatttccttgagcactcttggcagtccaaactccgcatcccccagtagcactggccttatgaacaagtttccagaatatgacatcgaggatatggtcaatttccaaaaacagttcgtcgaggaaagattcgggatcacccatatcaaggggctgattggcaactctatgggtggtttcgaggtcctgacatgggggtgcgtgtacccagactcggtggactttattatctctctggtgagcagctttaaggtagggggccacaactacatactcagcaaagtgatcgacaacatcttcacgtcagacccggactacaatgacggcgcatacgatctgcccatctccgattctctgaaacgaagcctcaagctctcctcagatgcgatgtattcatttggactatcacgggaggagtatcgcaacaaccttaccaacgaggaattaaccgagtttatggctgagtttgcggaggaaagcctagaagaggaccctaacgacgtggtgtatatgaacaaggcttccattgattttgacattagtgaggacttgaagaatataaaggccaaggttctgattatcgctatcaatcaggaccagtacttccctcctaatttggatgccatccccatgagcaagatgattgaaaacaataaactcgtcatatttgattcctgtatggggcatgttggctctggggaactgtttaaaatcgaggatgacctcagggagttcctgacggaattttactga

SEQ ID NO: 2828 - DNA, 405 bp, synthetic construct
  source 1..405: mol_type = other DNA
atggagatcacttacaaggatacgcacgacttcaaggaagaggacctgaaagacctcttcctgagtgtggagtggagctcagggcattttccagacaagcttgtcatagccatgaaaaacttcgagaccgtgtattccgcatgggacggcgataagctggtaggtctggtcagcgctatggacgatggcatcatgaccgcctacgtgcactacgttctcataaggccggaataccagggaaaggggattggaaaagagctgctaaaacggaccacagaccactataaggattacttgcgcatcgtggtggtctcctataatgaggagattgagttttacgaagcctgcggctttgaaaaggcagatgacgcgagccccatgttcatcacagaactctggacttga

SEQ ID NO: 2829 - DNA, 285 bp, synthetic construct
  source 1..285: mol_type = other DNA
atgttctctgtgaaagtggatgattatggcgagaccgaggacgacatgcactttgtcacgtatatgatctccggactgagtgaagcggaactggactacctcattgctaatcttgagggtgagctcgccctggaggatggcaacctgttcctgaacatcttctactcaaagcagttcttcccctttgggagcgatgacgcccatttcaagctagacgactttattaagcgggaagagatagaaatgacatacttcatcgcaagctttttggaggacatgaaatga

SEQ ID NO: 2830 - DNA, 942 bp, synthetic construct
  source 1..942: mol_type = other DNA
atgattagcaaagaaacatttgataaggacaaggccaactttaagggcacctaccgtcctctcctaaaggagattgacaatcccacgctgcttcagatagatgagctacacggcattgcaggggcattaagcggcaaaaaccagaacattcacaataatatcctgctgttgctggcctctatcgggaccataattaccatcatcttcttcatctactttgagtgggacataagcgcctttatcatcccttgcgtgctgttgatgtttatcctcatcggtatccacctggtctcaaacaagctgaactatcacgataaataccttgaatacagggtcctcgccgaaagtctgaggctgcagttcttcctctcctatgctggtgcccaggagaaggtgatcgacatcctcccctggttcatcgagcatggggtgccactggttaaagaggtattgggaaccctggatttcactgagctaccgcagaagcgcgagatccgagacaactggattatacaccaaaagaaataccacgaaggggctctgcaaaagagtaaaaagaaaatgcggacccagaaaattgtcacatacgcgtcaattacagtgacaatcgccacctacatcattgcactgatcttcgaatatctcatccccgcctcgacgttcaatctgaatggcgacataattcatcttggcatcaaactggcgatggccgggatgtctgcattcaccctctttttaggaagctattacggcaagatgtccctgtccgaaaagatcgatgaccatgagcggatggtggaactctatggaattattgaggacagaatacgcacggaaggagaaactgacgagatccttagctacgctgctagagagttcctgattgagaacagtacttggtacgcgtatcagtccaagaacaagccagatttggtggtttga

SEQ ID NO: 2831 - DNA, 918 bp, synthetic construct
  source 1..918: mol_type = other DNA
atgacaaccgaactgcagaacgaaatcattcaattgaaagaggagaagaacgcaatcattcttgctcacaattaccagcctaaggagatccaggagatagctgatttcctcggcgatagtctggaactgtgcatgaaagcaaaagagattgatgacaaggacatcatagtcttctgtggcgtggactttatggccgagactgcctatatgttaaacccagacaagaaggttctgatcccagatatcgaggcggagtgtcctatggctcatatgctgacaggcgaacaggtcatcgaagccaagaaaaaatatcccgacgcggccgtgtgcctgtacgtaaacagtctcggagaggcaaaggccgaatccgacatcctctgtacctcgggcaatgtgaaaaaggtcgtagagagcatagaagaggacaccattctctttggacctgatacaaacctaggagagtttgtgcagccattcacggacaaaaagatcattccgattcccggtgacggtcactgctacgtgcacaagctattccataaggaggatatagacgacgcacggaaaaaataccccaacgctgagataatcattcatcccgaatccaataaggaagtgcaggatatggcggattacgtcctcagcactggggggatgctgtcacacatccgagacagcgaaaagcaagagttcgtcattgggactgaagtggatctcatcacgagactggaggccgagtttccagataaaacctactatcccttgcttgagggcgccatctgcaagaccatgaagcttcacacactggaaaagctgaaagactgcctggttaatgaggagcctctgatcaccgtgccggaagacattgccgaaaggtcaatcagcgctgtggagcgcatgttggacgcctccaagtga

SEQ ID NO: 2832 - DNA, 807 bp, synthetic construct
  source 1..807: mol_type = other DNA
atgaccacaaccgaatggctgtaccaaattttactcaatctgctggatttatccacgatcatctcaattattgtaattatcatagccgccgcgataatcatcaagctaggcgaaaaatccctgctcagaatcgagaaaaagtacgagatcaacctgactgcccattatctcctcaaagacatcctgaagtatggaattattataattgcacttgctttgatattgaatctaattgggatagacctccagaacatcatcttgagcctgggaattgtcagtatcgtcatcggttttgccagtaaggacatcgtatccaacttcatctcaggcatattcgtcattggcgataagaacgtccaggtgggggagaccatcgagattgacgggcgaaagggggccatcactaaggtggggttcaggaatacaactatgattggtatggataactttaaggtgaccattccaaactctgttctgagcaccaagacatacaaaaacttccctatgggagaggattacaggcttcgccttgacgtgatcctgccgcacggatttgatatcttcgaatacaagcagaagatgacggaggctatggaaaaatatgagtatatcaataaagacaaagagcccgtgattctggctcgcgagatcaacgaagagggctcgaaagttgaaatcagcttttggatcaacgactacaaggaccgggaccccggcaaggcggtgatcctggaggaaagcaataagctgatttatgactacctcatggatgagaagaatgcaggcatcctgcggatagtgaaatga

SEQ ID NO: 2833 - DNA, 912 bp, synthetic construct
  source 1..912: mol_type = other DNA
atggaaatcatctttctgggcacatcctctgccgtgccgtcaagggagcgaaaccatgcggccattgtcatcagagagtttggcgaggtttttctcttcgattgcggcgaagggacgcagcggcagttcattgaggcaaatgtaagtccaatgaaggtggataaaatcttcatcacccacttccacggtgaccacatcctggggctcggaggactaattcaatcaatgggactgcgacagcgcgaggaggatctcgatatctacgggccacggggactgaaaaaggtgatgaatgccatcacccacaccgggtacttcaagattgacttcaaccttaacattcatgagatcgacgaaggcattgtcgtggagacagagaagtacagaatagaaaccacaaaaacaaaacatagcgtccccaataacgcttattcgatcatcgagaagaaaaaaccgcgtttcattagggagaaggccattgagctgggtgtgccagtgggacccgcctttggcaagctgcaccggggcgaggaagtggagatagacggcaaaataatcaagcccgaacaggtcctcggtcctcctcgcaagggcctgaaggttacttatagcggggatactagaccttccttcaagctgatcgaacttgcaagagacagcgacatcttaatccacgaggcgacctttgaagaagaagaccggctgcatgcgtacgaacacgatcattccactgcaagggacgctgccgacatagctcgcgaggcaaatgtagggaaattgattctcacgcacataagtcccaggtatcaggaatttagcgtcttggagcgcgaagccaaggaggccttcgataacgttgaggtggctgaggactttaaggtgttcaacatcaacagcaaagacaaggagtga

SEQ ID NO: 2834 - DNA, 831 bp, synthetic construct
  source 1..831: mol_type = other DNA
atggacgatatcataaaatttatgctggaggaggacgagggctttggcgacatcacttccaatgccttgattccgcaggacaaggtgttctacgccaagctaatctccaaggatgagggaatcctggccgggattgagatcatcaaggaaatcttcctggaatacggaatcgatattctgtcctctaaaaacgatggggacgagatcaaaaaaggggacattctgctggaaattgaaggaaacgcgcggaagattctgctgttagagcgcactgcactcaacctcctcatgaggatgtccggcgtggccaccaaaacccacagggttgtaagcagtgtgaaggaggtcaacgacaaggttcgcgtagcaggaacaagaaagacagccccagccctgcagaagtatgacaagatcgctatttcaatcgggggcggcgaccctcaccgatacggtttggatgacatggtgttaattaaggacaatcatatcgcagtggtcggctccgtgaaggacgctcttagacttgccaaagagaacgtcagctttagcaaaaagattgaaatagaggtggaatcggccgatgacgcggtgatcgccgcagagaatggtgccgacataatcatgttcgataatatgagtcccaaagaagctcaggatagtctcgatgctctcatcgataatgacctacggaacggtgtcctgattgaaatctcagggggaattacggaggataacatactcgattatgcgcccctggatgtggacatcatatcactgggctctcttacccaccaagctagcagcctgaacttcagcttggacatggactga

SEQ ID NO: 2835 - DNA, 258 bp, synthetic construct
  source 1..258: mol_type = other DNA
atggccgaactggacaacaacattaaggaaaaattgacagaagtgttcaaagaggagcttggcaaggacgatttcgaactcaattatctgattaccgacaacgagatcacgtttttctttggcatcagtgagggaaaggaactatcactcgatgggatcgagaagatttctagcataatcgatgggggatacgagggcaattccatcgtcaatcaggagtaccggtacaaattcaacctggacccctgcagcgactga

SEQ ID NO: 2836 - DNA, 2097 bp, synthetic construct
  source 1..2097: mol_type = other DNA
atggagaatcgctatcaggaacatcaatccgacttcaaatatctcttgatcatcaatgatgatctggagtgtgagataaagattcgccgagaaggcaatgccagtgagaagaacctaaaggacaatattttcacaatcaaagaggccagtgataaggaattagaggatatcggccggatctatgacctgttcgaccagttcgcaatcgaaaatacaagatacgagaaaatccagatggacaagaaggccttcattaagttcgccctaaacattaaacctatcctccgggacaataatgcagagcttatcagctccaaagagattatagaaagcgatttgaaactgatcatggatactgacttgaaggagaatgagttttctctgaaaaaactaaaccgtatcaaatggatcgtgagattaaacaaagggagaattgccctccgtgacttcgacaagcagacagaaaacaataaggaaatcctcataacccggaactacttcttcattctgaaccgaaacgagttcctggacatcaaattctacgcatcctcactgcttaaaaccacagaaaatagcgaaatcctcaagctggcactgtccgaagagatcgatggctttaagttcgaagtgggggagaacctgaagcgcctgataaacccctctagggtgtacgaggtgcctaggaccttaaagggggaattgaggacctaccaaaagattggctattcatggctggtgcagaacattaggtctggctttggttccatattggcggacgatatgggtctggggaagaccctccaagtcttaactgctatcctttactttaaggagaaagggctgctggaggaaagaccgagcctgatcgtcgtgcccccaaccctgatttcaaattgggagcatgagattaggaaattcacccccgaactatcatattacatctatcacggcacaaaccggcgttttccattggaggactacgacattgtactcagctcgtatggagttattcggaacgatctcgaccttttccttgataaggaatggtttctttacatcatcgatgaggcccaaaacattaagagcccacatacccagcagacaaaagcgattaaggaggtgaatgcctacaacaagatagccctgactggaacgccaatcgaaaaccgcctcacagactactggtccatatttgactttacgaataagggctacctcagtagcctcagtgactttaaggacagctatgtcttcagaatcgaaaggctggaagacgagcgatccctggagaactttcttgccatcacaaaaccttttgtgatgcgccggctgaagaccgacgagcagatcaagggggagctgcccgataggattgtcaacgatatctacgccagtctgagcaagaaacagatcaagctttacaacgctgtcctggacggaatctttgaggagatagacgaactcaaaggaatcgaacggcgcggcaccatcctcaagaccataacttccctcaagcagacgtgcaaccaccctgctcagtttctgggcagcggcaaacccaagatcaaagaatcaggtaagatggaactcctgatcaccattctggagaatattatggacatggatgagaaggtcctgatcttcacccagtacgttaagatgggagagattattcaggatcttgtgagcaaaaaactgaaacgggaggttctgttcctccacggctcgcaaagcagaaacgagaaggcagagataatcgaccggttccaggaggatgacaactacaagattttgattgccaccctgaagacagggggagtggggttgaatctcactgctgctagtaacgtgattcactatgacctatggtggaatccggctgtggagaaccaggccacggacagggtacaccgcatcggacaggaaaaggatgttatggtgtatcgctttatcacgaaaggtactctggaggaggaaatcgattcgatcatcaagaccaagttggacttagctgagaaggcgataagcgtagatgagacattcattactgaaatgactacggaagagctgaaacgagcactttccctgagactgtga

SEQ ID NO: 2837 - DNA, 435 bp, synthetic construct
  source 1..435: mol_type = other DNA
atggccgaggacgagaaaatcgaggaaatcgaggaaatcgaggacaaagaggaggaaaatctcccttttgcgaaagctgaagtcgttcgacttatgaaggaaaacctcgatgatgacaagatgataagggagcgggtgaaagtcgagatgaacaagttcctgggcgacattttgaagcaggtatgcgaacagcttaacgattacccgtacactaccatcgagtatgaaatgctgaaggagagcatctatccatacacgaatatcaagcgcattaaccaggagaaagaaagaatactactgcacttaaatgccattaaggccgactgtgatgccctggctatggacgtggaaaagacactcaaactgaaggatgtggcagacgaagacgcattcacccccctgagcgaggcccaagatgaggagatggacgagtga

SEQ ID NO: 2838 - DNA, 516 bp, synthetic construct
  source 1..516: mol_type = other DNA
ttgaatgaagcactgactaagctgctagacctcatgcaggattataacgtcatcctgcctaatgagttcgtctcaatggctaggggaatctccatgattgaatctgtggccaccaccctcgatcccaaaatcgatgtcatggcttccatcgaaccgatcgtcaaagaggtaatggaagagcgaatgaacattaaggagtctctctcaaacaaaaaaggcagtctcgtttactacaagaacatgctgaagacacttcccccactgctaacaaacagcgtgcacaagataaacaatggtgacatgaagctgcgctttgagattgacagaatcgaccatattgtgagcaagttcagtctcgtggtgatcattgccgcccttctgatgagctcctcgataactatgaccatcaaccgggggcccatgttattcgacatgccattgattgcagttctgggctatatagtgacgtttatcctgggggccatcgccgtggcgaattacatctacagccggtga

SEQ ID NO: 2839 - DNA, 666 bp, synthetic construct
  source 1..666: mol_type = other DNA
atgaagcatagactgaatctcgataacaaagaccccaactacattttgctcaaggagatcttcaaaattatggattcccggaagagcaaaagtatcctagcctcctatggatttaagaacctaaatcgcacaatcttcacttttaagattatcttcataagcatgttcttcggcattgacattcccttcatcttaaacgagctgaaatccaaaaaagaacttcgcaagtactttaatatcagcgaggtgctgacggccgaccaggtctataaaatcttttcagaaataaactctgagaaactgataaaatgcctgaaccggatcttgaactcaaggaatatggttaagaggcggggcaagaagacttttatagtggatgccaccccagtggacgtcgatattaatttccacagaaataaaaagaccaaggagcacctggagaagattaatctcaagtggagttacagctcctctaagggttattatatcgggtttaaggcaaccgtggtactggattacgacagtatgaaccctgtgtgtatcctcgtccactcgggagctccgaacgacgcgaagctgttcgaagagattctggaaaacctccagaaacgtcgaatcatcaggaagggggacacacttatcttcgacaagggctactacagctga

SEQ ID NO: 2840 - DNA, 111 bp, synthetic construct
  source 1..111: mol_type = other DNA
ctggatgacatactgacatatcccctcgccgtgttcaataaaaccaagaggatcatgaaggaaaagcggctatacaacagcctgaagatggagctcatgaaaaagaaatga

SEQ ID NO: 2841 - DNA, 132 bp, synthetic construct
  source 1..132: mol_type = other DNA
atgcgggagatccacaaatacacccccaaatccgtggaaaagacagtctatctcaatgtgttcctaggggccctgattataagccagggcttttacagcaagacgaccatccaacagctgagtgagaactga

SEQ ID NO: 2842 - DNA, 348 bp, synthetic construct
  source 1..348: mol_type = other DNA
atgatcgaactgaacaagaaatacgtgtttcacgtgcccctctacaaatacaaagatgaagagctcatcccgattgatatggacgacatcctagatgaactgatagacgaattttatcaaaacggctatgactccctctatatgaccaatatagaaacctactacaagtatcggttcctgacagagatccttatcagcatctttgtcagcacggagcgcctggcaaaggagaaccaggagttcccagacaggattttcaagaagtggttcaagaagaacaataaaattttggagcaggaggccttcgcgtacgagtacaataacaaaatgtttattgagaagctgtga

SEQ ID NO: 2843 - DNA, 600 bp, synthetic construct
  source 1..600: mol_type = other DNA
atgacgaaggatgatattatcactggaaaacaggcgataatcaaaatggactgtccagtatgcggtggcaacaaaacagctaattacatcactcagacccacgagcttgcctatttcggcgagatagtggaatccacaatccagtgcgaaaaatgcggatttcgccacagcgacattatcactaccgagcagaaggacccggcaaagcatagcctgatcattaccaagaagtcactgaacagtagggtggtccgatcccagtctgccaccgtttcactgccagagatcgggatcaaggtcgaacctggccccaaatccgagggttacatcagcaatgtggagggggtgctcattagattcaagcaagccacagaaagtgccctgcggatgttcgacgatgaggagtcgcagaagaacgcgaacgcagtgctggacaagataaatcaagtcctggctggggagttggaaaccctcctactcattgaagacccctttggacagagcaaaatcatggacgttcgggccaagagcgagcccttaagcgacgaagagcttaagaacctgaaaacaggcttcacggtgattgatgatgagcagtga

SEQ ID NO: 2844 - DNA, 948 bp, synthetic construct
  source 1..948: mol_type = other DNA
atgaaaccttatgtgattctcatcggcagcgcttcagggataggcaaatccacagtggcagctgagctggccaaaacattaaacattaagcacttggtggaaaccgattttatcagagaagtagtgcggggaatcattggcaaggaatatgctcccgcccttcactcatccagttacaatgcctattccagcctgagaaaccaggaaaactacaaaaaccaggcggagctgatcaatgcagggtttgaggagcacgcgtcatttgtgctgccagcagtagagagggtcatcgacagggccataaaggaccatgatgacattatcctagaaggggttcacctgatccccggcttcattgacatcgagcagtttacagacaaggcatcggtcttcttcttcatcctcagcagtgatgaggaggaccacaagaaccgatttgtgaaacgtgccatggaaatccggaggggtggaaagcagctcgactactttaaggagaaccgaatcatccacgaccatctgatagagcaggctcaaaagcataacgtgccaatcatcaaaagctatgagattgaaagcaccgtcaagaagatgctatcctacattaacgaaacctgtgaaaccatctatctgaaaaacactgttgacgagttggataaggtgggcgaaatcatcctggaccgctacagcggaagcataaagaatatctcctacccgatcaaggggttcaaagagcctctcattagaaagatagatgtcagcgagatccgggaatacgataagttcataaagaacctgaataagttccccgagaaaaaggaggaacttaaagagctgtacagtctgactgactatcgcgcctaccgcatttgcgccattaataatgaaacgattgagaaaattaaaaatgaccttgataaggagggtttgctcttcaaggaggatatgtga

SEQ ID NO: 2845 - DNA, 1053 bp, synthetic construct
  source 1..1053: mol_type = other DNA
ttgtacagcataacttcagtggaggacctgcaagagctcaacccatatgtgattatcgggtgcggcgggggcggggagaaattctccaaccttgaagggatcgaaacagttggttttctagacgacaaccccgagaagcagggaaaactcttctgtggtctggaagtcgccagcaacctgtccgaccttttcgagtcaactgatgctaatacagtggctgtcatgctgcctatcggcgctgagggcgcagccttgaaatacgccgtagaggccctggccaatggcaagaatgccgtggtgagtttccgctcactcagcctgtgtgaaaacgagtctctgttgaaactggcaagtcagaatgatgtagtgattaaggaaattagtcccagactggacgtggtgcgtgaaatctgtggtaccgcacccgagaaatgctgcgaggtgctgcccaagatttcttacgaacccaaagcgaaagttgtctttgttggggggacatcccaggagtgcggcaagcggaccacgaccaagtctctggggatcgaagccgaaaagagaggcatgaaggcggctgtcatttccactgatgagatgggactggagaagccaaccgtatttaacttcagggccggaagcttgtcggctatggatatccctagcgccattctcagctccatgaaatatgtggaagaaagggacagtccggacatcatattcatagagggtcagtccagcctgacggaggatgggaaccctcatccccgcggactcagcgcttgcatccttatcggcgcaaatcctgacgccgtcatcgtcggacaccggccaaaccacccatatcgggagccacgaggaatcgactatgaggtgaaggctatcgaggcggttgtgcctaccacaaaagtcgtgggattatcgataaaccttaggaataaggatgaaggcatgaccgtggaagactttgagaaggagtacggtctaccggcagcagatatgtacgacggcggcgcctcaaagttactggatgccattctcgattacctcgacgagtga

SEQ ID NO: 2846 - DNA, 285 bp, synthetic construct
  source 1..285: mol_type = other DNA
atgactaagatggaaattgagcttaatgacgagcagctagaaaaagtgaagatactggagagccatgacatcagtgtcggcgatgctatcgacatgctgtttgaagcccgggacagggtgatctccatcattgatgacatcgatgagaaagatctcgaagacgatacacccaacacagaggaggccaaagcggagcaaacccagctgaccgtaaagacgtatgacatagcaattgaagattacaagtcacacatcagctgggccaacgacttcttcaagctctga

SEQ ID NO: 2847 - DNA, 345 bp, synthetic construct
  source 1..345: mol_type = other DNA
atggtggtgcaagagcatatctgcataaacgaagagaaaatccaggagcacagtctccaactaaagagccttgaaagcgatgccgatttcaaagacaagcggatggatgaactgtaccgcaagatcgacaagattgaggaaaaactcgacgtcctgaataacaatataaacaattttttattgcgcaattcacaggagaacaaaaagatggaaattaggctgacaaagatcgagaccgacattcagaaccagaaactggagtcccagcggagaatcgcacgaatgggcatcgctctcaccgccatcacgatactgatcaacatttatttcaagattatgcactga

SEQ ID NO: 2848 - DNA, 969 bp, synthetic construct
  source 1..969: mol_type = other DNA
atgaaaatcgccccaatgaacaaggacaagggcggtgaaaaaattttggactacagtatcctgaaccacaaaggcttcaactcttttgaagagaaaatcaagcgcatcaaagtccacaagccctatgataagatcctgaagaccagtttcaagaagaaccccaatgggtttttggagatcctggaaaagggcgccatattcgaagagttcgtggatagtgagattataaacgcttttttcagggagttgcattctgatattattattcgggtttataagaagcggatctatattattgaatttcagagcagccgtctcaagctcgaggacattctgaggttcgggctttaccgcgccagcatagctcaccaggaaaaaaaggacatccacctgtatgtggtttccaaggagccgataaagagggataaaattgaaaataagtacggcgactactggtttactatacatgtcaaatcgcttaccgacatggattacaataaagcgctgaaccgcactaataacaagatcgagaatgaggaggaagagtttacagaggaggatttcgtgtacctggagatttcccctttaatgactcgaaaaaagaaaaagcagcggcagctgctgaaaagagtggctgagatgacgaataagctggacgggagaatcagccgggagaagcttattgagatcaagtccatccagttcgtgctggcaacggagctcctaaacgacaacgaaaaagccaaaatcgccaaggtgataagcatgcagtcagaaggaaaagaagaggtcttccaaggatacctcacaaaggaagagcgaaagcaaacctatgaagaaggaagagaggaggaaagggaggaaatcgtgaagagcctagccgagctcgacgtatcaccagacatcatcgccaaagcgacaaaaatgtccaaggcagagatcgcaaccctcacaaccaccatcatctga

SEQ ID NO: 2849 - DNA, 510 bp, synthetic construct
  source 1..510: mol_type = other DNA
atggagtaccgcttgccccggatggaggatgaggatgacattcgcgacttcatccgcgagtgctgctacgtggaggaatgctatgtcatgctcaagcaggagctcctgctgtcggactacagcaaatgggtgtcactcatccacagatatgcaagtctcggcaacggaaaatgggggagaagtttgctgcttctggcctatgatggttctcgactggtcggaatcctgccaatcagatacgaaatatccgaggactacgcctttctatatggcaatattggctaccatgtgcggccgtccttaaggaacatgggctacgcaaccaagatgctgaagcacggactggaaatctgcaaggaaaaagggatggcgcgggtaatcgtcgggtgtgacagggacaatctggccagcagcgctgtgataaagaaatgtgggggtgtgcgacttaggacattcaacgactcctacggcgttaacgattattacggaatttatctctcaagcgaatga

SEQ ID NO: 2850 - DNA, 654 bp, synthetic construct
  source 1..654: mol_type = other DNA
atgaaaaccacctcagtgatagtccttttagttattctgggctatgggctgaaggtgactcaagacgtcatcaacggcggcaccagtctgccaaagatcagcctgaaggagttgctcaacttcggggtgaaaggaaccatcgtctacaccttctatctgaccatacaggcctccctgctgggtttgatttccctagccatgaacttccccgaatttgagttggaagagatgatcctcaatcttcacgagaccattgaacttttttttgagcatgacccgatcagcttcatcctctttatcatactgggactgctcattgtctatggaacaatattctttatggagatcgctctggcgattctcgccgatggggaaacgctaaaagccgcattcgacttcaagcgcatcaaaaggacagtggagacaatcgggtggaaggaatacgctgaggactacacaaagatcgtggcggctgtagttatcttagtatttatcaatggctatttccactcttacgggtggatctcgatcattatcggcgtgctgactgatattctggcattcactgtggaataccggggcattggtaacatttacagaggatacaaacagaagataaatcaggagacggccctcgaggatacgagcaactga

SEQ ID NO: 2851 - DNA, 1407 bp, synthetic construct
  source 1..1407: mol_type = other DNA
atgaaaaagaccaaaattattgctagtgtaggtcctgcatccgattccgttgaagtgatgagtgacatggttgagatggggatggattgcgccaggatcaacctctctcacgcgaatcaggaggatattttgaaaatcatagatgtggttaatgaggtgcggaagatatgcaacgtgccgctcgcaatcatgtacgacacaaaagggcccgagttcaggacttctgaatttaagcatggcggtgtgctgcttaacgaaggggacaccatcaagatgagcaagacttgcatccagggtaataaagaggagtttggcgtcaaccataaagaagcaatcgactttatcaacgtgggcgacaaggtgctcatcgacaacgctctcctggagtttgaagtcattgacaagaaagaggactatgtgctcctcaaggcgctgggcgatggcaagatcctaaaccataagaccatcaacgtccccggcgtggacctgaagttggatttcataagtgacgtggacaaggaggacatctccttcgcagccgggcactcctgtgactacctggcccttagctttgtaaactcaggggaggatgtaattgccgcgcgtaaaatcgtggaggacgccggaggagacgccctgatcatttcaaagattgaaagtcgcatgggccttatgaatctggacgagattattgatgaatctgacggaatcatggtggcccgaggggacttgggggtggaggtcccaatggagcacctgcctatcatccaaaaggacatcatcagaaaatgtcgagaaaagggcaaatttgccattgtggcaacagagatgctggcttccatgtacgaaagccccagacccacccgggctgaggtcagcgatgttgccaatgccgttctggatggcaccgattgtgtcatgctctcgggagagacaacgatcgggaagcacccggtccacgctgtggaaatgatggatcggatatgcaactacgtggaatcgaccattgactatagtaagcacaccttctacaaaggaaaggtggctatcagcgatacaatcgccaagcttgtcataggagccagcgaatactcagacatcaagctaatcgtcacccctacactcacgggattcaccgcccgcaaaatcagcaatctgcgctcaagctccgcaattttagcctgctgtccaagcaacgacattgcgcggaagctggttctgaacttcggagtaaaggctgtcattactgacatttatgagaatactgacgaaatgatcgacaatgtggtggatattgctaaaatggagttcgatctgaacaaaggcgatctgatagtggtcacaggcggcttcccattaggtaagactagaaatacgaactccttgaggatactggagatcgattga

SEQ ID NO: 2852 - DNA, 1491 bp, synthetic construct
  source 1..1491: mol_type = other DNA
atggcgaatgagaacgagtggggcagcaatctggcctttgtactggccatgattggttctgccgtgggcctgggaaacatctggagatacccctacgtgctttactcgaatggaggcggagccttctacatcccttatctcattgccatcctggttcttgccatccctctcatcattctagaatacggggtcgtctacaactataagtcctcatttacaaaggctatcgtcaaaatcaagccgaaactggagttttatggttggattctgcccgtggtcacgtttatcatgacaatctactatagcaccatactcggctgggacggaatctacttcatcctaagcttcttcaagggctgggggtcagatccaaatacctttctgactgtttccctactgcagtctgcagatagtatcagtggcattctgaacttcattccagtcatcgccattagtatgattttcatatggctcataatatggttcatttcccaccgtaacctggatgaaggcctcggccgggtggcccgatactttgttcccatgctgtttgttataatgattgtgattgtggcgtttagcttgaccctgccgggggcatccatcggtctcgcggagttgtttgatcctgattggtcccttctgtacaattatagcatatggatggccgcattcggtcagatattcttctcattgagcttggggatgggggctggcttcacctttgcaagctacaccaaaagggacatcgacttgatcagcagtggactgtgtgtggttctggccaacagtctgttcgagaacttcgcggccctgggggtgttcagcatcctaggatacatgtcccttgagtctggcgttgctgtgtcaaagcttgtgagccaaggcacaacactgatctttgtggcatacccaaaggtgttcaacattttaggaggggtcgctttgattttagggccactcttcttcttcaccgtgtatgtggcaggagtcacaagcatcctctcctcctttgaagtgctgtcgatttccatccaggacaagttcgctttctcaaggaaaaaggctactaccgctctgtgcattgtgggcgggctggctagcatggtctttgccactagcgccggcggttatctcctcagcatcgccgacatatttgtcaataatatcatggtgctgttcagtgtgattgtgcagaccatcctcttcgcctgggtattcaaggctgaacggctggtggactttttcaacgcgaaaagccgcttcctgaaactcgggagatggtggcttatcctggtcaaatatatctgccccatcctgcttacggtcatctggatcggagagctctataacctgatcaaaatgggttcgactgaatttgtagtgattttaggcgtactgctcgcaatattattgatctttgcctttattttcacaatccgccccgcaaagacggacgagtggtttaagaccgaagagcggattaagtga

SEQ ID NO: 2853 - DNA, 618 bp, synthetic construct
  source 1..618: mol_type = other DNA
atgggtgaggaagaactgatagaccaatacatgaagcctcacggcgaggaggggatcaagatcatcgaaagcatgaacgaggagcaccagaacatcagcgaatttgcattcgagtgtgtcaacctcggtgcctacgatgacataattgatatcggctgcgggggcggcgtcaacattgaaaagttcctgaatgtgacgaacggacatgtggacggcctggactactcggatgtgtctgtgagcgagagtatcaaacgcaaccagacgtcagtagacggtggcagatgcaatgtaatcctaggggatgtgactgacatgccaattggggatgagtcctacgacctcgctaccgcattctccacaatcttcttctggccgaatttagtcgagacatttaaggaggtgaaacggatcatcaagcccaacggacagttcatgatagcccagggaaccgacggaacaaaccccgaggaccaggagtggattgataccattgctggcatcaatgtctatactgccaacgagctggaagaatatttgcttgatgcgggatttaaaagggttgacgtgtttaccaaggaaaatacctatctgctcgttgtgattgggaagaaatga

SEQ ID NO: 2854 - DNA, 498 bp, synthetic construct
  source 1..498: mol_type = other DNA
atggacttcaataaggaaaaattcaagatggtgctgcagtacatcatctacaaatgtggaattaaaaatacggtgggacggacagttctgcacaaactgctatatttttccgacttcaactatttcgagctgtataacaagtctctcaccaatgaatgctacaggaaacttgcgcggggccccgtgccagtgcactttgagagtgtggtcgaggagttgattgacgagaagaagatcagcttaaagaaccgaagactgccgtgcggcaagctgatgaaccgctatttctcgttggaaaagcctgagatagacctgaaagaggatgaactcgcagtcattgatgaagtcatcaaggatcttagccacatgaacgggaagatgatcggcgagtactccctgaaggatatgcccgtaaagcaggcccatgacaatgggtccatagactacaacctcgtgtttagccgcagtctccaatactcaaaaaggaccgacgattga

SEQ ID NO: 2855 - DNA, 357 bp, synthetic construct
  source 1..357: mol_type = other DNA
atgctagacatcccaaaagaagacccccaggtccgccgattcattaagctcgtgaaggaggagggatacagttatgaaaaagctctggaagaggtgggggccgactatatcgatgagcgggattgggaatacttcggtttcaatcaaagggagggcgattacagggacttttacaacctccggcacccgcctaaggagcatcactacctgagcgggagcaactcatcaagcggctcctcgtccaacaaaagacagtccagcaagtgggatgacctgaagtgctatatgagtgtactgggccccttgataataatcttcgcaatcgccattctttggggagtgtttaaaggcgggtga

SEQ ID NO: 2856 - DNA, 486 bp, synthetic construct
  source 1..486: mol_type = other DNA
atggattccaaaaaaatactggtcatactgggcctcacggttttagccatcttcctggctagttcagtgagtgcaggcgacctgatttcgaccgggggttataacccagatagcctgattatccttgaaggagccgacttcaacattcccgacggattcgaaaggatcgaggacaagagcatcgcaaaccagacacgcaattccggggtcttttcatccatcttgaatcgggaagtgtacgggaaccctaaaggggaggagatagtcatttctgttgtggactttgataattttgatgccaatctgccgatccttagcatgatctgcaaaggctgtcaaaagaaggaactcctcggctaccccggtttcattggcagtgatggaaactccaccaagtttagctacgtattcgacaacaaggtggtgtctatcagcgctccaaatgaggacctgatcaaccaggtgctagtggtcgaggacgcgtga

SEQ ID NO: 2857 - DNA, 123 bp, synthetic construct
  source 1..123: mol_type = other DNA
atggccaagatcaattatagctactccaaaaagtactgcatcattgtgttcatcatgatgtttttcatgaagcggaactatagcaagaagaactacaaaataggcaaaaccgacattctgtga

SEQ ID NO: 2858 - DNA, 339 bp, synthetic construct
  source 1..339: mol_type = other DNA
atgaaagacctgattggcttttgcggtttggactgcgagctgtgccaggcctacatcgcaacaattaatgacgatgacgaactccgggaggaggtggccaagcactggagcgagctcaacaacgtggaaatcagcccggaaatgatcaattgtatgggatgtagggtcgaaggggtaaagacgccattctgtgacttcatgtgtcccatacgccagtgcgcgctggagaacaactatgatacctgcgccgactgcgataaaatggagggctgcgagaagctagtgatgatcttcgaaaacaacgataatgcttacaagaatcttaaacaccattactga

SEQ ID NO: 2859 - DNA, 549 bp, synthetic construct
  source 1..549: mol_type = other DNA
atgtcgaggagatttgcggtaatcgacactgaaacaaactggaacgacgaagtcatgagtatcggtgtgctgatcgcccgctgcaagaactttaaaagaacggacagccgccattacattctccccaaagccgaggcagtcgggggcatgtactccaaatcaatgcgggtgaccagtcacgagattctgacaaagcacaggaatgacgccattgacgatttacgctacctgcttgattccaatggggtggacgacttgtttgcatacaatgcttctttcgataatagacatctgcctgagctgagcgacttctgttggcgagatataatgaaggttgccgcctataaacagcacaacccatccatcccaaaccacatgccctgcttcaagaccggacgactccggcggggctatggagtggagcccatgctgcagatcctcgggatcgaggactactgcgaaagccacaacgcgattattgatgctagggacgagctgaagatcatggagcttctaggctacgatatagatttctatccggaaatctga

SEQ ID NO: 2860 - DNA, 609 bp, synthetic construct
  source 1..609: mol_type = other DNA
atgacggtgatcatgagcacaaacaccatgggctatgcagatttggacctcaggcccgctgagatgcaacgcagcacaatgtacatttccataaacgagtgcccgaactgcggatatgccgaatttgacttctcacgggagcctaaaatcaagagagagtacctggagagcgaggagtatcagagctgcgagggcatcgagttcaaatcggagcgctcaaagccattctacaaggcttatctgattaataggaaggaggaaaacacccagaatgaacttaacttcctgatgcactccatttggtcttgtgacgattccgaagactgtgaaaacgcacggaagctgcgccgaattgcctgccagttgttagaaaccatcctcagtaatatcgagaagcataaagagtgggcggataaggacactctgatgctcatgaagtctgatctgatgagacgtggggagatgtttgatgaactgatcgaagagtacgagacggtgtcctttgaagacacacttctaaataatataaaccagttccagatcaaaaaaagtaaagaaaaggacagtgcccggtacaccattggtactgtcatcagcctctacgggtga

SEQ ID NO: 2861 - DNA, 627 bp, synthetic construct
  source 1..627: mol_type = other DNA
atgaacaccaaggaaaagatatttgatgtttctctcgatctgttttcaaagcggggctacgactcggtctcactgagagaaatcgcagaagaggtgggaattaaaaaaagctccatctacagtcactactccagcaaagaggccatcttgatggatatcttcgaatacttcacagaccttttcgaatatgacgatctgatcaacagtaaagagctggtcctaagcgaagataatgacgtactgatcgaaaaccctgagctgttttaccacatgggctctgaggccatcaggggtatgtttaaagaggagcgaaaccttaagatttggaagctgatcttcatacaaatgcactataacgagaagataaggaatttcttccagaaggaaatgctgttgaagcccctgattttctgggagaactttttcgctattctaaaagaaaaagggattattcgggccgattccaatccgcagttgctggcgaaggagtactatagcttccccatctttctcctcttagagatctgcgccaagtatgacgacatcccagagagctgcctcgacgacttctttaagcaggctgaggagcatgcacgcttccttctcgactgtgtgaaggtgaaatga

SEQ ID NO: 2862 - DNA, 1092 bp, synthetic construct
  source 1..1092: mol_type = other DNA
atggattctaagtttaacatccaagaatatctggctaacggggttgaggtcatcctgaaggatgccttcaaagccaccctgaagaatcccaaggaaggcttatacttggccaagttcgcaaagcacgcccgtaaggccagtgaaatccggagggagtacagcaaaaagggccagaacatcccagttttcctgattgctagcatcacaagttcctgcaatctccactgtgtcggctgttactctagagccaataattcctgtagcgacgaggcgcccttgaaccagctctcagccgatgattgggaagatatattcaaacaggcacgcgacattggcataagcttcatagtgcttgcaggtggagagcctatgattagggaggatgtgatcaagaaagcatcgaaattccctgagatcttattcccaatctttaccaacggcaccatgctgaacgaggattacctcaaactgctggataaaaaccgaaaccttgtacctattctgagcatcgagggggacgagaagctcactgactcaagacggggctctggagtctataaacagctgatggactctatggagacgatgaagaaaaagaatatcgtatttggagcgtcccttacctttacaaaagggaatatctcttccttgctttcaagggactatattgagaagctgcacgacctgggatgcaaggtggtcttcttcattgaatatgtgcccgtgaatgaggaaacagtggacctcgctccaagcgacagtgaacgcgaactgttgctaagtgagctcgatgagctccgcagtgactactccgatatgctatttcttagcttcccgggcgacgaaaaggagagcgggggttgcctggcggctggacggggctttttccatatcaactcccatggcggggctgagccctgtcccgcctcaccgtactccgacattaacgtgtgcgagactagcctcctcgaagccctggagagcaacctgtttagatccctgcgagatggtggtctgttgctggacgaccacgaagggggatgcgtgctatttgagcacaaggaagaagtggagtcgctgttcgacaattga

SEQ ID NO: 2863 - DNA, 414 bp, synthetic construct
  source 1..414: mol_type = other DNA
atgagttttacagacaacctgaagaaatccctgggctttgaagaaggagaatacgggagcggctatacgttcgacgaaggttacaacggggagcccgacccatttttcgagggaattttgattccctataagttcccagagaccaaggccttcatggagatcatcctcatcaaaccgaaaagcgttgacgatatggattacattttcgaccaggtcgtagaggagaacaatcctgtgataatggacctaagcttcatggagaagaaaggggcggcagaatttaagcaagccggcgaaaaactcaaggtcctgcgccagcagtacaatgccgaggctatcctgctttcaaagtccgatgataaaaacctcatcatcgtgacccccgcaagggtgaagctgatacggaaggagtga

SEQ ID NO: 2864 - DNA, 756 bp, synthetic construct
  source 1..756: mol_type = other DNA
atgatcgatacccacatgcatgcagacgcacgcagcagtgaagacttcgaaaaaatgttcatcggcggaatcgatacggccatcagctgctcatactacccctacaaggtgaacaatgccgagattctcctgaaccatctgaatcgaattttgaactttgaacctaagcgggccatggagtatggcctggaactcaagattgccctgggcatccacccggcgaactcgattaaggacaacgaaatcatattcgactccctcaaagaatggatagacaacaaagacataattgcgatcggagagattggtcttgatgagaacactgagctggaaaaggaggtcttcaagaaacagttggagctggctgaggagacaaaaagcaaggtaattgtccacacacccagaaagaacaagctggaagtgctcaaagacatcaaggagatcgccctagagaatatcaatccaaagctcgtggtgattgaccacataaaccttaacaccatcgaggagatcattgatgacgatttcaccatagggctaaccgtccagccccaaaagatggaggttgaagaggccatcgagatcctggacaaatacgactttgacaagtttctgttaaatagtgatatctccaataaaccatccgatcctctttcagttccaaagacagtgaggactctgaaacggctggggtataagcaggataaaatcgataaggtggctttcaaaaatgcagaaagcttctttaacttgtga

SEQ ID NO: 2865 - DNA, 813 bp, synthetic construct
  source 1..813: mol_type = other DNA
atgtattatcacgattacgtcaaggagcaactgcggtttttgaataactcagagattaggctgagaatcttggcatatctgtctaaaaagccattcagtttagcggacttcaaaaacagttcctttgttagctacagctctatatcctctaacgtgtacaagctcaccgatgaagggtttgtcgagaagattgacaaaaacaacttccggttgacaaacatcggcaaaatttacctgatttccctcatggagtttcacgatacaataaacacggtaaataacttctcagacttctggcttgatcatgacgtgcgggccctctccagcaaatatctgaagaggatttcacagctggaaggctctaagctaatccagagccgtcccaccgacatctataagactcacgaggagttcaggaacctatttaaggactccgacatcctcaaggtcatcttcccataccttcatcctgaatacccgcgactgatcaggaccctgctgtccaatgggagcaaaatagagatactcgtgcccagagtaatctgccggcgcttcatcaagagtgtgggagaatccctggtgcgcagctcgatcaagcagaatgccctgtcgatcaagttcattgacgatgaggtgaagctggctctggctatctctaataagtgggttagcattggcctctttaaacgagatggaagctacgaccagagcagattattggtctcagataaaaaggacgccatcaagtgggcatacaatattttcaaaagttacgataaaaaagccgaactggtggaccttcgcagtctctga

SEQ ID NO: 2866 - DNA, 819 bp, synthetic construct
  source 1..819: mol_type = other DNA
atgatcggggatatcaattttgagctcgacagtgagaactttcggatcatgcgtttcttactgagctcatttatgcgaacagatcttctgctgaccctggtgaatagttcttctcgcttgtgttccttgagatcgaacctcggcaagagctccgctacaatcctccacggcgttagcgagcttgaagcctttaacctgatatcaaaggactccaaatattactgcctctcttcgaaaggatttatttacggcctggccctggataagctgtgcaagaacctatacattttccagtcaaaccccgagttttggcagaaccatttcatcgacgggcttccgagcgaatttgtagagaacgcgtatctcattaaggattccgtgtatatctgcagtgacaagcttgacatggaaaagcccatcagggactatttcaagaatatcaagaacagtaaaagcattaagattattctgcctatcttctctgaattatacttggagatgattctgaaaaccgtcggaagcgaccacgacctggagttgatagtggacgaggaggtcttcacttcaatcaagaaatcccggtattacaggcgcatcatacggctatccaaaggtggcaagatcattctgagaaaatacatcggggacctgaatctgttcctgaccttcagcgatgaatttatgagcctcaatctcttcgataaggatggattctttgacgattctgagacgatcttcaataacactccagatggtgtgaaatgggcagaaataatgttcgactacttcctggacaattccaacgtggtggtcctctga

SEQ ID NO: 2867 - DNA, 1713 bp, synthetic construct
  source 1..1713: mol_type = other DNA
atgaatcacgaaaagatgtccaacatagcccgcaagcggggatttctgtggccgtcctttgagatctattccggggtgagcggattcaccgattacggccctctcggggccagtctcaaaaacaacatcatgcagaagtggcggaagcagtacatcgcaggcgagggcttccacgagatcgaaggccccaccgtgatgcccaaggaggttctgaaggcctccggccacgttgataacttcactgatccaatgactaaatgtaaggactgtggcgaagtctttcgagctgaccacattatcgaagaggccattggagaggacgtagagagcctggagaatgaggagatggatgaaatcgtgcgcaagaatgatatcaagtgtccaagttgcggcggcgagctggcaaacatttggaactacaacctgatgtttaaaaccgagatcggtgccaaaggagacaaagttggttatatgaggcctgaaaccgctcaaggaatcttcatcctcttcaagcgattgtcccggttctttaaaaataagctgcccttcggtgccgtgcagctgggtaaagcatatagaaatgaaatcagcccacgccagggggtcatccgcctgagggaatttacgcaggcggaagcggaaatcttcctcgaccctagagacaagacacaccccaagttcagccagattgctgacgaaatcctgtatctcagttcgcaagatgtgcagataaacaacaaggaaaccttggagatcaccgctcaggaggcgcttgatcagggggtggtgtcctcggagacattgatctaccaactgtaccttgcaagaaagttccttaaggaactgggcatcccagatgaggtgttaagattccgacagcacctacccggcgagatggcccactacgcgctagattgctgggatgtagaatgcctaactgaccaatatgggtgggtggagatcataggtattgcagataggggagattatgacctgaaggcacatacagagttcagtaatgaagagcttagcatttacatcgagtatgatgagcccaaactggtcaaaaagaccatcgtcaaacctaacctgaaactgttcggaccagcctttaagggagactctcctaaaataaagacatatattgagaatctcagcgacgaggaggtcattgaactgaaggagaagattgagagcaaggggaaattcacccttgagctggaccagagctttgagatcctcaaggagcatctcttgtttgaggacattgaagaggaagtcaaaggggagcgcatcatcccccacgttattgaaccgtcattcgggattgaccgtatcctgtactgcacgctcttacattcattcaagacggaggaagatgggttcgacaaggaatactttaagtttgctaatgagattgctccaatacaggtcagcgtgttccccttgatgaaccgggacggcctgggcgagatagccaccgagattacacataacttacgtgaagccggatttacagtagacaatgacacttcaggcaccatcggcaaacggtacgctcgggccgatgaggtgggggttccgatagccatcactgtggactacgacacaaaggaggacgatacggtgaccgtgagaaacagggacactgaagagcaggaaagggtgaaaattgaagacctgaaagaggtcattgaaaccaaatacctctga

SEQ ID NO: 2868 - DNA, 588 bp, synthetic construct
  source 1..588: mol_type = other DNA
atggctattctctccgacagggatatcaagaagtacctgaatgaaggcaaaataactatagaccctctcgaggatgagaagcaaatccagcccagcagcgttgacatgaggctaggggatgagttcaaagtcttcaaagtgattagaaaacctttcattgaccctaaggacccagaggacctggcgtcctatatggagtccacaatagtgcccgaaggagatgcattcatcatccatcccaacgaatttgccctggcaaccacctacgaatatgtcaaaatcccggatgacttagtagcccgggttgaagggcgctcaagtatgggccgcctgggagtgaccatgcacgtgactgccggcttcattgaccccggatttgagggtcggatcacccttgagatctcaaacatcggggccatgcccgtggctctgtacccgggtcagagggtctgccagctggtgtttgagacaatgacgtcgccaagcgagttgccttacggccacccagaacggaacagtaagtacatgcgtcagcgcagaccagagagcagccgaattaagtttgattatgaactcaatgagaagtga

SEQ ID NO: 2869 - DNA, 876 bp, synthetic construct
  source 1..876: mol_type = other DNA
atgaggaaaggcttttacgaagatatcagtacattcctggtgaagcacaccttccacacccgttttttcctgtcaaggctaacgaagaagtccaaaattgccaagaaaatcatcgatagacttcttttccagggtgacgaggtgtacgtcctgcccaacaagaatactgtacagaagacaaagagcgccacaatctctgcaaacattgaggtcaaccaatcgttccagaaggacgattccgagtttgtgccaagcgaaatcctgaagatcgccattcgcgaggctagtgacattgtcataatgaacaaatgcctgtgccgctcctctaatgactgtcaggactaccctcaggacctgggctgcatattcctgggcccggctagcaggaagatcgcctccaagtatggacggcgggcgactgtagaagaggcactcgcccacgtggacaaggccgatgcggaaggactctcccacgtgatcgggcgaaataagatcgataccatatggatgcatgtcagccctaaagaggagctgctgaccatctgccattgctgtccctgctgctgtctatggaaagtcctccccgacctcgacaacgatattagcgataagatcatgagactggaggacgttgaggtgcatccaataagcgacaactgtaagatgtgcaaaaaatgtttaggggatgacatttgctttggcggtgcaatcagtttggaaaacgacaagatcacgatcgaccaaaacaagtgtgtgggatgcggccactgtgtgcagacctgcaaattcaacgctattgagctcaattatactcagaaatcagttgattcagttttgaatcggattggggaacttgtggattacaagaaacactga

SEQ ID NO: 2870 - DNA, 792 bp, synthetic construct
  source 1..792: mol_type = other DNA
atgaaatacaaggataaaaaatcagagcgcggaaaagtgaaggaaatcgttgaggacgaggaaacgatcagactcaaggagaacatctatgtcgtcttcgttgagtgtgaatcccctgggaatgtggggtttttagcacggaccatggggaacttcggcttgaataaattggtcctcatcaatccctgcacacttaaggaagaggcttactatcaggccacccatgcacgggacacggtggagaacgcaatgatctatgacactgtgggggagtttgtcaaggacaaaaagatcgacttcataataggttcgaccggcgcccccggcggaagctacaacattagtcgtatccccctgaagcctgaagagctcgccaaaagtatgaattacaacgacaagatagcgattctattcggccgagagggcaacggactgaccaatgccgaggtggacatgtgcgatctgattgtaagcattcccaccgatccaagctacccgatcatgaacatttcccacgccgcggctatcatcctgtacgaaatctttaagaacaggaatgagtttccagtgcagggcctggaagagagcacagccatcgagaaggaatatctgatcaaggatatggaggaactcatcgataacctgaacattccagaacacaagaagaaaaacggcctgaaagtattcaagaacattgtgaatagggctttcattactggaagagaagcccacacactgatcggtattctccgccggctaaatcttaaaataaagcatggggacgagtactga

SEQ ID NO: 2871 - DNA, 1527 bp, synthetic construct
  source 1..1527: mol_type = other DNA
atgatcacagtgtatgtcaagcgcttcgactcggagaaggatgaggagcctcatatcgaggcttacgaaattgaggagtcccccgggatgaaagtgctagacgccttagaagagatcaacagaaaatacaatgcggacattagtttccgtagctcatgcaaggcgggccagtgtggatcatgtggcgtcaagattaacggaaacggcgcactggcttgcaaggcccagataaaggacaacagactgatcgagccactggacttccccgtgattaaagacctcgtggttgataggagctctgccgatgaaaaggtaaagcaactgcagttgtcgctcaactgcgacgatgagactgcccatgagaaactcaatcccaaagatatcaaggacacgaaaaaggtccgcagttgcattgagtgctatacctgtttgtccacctgtccagtggtgaagcactttaaggaagacttcctcgggccatattacctgcggtacctctctaaattcgattttgaccccagggacgagtcagaccggctgatcgaagcgctggacagcgggatgtacaactgtaccagctgcggcaaatgcggctccatctgtcctaagtctattaactcctttggagatgcaatagaaaagctaagagcaatggcttacgctagggatctgggacctcttgatgcccacaaaatgttcagggaaaatgtggtggcaagcgggcgatctgtgagcaagcccgaggagccattcatcgaaacaatccacaagaaatgggacgaggaaggcaaatactatacggatgacgagagtaacgacgaaaacaagaataaagaaaaggtggccctgttcactggctgtatggtagactaccgagcccaggaggtgggatatgccttaatagatgtcctaaaggccaacaatatcgagatcgacattccagagggccaggtctgctgcggcagcccgttgctgagaaccggacaagtggatgctgtccaggagctcgtagacaagaataaggaagtctttaaggattatgataaagtgattacaatctgtgccggctgcggagccacacttaaaaacgaccatccgaaatacggctcaaatctcaatgtggaggacataagcgagtttctggttgataagctcgacaccagtaagatgaagcccctgaacactaaagtgacttggcacgacccctgccacctgtcccgcggccagaacatcaaagatcagcctcgcgacataatcgaaatgattccaggggtcgagtttgaagagctggaactgccttgccaatgctgcggtgcagggggagggatcaagtccgggcggcccgacattgcgttggagcttgctaaagacaaggcagagatggtgcgggttaccggtgccgactatgttacgacaatctgtccgttctgtcagatcaacctgcaggatggtctcaatgccattggtcttgataatgttaagaccttgaacctgatccagctgcttaagatggcttacgatgaatga

SEQ ID NO: 2872 - DNA, 1992 bp, synthetic construct
  source 1..1992: mol_type = other DNA
atggcgtacgatcagttagtgacgagtgaaaaaggagataaactctttctgctcggtaatgaagctgccgtgagaggagcgatcgaggctggcgtatcagtcgcagcaacataccccggaacgccttctagcgagattggcaacatcctcagtgtcgtggctaaaagcgcagacatgtactttgaattttctgcaaacgagaaggtggctatggaggtggccgccaccgccgcagccagtgggcttcgaagcttcacctttatgaagcacgtcggtttgaatgtggcggccgattcattcatgaccactgcatattctggagttaagggcggaatgattatcctggtggcagacgacccctccttgttttcatctcaaaatgaacaggatacacgcaactactcccggctgtcgtccattccaatacttgaacccagtaaccctcaagagataaaagacatgatggtttatggctttgacctctccgaacagtttggtatccccgtgattctcaggaccagcactcgagtgtcccatatgagaggcatcgtggagatgggggagataaacagtccgaaatcaaccacaaaggaagtcaagagcgataagcactggctcaaaggatacttcgtgaaaaaccccagggagtttgtcccggtgcccgctaatgcacttgcaatgcatgagcggttggtggagaagatagggaaaatcgaagatgaggccaatgaaagccctgtaaatgaggttgtctcattcgaatctggggtgctgcagggcaaatacggcgtcatttcctccggcggggccttcaattatgcctatgacatcgtcgctggcgaaaacctgggaatggacatcctgaagatcgccctgtcctaccccacgcccaaagacctgatttacgacttctgcaaaaacctcgagggtgtgttcatcgtggaggaagtggaccccatcctagagaaggacgtcctggcagtgcttggggaaaagaaccttgactgcccagtgtatggaaagatcgacgggactttccccatggttcatgaatttaatccagatatcgttaaggaaagcttcaacaaggtgatctctgatttggccgatgacgaggagctgaaggccgaatacaaggatgagtttggcaaagatctgactggcgacctgatcgagacagtcgagaaaatggagtttagccagagtctgaatgacttggtggacaatatccccacacgcgcgcccaccctgtgcgctggatgttcccatcggtcggcctacttcgcttcagtaaaggcttacgaggagttaggctacgataaggaagatatgatcttcgcctctgatatagggtgctacaccctcgggatcagcccgccttatgagaccgctgactacctgctggccatgggcagcagcgttggcgacggttgcggattcagcattgccacaaaccagcacgtcatgagctttatcggcgactcgacattcttccacagcggcttatctcctcttgtcaacgcggtgcacaataagaacaagttcgtgctcactatcctggacaacaggatcaccgccatgaccgggggtcagccaaacccaggtatccctattgacggcatgggcgatgaggcgcctgccatctccattgaggacatagttgaggccattggagttaaattcctcaagattgtgaacccgcacaatattaaaaagacggtagatatctataaggaagctctggaatacgatggggtggctgtcgtcattgccagatatccatgtaccctaatcaaggggcaaaagcgcaagccagtgatggagatcaaggacagttgcgtcaaatgcctgcactgtgttgagaagctagcctgtcctgcaatatcctatctggatgacaaggtgaccgtggacgaggccctgtgtaaaggatgtactgtatgcattcagatttgcccaaacaaggctattggggtaaaaaaaggtgattga

SEQ ID NO: 2873 - DNA, 639 bp, synthetic construct
  source 1..639: mol_type = other DNA
atggataacattaacagttccagcagcaattcagacaattcggatgtcaattacagcatctacatctccggggtgggaggtcagggaatcatcaagaccagcgtaatcatcggggaggcggcaatgctggagggatatgatgtggtcatgagtgagatccacggcatgagtcaacggggaggctctgtgagcaccgagttgaagataggcaacttcaagtcttcaatcgttgaggaaaataaggccgacctgattctggcctttgaacccatcgaagtcttaaggggcttggataaggccaacaaggataccgctcttatatttaacacgttcccgatcgttccttcgactctcacacagactggcgagacatatcccgatattggtgacataatcaaaaacctcaaggacaattttgactccgtgtaccccgtggagggcaacggccttgcaaaggacgccgggagcattctaagcctgaacatggtcctgctcggggcctgcgtggcaaacgactccttcccactgtcaaaagaaacagtggaaaccgctatgaaacataatctggctccaaagttccacgagatgaatctcaaagccattgagaacgggtacaacgcgattaaagactccctgtga

SEQ ID NO: 2874 - DNA, 591 bp, synthetic construct
  source 1..591: mol_type = other DNA
ttgaacggcggtgttaagatcgagtccaccgatatcagatacttttacaggaatatcgtcaagagtgggaaaaaataccggatcaaacacaacaataaggattatggcgagtttagcaaactgtcagacgccctctacgaaagggactgcctgttttattgcaagttcgactatgacctactggtggaatgtgaccttcccaacaagtacgagaacatggaactgccccctttcccagagcaccgtccacgcggccagattaagggcctgaaattcaataagaaggaacgggaaggagagatagtctttgaccacaaggagcgcaagttctgtgtgatcaggggagaggagcatttcggaaagtacaacacaatggtggaagcctattatgtgaagaagatcctgatggaaaacgattgggacaaagcttgcctcattcaaaacaagagaatccgagaggacatattccttaaccagaaaattaaggcaagcacgccgaaactcaataaatactgccccaattgtgggaacaaggtaaaagaggaggatatcatttgcaaaatttgtgggatacggttagtgaaggattga

SEQ ID NO: 2875 - DNA, 1839 bp, synthetic construct
  source 1..1839: mol_type = other DNA
atgaaagggaatattctgaagaacattgatgagatcatcaaatcggattttaagagtgcattttcaaacccaattgtagtgattgtgctaatcggcatcatcatcctcccctccctttatgcggtgctcaacatctatgcatgttgggacccctacggaaatacggacgaggtcgtctttgccattgccaatctggataacggctccacgttcaagggcgactatatcaacatcggcaatgaactggtcacggagttcaagaataataacgacttcaagtggacattcgtgtccgaagagaacctgcggacgggagtgtttaatggaacatattatgccgggatagtcattcccaaaaacttgtcggagaacgtggtgagcatcgcgactgacaatccgaagcaggccaaattggagtacgtggtgaacgtcaagacaaaccccgtagcttctaagctaactgactccgctgcaaacagaatctacatggccctcaatgcaaagattgtgaaaatcatcgacctggccgcctatgagaagctcggggaactccagaagggtctggcttcaggctcccagcaactctccagcggaggctaccagctgcaaagcgggagcgcccagatatctagcgggtcccaccaggtcagttccggagctaagcaggttaaggacgggaaacagcaggtgagcaccggagccgagaccgtgaaaagcaaggcgtctgatttggatgagggtgcgcagactgttcaggagggctcaaactacataaaccagaaaagcgaggagctccagcaggggtccgatgaagtgcaggccgccgccgacccatcgctaatgcctgacggccctgtcaaagactacgtcgatgccagtgtggaactggcaaatggcagtggcgaactggctaaaggttctagtcagttagccaacgggtctgtgcagctggccaacgggtctgtgcaactggctaacggtagcgtgcaattggctgacggttcagtgcaattggcggatgggagcgttcagcttgctgacggtagtgtgagtcttgccgccggagctcaactcctgagcagttacgcagtccaggcactgtttaccgcctcctcttcactcggggcaaccgccaatgagcttggcagcgttaccggcattaacaaaaccctgcttggaaactacttgtacgccccaatagccctcgaaagggaagaaatgttttcagtgccagattatggttctgacattgccccgttctacatcgtcttatcaatgtgggtaggagccattctgacctgtgtcatgctgaagactggcctgagcaccggtacaaagtattccgctctggagatgtacggagggaagcttgtgattttcgtcatcttaagcatcttgcaggcgtgcgtcaccatcatcggctgcaacattctgggcatccatatcgttaatctgcctctcttcatcttctcttgcatcctcgtatcggtggtatttatgatcctggtctattccatcatctccgcactcggacaagttggaaaagctattgctgttgtgctgttagtgctgcagataagcgcaaccgggggcatctaccccatccagatcatgcacggcttcttccagaccctatattcatacatgcccatgacttacggcattacactcgtacgagaggcccagctgggcacagtgtggtccaattactggcctgctctggccatactgttcgcaatagggattattacagttatagtggcacttttgattaaggtgaaagcggataaggctagccactactttgagaagcgcctggaagaaagtggactgttctga

SEQ ID NO: 2876 - DNA, 276 bp, synthetic construct
  source 1..276: mol_type = other DNA
atgtatgaggataagctgtacgacaaggccgaacgcagagtggatgagaagatcaagttctaccggcatctgtacagctatatagctgttaacgtgatccttgcagtgatcaacctaattttctttaaaggcgactggtggttcctgtgggtaagcctcttctggggaatcgggctcgtctcccactttattaagacctttgtcatcttcaactactttgacgaccaccacagggatagtatgattgagaatgaaatggccaaaatgcgaaaatga

SEQ ID NO: 2877 - DNA, 447 bp, synthetic construct
  source 1..447: mol_type = other DNA
atggataagaaaatgatagtgtcagtggcttttcttcttctgattctcgcggtggccctggtctcggtgtttgatgaaagcaatagcagtgaaagtaaagtaaacttaatcgtttacagcgagggcccaaagtccctgtctgaactagtcaacgaaatcaagacccaggactattatgaaggctacgacaacgagacagttgcctggatggagtccttgggaaataagaaattctattacggggacgggatcatagtgattatgagcgccacggatgcaagcaagctcccctccctctacgtcaccgacgtggagctgttcgagcacttcgagtgcaacgtgctggagaaacggtctctgggaaacgtggagtacccgaaggacgtcctgtatgtgaagaatgtaaaatacatcggcgaggaatacggtaacttctcaggggcatga

SEQ ID NO: 2878 - DNA, 462 bp, synthetic construct
  source 1..462: mol_type = other DNA
atgaaagtacagctcttcgtgtcgaaagatctggaagagccctatgccgagatttacacggataacctgacagacaacattcagaaggccatggtgctgttggaaaacgatgagagtgatgacgatgtggacgagggcaactccatccttgcagtgaagaaggggtccgacatcgtgcttctcgactttgaggacatcttcatgataaaggttgaagacaagcagaccaaggtcttcagccaaaatgctgagtacagcatcaaaaagccactgtatcagattgaggaaagcctggattcagattttgtccgcatttcaaaaagcaccatcgtcaacctgagaaagatcaaacgagtggccccgagtctcaggggaatgatgtttatcgaattgaagaatggcctgaaggacaatatatcccggaaatacctcactgacttcaaaaaggcgttagacctatga

SEQ ID NO: 2879 - DNA, 432 bp, synthetic construct
  source 1..432: mol_type = other DNA
atggagatcattaaacggatcgggatcggagcgtttgtaggctgcttcgtggtgatgcttgtcatggtgctggggacatatagtctgggtccccagaacgtcagcttttccggaacggagatcattaatgccttcttcgggtcaatcgttgtgggatgggcctttgccttcagcggtctcatctatgaaaaggaggacattccactgccgatccaggtcatcttccaaatggtgatcggcttgggaaccctctttgctgtcgcggtgtacctgggctggatgcccatctccctgggcatagggcctataattacttggatagttatcgcaattgccttcgctgccgtgttctggctgggcttttacctctactacaccttcctagcaagggacattaacaaaaagattgaattatctaacgattttgactga

SEQ ID NO: 2880 - DNA, 1140 bp, synthetic construct
  source 1..1140: mol_type = other DNA
atgaagacgattgtgaacggtcttattctaaaaggcctggagctcgaagcaaaaaaggagaacatcctcatcgatgacgatggcactatcctggaaatttccaaagaggttaaagaaggagaaattatcgacgcagataataagattgtctgtcctaggttcttaaacgcccacactcatatcggtgacagtataatcaaggacgaaggggaaggcctttccctggatgaagtggtaaagccaccccacggaatcaaacacgtcgccctggagagtgcggatgacgacgtgctgattgaggccatgcgggagtccatgtgggatatgtacaacatgggggtgagccacttcatcgactaccgggagggtgggttggacggagtgaagctgctcaaggaagctgccaaggacattccaatcacgcccataatactcgcccgcgacagctccttctatggggaggatgcaaactaccatatggtgaagatggccctgaagaaattgctcaaggaatccgacggcatcgggcttagcggctttggtgaaatcagcacaaccgtggcggagattatctgcgagagatgcgagagggaggataaaatttcttctatccatgtcgctgagaacgagctcaatcagatcgcctctctggagaagactggcaagagcgagccgcaacgagcctttgaagctggattcaatcagatagtacacatgaccaatcctaaaaacgatgacgtcgaactgctagcgaggtccgattcaagcctgaccgtctgcccccgcagcaacggagccttggctgtgggggttgttccgctttatgaaatcctgaataaaggcgtccggcccctcatcggcacagacaatatcatgataaactcaccaaacatgttccgcgagctggagtttaccctgaagataatgaaaggagtgtcaagaaaccacattgacgctagagagatcttaaaaatggcaaccacaaatgcagattcaagcatttcgaatctgcccattgacaagtcgtatatcggggagggccagaaggccgaactcatgattgtgaacaagaagagtaataacccttacctgagtttgatcaaccgaacagaggctaatgacatcgtgaaaattatctga

SEQ ID NO: 2881 - DNA, 876 bp, synthetic construct
  source 1..876: mol_type = other DNA
atgattgtgaaagacgtggcctccacagacgtgatccatgttacagtgcccgggagccgagatgaggccctgcggatcatgaaaaaagaggacgtgagtgtcgtgcccgtgatcaagaaagagacgggcaagttagtcggaatcctaacgcgcagtgacatgattaccaacccagacgaagagcagatcgctatgctgatgacccggaatctgattaccgccaagatggatgacgaactgtccacggttgctgaaaagatggtcacaaacgacatccgcagagtccccgtgattaatgatgacgacgagttggtggggattgtaaccagctttgatatagtgtcactggcgatcgcggatatgggaatcaaggaccctgtggagaattatatgatcaagaccattccttcaacatgggatgagactccactgaatgtcgccttcgaagtcatgaagttcttcggcctgaaatccgtcataggactgaactccaacaacaagatgaccggcatcctaactgaaacagatttcattgcagagagcgaaatcatctctgagaggactgagcacagctcgagcgtaggaaccgagggggacaaatggtcctgggacagtaccagcgttctctacattgagaaaaaccacctgaagtttactgacaaggtgttcaaggacgtggcatccggtgatgttgtaacggccaataccaagacaaaggtgtcagtgtgcaccgaaaagatgaaatcgcttgatgtggagcagctcccggttctcggcatagaaggcgaacttgtcgggttggtaagggctagtgatctcattaaaagcttcatcataggcttcaacttttctttctcttttatctttactttttga

SEQ ID NO: 2882 - DNA, 1080 bp, synthetic construct
  source 1..1080: mol_type = other DNA
atgaaggccaacccaaagattgagaaggtgaaacagatcctaaaagattacaagaagatagccctggccttcagtgcgggtgcagacagcaccctcctggcgtaccttgcaaaggagtccgactgtgacgtgcttgccatcacatacgacaaccagatctttcctgagggctttttggagtttgctaaaagacgagcagacgaactgggcatcaaacacgaaatcatagaaaacagcttcctgatgatatacgatgtggcacacaatactccgcagcgctgcctcacctgcaggcgcttgatgtatgggagcattaaacaagtggctaatgagagaggctacgatattatcatcgacggcaacaacatcactgacctgatccacgaccggcccggcatcctaatgaaatatgccaatgggatcgagagtcccctcatagatgccaatctggaaagctatgagattcatgatttcctggaagagaacgatattgaatattccaagtccacaacctgcctggccacgcgggtgaaggccaacgaaaccgtcacagaggacaaggtcaaccggattgactactgtgaagggtttattaagagtacgattggtgctgacgtggtaaagctgagggaagaaaagaacatagccaccatcgagcttggaaacaatgattcaaagaagattttggacaaggagaaactcgagatcatcttcaatgagctcaaagaggcccagtatgataagattttactgaacatcgatttcaccgaggacgaggaggagctcattttagactcagagcttcagaaggggaaggagaatctcattctgcgaaagaagctgccattcgacatcgaaatttccaaaactggaaaagtcatcaatgaagctgataatgaatttatctcggatatccaaacaatcgaagagataggatacatcaaactgaaaatcgacaagaaagagtctaagatcttcagagatggaaagattagcattgagaacaacaaaaacaaggaagacgctaaagagtctctggttaagatcttgcctctgataaggcgcgcgaaacccttctga

SEQ ID NO: 2883 - DNA, 642 bp, synthetic construct
  source 1..642: mol_type = other DNA
atgacaaagatcatagtgtatctcggcctgtcgattcaggaggaagaagctaagaccatcttagatgcggattatcgcaccccagttaaaaggggggacatactgaaggcgatcagcgagaagccggacataatcggaattatcgacggcgtcttccaccacacccctgcagtggcccataaggagatcatgaaagccttgaaaatggggatcactgtcgttggagcaagtagtatgggtgcccttagagcttccgaactggatgacctgggcatgattggaataggctacgtctacaaggcctaccgaagcgggaaaatcacgtcagacgacgacgtggccctcagctttgaccccgagcggaatgtgcccatctccgaggccctggtaaacattgactacaagcttgatttggctgtgaaagaggaaatcataagcgaggaggataaggaatacatccacaacattgccaaggacatctattatccaaaacggtcataccagtacatcttcagcaaagtggagatggaagatgaaaagaaaacaaagctgattgatttcatcctaaaggagaaggacatcaagtatctggatgcaattgaagctctcgagtacattaaatccatttctgaggaggaatga

SEQ ID NO: 2884 - DNA, 1260 bp, synthetic construct
  source 1..1260: mol_type = other DNA
atgttcgaggatgttgagatacagttcttcaaaggcactcaccgcgtgcgcgatcccaaggaaacaatcgagatcaacgaaaataagctaaggactgcgggaatcacccgtctcactgaaatcaccgacctggacagaatcaaaatccccgtgttcagtgccattcgaccgactgcacaggagggcggggtcagcgtctacgctgggaagggagcaaccaaggagcaagcaaaagcctccgcgatgatggagggctttgaacgatattccgcagagcgccaggatatagacaacgaaaggacctttgtggacacctacaacaatatcaaatccagccaagaactaaaggccctcgaccctagagacttgcttctgccaaagaatttcaccacacagaatgtggaaaactccaggctcgaatggattgaatcaaaggacataattagcgaggagacaatctacgtgccctccaatgccgtgtttcacccatatattcccaccagagaagtgattcctagtccactggctatttttaaagggaacactaatggtctggcgtctgggaacatcatagaggagtctgttctccatggtatctttgaagtggtggaaagggatgcctggagcctgtttgagcttacgaaacgcaacaagaaagagatcaatcaggataccatcgaaaacgacatcatcaatgagcttttagccaagttcaacaacgagggcataaacattaagcttatggacatcacggctgacctgaagatcacgactgtcgctgccagcgctgatgataccgtactgaaggacccggcactcctcacactgggtgtaggcacccatctggaccctaacatagccgtgatccgcgccttgacagaggtggctcaatcgcgggccacccagatccacggaacccgtgaggacacgatcagagcggatttcatgaggaaatccagctatgaaggcatgaaaaggatgaacaaacactacttccagaaggaggaagatacaattgacctgtcagacattgaggacaagagttcacacagtatcaaaaaggacattgagacgagcattgaggaggttcagaaggtcgggttcgataaggtcttatacacagacctgacacgggaggagattggaatcaatgtggctcgggtaatcattcccaaggcagaactctactcgctggatgaggaacggctgggcactagagccttggagtatgatcgaaaagcccggcggggactggtctga

SEQ ID NO: 2885 - DNA, 1044 bp, synthetic construct
  source 1..1044: mol_type = other DNA
atggtgtcaagtgagaataaagtgcacgatttccacataaaaaatatcctgaagagactggaggagaaagacttggatgcaatgatggtggccaacttcaacaacatctattatctgtctggctacctatctacgagcttcgcattcatgatagtcaaggagaatcctatcatatttgtatctgggatggacctggagaatgccaacaacaattcctctattgatatcatcaaatacgagagtgccgaccagatggtggagtatttgaacgaagaggagatcaaggaccttgccatcgagtcggatctcactgccaacgcctaccaaaaatttaaagactttaacctaactatttcaccagcgatctccatcgaacgaatgatcaagaccgacgatgaaatcgacaaaatcttcaaggctggcgagattgcacacaagagtctgcttgagctcgacgtccgctcgaagcaggaaaagggggctgaagagtgggaatgtgcttacgagttaggctacctcatgcggaagaatggagcaagcaccgaatcattcgacacaattttcgccagcggccccgtgagcagcctcccccattccacaccaaggcaccacaagttggatactccggtgctggtggattacggttgcaagttcgaaggatactgctcagacaccacccggacctttgtctacaacgagaagcaggaagagatttccaagattgtgctggaggcgcatgacaaggctataaaagccgtgaaagagggagtaaaatcctgcgaagtggataaagtggcccgcgacatcattacggaatatggctacggggacaagttcattcatagcacagggcacagcttcggcctggacatccatgaaagccccagtctgtccctgaaggatgagaccattctggagaagaatatgtttgttacaattgagcccggaatctatcttgaaggggaatttggtgtcaggatagaggacatggtcctcgttgataagaaggctaaaatcgttggcaacctgccacctatcctctga

SEQ ID NO: 2886 - DNA, 930 bp, synthetic construct
  source 1..930: mol_type = other DNA
atgtttgtcgaagatctcataaataatctctcaaatttcatcgaaagcagactcagcgacaaaatattaatattcctgcaggagtacttcctgaaggcaggcatattcaccctggccagccagatcattgctatcctgttcatctcaattgtgtttacactgatactggctctcatgattgcattgctcttttcattcgatatccttatggcgatcctcttggccattttcattcctctcttgtcttttattctattcgttttcatcaaatccgagcgacggcgagaggagctagaaaactcaatcccggactttctgcggcagctggctagcatgctgcgggtgggcatgagtcttgagaacgctcttgttgacttgtccgagcatggcaacggcccattgtatgacgagctgcgccgtgtggtcgtggagatcaggatgggaaagagctttgatgaatccttcaggaacatggcgaaacgcctggactccaaggacctggaacggagttttaagattatcctgaacgctcacaagagcgggggaggtcttgccgacgtgatcagtgatgtcagtgacgatttacgcgctatgctgattttaaaaagggagagaaagtcgagcgtcatgatgagcatcatgtttctggtgttggccagcgttgtagcggccccctttgccctcgggatggtgggggtctattcttcctttatgattgaactgaacagatccagtgccatctgccaactggcccccacggtggccctgatctacctgatcatccactcgattctcgcaggatttctcatagcccttattatgtacggggatatcaagaaaggtgtaaagttctctattccaatcaccgcactggcattcttccttttttacctgatcaatgtgttcggcctatccttcttcggattctga

SEQ ID NO: 2887 - DNA, 225 bp, synthetic construct
  source 1..225: mol_type = other DNA
atgttcagcatctacctcaaaaatgattttaaccggttgttcaaggaagacaaggcccaggggtcggtcgaactgattctacttatcggtggcataattgtaatcgtgctggtgtgcatgtttgtgtataagagttacatggggggactgggcgacgaactggagtccaacgagctggagtcactcaataacagcttcgaagagctctccagcaaattcgagtga

SEQ ID NO: 2888 - DNA, 1416 bp, synthetic construct
  source 1..1416: mol_type = other DNA
atgaaagtattaattgatggagaggattttgacagcggcgaccactacgaagtcaaaaacccatacgacggtgagctggtcgacacggtgccaatttgttttaggcaagatgtagaccgcgccattgatgcagccaaccgagccaaaaaggaacttcaggacatgtcggccaaggaggtgtccaataacctgtattctgcgtatgaggagctcgaatccagaagcgaagaactggcaaagctcatcgtccttgaggctggaaagcctattaagcaggcgattggcgagctgaacaggtcttgcgagaccctaaagtttgccgcggaggaagccaaacgcatctatggggagagcgtccccatcgacgctaccgggagcgtcgatgagcggtttctagcctttacaaagaaagtccctctgggtgtcgtgggagcaataactcctttcaactacccggtgaatctcgctctgcacaagatagcgcctgccattgccgccaagaatgccgttgtggtaaagccctccactgaagctccactggctgccctgaaattggtggaaatcatcgacaatcatttccctaacggggtgataaactcggttacgggctacggcagtgaagttggcgatgcactggttgtgtcagagggcatcgacaagatcagcttcacaggcagcattgccaccggactgtttatctccagccgagccggcatgaagaaactcacgttggagctcgggggaaacgacccactggtcgttcttgaagacgctgatattgagaaggctgtgagtgcggcggtgtccggcgccttcctattctccggacaggtgtgcatcggggtgaagcggatcatcttggacaacaagattgcagatgagttcattgacctctttgtgaaagaggcaagcaaactcaagatgggcaaccccatggacgagtctacagatatcggtccgcttatcaacgaaaacgcctcaatcaacgtggaaactgctgtgaacaatgctataaaggacggggcagaactgattctcggaggaaaccgtaaggactgcttctatgagcccacaatcttggatggtgtcaatatgagcatggacctggttgctaatgagaccttcggaccagtggcccccatcataagggtagatagaatcgatgaggctataaaagtggccaatgacacccggtacggtctgcaggcaggggtgttcaccgaaaatgtgcacagtgcattaagatgtgccaatgagatcgatgctgggtcagtcctgatcaacaaggagtccaccttccggacagatgccatgcccttcgggggcttcaaatcaagtggcatgggtaaggaaggcattaaatacgcagtggaggacatgtgcaagtttaaactgatcgcctttaattgtcgctga

SEQ ID NO: 2889 - DNA, 726 bp, synthetic construct
  source 1..726: mol_type = other DNA
ttgtgggataccgccaaagattacagaattttagtcgctatgcacgcacgggagctgtttcttcggacggttcagacgggctcgttcagagggaactggaataagaaggccacaatagaagaaaccaagaagatggaagctgacctaaaatcactcctttactgctatctcgaaggggacgctctggcgaactgtgaggacgtgcaaaagcttgaggacaaggcgggacgcatcatagagttcctgggcggtgaggattggaaccataaattcatgcagggggcccccaaagacgaaagggagaagacagaggagaacatcgcaaaggtgcgttttttcctagacactatcctgggcctccgaaaccggtttaagttcggcccaattgacgaccctatcatggggatcgatgtaaaggtgggcgagattatgagcgtcagcaagcaccccaaagccgattccctcatgatctgcaacgtaaacattggcaaacgcgccctgaaggtcgtgaccaatgatctgaccgtgaaggaaggcaatagggtcggggtgtccctgctgcctccggcaacattcatggacgtggtgagcgagggaatgttcctgggaatgaatggtagcatcttgaaagaagttcagggagatttgggtaatatgcccaacggaatcccaatggagtctctgaacgagactaaaaatatgattaccgcctttctcgacagttga

SEQ ID NO: 2890 - DNA, 417 bp, synthetic construct
  source 1..417: mol_type = other DNA
atggtggaggttacccagctgtatgatctggacatatatacgctggccgggcagtacgtgggccaggtgcacgatgtcgtgctcaatatccgctacggcaccatcagccggctacaagtgaaagccctggagccggagaagaagtccgcggggtttcgggacatcttccgaggcggattccagttcgtgcctgaggaagaagtcggaaggacataccaggaaggtttgctgaacatagagtttgacagggtcactgcaatcggggacatcatgcttattgatccccaagacctcaaaagacccaagccccctgtagcaggcgaggaaatgagcattcgcccgagacccgaagctccaaaacaggtgccccaggaggttcctcaggaggtcgccccaaagccaaaggaggtaatttga

SEQ ID NO: 2891 - DNA, 762 bp, synthetic construct
  source 1..762: mol_type = other DNA
atgattgtgggcatactgggttgcggcgcaatcgccaacaccatcgttaacgagttcctctcagatgatggcatcgacatcaaatacttctacgacacagacatcgaacgagctgagaacctggcccagatcagcaatggaatagctgtcctggagatggatgagatgctcgacaatgtggacttggttctggagagcgcatcccccatcgccttaaaggtgcacgccctgaacatcattgagaacggaaaggacctgatggtgatgagtgtgggagctctgatggataaagaatttcgccaaaagatccataaggctgcgcaggccaacaatgcaaaggtctatgccccctctggggccattgtcggcctggatggcataaaggcggcatccatcggaaagattaaaaaggcttcccttacgactcggaaatcacccaagagcctaggtcgcgaagtggaagaggaagaaatactgttcgagggcaaggcctctgaagccgtagagcggttcccggtaaacatcaatgtggctgcgtccctcagcattgcctgcaacatggacattgacgttaagatcattgtcgatcctaaggtcgacaggaatgtgcacgaggtgctcgtgcagggggactttggggaatttagaagcagttccgagaatgtcccattcgctgcaaacccaaaaaccagtatgctagcagccttctcagccatcaaattgcttaaaagctttagcgagtgtttctcggtggggacatga

SEQ ID NO: 2892 - DNA, 759 bp, synthetic construct
  source 1..759: mol_type = other DNA
atgaaagactatgagatttacagcaatttgaaggtcccaaagaatagtaacatcattctgcggctcgacggccgtaagttccatagcctagctaaatacctcgcgctgaaaaagccatacgacaataactttgctaagctcatgtctgaggtgtccctggacatttttaaccagttctcccccaaattcatctacacattcagcgatgaaatcagcatcctactggatgagattcctttccttggccgggtcgagaagctgaacagcgtattctcatctatagcctcaagttcgttcacctaccacttactcaacgattttaaggacgacttcaatatggacaagctggacgaagatgaccgaaacgtcatcttccctgtttccttcgattccagagtgatccccattgtcaatgaggacatctatgattatttcaaatggaggcaggatgaggcatggcgcaactgcgtgaacgcctatgggatttgggccctgaagaaggaattttcaccccagatcgcaaatgaaaagatcaaaggcctgaagtccagcgagatccacgaactgctgtttaaaaaagggatcaaccttaatgacgtggacacgtggaaaaagagaggaatcggtatttacaagatagaaaaccaaatagagggatttaacccggttaaagaggagaagaccgtgtcttaccgcagtgaggtgtttgtggattacgaactcgaattgttcaataaggagtatttttacaggttttga

SEQ ID NO: 2893 - DNA, 921 bp, synthetic construct
  source 1..921: mol_type = other DNA
atgggattcaaggatttgatcagtaaactgaacgagaaaaatcactttgaaaaggtgtgcatagaccagaccgtcatcgattcaatcatctattattccaagaaatcataccctgatgagttcttggccatgttcgacggttttgtgaagaacgaggttctgtacatcagtggcctcatctttttgggaggcgagcgcagccacacaagcgccagcttcaacgactggctgctcccacccgatcagaagaagtggggaacggtgcattcacaccctgggctgaacgcaaggccctccggcgctgatctgacaaccttcagtaagtacgggtctttccacattattctttgtgagccttatagtctcgagacaatgatggcgtacgactcgtacgggaacatgagaggcttcgaggtgggcaactttgtggatggcaaggatgacgaaatctacaaggaccttgaggagctgcggaaagagatcgaagaagaggacggagagctcaccccatctatattcgacctagatcaggacctgtcctttttcgatagcgaagaggtaaaaaccaataagtacagccatgagctggaggatgagtttgggaatctcgccttagacaatgatggctcgaatgacttcgatagcaacaatttctccgaggacatcaacagcaacaacccaaacagcaatgacttcacttccaaccgcttttatccctcacggaatgtcagcgacgaagatctggggtctattgaccttaacccgcaggttattcgaataggtggagaaaaggtcaacggtcagagcccgaaactgggcattatcattgaatttagggacgggaagcccatcctaaaaagttatactgtggactctcaagaaaatgaagactcccaagaaaaagaggattccgacaagtga

SEQ ID NO: 2894 - DNA, 1575 bp, synthetic construct
  source 1..1575: mol_type = other DNA
atgaaggccctggtcgcagatgcaattaacgagaagggcatagagaatttgaaggaagtgtgcgatgttgtggtagatactagcatcacgcctgaagaattactagagaccattggagagtatgacgctatcctcattagaagccgcacaaaactccccgcggaagtaatagagaaggccgacaatctgaagatcattgccagggccggggtcggtgtcgacaacgtggatgtgaatgcagccaccaagaaagggatcatggttgtgaatgcccccgaatccacgtcaatcacggtggctgaacatacaatgggcttgatcttgtcgaccatccggaagatagccatcgcggataaatccactaaggcgggaaaatgggagaagaaagcttttatggggatggaacttcggaacaagactctgggtgtgatcgggatgggccgcatcgggtctcaggtggtgaacaggtgcaaggcctttgagatggatgccattgcctacgacccgtatctcccccctgaggtggctaagaacatgggggtggagttgtacgaggacattgaggacgtcctgacccgagctgacataattactatccatgtgccactcacgccagaaaccgagcacagtatctccacagagcagttcaagatgatgaaagacaccgcactcatattcaactgtgcccgaggcggcgtcattgatgaagatgcactgtacgaagctctggttaacggcgaaatccttggcgccggtctggacgtatatgagaaggagcctgccaccaacaataaacttttcgagctggacaatatcgtctgcacaccgcacattgccgcatcaaccaaagaggcgcagagggatgctgccatcattgtcgctaatgaggtgatcaccctgttcaaaggaggcatgcccaaaaacatcataaatatgcctcgcatgaacaacagcgagtttgaggagaccaatgattacctggagctctgtgaaaaactaggatcgtttatcacacaggcgacaagcagcccaatcaacaagctggagatcacctacaaaggtgaaatcaacaagctcccaagcaaagacctattcacacggaccatcctgcagggaattttaaaccccgtcactgaaacggccgtgaatgctgtgaacgccaccacggttgccaaggcaagaggaatctccattacagaagcagtcagtgatgactccgagggctatgacaccctgattaaagttgctgcaaagacaaaggagggacaaatgtctgctgaaggtacttacctccacgaggctaagatcataaaggtaaatggctactgggtcgatgtgaagcctgagggaaacatgttcatcgccaagtataaagacattcccggcagcattggggcaataggcactaaattcggggaagaaaacattaacattgggatcatgcaagtgggccgtgactcaactggtggagaggccatcatgattcttacactggatgaaagaccatctaaggaggcggtgaagaaaatcaaggacctggacaatgtgagtgacgccacctgcctgaagctgtga

SEQ ID NO: 2895 - DNA, 339 bp, synthetic construct
  source 1..339: mol_type = other DNA
atggtcaaattcgaggagtttccaatctccagtgcaaactatattcccggttataaggtggtggaggaaaagggcttcgtatacgggctgaccgtcagggcccgcggcctgggtggagacatcggggcgggactcaaagggatactaggcggagaaataaagcaatacgtgaaaatgatggaagagtcgcgagaggagagcatcggccggtgcattgaacacgctaaggaactcggggccaatgccatcatctcagtcagattggatagcgacagcatctcccagaacatgcaggaggtgctggcatacggcacagctgttgtgattgagaaggagtga

SEQ ID NO: 2896 - DNA, 774 bp, synthetic construct
  source 1..774: mol_type = other DNA
gtggttttgggaaatgctccatttcttgcagacgcttatttcgggcataggactcggctctacaacctggatctgctgagaaatccaaacaatgtcagcaaaatcatagaaaagtcctacgactgcggagtgcgctccatcaacctggcaaataaggaaaacctactcaaggcctttgggatggcctgtgacaacggcgtcgagatgcaggcagtgagcaccattggaaagacagagatggactacgtcatccccgattatgatgaggcccggcgagaggccacctggaaggaggacattgaaaacttggcccagttcgacaactccatcatgcttgtggatgagtttctgatcgacagctacgattgggatttcatcacagacattctcgacgcgatcaacgatacaggcatcccctcggggataatcacgtcattccctttcaaaacttctctagagctgattgatagcccattactggaggacaaaaacctctttgacttctatatgattccggtaaacaaactgggttacatgatggacgtgcctcacttcaagagtgacaagcaggaagagctgaaattgatgctggacaaaatagacaaaaagataatcatcaacaagatcctcgcggtgggcatccagcgccccgaggaagccttcaatttcctcaataccctggattttgctgatatggtgtcagttggcattgccagtgagagggaagctgaagagacctttggtattttcaagcaaaatcttgatttcttttga

SEQ ID NO: 2897 - DNA, 810 bp, synthetic construct
  source 1..810: mol_type = other DNA
atggactacttaaagaagatccccgctattcggtggaaagatggcaaatacgaagaagtggaagagaaaacagtgagcgatgagaatatctatttctatattgatctcctgccgcctcggaagttttccacatatccagccgacttggaggacttcggagtcgggtattgcctcggtgacgggctggtcaactcatacgatgatatcctaagcattgacattgacggcaagcatataacaatcaaaaccaagttcaatcacggcgccgatgaggataacaaggaagcagatgaggaaaagccagacgtggacgcggacgtcctgggctaccagagcgtaatgtctgacagtgcaggaggatggcgtagcgagcttaaaaagatcgagccaatcgaatccgatttggttgtcaatgccagcgaaatcatagagaacatgaaaaggcttaccgctaaggcggagatctggcaggccaccggaagtgtgcacgttgcccaactcgtgtacggtgacaaattcattacgcgggaggacgtatctagacacgtggcggtcgataaggtaatcggggccgcagctaaggcaggattcgacctgtcaaagtgttacgtgacctatagtggccgaatgcccgccgacatggtgataaagatggtgagagtcggtgttcctatcctggtctccaatgctgcccccgccgggtccggctacgaggtggccgtgaaagggaacattactctggttggctttgtgcgcagcaaccgctttaacgtgtacgcttctacttcgaggatcgacctggataaatga

SEQ ID NO: 2898 - DNA, 432 bp, synthetic construct
  source 1..432: mol_type = other DNA
atgtccgacgagaataaggataatcgggtgtacaatctgctcataaccaagggaacagacccggaaggccaatacgaattttacaaggagaggattgacagtcagaaggacttcctgtatgccgagtataacactcaggataacgagctcaacgatgacttgttcgaggaagtcgatgtcatagtattactgtacgggctctatcacgataacacggagatctgcgacgagctgatcaaaaaaagcaaagaactgagcatccccttcctgctagtgcgctcttttggcgttgaatggatcttgcaggaccttgagtcaaaggctgacgccgtggtcggatggaacgggcattgcattgtggacgcaatcaagaccctggtggacgggggtggcgagtggatcaaaccatgtgatattgaagaggaatactga

SEQ ID NO: 2899 - DNA, 168 bp, synthetic construct
  source 1..168: mol_type = other DNA
atggagctcaatagcaaacactacacaatcattcttatcatagcaatcataatcgccgtcattatgacctatatgaccgggatcaagaaccccatcatcatcggcctctgcatactggccattattgtgattctagctaacttgtacctgacgaagctgaaaaagtga

SEQ ID NO: 2900 - DNA, 981 bp, synthetic construct
  source 1..981: mol_type = other DNA
atggccgtaactaataggaatcaattgatcagagaggtgtaccagctgctaaacaaggagggctttgaaacgagcaacatatacgatcagagttgctttgatatcgtggctcgaaagaaactgctcattctccttcttaaaatcctcgtgaacattgatagcatcaacgagtctcacgtggaagaaatacggcagatttcgaatgttttcctagcaagccccatcatagtcgggctcaaatccaaaaaccacatcctggaggaggacgtggtctatgagaggcatgggctcccagccattgggctgcagactctgaaaaatatgattatctacgacgaatatcccgaaatcctcgcagaccggggaggatattacgttcaaatcaatggcaacgtcctcaaggaataccgtgaggagtataacctatcactgaaggatttggccgacctggcgcacgtgtcacgcgctaccatgtacaaatacgagaatggcatggtgcgggccaataccgaaacggcaatgctgctggaagagatcctcaacacaaagatcactctggacatcgacctgttcgagccttatcaggaggacattaagctgaaggccgataccagcaatttgaatcagacacagggtacaaacgctcaaaaccttgccaaattaggcttcggtgtggtctccaccaacaagagccccttcgacgctcttgccaaagcggaaatcgccaccaaaaagaaagacaaccctctgattgctaatctgaacgttcaggacgagcagaacacaaagaccttgaagaaaatggcaataagcttaaaggatctgtccctggtgacctctagtgatccgttctttgtccttgccgacgacaagataaaggatagtattgatggaatcccagtaatcaagtcttgggagatgaaagaatttgaaaactccaaggagttcctcaagctgattaaggagagacgcaacaattga

SEQ ID NO: 2901 - DNA, 1293 bp, synthetic construct
  source 1..1293: mol_type = other DNA
atggagatcttatacttttactcaagttcggtgattatcatggattatttttacataggcatcgatgatacagactctccagatggaatgtgcacaacattcctggcatcctccatcctaaatgagttcgagcggagcaacattaaaattattgattatccccgacttattcgactgaaccctttcgcaaggttcaagacgcgtggcaacggcggggtcagtttcaagctcgacattgatgaggatactgacctggccaaggagatcgtgctcggttatgtaagggagctgtccatgtttgactgtgacaacacaaaccccggagttgtcttctacgagggtgaaatcactgaagagatggtggactacgcattcaaggccatttactccattatcacgatagaggaagccgaagaatttgcgaaccacattggggctgagatttacaagttcaaaaagggtcgcgggatcatcggctcgatcgcggctatttcctgccctctggaggattacacctacgagcttctggcgtacagggaaccttcacggtatgggaccctccgaaacatcgactatgattctgttgtgcggatggataaggaaacttaccctgagacctttgaaaatatcgacggcaagtatttggccatagagccgaagaccccatgccctgttctttatggaatccgctcaaacagtccagaggtgctggagaaggcacgcgaaatggtcatcccaaatgaaaccattgctgacagttgcatattcaagacaaaccagcatacggacatgcacattcagaatgccgaccggatcagcgacatgaagcagtattcctgctaccggataaggggaaccgtcaaggaaaggccccacatcatcgagggaggccatatgtttttcaccctgtatgatgacagcggcgagatcgagtgtggcgcctacgagcccaccaaggactttagaaaaatcgtggccaaactcagagaaggggacgtgatcgagctctatgggggaataggcgagcaaaatacatttaatatcgagaaattccaggtcatcaaactaaatgaatttgtatacagaaaccccgtgtgcggttgtggcaaaagaatgagctctgctgggcgcgggaagggtttcaagtgcaaaagctgtggaaaacgtatagaaagcgacgaaaaggtgcccgagaagatcgacagaaccttgattaacggcaaattctacgaaactccagtgagcgcccggcgccacttgtctaaaccgctgatccgcatggatctggactga

SEQ ID NO: 2902 - DNA, 1251 bp, synthetic construct
  source 1..1251: mol_type = other DNA
atggctatcggggtcaaggagatcaagatcaccgacaccatcagcatcctactgctgcctttgatctatgccttggtacttggtctggccctgtacttggccaagcccatcaagtttataggccgaaagcagtccaaagtagctgaaggggctatggttctctttattggagtattaattaccaaattggcgatttcaagcggtcaggccatagccagtattttccaagtggggcctgctctgctcctgcagcagattggcaatttaggtacactcatcgcactgcctatcgcactcttcttcggctttcgcagggaggtcatcggcatgacaagttccatttgccgggaacccaacctgggagtcatcatcgacaaatacgggtttaaaagccccgagacccgcggcgtgctcgcggtgtttgttatcggctcaatcctggggacacccttcatcagcttcctatccagcatcagcgctagcctgattccgatgcacccatacgcctatgcaatggcgtccggggtgggaagcgccagtatgaacgccgctgccctcgccccgctcatgcatatgtttccaagcatggccacggacctcgaggcctttgccggatgcagtaaccttctttccttctgcttcggtatctatatgtgtatctttgtgtcattgcccctggccgagcggatgtataagtggctgtccccccacataggccatgacaaagaggagacaatcgacgatgagtatgcaatcgaaggggtcaagcacgacaagtacgcatctaaggaagagttaagtagcggcaagattaaaagatgggccacattccttctgatattctccttcaccgtggctgtgggcaattacataggctatcacacttctctcctggattcattcattggcatgatcattatcagcctcataaccattctgggaatgtcgctggaaaggatcattccttggaatattcagtcaatcatttacataagcctgattgggatcatcgtggcaatcccaggcatgccaactgcggatttcattgtgcgttacgtttcccaaatcgatctgaccacaatctgcactgcattcctggcttacgtgggtatagccataggaaacgactgggaagagtttaaaaagattgggtggagaggaatcattatcactctaatcgtcatttcgggaacctacctgtgtagcgcaggaattgctcaccttacgctggtggcgacgggcatggtctga

SEQ ID NO: 2903 - DNA, 2964 bp, synthetic construct
  source 1..2964: mol_type = other DNA
atgggcggtgagattatcaataatgaaaaactgaagctgattttaatcctgacccttattttctccatcttaattatgaacacagtcaacgcaagtgacaatggtatcatcgctgaatacgccgacatctccacaattccaaatgacgaaaaggtgagcatcaacgagaatgactatgatacaaactattacgagctgcctgacaaaaagttggatcacttggagagtaatgacaatcaaaaccacctggaaatgaatgacaagaaactaaatgacgggaactcgaataacgacttcaactacatacaggagttgatcaatagtcacaaggacggagactcaatattcctggaggacaagacctatataggcaacggaagtcccattatcattaataaaaacctcaatatttacggctacggctacaagaatttgtccgacctggacatcaagacaatactggacggcaactccaaatcaaacatctttatcatcaataagggaatccagctcaatctttacgggctcagcctgatcaatgggaatacaagttatgaggatggcggggccatctataacaacggcctactgagtatagatagctgttcaatttcaaacaataacgcgggcggtggggccgtgtactcctctgagggcagtgagattgagatttacaacagtctcttcgagaacaacagcggacttcttgggggcgccctggacctcgagaatgccaacgccataatatccaagagcacgttcaaaggcaaccggtgcaacggggacggaggggccatttacaataacattggaaagctcacgatctctaactccaccttttccttcaacaagggagctagaggcggtgttatctacaataaccatggaaccctctcaatatacgattgcgagatgttcttgaactctgcgagccagctgggaggtactgtgaagaattgggggagctgtgaaatctacaattccacgatcaagaacaacactgccgacatgtacggcggtggactgtacaccttcgagtttaagatgacggtcaatgattgcctgatagagaacaactacgcagacgaaggaggaggcctttttgccgatgcagacagccggctgattgtcatcaattccaccatcataaacaacaatgcgaagattggcgggggcattgatgcaaagcaggcgtatctgacggtaaataactcttccattataaacaacaatgctaagagcaacggcgggggaatctatgccgacaagcaccctgctgaaatccataacacgaacatcaaggacaataacggcaattccgggggcggcgtgttcatcggcgacataagtgcaaagatcagtgattccaccttaaacggcaactctggcgagactgggggagccattttcaacaaagggaaattgattatcgaaaaaagcaccctcaactcgaacgaggccaactacggtggagccatctataatcagaagaacctaaccgtgaacaaaagctcttttgattcgaataaagcctatgaagctgctggaatctataacctgggagacttccttatcgagagctctaactttaccaagcagtctgtgagccacaaagctggagtcatcctgagcgtaaacgggaacatcaagattaaagattccatcttcaagcagaccagcggagccgatgaaggcggcgtgatctttacccgagaggggaatatattcatcgacagctcactgtttctactcaacaacgccctgagttatggtgctgcaattgacaacagcgccatcatgacaatccagaactccctgttcagcagaaacaaggcattcggtgccggtgcaattgacaatgggggagatctgactgtcacaaactccactttcacaaacaataaggtgacaaacaacggaggggcgatcgacaacaacggcaagctgtacatgagcggctccgttctcgtaaacaacaccgctcaaaactacggcggcgccatcatctctaggaaagacacaaatattgagtattgccagatcttggacaactccgctcccgagggggacgggctgtatgatagcggcgattacctgttaataagcaataattggtggggggaaaacaatccaaactttgatgagctcctgaacttcaatattgacgaagacttcaaatggatcgaaatgaattttaccaactcaacccccctgatgcagaaaaaggtctctaacttgaccattagcctaaatgggaaggacaaaaacaacaacagcttcaaattggagaatccagataaactgcctattcttaaatcaagtattcaggtggtgagcgaagacagtaaaattaagtacaacctgaacattgtgaacggttcagcgtccacttcaactgacatgaagctggctaagacagtgaacgcaatcctggataatgagatcgtcagcctggacgttctggaaaacaatgagtcggatgatgactccgaggatagcgacgattcgaacgactccaatgatgagtcggacaacccgaacaattcaaatgataactcggacaatgtgactgacgactcagatgactccaataagtccaataatccgaacaatcatcaaagcaatggcaacaagaataatgataataacaagaattactataacaaaaacggtctcaggtactctaaaatgaaaaatagtcttcttaactctattgatagcaatctggacaatgattatctcaaccttaaagaaaataatgaaaacaatgatgattcaaacagcaataataaggatatgaactattctgacaaaaagactgatctcaacaacgagagttctaacaaggaaatcgatgaaaacgagaccaaattgtttgatatcaattactctttactcatcatccccattgccctgatcctcctggttctctttgcatttcgccgcaagaacaaggacgattga

SEQ ID NO: 2904 - DNA, 1434 bp, synthetic construct
  source 1..1434: mol_type = other DNA
atgattattcatgaactctctcggtttctaatagacctgaaatacgacgacatcccaaaggagagcattgaaaaggccaaactctgctttttagattacctgtcagtttacttcaggggattggagagtgagaactctaaaatagccattaagaccatctataaactctttggcgataacttcaattccctgaacaaggccttcatcaatggcatagcttcccatagcctagatcttgacgacggccacagactggcccaactgcatccgggctctatcgtctttagcagccttctggcactcataagcgataagagcttagacttagacattagtactgagaaattcatcgagtccatcgtggccggttatgaggtagctatcgctctcggaatcctggtgaatcccaaccaccggaatcagggatttcacagcacaggaacaataggcaccattgctgcaggggccgttgcgtcaaaaatcctgaacttgaatctcgagcagacagagcactgcctgggattgtgcacaacccagagcgccggtctcctcgaggcagatcatgctgggacgatggggaaaagcttccacgtgggcaacgcgtgttatggcgggatcatctctgcattccttgctaagaacggttttactggaggcgaatccatcatcgacgggaaagaaggcttcctgaaggccatgtcccttaaaacttatgaggactacctcgacgcagacaacaatgacctcgactacttgcgcatttctaagtttctggaggataacctgggcaagttccacataaatgaggtctacctgaagaaattccccttctgtagacacatccacagctccattgattcaacgctctacctgaaggaatctatcgtaaactcggatgatttcgactcgcttgatagtatcgggttggatagtattgattccattgaagtcaaaacctacaagatagccagtgaacatgacaacttcaatccaaagaacccccaggatttgaagcagtccctgccttatgccgtggccatctcgctggtgctcaatgacctgagtctcgattcaattgacgaactgaaagacgatgggctgtttgacgagaagtccaacaaggaatacgtgcttaaaatcaaagagattatctcaaagatcaatatcatctacgacaaggatttggacgacctggcgccccagatgcgcccttcccaggtgaccattaagttcaaggacaattcacgagacagcatcaagcacaccgtctattacccgctgggtgaggtggaaaacccactgagcgaagaggatatcctggaaaagttcaagctgctaaaccctaagtttaacattgataaactgcaaatcattaaacacatggaggagtatagtatcgacgagctttttagggagctagatctgattgactga

SEQ ID NO: 2905 - DNA, 876 bp, synthetic construct
  source 1..876: mol_type = other DNA
atggatgaaacgaaaaactcattaaaagaattgggcatcaacgaattgcatgatgattacgtgtcccagaagcgatttgaggatggagggcaatataggtttgaagtgcccggaatccagggtccttctgccctcgagtcgctgctgaatgcttgcgacgactttgatctcaccattcaccgggccactcaaaccaaaggaatcatgttcctgttggacgaagagattgaggacatggtggacctcgcggacgacgcaaatatccagctcttcctggccgtcggcccaagggccccttatgacacaagtgctaccgtccagacagaagagggtaagagaataggctatcggctgcgcggctataaaaacctagtctacgccatagaggatgtaaaacgcgccgtgggccttggggtgagaggcatcctattgtacgacgagggcctgctcttcgccctcagtaaaatgcgggagaatggggagctgcctagcgacctgaagttcaagctttctgcccatgcgggctgttccaaccccgctagcgcgaagctgtttgagtcaatcgggctgaatagtttaaacccagttcgagacctccaaatccccatgcttgcatccctgcgtgatgcaatagacattcccattgatgtacacacggaaaacccaaagtccacaggaggtttcatccgccactacgaggtgcccgaaatgattaaggtggccagcccgatctacctgaagactgggggaagcgtcgcaaagcaccacagctgggataccaccgaccaggaggcacgccagagagctaagcaggttgctctgatccgggacctgattgaaaggttctacccggaggcccagatgtctaaactttga

SEQ ID NO: 2906 - DNA, 885 bp, synthetic construct
  source 1..885: mol_type = other DNA
atggacctgattaaaaaagtagaggacgcagttgttaaggccggcagcggatacagtgaagacagactgacggcctatgagaacgcgttgcggctggaagaggaaaagggaaatgaaaacgcggtgtgggctctggaacagatgattgagaacttcaaagtcgctaaagaaaataagctccccctctgcgacgacacaggaatcccccacatcataattgagatcggttataaccgagagatccctaagaacttcttcaacgatattaatgcaggcatcgcgaatggtctggataaactgcccggaaggcctatggcagtcaagggcaacgacatcgagagaatcgagcagtcaaagggtttatatgccgagtccaacatgatgaaaccagcctcgtttcttatcgaagagaaggatgactccacttacgggcggaaaattggcatcgacgatgacaagatacgtattaatgtccttctagaaggggggggtccagaaatccgcgctaaaacataccgcgtgttccataagcgggacagcaatatcgtctttaatgaggccctcagctggctcaaggagtctttgtccatgctggggtgcactccgtcaattccagccattggcataggaagaagccacttcgaggccaacagtctcatgttgagggctatggtgcacggcaacctaaacgatcaaagtgatattgagaagtacatcgcagatgagctgaacaagaccaatatcgggcctctgggccttggcggggtgaccaccgtgctggggtcctttgtaaacatcggataccagcgagctagcggcgtgaggatagtggccgtccgccccgcctgtttcgtggaaccgcgggtgtctagctttgagttctga

SEQ ID NO: 2907 - DNA, 849 bp, synthetic construct
  source 1..849: mol_type = other DNA
atgagtgacgatcaaaagccctacaagaatggtttcaagttcccagagcaaagcattagaacaaaaatcaccgaggtgagccccaaccggctgtccacgcgggggttcaaccaggaggacctgattgagaacctttcctactctgagaacgtgtttttaatattgagaggccgcctgccggatgagaaggaggctaaaatcttcaatcacattcttgtttccttttgcgaccacggtgtcactcccccaagcacacagtctgcccgactgatcgcctcctcgggagcgagcataaacaatgccgtggctggaggactgctgtccttcggcaagaatcacgcgggggcaattgagaaagccatggctctctttcaggaatcaatcagtggccttaacctggaagagaccgaccctgacgatgaaaacaagcgcatagccctcttggccatcgagatcgtaaaccgctacgaaggcgaatcaaaaagagtgcccggctttggccacaggtatcacgacaaggaccctagggccgctaagctgatcgacctcgccattcaggagtcagccatcgggcctcataccaagctagccctggcaatcgaaagcatcctgaatgagaagaaaggaatttgtttaaatgtggacggagcgaatgcaggtctgctaagcgatctgggcttcgacagtgacctcggactgggcatcttcatgatcgggcgtctcccagggctcatcgctcatgcatttgaagagatgcaggaggaagagaaattccggcgattctgcgatttggaaaacatagtctatgaagggtttaaaaacaagaggattgatgatggcgaggaatga

SEQ ID NO: 2908 - DNA, 510 bp, synthetic construct
  source 1..510: mol_type = other DNA
atggaatttttcgatgttatcgaaaaacgatacagcatgcgcggttttgaggacaaagaggtagagcaggagaaactcgacaagatcctgaaggctgctcagatcgccccaactggagtgaacttccaacccttcaaggtcatcgtgatagacacgaagaagtataaggaagagctaaatgcaatctaccccccagagtggtttacacaggcgccaattgccctttgtgtggtggctagcaaggagagggcgtggacccggaaattcgacggcaagaacatcgccgacatcgatgccacaattgtcatgacccacatgattctcgccgccgaagacctgggcctgaacacctgcttcattgctgcattcaagcccgacgaggcaaagaaatttttggcactggatgatgaatgggaacctgtgctgttcactcctttagggtatgggaatgccgagccgagagacaccccccggaaagccatagaggaactcgtcatctacaaagattga

SEQ ID NO: 2909 - DNA, 372 bp, synthetic construct
  source 1..372: mol_type = other DNA
atgaaaccaaaaatagtgcgcgcaagggacaaagaggtaatgaaccaattggcaaagcttttcgaggagtcaaaatacaccgtcaagagccaggataagaactatgtcctgctgaagaagaacaattacgggaaccctctcatccacctaccgttcattctgatcggactgttcttcaatgcgtttgctatcctcgtgaacgtggcctattttgcctacagtgtttttaaaaagtccaatgtcatcttaattacaaccgaaaagaatgatgaagacggcaaccccctggagtttgacgacgtgggcgaaattgaggtgttctacgaccaggagacgtgggataaggccatcgagctcagccggctggaatga

SEQ ID NO: 2910 - DNA, 339 bp, synthetic construct
  source 1..339: mol_type = other DNA
atgagaaagatcatactgctggctttttccgccctgttgatcattctagggctatggaactacatgagtgtgcctaaaccaggtctcgatatcattgcctcatcccttgtgctggtggcagttggctggaccctggcaatgtcggtgtttgagccgaactggattaaggccgcgatcttcatcgacggactggtattcgtccttgtcagcatcacattcctggtcagccccatcaattatgtgttcctcctctttggcatcattttggtggccatagctgttctggcctatctgaggaaactccccgacaacattttacgctacttctaccggagctga

SEQ ID NO: 2911 - DNA, 315 bp, synthetic construct
  source 1..315: mol_type = other DNA
atggcaggcatatcagaagctattacccagatcaaaaaggctgaaagtgatgcggactccctggtagaacagagtacagtcgacgcgaaagcaatgatcgacgaggcccacgtgaaagccaatgaaatggttgaggccgccaagaacgaggccaacgaggaggcccaatcgacggtcttcgacgcagaagagaacgcaaagaaggaggccacctctatcagcagccaggccgacagcgatgtggaggctatcaagaacaaggcccggaataatatcgatgaggctgcttccataattgtgaaaaacattctctga

SEQ ID NO: 2912 - DNA, 2007 bp, synthetic construct
  source 1..2007: mol_type = other DNA
atgtttagaactgcgagaatgcgaaagctgaatgtgataacgctcgacaagtacgctggccccacggtcagcgcactgcacgacgagggcattgtccagataaatgatatttctgagcggattcagcaggaccccaagctcgccgaactgctgaaaccttcaaaagttacaccttacactgggaagctgtccagcctgctgatgaagacaagcgcactttccgatctgctcggagatgccctttcagagggccagtccctgaaggacaccctcatgtctttcataagccccgatctcccagtgcctaaagaagtcgaggatgttgataccgaaagctttatagcttatgctgaatcaaccttaagccaggttgaggctgagaccaaaggtattgaagacaagctggccgccctagacagtgaagagagtaagctcgaaagcaataaaagtctggcatctaagcttaaaaatctggatatggacctggccttgctgagcgattcgaagtatacgagcaccattgtggggcgcatcactgccgagtcagctcagaagttcaaaagtgagtactccaagattacggaggacctcttttacgagttggtgccagatgacgagaaggagtacaatattcttgttgtggtcgtggccaacgagtttaaggatgacatctataccttactgaggaaaaatgagtttgagaagttcgaaactgaggacttacagggccgccctgacagtctgatttcctcttgcgaatccaggcttcaggctatcgaaagcgagcgatcccaagccaaggccgacctcaaagtagtcgccgaaaaatgggacgatgaagtgctggccctcaaagaacagttggagaacgaaaaggagaagaacgaggtgttcgccacatttgctgagaccgacaagactgtggtccttgaagcatgggtgccagagaaaaacctggagcaagcgcaaagcataatcgagactgcgacagatggccacgtgatcatggagacagaagaggttcccgacaatgctgaagacgtcccggtactgcaggagaactgcacctatgccaaaccgtacgagctattggtggaaatgtactcgccactgaagtacaatgaaatcgaccctaccttattcgtagcgattacataccccttcttcttcgggttctgcctcaccgatgcaggatacgggattctggtggcccttataggcttcatcctctatcggggaatgggcaaagtcaaccggaccatgcacgatgggggcctaatcatcatcgccagtggtatatggtccattattctggggctgtttaccaacgggttcttgggggacatgtggactaggatcttgggtctgggacccgctctgcccacagtgatcgactcaatcaacgcatttaagttcccggccacaatcctggtgattgctatcgtaatcggcatcatctataccaacatcgggttcatcctgggggcaatcgacaacttgcgctacggagagaagaaagaagcaatcgggtcgcaaatcgtgtggtttgtgtttgagctggggatcatcctgctcatactgggcttcctcttcccaacgttcggaatgattggaatggccttgggtgccgtcctcatcattgcagcgcttggcatgctcatatgggccaacggcgcatatggcctgatggatgtcttcggatttatgggagatgtgctatcctacgcccggctattggctctctgtttagctacaggcggtattgccatgaccgtaaacatcctcaccaatatggtgaatgacatgattccctttgttggcatcgttctggctattatcatctttatcggtggccatattgccaacttccttttccaggtgctgggtgcaggagtcaacgcgctgcgtctgaactatgtggagttcttcagccagttctatatgggcggaaaaaactcttaccaggcctttaaagcgaagagacagtttactaaggtgaagaagtga

SEQ ID NO: 2913 - DNA, 486 bp, synthetic construct
  source 1..486: mol_type = other DNA
atggtggaaatagccctgggcaccgccctcgccgcaattggcgctggcgtggcaatcggttttgcggggctaggcagcgggctgggacaaggcatggcagcagccggatcggttggcgccgtcgccgaggataacgacatgtttgcccggggaatcattttcagtgccctgccagagactcaggctatctatggcttcttgatcgcgattctcctgcttgtgttttcaggactgctgggcggcggagagggtctcagcacaacggccgggattgtcgctataggggtaggggccagtatcggatttgctggtctcggctccgggatgggacagggtatggcagccgcgtcctctgtgggcgctatcgtcgaggacaatgacatgttcgccagggggataatcttcagcgcactgcccgaaacccaggctatttacggtttcttgattgctatcctgcttatggtgttcggcggaatcttagggtga

SEQ ID NO: 2914 - DNA, 681 bp, synthetic construct
  source 1..681: mol_type = other DNA
atgagctccggggccgacaaaattgtcagtaacataatgagcgaagctcaaggcaaggcagatgcaaacatcggcgaagctcaggctcaggtcgacgcaatcctcgccgacggcgaaaaaagggccgaggccactaagcttaaaatcagtgaggacgctgccaagcaagcggaaatgagataccagcagatcatcagcgaggccaagatgaacgcccgtagggcagagctgggggcaaaagaagaggtaatcgaggaggctttcaataaggccacggaggatttgacaaatatggccaacaccaacgataccgaatatgtggacgccctgattgagatgattaaggaggccgcggtggaaatcggcggcggagacctgatcgttctgctgaaaaaggaggacatcccgaaaattgaggggaaactggagcacatcgtcgggctaataaagtcactcatcaagcgggaaaagccatccgatttgaatgtgattgcgaaggaagtgagccgggagaccgacgtggaaaccactctcgagataggagagcccatcgataccattggtggagctatattaagaacacgaaacggtgagattcaggttaataacacgatcgaatcccgcatgctccgctttaaaaagtcactgcggtcggaggtggcaaagacacttttcgattga

SEQ ID NO: 2915 - DNA, 1155 bp, synthetic construct
  source 1..1155: mol_type = other DNA
atggctgatgagattgctacaataataagtagcctcggcctgtccaatgaggcattcctggcaatagttcttctggcgtttgtcgtgatcggtgccattatcgtgatcgtcgcaacgcggccaatcctggatgtgtacccctatctgcaccctaatgcaagggtacgggcacgcaaaggacggttgtttgatgagaagcagatttcagaactagtggaagccaacaacgttgatgaaatcacaaactatctccgcggatcgcccgactatgccgactacctggataactacacactggaaaaggctctggacatccagctcggggagacctatgacatggtgagcaggatggcgcccaaagagatccagtccagcttcaaagtcatggctaaaaagagcgacatcaataacattaaaagtttactaactgctaagcaagcaggcctgaacgaggaagccaccgccgacctgcttattcctactggttctctgtatgaagatatagagcgtctgaccgacgccgatggtgtaaccggcgtggtggctggcttagacggcactgagtacgcgcccgtattggaggaggctctgccggagtacgaaaagacagggatggtcctgcctctcgaatcagccctggataagtactacttgtccaaattgctcgcttcctcagagaccccatctgatgagaataagcagatactctacagttatgtggggaaccaggtggacgtggccaacatcaaactcatcttacgagccaaggccgatggactggactatgaagccatcagcccatacatgattgatagtggatatcaactgagagaatggaagcttaaggacctgatggaggccgaggacgtgacgggggtgattagcgggctagaaggcaccaaatactcagacgtcctggttgaggtgcttcctgaatacaatgagacgggatcggtggctctctttgagaaggccctggacaagttcctcgtcgactctgcaaaatcctactccatgaaaaagccccttggcattgggccgatcatcggcttcctcagccagaaggaggttgaagtcaagaacttgaaggtcatcgccagagccaagcgcgaggcggacttcccaatcagcaaaattagggagatgctggtgtga

SEQ ID NO: 2916 - DNA, 318 bp, synthetic construct
  source 1..318: mol_type = other DNA
atgagtgacgtcgcgataattggggatatcgacaccgtgacgggcttcaaactaggtggagtgaagcgaggaatcatcgtgaataacgatgaagaagctaaagatgcactggacgagctcctcaacgacgaaattagcattatcatcattacacagaagatagccgacaacatccgcgagcacattaatagacggctgggctcagatgtccttcccatggtgatcgagataccagacaaaagcgggtcctctgagggcggcgccgaccagatggcagccctgatcaagagggttatcggggtagagatggtgaagtga

SEQ ID NO: 2917 - DNA, 1755 bp, synthetic construct
  source 1..1755: mol_type = other DNA
atgattaatgaaggaaatatcatcaaaattgccggtcccgttatcgtcgccgatgggatgagaggcactcagatgtatgaagtggtacgcgtaggagaagccaagctgatcggagagatcatcgagctcgagggcgacaccgccaccatacaagtgtatgaggagaccgccggggtgaagcccggcgagaaagtggagagtacaggaggtccactgagcgtcgagcttggccccggggtgatgggtagcatttttgatggcatccagagacctctggaagtgataaagggaatctccggagactacatcgcaagaggcattgatgtggactcaatcgacaaagagaaaaaatggacttttgaacctatcgccaaagtgggcgacaaggttgtgggcggcgacatcctgggacaagtccaggaaacaagcgccgtggtccaaaagatcatggtccccccaatgattgaaggcaccataaagtcgatagccagtcaggccgaatacacagtgcttgagaccatagccgaaatagaaacggaggatggaattgaggagatccagatgttacagaagtggcctgtccggaaaggtcgcccatacaaggaaaagctagacccggatatcccacttattaccgggcaacgcgcacaagacacttttttctgcctggcgaaggggggggccgccgctatcccgggccctttcgggtcaggcaagactgtgacccaacagcagctcgctaagtgggccgacgccgatatcgtggtgtatatcggatgcggcgagcgggggaacgagatgactgaggttctgaccgagttcccattcctgacagacccaaaaaccggcaatcccattatggacagaacggttctgattgcaaatacttccaatatgccggtggctgcccgtgaagcttgtgtatacaccggtattacaattgctgagtacttccgggaccagggttatgacgtcgcgctcatggctgactcaacgagtcgatgggccgaagcgatgagggagatctcaggaaggctcgaggagatgcctggggaagaagggtaccccgcttatctcgcatcccgattggcccagttctatgagagggccggaagggtcatcacactgggccaggaccccaaggaatcttccgtgactgtcgtaggagcggttagcccccctgggggggacctgtccgagccggtgacgcaaaacaccctacggatctgtaaggtgttttgggctttggatgcatctctggctgataagcggcacttcccttccatcaactggctgcagagctactcgctgtatgtcgagagcattaccaactggtggcaggaaaacgctagcgaagagtggcgcgccaacagggaccaggcgatggtgttactgcagaaagagagcgagctggaggagatcgtccagctagtcggtcctgatgcactccccgattctgaacaggtggtgttggagactacccggatgctcagagaagactttttgcagcagaacgcatacgacgatgttgatacatactgcagcccaattaaacaggcaggcatgctcgaaaccatccttaagttccatgaggccgcaagtgcagctgtgacgcgtggcgcagatgtgaaggaaattgccgctctgacagtgaaagaggacattgcgcgcatgaagtacatccccgaagatgagtttgaggcccgagtgaaggagatacaggagaaagttgtcacacagtgcgctgaggtatga

SEQ ID NO: 2918 - DNA, 1386 bp, synthetic construct
  source 1..1386: mol_type = other DNA
atgaatgctgatattaaaacacgcgagtatacaacagtttcggaggtgtccggccctctgatggtggtcgaaggcgtggaaggcgtggcgtataacgaaatcgtcgagatcgaggcccctaccggagagcatagacgcggacaagttctggaagttaaggatgatgtggcggtggtgcaggtgttcgaaggcaccacagacttaaacaccctcaacactaaagtacggttcacaggcgagaccgctaaaatcggggtgtcaaaggacatgatgggacggatcttcgacggaaccgggaagcctattgacggcgggcctgagattatcccagagcaagaactggatattaatgggaatccaatgaaccccgcctcaagagagtttcccgccgagtttatccagaccggtatcagtaccatagacggaatgaatacccttgtcaggggccagaaactccccatctttagcggctcaggcctgccacacaacgatttggctgcccaaatcgccaggcaggctaaagtcgtgggcagcgatgacgatttcgccgtgattttcgctgcgatgggtataacgcatgaggaggccaacttctttatgcgcgatttcgagagaactggagcactcgaaaaggtcaccgtgttcatgaatctggccgacgaccccgctatcgagaggattctgactccgaagatggcacttacaactgcggagtacatggccttcgaacttgggatgcacgtcctggttatcctgacggacctgtccaactactgcgaggcactgcgagagatatccgccgctcgcgacgaggtgcccgggcggcgagggtaccccggatacatgtacactgacctggctggtatctacgagcgtgcaggacggatcgcaggtaaggaaggtagcattactcagatgccgattttggtcatgccgcaggacgatattacacacccaatacctgacctgaccggctatatcaccgagggacagatcgtcctgagtagggatattcacaggaaagggatctatccccctgtggacgtactgccatccctaagccggttgatgagcggtggcatcggcggcgacaagacgcgtgatgaccacagtggcgtgagcgaccagctctattccgcctacgcagaaggacggaacctcagagacctggtagcagttgtcggggaagacgcccttacggagcgcgaccagtctttcctagcttttgcccaggccttcgaagatgagtttatcacgcaggccaaggatgaagaccgaagcatagtggaaactttagatctggggtggaagttgctcaccatactccccaagacagaactcaagagagtgaaggatgaatttattgagaaatactacccagagtga

SEQ ID NO: 2919 - DNA, 693 bp, synthetic construct
  source 1..693: mol_type = other DNA
atggccgaagaaatactcgaggggattaacccaacccgaatggagctacttgctctgaaagatagagaaaaacttgccgtcaagggccacagtttgctcaagcagaagagggacgctttgattaaggagtttttcgatatcctggaccgagttaagggtgcgcgcgagaatgccgagaccaacctgagtgaggcttacgaagcactaactgaagctcagatcattatgggagacttagctgtgcagaaggcagccctgtctgtgaaggagagcgtgaaagtagacatcagctccagatcgattatgggggtgtccgtccccattgcagatatggagatggagagcaggacactggtggaacgcggctacggcttttcagacacttcaatacaactcgacgaagccgccaaaaaattcgagacagcgcttaagtacatcattgaactcggagaaatcgaaaagacaatctatctcctggcggatgagatagagtctaccaagcggcgcgtcaatagcctggagcatatcatgatcccgcggttccaggccaccatcaagtccatcaatatgaaactggaggagatggagagggagaacttcgtgcggatgaagatgatcagaagcacgattgagaagaacgaagccgaggctctggccaaagcccagctgaaagcagcaaaagccgaagagtga

SEQ ID NO: 2920 - DNA, 2859 bp, synthetic construct
  source 1..2859: mol_type = other DNA
atgattagtctgtcgtttgtctcggcttcatacgctctagactccaatcacctcggggaaaatgatcggtcttgcctcaattcttgttcgtcgctgaaatattccctgggtgataacaagaataacgacttagataatagtgccgatctcaatagtctgaaccccaatagcaataattgcctcaattccaataaaaataattgtaattgctattgcaagaatcagacagacctgaatgatgatctgaacgactcagataactgtcccgacagttttgccaaaaagaccaatatcaaccatgataagcagctgaacgacggggagattgacttctccgagcgcaataatcagatcttcctgataagtcccgaaaacttctccgtgttctttgacgagaataaccgcctgaaggaagattacgggggatgcaccctggtgtttgagggggatttcgctgagctgggcataatcgacatatcatacccttacacccgaatcacggcaaaggaaaacagcttcaagaacactgcattcaagctgtctgcatctgacatcgaactttccaacctaaacataagtctggataaggagtttaaagataacgaatacgccgggattctcgtgctcagcgactacattagcatctacaacattaccctcaactacacggtgcccgccaataccaacgggttctgcatctacagcaaaggtgaaggctttcggaggatcactgatctgtccttaatcaacaacaccatcacctttacaggcaacaacctaaacgaggcttgggactatggcattttccttgataagaccgataatgccttggtgtacggcaattcacttggttcctacttgcccctgtgtgaagacaattggtataacaacgagtatggtgccgtcagcaagatgtccagcgccggctttgtagcgcagagctgtaatgacctcaagctgtcctccaacgaaatcaacacctatgtgacagattccacccagagctcctttgccatggactcctgcatattatacgattgcagtgacctgacggtcgagcggaacactctgtacctggaggacattgacagtcaggacggcaagaacaacaccctgcacggctttgacttgtatctatgtgacgatgcgataattgccttcaacaacatcgatctgttcacaatgggaggcaatgacgggaggaagatcacaagcccattgcaggtgaacgggccaagcgacaacatcagaatcgcctacaacaatatcacaagttccaacttcggttccaactgtggcatttactcccataacttctatggggacactcacctcgagattatcagcaatttcattgatgtggctggcttcgcaaactctggagaatggtcacttctctctggaattgaggtccaggattcagacgacgtcatctggaataatacaattatcgtgacaaatctcggtgacttcaaatataataacaaggtctacggaataagctactcccaaaataggaacaactacaacagcacattcaatgtccaatacaacaacattaccaccaacggttattacgctgtatatctgggtaaggacgattaccccgtggtcaactcgaccgtgaagaacaatgtgttgaacacgtacataaccggaggcaatccggcagtgagcatcgcaaacgacaataaaaacaaccccatcgtaaacaataccgacaacgagtttaaaaacatctttaaaaacagctccttccccaaatggcttaaaaacttcctgagacaggacaccaaagtggacaaggacttttcgtggattaccgatgctatcaacccccagtcaaacggcacgggattttctaacgacactggaaatggcacagggattatagacaatgatgggagcgacactgtaggaaacaattctgaaggcagcgactctatcgttaatggcagcacttccgcgaacggaaccggcaatggcaccagtggaaacgccaccgagccacagaatccgatcgacgacaatcagggggataactctggaggctcaagttccagcgacaattccactggaagccagacagataacgaggattccaatcagaacaacaccgaccctactgacagcaaaccgaccaataacacagatgtcccagtgaaccccaccaacactagcgacaagccagttaacagtaccgagccggtccccgctaacgacacagagccagtgccagccaacgatacagagccagttccagccaatgatacagggcccgttcccgataacaagacggacaatcctgtgaacaatacagaaccggttcaggaggatgccaataaaaccgactcagataatacggagccaatcaacacgaccaaggacaatagcacggagattatcaacaagactgagtcagatgacgacactaaccagactgtgcttaaagacgacgatctggaccctaaagagtcacacgaaaactctcaagacgacaacaagaatcctagtgatgacgaggagaaaagcactcctggggattctggcaatgagctgacggaccccgaaagcaactccgaaagccctcagaatcaagaggaaaactcagagaacagtaatgacgactctagtgagccttctagttcgacagtcggcgattcacactcagattctgcctccagccctggtcttagtgatgcttccagcagcaagaacgcatatgaattggataagcctgtggaggatctcgtgacaaaatcggttgattatatcagcctcgcgggaatctgcattgtgactttgttactgatcctgttcgggtataagcgtcaaaaggacattgaaggcgaagactga

SEQ ID NO: 2921 - DNA, 639 bp, synthetic construct
  source 1..639: mol_type = other DNA
atggtggacgtgggcggaggaattttaacctacatcctagacacccttagtcaaagtctgcagatcccggtcatcatattcctgctcatcttcgctgttggggcgatcatcctgctgggcggcctaatccgggagtatagtcacagaaaaaccatctcagacgcggaaatgaggaacattattgatgctatcaacaaggctaatgacaaatcggagattctgtccattgtcgacagcagcgatattcccaactctcagaagactgtgctccgggagattacagattccgactgggacaatgagtccagggtgggccttgccaaaaagctgatatcttcccgcgaaaagcggctcgaaaagcgcttgtcatacactgacataatcacccgtatcggtcctacactcgggcttatgggaaccctcatccccatgggcccaggactggccgccctggggacgggcgacgtggtaacattgagcaatgccatcattgtcgcatttgatacaactgtggtggggatcggtagcggggccctggcatatgtcataagcaagataaggcgaagatggtacagcgagtacattaacaacatcgatgttctgacggatgtggtattgaacaagctgaataaactctga

SEQ ID NO: 2922 - DNA, 342 bp, synthetic construct
  source 1..342: mol_type = other DNA
atggtgaagatcagtcggaaaaattccttcgacgaaagcagtgaagaggaccctatgtccggcgtcgccaacctcgtggatgccatgttggtaatcgcagttggactcctggtgtttctggtcatcagctggaacatgcagtccatcattttcaacgaggatctatctccccagcagaaacaggaggctattgatgcgatgaatcaggtcattgaggtggaccaggggcaacaacttaatgagacaccagacataagcaactcgtcaggagagggctataccgaaatgggcaaggtgtaccaggacccgaagacggggaagctgataatgatcgaaaactga

SEQ ID NO: 2923 - DNA, 1323 bp, synthetic construct
  source 1..1323: mol_type = other DNA
atgggaaagctgtcatttagcgtagctcaaaggttcggcaaaaagggcaccgccctgccaggtaaggtggcattgaaattcaatcctaacctgcttgaagagctgtccaaaaaatgcgataagatcgtctttatcacgggcaccaacgggaagacaactagcaacaacctttcgacacacgtgctgaaaggcgggttcaatgatgtcctctcaaacctgaacggtagtaatatgattcagggcgtgctgacccccttcattaccgattacaaggattcctacgacgtaggtatttttgaagttgatgaaggctcagttccggtggtgagccagttcatgaagcctgactatttcatcatcaccaatttcttcagagatcagctcgaccgatacggtgaggtcgaaaccacgatcaagatggtgcatgattcaatcactcccgagactgttctcatcattaacagtgatgagccatccctgcttagattcgacgacctgccaaataagaaggtgtactatgggatcaacaagaccaagtttgcgcaggatgacattgatgttgccgagtccattttctgccctaagtgcggaaacaggctcagttatgagtacatctattacggaaatgtggggaaataccactgtgacaagtgcggcattgagaaccatcccgctgactatttcattgaatctgccgacctcatcaacggctcctataattttacagtcctcaacgacaacaaaagggaggaatacactctcaatctgatgggcctctacaatctatacaattccctgggagtgataagcctggctaaggagataggcctggactacaatctgattaaggaacggatcaacaatttcgaataccgtttggggcgcatggagactttccactttaaaaacaaggacctggttttggtcctctctaaaaaccccgtgggcctgtctgaggtatttaacacaataacctacgacgagagccagaaaagtgtgatgtttatcttaaacgactacgcgccagacggaaaggacgtgagctggatttgggatgccaacttcgatcccgtgaatcacatccctaatatggacgcattctattgtgtcggaacccgggccgaggaccttgccttgcgcctaaagtatgccggagtggatgaaagcctgttaaagatctacccggcaaaagaccagtttgacataaacgaggcagtcgataccatatcgaaggaaagcacaaaggcgtatgtgatcgggacatttacggccatgcccgaggctcggaaaatcctagtcaaaaaagaacaagaggggttttga

SEQ ID NO: 2924 - DNA, 777 bp, synthetic construct
  source 1..777: mol_type = other DNA
atggacaacctcgaactgacagtgatgaacatgtactcggacattttaaatacctacggcgacatcggcaactttcgctgcatcaatcagcgcatccggtggagggacatcagtcttaacatccaggagtgtacgatcgacaaggacgatgacttcgagtgggaggacatcgacattatccttatcggtggaggcagtgataacaaccagtccatcgtatctaaccaccttctagagcagagaaaggatctggtcgagtttattgaaaatggcggggtgctgctggccatttgcgggagctaccaaatgttcggaaacaaatacctcgatgtggacggcaaggacatcccctgcctggaggtctttgacatagaaaccacaagccggcccgatcgactcataggggatattgtgatatccaacgccatcccagattcaaataatgtgctgaacaaggattttgatttcaaattgaaggatatggttgggtttgaaaaccatggaggccgcacctaccacaaccacgaccccttgggccacgtgaaggtcggattcggcaataatggtgaagacaaaggggagggaatggtttataaaaacttcctagcaagctatctgcatggtcctttcttgccgaagaacccacacattgccgattatatgatattcaatgctctgaatagaaagtactccatcactgagattaaagacctcaatgacactattgaaatcagggcgcatgagcggatgctgaaacgtctgctcaacgataagtga

SEQ ID NO: 2925 - DNA, 1287 bp, synthetic construct
  source 1..1287: mol_type = other DNA
atggagaacctgcttatcatgggcatcaatacacgtccaatggttaacagcgcgctgaagctggattatagaacctactctgtaagttattttaagacttacgacttcgtgagcccctataatgagaggcacgtgctggaccaggagagtgtcgactcctgcggcttcttcgaacgcaactacagcccccaaaagctactcgatctgtccagggaatacctgttcgacctctcgaaagaacacaattccaaaaagcaggacaacgaaaacaatgaggacatcgatgagatcgacaaaatcgtactgataacgggaatccatgctgacgactttaaaggggagttttccagattcaagaccaagattcggggaaacataaataccaaggacctggacgataagtttcggttctaccaaaagacaaagaacaaatttgacgtcccactcacgttcaaactcagtgacgtcgatgagctgcgggatatccttaagcaatacaacaacaaccagtttatcctgaaaccccttaagggcaatggtggtctcggaattttcctgatcgattacgatagcctgaacgaattgaataatagcaacaatcctttggagaacatctcattcgatgactacatactgcaggagtatattgagggcacaagcataagcagctcagtgctcggcactaatgacgattgcgtgaatctcttcaactcacgcctagtgacagaaaatgatttgggaaacgacaactttgcatatagtggcaacattgtgccactcgatgtgaatagctttaactgtttcaacgagagctttaagggcctggggatcgattccaagcagttgaacaaagagatgaaggagatttccgaggacctgattaggcagttccgactgattgggtcgaacggcgtggacttcattttagaccgcgagaacaacctaaaggtcattgaaatcaatccccgactgcaggggacctatgagttatgtgaagagatcatggacttgaaccttcttgacgcacacatcaaggcctgcgagggagaactggtggaagtgccgaagctgaatggcagatatgggatcaaaaagattatctatagctccaaacaggttaaaattggtaacctcagtttatcaaacgtctacgacgtcccttacgaaggagtgaagatagaggccaatcagcctatcgtaactctgatcgatagcaacaaggatctcaaaaccgccattgggaatataaataccgctgaagagctggtttacaaaaatatctactga

SEQ ID NO: 2926 - DNA, 981 bp, synthetic construct
  source 1..981: mol_type = other DNA
atgaacatcttctcaactgaagagacatattacggcactagaaaagactctccagtgctgctgccttcatacaacgaatatggggacaagctccacatcaaggacgtgttcgatttcgaggagatgctggaaaactacatcatcgaaatggaaattcggaactatagcgaaaacactgtaaagacctacagctccatcatacgaagcatgatcgattatatgagctcggaggagggagtgtacgatggccgcaaattcctagcctgctttaaaaagtatattcgcgacttgaagaaggaccaggacgtgtcacagaattacatttacctcaacacagtggtgtgtaagaagttcctggaatttaatgacatctacttcctggaggacgtgcagaacccgaaaaggaccaagagtctcccaaaatccctgacggagaaggaagtgaaatcgctgatcgatgcagttcaaatcaccgacgaggacagcgagctgaagaaaaaagccaaaatgcgggacaaggtcattcttgagtttctatactctacagggctgcgtattagcgagctcgtcaagctgcagaaaaaagatattgacttcgacgagaggaccatcagggtgagaggtaagggcgaaaaggatcggattgttctgtttgacgaaaatacgcgcgatttgatagataattacatcgaaacccaaaaccagaagagtgagtacctcttcatcaacaagaacggccggaagttaacgcccagatatgtccagatgatgatcaaggagtatgctgagaaagcgggaatcaagaagaaagtaaccccccacgtcctgaggcacagttttgcaacacatcttctcaagaatggggttgatatacgagtcattcagcaattattgggacactccagcctttccaccactcagatttacacaaatgtggatatggataccataaaatccgtgtatgaccatgcccgcgagtga

SEQ ID NO: 2927 - DNA, 1338 bp, synthetic construct
  source 1..1338: mol_type = other DNA
atggggaagggggtggagctcactacaactaaataccttattcacgctcagattaatgccaacggaatcgtcgagaagcctgatgtggtaggcgcggttttcggacagaccgaggggcttctcagtaacgatttggacctcagggagctgcaaaggaccggcaggataggacgaatccaagtgatcatacattccaacggcggacgggcaaaaggtgagatcgtcattccctccagcttagatcgcatcgaaaccgccatcctggccgcatcactggagaccattaaccgtgtgggtccttgcgaagcgtccatagaggtgcttagggtcgaggacgtacgggccgtgaagcgacagcaggtgatcaatcgggccaaagaaatttacatgggcatgatggaaaccgtctcgcccgagagcatgaagatgattgaagaaatccgggaatcaatgcgcgtgcacgagatctctgagtttggggaggagaggctgccagctggtcccaatgtccatacgtccgatgcaatcattgtcgtggagggccgcaatgacgtgctgaacctgctcaagtatgggatcaagaacactgtggcagtggagggagtgaacattccgacaagtgtggctgagcttacgaagaagaggaccgttacagcctttgttgatggcgaccgtggcggcgagctaatcttgaaggaactcttgcaggtgggggaggtcgattacataaccagggcgccccggggcaaggaagttgaagacttggaaaaggaggaggtcctcgtggccctgcgggacaaggcccccaccgagcaggtgatcaataatctggacttcaatctagacacgcaggccaagactccaaaaaacaaagtaaacagaacagacagacgggcaaagaacttcaataagagcgacaagtttcacgggaataaaagaaacgatcgtaaagacaaattcaatgacagaaaggacaagaacggaaaaaacgatcgccgcggaaaagaccgcaattctagaggtcgcagggaccggggcgaccgcatccctgaaagccgaatgaagctgctgaagaacatgctgagagacttagaggggactggaaacagtgagatcctagatgatagcctgaacctccttaaggagaccaaagtcgaaaccctgtatgaagacctgaaagaagacatcccagatgctgatacaattatcttcgatggcgtaatcagccagcgactggtggatattgcccactcaaagggcgttaaaacactcgtggcttttaaatccagcagagtcattaaacggccggacaagctcaagctgataacgctgaactga

SEQ ID NO: 2928 - DNA, 756 bp, synthetic construct
  source 1..756: mol_type = other DNA
ctggaaggcgttatcttggcaaagatcaaaccgaatgatctgctcaaaaaaccaagtaagatagaaaaaatggagctggatcagattgacatcagcaaataccagttttcaatagacgatttggaggggaaggacagttccaactacattctgctcaagaagattctggactcaagctcttcatgccaagtttccgacgcctacgcctcggtatccggtcgcagcggcgtactggacggattaaagccaatgaaccggaacaaggtctacgggcgggtgttcacagcgaagaccaacactaacgattggggcacctccttgatggctatggacaatgcgtctcagggagaggtgctcttcatctacagctacggagataaggccagcgtgtggggagagcttgctagcacctgcgcaggcgagaaaggaattgccggcactatcctgtatgggtatgccagggacatggatgccctaatcgacctggactatcccgtgtacgctctcgactattgtcccaatgccgggaaggctcttgggctaggtaaggtggatatcgtgctggaaattggtgaagacataatcaagcccggcgattttgtcttcgcagatgagaatggggtggtgctgattcctcaggagctctttggcgagacgatggtggcaacattcaacgtcaaggtcaaagagagtttcatcattaaggagctcaaaaaaggcagacttctgtccgaaatcatcggactggaacgatga

SEQ ID NO: 2929 - DNA, 363 bp, synthetic construct
  source 1..363: mol_type = other DNA
atgaaattcctcggaaacatttcacacctggcaaactctggtaagctgatcgccaagtcaagccagaccccacctgccggagctttcgtgtttacgaacgacaaacagaagataggcaaggtatacaatatcttcggcccggtgaagaatccctacatctccattaatctctacaggagcgtcaacaagagagatctagagagtaggcaaggggaaaagctgtttgtgtctacaaagcgggagatggaaaaagacaagaaaaagaagcggagcaacaagagtaaaaaggggaaatattccaaaggcaaaaacaagagcaaacccagcaagaaaaagcgatccaataagaaatcgcgccgctga

SEQ ID NO: 2930 - DNA, 795 bp, synthetic construct
  source 1..795: mol_type = other DNA
atgggcccggagtggagggcctttgaccatgaacagagagacaaacgcacaagggtgggcgcgcccatcacttacacaatccacgataaaggcctcagcaccatgatcgattggaggaataaggacatctacggtcgcgatatacctgcccggaatagagcgcagtggtatcggttgcgcaagtggcagcgaaaaatccgaatctccggtgcgaccgagcgtaacctggctttcgctctgagtgagttggaccgggactcttcccgcctggggctgccaagaagcgtcagggaagccgcatctgtgatctaccgaagtgcagtggaaaacaagctcattcgggggcgctctattgagggcgtggtcgcagctagcctatatgccgcctgccggcaatgtaaagtccctcgtacgctcgatgagattgccgaggtgtcaagggtcagcaagaaggaagttggacgcacctaccggttcctgacacgcgagctgcacattaagctgcccccaacatcgccagtggactatgtgcccagattcgctagtgagctcggcctgtccggggaggtgcaaagccggagcatcgaaatcattgagaaggcaatggaaaaggggctgacttcaggcagaggccccaccggggtagctgccgctgccttatacatagcatccgtgctccttggagaacgaaagacccagagggacgttgccgatgtggccggagtaaccgaggttaccataagaaacaggtacaaagagctaacggaacagctggagacgggagtcactctttga

SEQ ID NO: 2931 - DNA, 2106 bp, synthetic construct
  source 1..2106: mol_type = other DNA
atgaagcttagtattatcatccctacatacaatgaagaggaatatttgcctaaactgattgaatccatcagatcacaggagtttaccgactacgaagtcattgtggcagatgccgacagcaatgataacacccgagagatcgctgaagcttacgggtgcattgtcgtagatggagggctgccggcaatcgggcgcaacaggggcgctgcggtggcgaaaggtgagatcctgctctttctggactcggacttggagttgaccgagcattaccttgaaaatgtcattgaagaatttgaagaggaagatttgggcattgcaatcacccagatgacccccctctcccagaagaaaagggacatctacctgcataacctggccaattggttcatgatcgctgtagaaaacatcaagccccacggtgcaggctgctatggcatcatctcccgcaaggagctccacgacgagtgtggaggatttgatgagaacctgacatttggagaggatactgattatattgaacgggtggctgagataagtcagtttaaagtccttcgcaatgctaaaatcggcgtttccacgagaaggctggaagaggagggactgtacaccctcctgaagcaatacggcaaatcgacggtaaatgatttcaggggcaaacggacaagcgctgaagacctgggatacgagtttggacacgaatcaagctctaagctcgagagtggtgtgcaggagtcggttccaaaactcgagaacggcgtgcaggagtcagtgccaaaactggagagcagtgcggatatcagttctcaaatagaagataactctccatccctcgaagatgaaatcgacattgagtccgaccactatccaataacggctctggacagcacagacatggagcgcattgccgaaaagtccaaaaaccggaagcaaagttcgtttaaaagacgcctcaacgagtttaaggacaaggagtttgagaccaacgagctgatcgagtatgaggatgaatcaggccacattaaacacgaggccgtgggcctggacagccgaaagaagatattctattccatctgtggagaggggatgggccacgccatccgaagcagcgtaatcctagaacacctcaccaagcatcatgacgtgtatatcttctcatccgaacgtgcctataagttcctatctgaaaaattcgacaatgtgtacgagatcgggggattcaatacggtctacgagaacaatgtggtgcggactaaaaagacattcttcaaggcaatgaaggccaatcctacaaacctgaaggaagggtacaacgtgctctataaggaatgcaaaaaggtgaagcctaatattatcatatccgactttgaaaactactccagcatgctcagcaagttgatgaacattcctctgatcagcctggacaatatccatatgatcacccagtgcgactatgactatccgccccaccacaaggctgacatgcttactgcaaaagcagttaccaaatcatatatactgcgtcccaaaaggcacatcattaccagtttcttcttcccacccttgaaacatcccaaaatgactgccctgtacccgccagtcctaagaaaagagataatggatttagagagtgaatctggggaccatgttctggtctaccagactgccgagtctagcataaacctgatggacgagctaaaaaagttagatgaggagttcattgtctacggcttcaacaaggatgggactgacgagaatctgacgtacagagccttcaacgaagacaagatctatgaggacatgcggacagccaaggcgatcatagtgaatggtgggttcaccatgatttcagaagccatttaccttaaaaagcccatctacagcacacccgcccacaagaactttgagcagattctcaacggcttctacgttgagaagttaggttacggtgagtcccacgaggacctggatgtgaagaagatcgagaagttcctggataatcttgatacctaccagaacaacttgaacaaggtggagaagtgggataacactgccattctcgaggaccttgacctgagcattgaaatgtacgccaagaagaattattga

SEQ ID NO: 2932 - DNA, 1059 bp, synthetic construct
  source 1..1059: mol_type = other DNA
atgaatctaaagatcaacaaatatattccctttggaatcattttaatcatccttggggggtctctgtacttcctgagtggcatcgaccaattcatccggccattcacccagcctattctaatgggctccagtaagggtaaggacatactcttcttcgtgctctttgggatcaccatcatcttgtcctccattggagacaatgagaggattcataactatcttatgaacctatcaattcccgaaaagctgaaggacaaggacttttacctgaagctctccttgatcttgttcctgatcactgccatctcaggactggctgtcgaactctacctgagagccagtctggggcttaactggaatacaatcctggtaatcatgaatccgagcctgacgagcacaagctttctccactcccacctctataaatcgatattcgggattatcctggggatcttcctgagccacattcccgctggtatccatacaggcagctccttaagtagctatgcccccagtgtgataagcctgctctttatactgattccaataacgtacatttctatggtcctatctaaccagaggcgaaaggccgcttccagaatcctcctcgcctttaccagcacccttggcataatcggactgattgacggcggcctcttcgcaacccctgccatcgggggcatctacggtatccttatactgatgtacaatgaggagattctggatggcatttcagactttatcactgaaaaagacaaacgcgacggaataaaagagaagctgaacgaggaactgcgcgcgattaagagcatcttcaacaacaaaaacatcaagaaatacttgaagattgccctgcctcatattgcgttgattctcatcatcatcctgcgtttctcggtggcattctatggtgcatgcccagattcttacgagttgattatatctaatggccacgatcttgatctcgatgagtatgacacattaaacatctcagagaatggagatcggactgtggttcacctgtccaatcagtacaacgagatggaactgtttaaatga

SEQ ID NO: 2933 - DNA, 738 bp, synthetic construct
  source 1..738: mol_type = other DNA
atggtgccactgcagttcttcctcttcaccagtgtgggagttgacccatctcttgccatgatggtcagcctcggaaccagccttgccatcattattcccacggccagttctggagcctatcagcaccagaagaagaacaagtccatcgtcagacccggcatacgattagctgtgtttggaatcattggggggttctgcggcggtctgctggcaaacatggttcctacacgcatcctgcagatgatattcgcctgtctactgatctttgtggctctcgatatgctctttggctccaggtccgacggggaaaaggccctgatcgatttcaacttgttgaatggcggtatcgtgggcttttccatcgggatcatctctggattgctcggcgtcggcgggggcgtctttctgattccatcactgtgcatactgttcggattcagcttgatcgaggctattggcacaagctcggtgttcattgcattcaccgccattggggggctcatcagttacatttacactggtttcggggtaaatcccatgccttactgcctgggctatgtgagcctgataaactttgtcgtgatcgtactgttttcagtgccgatggcgactatcggagctaaacttgtttataagctccctgagaaacggctgaaacaaatctttgcaataatcctgatttacatggcgattaaaatgcttggcttcgaccccattagcatcctgttaggtctatga

SEQ ID NO: 2934 - DNA, 915 bp, synthetic construct
  source 1..915: mol_type = other DNA
atgccatcggagaaggtgaaagagtttaatgaaagcctgaaaactaaggagggaagggacaaattcttcaagcagatcttttgtatcgctatcggtaccgtggttggggtggccacatacgccttctgcctttactttaatttggcaatattcggttggaacattggactggcattgtcccctctcactgctggctacgctgaatcaattttggcgaaaaagatcctgaatgagagcacgggggcaatcagcgcctttatcctttttattattactgtcgtctacggcttcttcatttccaactctaccttaggcttcaacatcattaccgcgggaagtgccgtggtaattatccaagcagctatgccaacagctaccaactatctcctgcttgcagtaggagtgggcatcctaacgtacgtcacagggttcctcaagaagctccattctgccctgtataagggttataagaaaatatttaagcgagagcccaaacgggcggagcggtactaccagaagcaggccagccaggtgcacgccttctatgacgaaaacctggatatcaacagtctgggagtgctgataatgaccctggagtacccgcccaaggagttaaatatcatcgagcagaagggaatatatgagaccaggcacatcttcggctccaaacagaaggaagatataaaaagcggcctcgaagactcactggaagaagaggtcattaatagagtcaagctagcccgcgataagacactggtgaagctgatcaaagaggttaaagccgacggctgcaacgggctgatgcatctccacaccacttacgaaaccctcgggacagagaagggcgaccacatcgcccaagtggttatgcgcggcacggggatcgtgattgaaaaagaggaggaggaatattga

SEQ ID NO: 2935 - DNA, 327 bp, synthetic construct
  source 1..327: mol_type = other DNA
atgctgctatcttccacaagtacgctcgaaagcaagaccatactgaaataccacgggttggtgagcggcgagtcactgatcggtgccaacatctataaggatctcttctcgggcgtcagggacgtagtggaggggcggactagcacttatgctgaggagcttgacaatgcgcgcaatgaggcaattgccaccatggaagaaaaggctaaggaatacggggcaaatggaatcatcggcctgaaaatatcctataacaacctgggcggaaccatgggaaacaccattctcgtgacggtttacggtacagccgtcacatacgaggactga

SEQ ID NO: 2936 - DNA, 189 bp, synthetic construct
  source 1..189: mol_type = other DNA
atggtggaaccccacaagcattgtccggtatgcggctcccctatcccaatgaaggagagggtctgcagccccgactgcgagaaagtgctggaaatgaatcagaagaacattcgcaaaagccggatcatgctgttcgccgtgatcgttgtctttatactcgtgtgggcatacttcatgttctttaagtga

SEQ ID NO: 2937 - DNA, 795 bp, synthetic construct
  source 1..795: mol_type = other DNA
atgaccggcctgattgacataggcctcaatctcatgcacagaagttttgacaaaaaccgggaagagatcatcaacaatgccatatccaacggcgtgtcccagttcgtcattactggaacatccgttaaatcaagcaagattgccttaaactacgcaaaggatgagaaatggaatggaatactcttcagcactgccggggtgcaccctcacgacgccaagacctgcaatgagaaaacccttgacgctttgaaggagtttgcgaaaaacgactgtgttgtagccatcggtgaatgtgggctggactacaacaggaactactctccacaggatgtgcaaagggaatggttcgaaaatcaggtgaaactggcccaagagctggacatgccactgtttctccatgaacgcgaagcccacgaggatatggtgaagatcttgtcaaaataccccgagatgtgcgagaaggcttgcgtgcactgcttcaccgggacaaaggaagaggcagaaaagtacctggaactggggtgttatattggcgtgaccggctggatctgcgatgagagacgaggacagagtctgcaggaggctgtcacagtcatcccacctgaaaagatgatgattgagactgatgctccgtttcttatcccccggaacttccctaaaaagcccaaatcgaataagaacaagccggagtatctgccccatatcctaaacacgattgcagagtataaggaatgtgacagcgcagagctcggtgaggcggtcagcaagacgacacgcgagttcttcaagatctga

SEQ ID NO: 2938 - DNA, 678 bp, synthetic construct
  source 1..678: mol_type = other DNA
atgcgcattgtggtggctattggcggaagcatcctcttaaagacttacgatgcccagcggtttcaggagtattccgacattctaaaggacctgagcaatgaacatgagatcttcatcgtagtagggggcggcaaacctgccagggagtacatcggggttgcgcgcgatctgggcgccggcgaggcaaaatgcgatgacctgggcatagaagtcacgcgggtcaacgctaagctgttgttgctggctcttggagactatgcgtaccagaaggtgccccacaacttcaatgaggctcaggaatactcggcaagcggcaagattgttgtgatgggagggaccgaaccagcacacagtacagacgccgtcagcgccatactcgccgaatttgtgcaagccgacatgctgatcaacctgacttccgtggacgggatgtataccaaggacccgaataaattcgacgatgcagagctcatttcagagattaccgctaccgacatgatggatttcatccgaaaccaggatgtgaaggccggaacatacgaatttttcgactttaccgccatccaaatgatcaaaaggtccaacctcgagacggtgatcgccaacggtttcgagccccagaaccttatcaaagcgattaatggtgagaagatagggacaagagtcatcagtgattga

SEQ ID NO: 2939 - DNA, 7728 bp, synthetic construct
  source 1..7728: mol_type = other DNA
gtgagtctcaataaacttaagatcggaagagtgtttatctgtctgtttatccttgtgttcatctcgtgcagcattaattgcgtcttcgcagtggacgatctggcgttcaacgacacatattattctgatctggactctgtgaatggggactactccggttttctgagtgaaggcgacttcaatggaggctcttctgtggtcgttgatggggaaattgactcctccccaattgccaacaacaaaaagaacagttcatttgccctgacgagcaagaaggactcatcgtcaccctctatctccacatcatcaaagaacaataaaaacaacaaaaacacgtcttctctgaaggaaaacaagaccgccgccccctctagccaacgggtgttttatgaccgcgacatcgtgtctgacgaggatgtaatcggacccggtcacgaaaacttggactggattaacctaacacacgtcgacgacagcctgttttcagacaattcaaaggaagatggagccaaaggcagcaagatcgccaccaccatcgtcgcaagcaacctagtgaaatactatctcaacgccagccagttgaatgtcggcttgaaagactccaacggcaactacctctccggaaagacaatcaatttcacagtgggcagcgcttcatacattcgcaccaccaactcctcaggcagatgctccctcaccatcaacctcatgccgggcgtctatacgttcacaatcagattcctaggagactcctcctattcccccagcagcaaaaatgtcaacgtcacagtcctaaagatgcccacgagcatcaccgcaagcaacctggtgaagtactatcacaattccagcagcctcatcgccaccctcaaggacacacatggcaaccccctatccaacatgactgtcacattcaaaatgggatcaaacaactataaccgcaccaccaacacaaacggcaaagccacccttgcactaaacatgatcccaggaaacttctccgtgaaaatcagcttcacccacccacgctacataacctccagcaaaaacgtgaccgtcacggtcctgagcatgcctaccagcatcagcgcaagcaacctcaacatgacctacggcgacggcagctaccttaacgccacactgaaggacgcccataacaaccctttatcaaacaaaacaatccactacaaactcaacaacaccatctataaccgaacgaccaataacaacgggcagacctccctcataatcaacataaaccctgggacgtaccagttcaacatctatttcaacgagaactattaccagaactccaacaaaacagccacagtgaccgtcaacggcattcccaacagcataatcgccagcaacctcgtggcatatgtcaacgagtcacctactatagtcgctaccctgaaggacgcaaacaacaaccctttatcaaataagaatctgaccttcaaccgcactggcacactgacaaacatcctgaccaatgccaacggccaggccacatacaacctaaacggctgcaccggcaacttcaacatcaaaatcacattcaatacaaccggctacgcattcagcagtaaaaccgtgaatgtgaacataaaattctggccctccacaatcactgccaatggtgccacaacatacttcacagacacggtacagctctcagcgtgcctaaaaggagaaaacaacacccctctcgcaaacaagaacgtcaaaatcacatacgccaataagaacataactcgaaccacaaacagcgcaggaaatgtctattacgacttcaacgaaaatgtaggcacttacaacgtaaactttagctttaaggagaactattaccaaaatgcgtcaaaaacagtcacagtcactgtcaacaagatgccaaccagcatcactgcaagcaatctcaacatcacctatcaggacggcagcagcttgatcgcaacactcaaggacagccacggcaacccaattgccaacaagaccgtcaatttcaagatggaaacaaacaactacaacagaactaccgatgccaacggaagggcaactctcgctctcaatatgatcccagccacatttaacgtgaatatcacattctcccacccatcatatcaaacctccagcaagtcagtgacagtaaccgtgaaccctatctccaacagcataatcgccagcaacctcgtggcgtacgtcaacgagtcacccactatcgtcgcaaccctgaaggatgcaaacaacaatcccctctcaaataagaatctgacctttaaccggaccggcacgctcaccaacatcttaaccaacgctaacggccaggccacatacaacctgaacggctgcaccggcaatttcaatgtcaagatcactttcaataccaccgggtatgccattacgtccaagaccgtgagcgtgaacataaaattctggccatccacaatcactgccaacggggccaccacatacttcactgacacagtgcagctctcagcttgcctcaagggggagaacaacaccccgctcgccaacaagaatatcaaaattacctacggcaataagaacatcacccgaaccacaaacagcgccggaaatgtctattatgacttcaacgagaacgtgggcacttacaacgtcaatttcagttttaaccagaactactaccaaaatgcctccaaaacagtcaccgtcacagtcaataagatgcccaccagcatcaccgccagcaatctgaacatgacatatcaggacggcagcagcctgatcgcaaccctcaaggacgcccacggcaaccccattgccaacaagaccgtcaatttcaaaatggagactaacagctataaccgcactaccgatgccaacggcagggccacgctgacattgaatatgatcccagccacctttaacgtaaatatcactttctcccacccatcataccagacatccagcaagtccgttacagtcacggtgaatgagatagcaaccaatctcgccgtaagcaatctcaacatgatctacatggacggcagtcacctcgccgccacgcttaccgatggcaataacaatccgctggccaataagacaatcatctacaccctgggcaatgtgaactacaattacaccactaacaacagcggtcaaaccagccttatgatccacctcaatcccggcacttaccagttcactgtccagttcagcgaaagtcactaccagtcagctatcaagacagtgaccgtcactgtgaaccctatttccaacagcatcatcgccaacaacctgctggcgtacgtcaacgagtccccccacatccttgccagcctaaaggacagcaacaacaatcctatcatcaacaagacgctggtatttaaccggtcaggcaacatcactaacatcataaccaacgccaacggccaggcaagctacaacctgaacggatgcactggcaatttcaatgtgaccatcactttcaatgccacaggctatgccttcagctccaaaacggtaaacgttaacataaagttctatccatcaatcatctcagcgaatggggccaccgactattacggcaataccattcatctgagcgcatctcttaaaggggaaaataacactcctctggctaacaggacggtgcacatctcctacgccaataagaacattacccgcacaaccgacagtgcaggcaacatctattacgattttagagagattcccggaatctacaatgtctgctttaattttaaccagaactactaccagaacgcttcaaaaacagttagcgtggttgtcctgaacccgccatcgccgaatgttaacgtgagcagcggtttctacaacgtctcttacttgctgattaatgtgtcctctaacatctctggcggaattttatattctagtttggataatggaaccacttggtacactggagaggacaatatctgcttcaacctgaccgaaggcaattggtctgtctgctcctactattctttaaacgggttcaatagttccatcgtttacaataattttattatcgacggtagtgctcctcttgtgtgggcgagcaatggatcggggttttacaaacggagcttagacgttaatctcaccagcttggatatcgtggataagaacccggtcatctattacacgctggacgggagcctccctaacaacctcagtgctatttatacgggcccaatccacattaccagtaattatggcttgacaaagctgcagttctatggtgttgatagatttggacataacagttctattgtgtgtgtgaattatttccatggcaattatgtggctaatctgaatagtggaaaatactttgacagtgtacaagacgcgattgatgatatggacacgataaatggtgatgttattgaagtgaataaggacctctcgggagcttgtgatttgaataaaagtgtctacctgcgcagctcatgtctaaacaactttacttggtcccagccgaatatagttatccatagcaacaactctgtgatcgagggctttgacttcgacggaagttctatgcattcggtgattctcgcaggtgtgtcgaattgtgttataatgaacaaccggttctccgttgtggaatatggtatttggtcttcccttagtggttacaacaatgtgatcatgaacaataactttagttcttacggtttgtcaatttccttcatctatctgtctcccatttatgggggggagaatacttatctcattaaagataatatttttaatcactcacgatgcgggatctgcctcgaatcttctttgaacagtattatttccggcaatgttttcataggttccaattacggtcttaaaatcaacgggaacaacaactccgtagtatacaataatcttagttttaattcgtatgcggtgtgttgttttggagacgataacacccttatgtataataatattgtgaataacgtgtatggaatttacggagattattcaaacttgactgtaaacttcaaccggttctacaataacagtgcgttcggcctgtacgcttctggagggccaatcaatgcttgtaacaattggtgggggcataataatctttctgtaagcgaggactacggattcgatatctgcctgcagactgacaatattgactacagttcctacatcattttaaagaattacaagtcctattttgagcttcggaataactttatagacaatgtgtcttgcgtggtggatctgaactggaacaatctcaaggagtacgtgggggagttcattgatggggtaaacgttaagtttgtggacatgaagacggggccctaccctcattggattgctattgaatctggtcaggccctgtacaaaacttcatgcgtgaatcaggtgaataatgtgatcatcagtctggatgatgagattcaaactttaaactattccagtttttcctcttcggtgaggttctatatcaacactacagggttcataagcaataatagcgggaatttggacaactttgttgcgaacgaaaatggatcgtatttcacttttgatgtgattttggatcatgacgtcgattgggtcagttacgtgtggagaaacattggtgattttaaatccgagctggacctgattgttgacggggatattgtttccacctccgttgtggagagtagcttttacaggaataatcttaataatatctcaagcaatgttttcgatgcaattctgctgtataatgattggtactacagtcgtctgaattgggctaaggccgttgtgtacgtttacctgtctttggagtacaatactacggatcttaatgatgttcagtacatctatagtaacgtgaattggggatgtctgagtcctgaaaggaagaaccagctgctcaacgatcacaatattacgtttaacgatgcactgtggaatctgatacagaactcctataacttgtcagatgaggacgtgatttttattaagaatcatcacaaatcgttcaacgactctgtgtgcgtgtcggcgcactactatggaaatgacaacgagataattaacctgaacaatataaataataacacactggcttactccggaggtatggtgattggctcgtggaaggcgccgatcatgtacgttgacgggtcctaccaacactttataggtaacaactcggacaacagtacggacatttttacgtattatcacaattacgggaatggcagtatcgactgggcttactccactaactatgggaacttaactaatggcacgtacgatggcctgatgactttcacgtttgcgaacgataaggttaacggcagtgtgctgaatcactacctgagtgagaaaaatcgtacggacgttaatggcagtctggtgtactccaacgggtttatgaaggcggcctacggcagcttccttgagggtttgctggtgatctatatggatgatttggtggccgaccttgtgtcgtcccggtataatgccagctgggaaagggtcagtcccatggtgatgagtgtgcgcgacgaccatggcaggctagtcatgagcggggagtccgatttctattttggccggaagctgctgtgtgatgatgagaacataatcaagagcttttacttcgcttgctcctccgtgttctcgtccattgaacattacgtgcaccaaactctgttcccagaccgtatagggtatggggtgaccgtcgacttgggcagacttctggctgatggggagtgtctgtctatcgtggatgaaggtcgcttcatctacatctgccccaacgagagcgatgagatttactatttgtgctttgacaagctgacgggaatcctgatggacgcctccatcctcggcaacgacgcttattgctacagtaatcagcagaccgaatgggcttttaccctcggggaggagctgattgataattgtgacttgatttgggactatctgaacggactggatgtggacatttgtgctctcaatgtgtccacccaggacatgctgaaggtgtgttacgggttcaatattctatcggacctgttcacctgcgctctgctgtccgaagtgaatattcttatagaatccattggtctggaggaatctttcaatgccattgtgcccctggtgggagtactggtttcttctttggagaatatcggatcgtacgtgctggatgagtacctgtcgaaccccaagtttctgagcggtgtggtagggggcctgctgtttgaggctggaatgatcgctacatgtactggggtgggggcccctgtgggcctggctttaatgggggctggaaccatatgcacagcatacagctcagggctgatagattataatgacaatgatgggatttacttcaacaccacgctggaaaatcaggccaacttcggattttccatgtcctgtaatcttattagtggaggtattgggggtttagcatcttcttctgctttcaaagctaccgggtctgaagttatccagatcgcaagtaagaacgctgtcatcgactcaaaaggattttatactaccactatttctactaaatacgttgcttatgagggttcaagcaacactgtgagtagatacgtgatcaatcgaatggtaaactctcaaaatcctagcaaaaagatcttcattctcaagggatgtaggaacatcttagattctctgatgcaggactgcatatgggaggagcggaacaaccttctgataaagtga

SEQ ID NO: 2940 - DNA, 567 bp, synthetic construct
  source 1..567: mol_type = other DNA
atgggagtactggctagtgtggctggaggcattttttttgaagccggcatgattgccacctgcacaggcgttggcttgcccgtgggtttggctctcatgggtgtcggtacaatctgcactgcttatggcagcgggctgtttggcatgacagacacgggcaacttctactctaatctaacggatgagaacctggccgatttcggcttctcaatgagcctgaatctcattgggggagggtattccgcagccgccgcgaagtctacattacggactgtgggagggaagtcggtccagatctccatctccaaggcggcattcgccagtgaccagagaggggcatacaccactttccacaccatcagctccaaaacctatatccagaaggtggagaacggggcattcagtaactgcggcgagtacctcatcgagcaagaatttggaaccaccgtgattgaaaacatacgcaaatcactgagggtgcttagcatcgactatgccctgaatttctgttacgactttcttaaagagaactacataaagagcctggatggaggtctctacgtctga

SEQ ID NO: 2941 - DNA, 168 bp, synthetic construct
  source 1..168: mol_type = other DNA
atgaatgccgcttacggtagcttcctagaaggcctgctcgtcatctacatggacgatctggtggccgacgcggcaggggagcggtataacgtcaactggacccgcgtgagcccaatggtgatgtccgtacacgacaacattaaaggacatatcctgcccggcaagtga

SEQ ID NO: 2942 - DNA, 1359 bp, synthetic construct
  source 1..1359: mol_type = other DNA
atgaccaaactgataaaacgagaagttaaaagggagtataacgaggaaagtcctctcaagctgaagatagctaatgccatctccacttttacgaaccctcctatcatttgtattccactgtttctgctcatcagttttgtgctcgcctcgaacgggaatccgttttcaagtagtttcagctttgactggatgctctttgccaaatgcgagatcatttccctggtgtttgcctccgtcctgcctatggccatcatcatctactgggcaaagaagctgaacacggataaggacatcagcaaccgggaggatcgcttcattcccttgatcgtaggggtgctgtcctacctgattggctttgtcatcagctttttcttcgaattgccaaacttcctgacaatcctgctcctgtgttacgccgtgaacacgttcattgtcatgctcattacaagcctctggaaaataagcatccataccaccggactgagcggacccgtcgctgccctaatcatgcttcttggtcccattggtgccttattcgggttactgtaccctgtcctcatctggtctagggtcacccttaaaaagcacacaatggctcaggccatcgcgggcggcattttcgggttcgtattcactgttggtgagagctatctttatatgcgcctgtttaaaatgtccgtgccaggcttggtgccgctcgcggaatgcttctggatcatcttcgccctggtggcctgccccattgtgctgggcatttgcgggttgctggagaagagaggcatcgagtcagttattcgggccaagctattccacctattggctttcatcgggtttgcagcattctacttctacggcccctcgagcgcggtcttgattctgatcctgtccgctatagtgtccgttctggtcacaatatttgccggcgacaccttctcatggtacaagggaatcagcagaggacttgaacgggagaacttatcaatagtgctcagcctggcttgcggtctgatctggatttacgtggcaatgaattacttcaatatagaaagtgccataatcgctaccataattgtggcctttgtaggagcgattgcagagcccgtggcaatcaaatatgcgcgttataagttccccatgaagtccctgctgggcaatgacggaaacaagagcatcgagagctctgtggtggccctcatcgtgaccatgatcattcttctcttgttcactcagaacgtgtttgtttctattgctgtggggttactagtctgtctgatcgagacattcgtaccaaaggaactcgagaatctggttattccagtggcttgtgcaatcatcctcggctttctgcttcactattga

SEQ ID NO: 2943 - DNA, 3789 bp, synthetic construct
  source 1..3789: mol_type = other DNA
atgttgaataagaaaatcatcatcattttaacctttattctgatattgtctatttcttcagctagtgcatctgcagatagtacagatgaaacaatcctgtccgatgattcggcagggctgatcaacctggacaattctaacaataatctttacctggatgacaatcagtttaatttagccaattctaatagtgacaattccaataactttaatctagacgactctaactcagacaattctaacttttacctagatgaagatctggacaataaaatcaatgaaaatatcaaaaacacgaaaacgatcttgaaggagaataacagttcaattgcttccttcagtaaccttagccacattctatccaaggcctcagcgggggatacaatcatcctggagaatgattataagtacgactctgcctacgacagtcaataccagggggggattgaagtcaactccatcaccatcgacggaaacaaccactatatcgacggcaatggcgaggccagaatattctacttggcgtcagacaatattgtcctgaagaacatcaagtttatcaacggtttcaatagtcaagggggagccatctacgcaaaaggaacaaatgtcaatatcactgactgcatctttgaaaacaaccttgccccagataatgggggtgccatctatgtggaagggaatgctagtatcaaatccgttaaattcataaataactctgcaggctacggaggcgctgcatatataaacgactcctccattcttgaggacctgatcttcacaggcaatgtggccaacattgaggggggagctgtttacattgggggcagtagcaatataactaactgtatttttgatggcaaccttgcagacaagggtgccgcaatctttattccagctaaagagagccctatgactccaagtgaggacgttccctttgacgagtcagatctcaactcgacagatatggatcttgactctaccgatatggatgataactctaccgattacaatttcaccgatatggatgataactcgaccgattacaacttcaccgacatggatgacaattccaccgacatggacgattaccccgatgagagcgacgaagacttcccagatggaggcgattatgtttttcccgattggtgggaaggtgatgaatttgagtacgatggaattgaatgcatcaacgtgttcataaccaattccactttcatcaattcaaatgatttctatcgcggagccatcttcagcgagcacgacaataacatatccattgacggatgtctttttgagaacatgagctcccagtatgctccggccatctactgtaacgtcatggtaaacatactcatcaacaatacgggcttcaagaacctccatgcaaacggcaccggtggggccatggcctttctggataatgtgtatgcaatcgtcgataactgcagcttcaaaaacatctcctcctcgaaaaacggcggcgccattttttatgattccaacagttgggggcactcctctccggtgtcactcattgtcctgaactcaagcttcctgaactgctccagcgactatgggggggccatagtggtgctgggcggcggcttcaaatctaaagacagcagcttcatcaacaattctgcacggtacggggccggggcggtgcacgtctatacagattatgacattcttgtttacgacacggtgttttacaacaaccgcttgaatgaggacaatacttcatttggcggcgccctctttattgactctgccgagaaggcgatcataaataacacccgatttgtcaacaactcaaatgacgctatctacgcctatgaatcgcgaataaaaatcaacaacagctatttcgaaaacaacgatgaatacctgcgcagcatctataccgaaggactgatactgggtgacaacaagtacaatgatgacacactggtggatctggactatgaccctacatatatcattatcgggaccggagaaggcctgaagctggatctaatcaataacacaatagacgtgacgacaattcctagcagctttctggccgctgactggggctggatgagccccttcaagaatcaggacttctccggaggctgctggtgcttctccacctgcgccgcgattgagtcggcattgctcaagagtacccagaagacctatagcctgagcatgcagaacatgcagaagctctccacagagtattccaaatacggcaacaaccatattgtagaggctggatcgaccattgtggccctgcattacgccctgtcctggatgggggtattccccgaggagtatgacacctttgacatgattgggaaactcagcaggcagatcagcaccaacgagaccattcacattcaggatgcagcattcacctaccctagaagcatctcctatgatattgaccaaatcaagcagactatcatgaagtatggcacggtgaccagtgacttctacgcggtgaatgaggcgccaaacttcaatgagaacacgtcagcattctactgcaacgagacggacggccgggacgccacccacgctgtagctgtggtgggatgggacgacaactatccggcaagcaacttcctggtcacccctcccggcgacggtgcctggattattaaaaacagctacggtgaggagaactacgaccacggttacgtctacgtgtcctactacgacacagtgttcaatattgatggcggggtggcctatctctttgaaaatacggaaaactacactaaaaactaccagaccgacattggaggggacatattcctcgtgaacgacagcgatagctactcctacaagaacagctaccagtcaataggagacgattacattagtgccgtgggaacctgtttcaacgatgctgacgaggactatactgtagagatctacgtgaacaacgtcttaaaaactagccagagcggtaaatcgccatttcgggggttccatacaattaagctggaaaaccaaatccaagttaagattggagacaatttcactgttgtaatgaaaacccactcagtgcccatcgttaacacaagccgtatgcatttcaaggccaatgtgtcattcatcgacaacggcaccgggtggaaagacgcgagcgatgacaatgcgaccgtgctcctgaaggtctataccatggagacgctaagggagaatctcacagaccgcatccccacacggatcgactgtaagaacatgacaacaacagccgtggccgctgaggacggcagaatcggcaagtactttgtagtcttcctgaaggacgaaaacggtaccgccctttctaacaagcccatcaagataggtttcaatggcagggtctacgacaggaccacagatgagaacggaagcgccaagctccagatcaacctggcgtataagggcacctacacattcgctatcggtttcctcggagacaacgattatctcggcgcctttgaagtggctaagatcacggttaaagtccagactcctaaattagccacttcaaataagtcctataaggcaagtgctaagactaaaagcttgacggccacctttaagactgctaatggaaaagtggtggctaacaagaagatcagtttcactgtgaatggcaaaacttacagtgccaagaccaactccaaaggaatcgccactgtgaaggtctccctgaacaagaaggggacttacagttttacggtgaagtttgctggcgataatacatttgctgcggttagcaagaagggtaaattgactctgagctga

SEQ ID NO: 2944 - DNA, 1245 bp, synthetic construct
  source 1..1245: mol_type = other DNA
atgagtgaggtctcctcaaaggaactctatgagtttaagaagacattaaaagagctcgccgagaagaaaggcaaaggaacggaactcgtgtccatgtatgtgcccccagaaaagcaactgagtgatatcattaagcagatgagggacgaactgggccagagcgccaacatcaaaagcaagtccacccggaaaaacgttcagtcggcgattgaggtaatcatgcagagaatccgtatgattacaaatgaaaacaaggatctccccaatggttttgtgctctttgtgggcatgattcctaaaggcggccccggcacggaaaagatggagacagtagtgatcgagccgccggagcccgtgcagacctattggtacatctgcgacagcacattcttcctagagcctttggaagacatgatcgcctcaaaggaagtctatggcattgcagttatcgaccggaacgaggcaaccatagccaccctgaaaggtaaacgcataaagattaccgcccacctgaccagtggagtgccagggaagcacaaggcagggggacaaagccagcgcaggttcgacagggtcatcgagcaattggcccatgagttcctgaagcgaatcggccagcatatggatgacgacttcctgccaatcaaggatgagttgaagggaatcgttctgggagggcccggatacacgaaagaggatttctacaatggagactacatgcactacgagctgaaggacaaagtcatcacaactgtagacacttcctacactggagagtttgggattagggagaccattgacaaggcttcaggggcattggaagagttaggggttataaaagagaagaagctggtccagcggttctttaaggagcttcgagatgacaacggcctgtattcctacggcgaaaaggaagtgagaacaaacctccaaataggtgctgtggatattcttctgctctctgaagacctgaaaagcaaacggcttaccctggattgtcaggcttgcggcttccacgctgaggtgacccagaaggaaggtcagaaagtcgaggatctaacctgccctcagtgtaatgataagatgaaaatcacaaaagaggaggatctcattgaggaccttagcaatatcgccgaagacctgggcactgaagtggaaatcattagcacggagaccgacgaagggatgcagctgtacagagcctttgggggtatagcggcgatcactcgctacaaggtgaactga

SEQ ID NO: 2945 - DNA, 654 bp, synthetic construct
  source 1..654: mol_type = other DNA
atgagtgataaggaggtttatggcatagtattgtctcaaaagcttacaaaggacaacgtcaacatgggggtggtcatggggaccgagaagttcacgctgaaaaggatagagctcaatgaagatgtgcggctgaagccccaggataagatcctgattacaaaagacagcgaggagctcaaaaagaccgatcagaaactgagctacgatgacctgtccaacgaggagcagatcgaagctgaaaaggcaattcatagtatcgtgattgccaatgagaacaagtacgtgggatttttcaacaagcaatccaaggacggaacccagcttcacttactggaaggcatcagccgaaagaactcaatgaaaatcatagaggagaaggaactgaacggcgactttgaaagcttcgaggacattgacaatcgcatctccttcattgacgactcggaagacctaatcgcgaaacgcgtcctgtatgaactaagcgaactcaataaggtgaaaaaagggcggccaacttacctgtttgcctccgtgaaaaggtcatctaaaaaggaagttctggagttggatgagtttgaggatgatgacagtttcttcatcgaaaagctcaagagagagggcctcgtggagcaggagggtaaacgtatcagatga

SEQ ID NO: 2946 - DNA, 426 bp, synthetic construct
  source 1..426: mol_type = other DNA
atgacggatctgaacacttgctctaatgagaagctctccttcaaatataacgacaaatgggaattggaagccatcccactggaaaacaatcctgactgtattgctacactgagctacgaggacggcagcctactgaatgtaattgcgttccccagtgagcttgagtcgttagacatctttaaggaagttgtggaagcaagtctgcgcgatgatggggccgagatcgtctcctctgagatagcaaacgtgaacaagcggccgtcaattcagattcattccaaggtgaccacccccgaaatcagctttcagatgttctcagtcatcttcctggaggagggattcctttacatcttcgagctcagggccgtgagcgagatagtccacgaatttatggagatcgtgaaaagctttgagatcctcgaatga

SEQ ID NO: 2947 - DNA, 804 bp, synthetic construct
  source 1..804: mol_type = other DNA
atgatcatcaaggccgggaaaatcaacaaagcccgtggcaacatagtgctcacgattgggaaagaggatgtcaacaagcacaatctggaagacggcgacttcattatcctgaccagtgatgagtacgaggacctcaaggcctcctctgagattgaggtgtctacaatggaagtgattcccgatgacgaggcagtcatcaaattggaatacgacctcaaggaagctaaaagcaaggaaaagatcctgttctccaaggtggaggagctggagaagctcaatctggagttgactaccgaattatccaagattgagaaggagaattacataaataaaacagtactcaccgactcagaatcgggttctctccttgaagagatcaaaaacgtcaacgataaaaacgaggagctgaatagtgaaataaagaaactgaacaaggacctcaaggaatcagacgaggagagaatcgaactgctacaagacatgaacgtcttaaaaaccaagatgagctttgacgccggggagattagccggctgagggagagggagtcgaaataccgcgaggttttggagatcatcctaaagagtaataagaacatccttgacgaagcggtgaataagactgtgacagctaccatccatgagataaacaaggagctgtcacagacgggactgatccgcagaatccggggccttactattgttcgagagcctgaaatcagcaaggagtccatttccagcaacgcatataaacagctggaaggagtgattccggatgaatatttcctggatagcccagatgaatga

SEQ ID NO: 2948 - DNA, 504 bp, synthetic construct
  source 1..504: mol_type = other DNA
atggggtactttcggggtgagataatggaagagatcaccttcaatgaggaggggatcaaattcaagtatctgagcaattggagggaacaggccaaagagtccgtcggccccaattgcatcaaggcattggttaaggtggtggagggcaagccctccacaatcacagtgtacaaaaacgatgccggagacgccaaggctgtggcccaactggaggagccgttcaatgaatcattcaagagtcagggctggaacattgtgaaatctgctattctcaacctcaacggcaatcctgtcttcaacattgtgtccgacgcgcaggagggggataccattctggaaaacaacactagcgccatcataaacaatggaaagatgtacgtatttgagctgatgcactttaaagacttcccatacgcatataacgattatctaagtatcatggactcgcttgaatttgtcaacgaagaggagatcgaggagacggaagaggaaagcgaagaatga

SEQ ID NO: 2949 - DNA, 423 bp, synthetic construct
  source 1..423: mol_type = other DNA
atgtcaaatctcttccagaacgaccagctgagttttaaatacccaaagaattggaagctagtgagcgatgatgagatcgaaggctgcctcgccatcttggactccgatagcaagcacagccgggtgatgatatttaaataccccgaggagggcctgtcactggaataccttaaaaacgctattgaggacattccccgagaggagagcctcaaagtcatctcgtccaacctgacaatcttggcgaacaaggaaacccacgagttaattgcagaagataccagtcatgagccacctctgagaacgcattccctgacaaccatccacaatcgcgacgcctatgggttcaacttcatgggatttggtctcgacaacccggacgaagaggggttccttttcatgtataggactctgaagtttgaatga

SEQ ID NO: 2950 - DNA, 612 bp, synthetic construct
  source 1..612: mol_type = other DNA
atgactctgaaagaagagaaagacaaggtgcggaagtcaatctacgacaatctattcaacaatggattctccaaccgaccaaatggtgactacggcaaaatccccgactttaagggctcagatattgccgctgagcttttatcgaaaaccgaagagtggaaatccagcattaccatattctccagtcccgatgccgcccagacgcccgtcagatatctggccctgaaggacaataagaacctgattatggcaagccctaacctcacacacggctacctcttcctggaagggcagaacatcaaggaaatcgaagaggcgtctacgaaggagggggcctttaagcactgcagtaaaaaggacatcagcaacataaatgtggaccttgtggtagagggctctgttggagtggaccggatgggacataggatcggcaagggtaaagggtttgctgatatggaaatagaggatctgaagaagcgcaacatcatcaataacaccactcctattgcaacaaccattcacccattgcaactcgtgaaccacattccgactgagagccatgatcagagaatcaacatgatcgtcacaacccgcgagatcattagggtctga

SEQ ID NO: 2951 - DNA, 546 bp, synthetic construct
  source 1..546: mol_type = other DNA
atggccgatctgaagggtacaaagaccgaggcaaacctagccgcagcctttgctggggagagccaggctcatacaaagtatcagtatttcgcaagcaaagctaagaaagaaggatacgtccagattcacgacatatttatggagacgtccaagaatgaaaaggagcacgctaaaatctggttcaagctcttgcacgacggagaggtgccagacactatagcgaacctgaacgccgccgcagatggcgagaacgaggagtggactgcaatgtacaaggagtttgcggaaacagccaccgaggaggggttccccgagatcgccggcctgttcaccatggtaggcaatattgaaaaagaacacgaggagcggtacagggcccttctcgcgaatgtcgaaggcgaagctgtgttcaagaaagaggcagaaatcgaatggaaatgcatcaactgcgggcacatcgtgaaggcccctgaagcccccttcatttgcccagtttgtaagcatccgcaagcctacttcgaagagcgcgctaccaactttaaatga

SEQ ID NO: 2952 - DNA, 159 bp, synthetic construct
  source 1..159: mol_type = other DNA
gtgagtaagaaggaagataattgtcagatagacgactgctcaagcgggacatgcgccccagtctccccctttagcaaagagggcattctttttctgattttcatcatcgtgctcttcatcgtactgttcttcctactctggaccaacggactgatctga

SEQ ID NO: 2953 - DNA, 429 bp, synthetic construct
  source 1..429: mol_type = other DNA
atgagcgacatgtggggcctcaccgtccggggaatttgtgaatacaatgacaagatcttgctgctaaagcttcgctccatctcggcccacgacccatgcaaatgggagattcctggcggcaaggtgaaaaagtgcgagtacttcgacagcgccttaaaaagggaatataaggaggaaaccgggatggacataagcatcgacagtctgtaccacgtgattcagaagaactatactgcctgcaagacgggagagaaaatcaagtccatacagctgatcatgaaagtgtcaacaaacagtgatgaggtcctcattagcgatgagcatgatatgtacgggtggtttacaaaggaagaaatcaacgatatgatcaaaaataacgagctgactcccccggcaaaggcggctttctgtaaaaccctgctcgtatga

SEQ ID NO: 2954 - DNA, 507 bp, synthetic construct
  source 1..507: mol_type = other DNA
atgagcatgctttccaactaccgcctaaaggaactgctgaaaaaggagtcggaaatgactgacgaggagtatgagctatttctcaacgaatttcggaagagtgagctcttcataccaatccaagtggacctcgattccctggacctgaaggacgtacagctgaatgagatcaaccacatcaatcaggagatcaacttccgactgaaaagctacgagagtaaggacaaaaaacggaccatcccgcttttcaccgacgagcatgagattgaaagactgaagatgaacacaacggtcggctcattgttcatgagggacctgtgcgagtcaattatgcccatccgcgacagctttgaccagataatcattaaccctaaaagcgaaaagtcctttaagatctctgtggatgagttcttggatttattcgatgaggatagggaatttgaagacctgatgaaggagattgaaaatgatgaagagttcattgagatgatgaaaaaggaactctga

SEQ ID NO: 2955 - DNA, 405 bp, synthetic construct
  source 1..405: mol_type = other DNA
atgaccctctcggacaataagaagcttaagaaattgctgaagtccaaatctagagtgaaaatcgaaaacaatccgaacctcttttacaaggagttcttaaagtcaacgctctttgtgcccgtgattgccattaacgaagacgagaacctgaacgatggcgacacactggacctgcagatcggattcttcgatgaggaaaatggcgaccggaacatctatatctttaccgatagcaatgagatggagagggcagattataagataacaagtatcgcggtaaacatgaaagagctaagtgtcatcctgtcccagtttgacatggacttcgattacattgtcattaatccatatgggcctgacagctacaagatagattacgacgagttcaaaagccgcactgaatga

SEQ ID NO: 2956 - DNA, 480 bp, synthetic construct
  source 1..480: mol_type = other DNA
atggattttaaacgggaaaaatacatcgaagtgttaatctacatcatcgccaagaccgccaacaagaagaatgtgggcaagacagtcctcgcgaacatgctgtacttcatcgactttgactactatgaactgtatggtgagagcttgaccggagagacttatttcaagacaatcaacggcctaaagccgaaacacttcgatgacactctgatagacctgattcagcgagacataatctatctgaaacgcgaggctgattacgacaacaagctgaagaaatactacattgctaggattcccgacaacaagctgtcaaaaaaggagtactttgtgataaccgatgcactcgatagattctccaaccttagcgccagcaagttcaattacattctctccaaggacattccatttaagagtgcaaaaatggatgggcagatcaattatgagtgcgtattccatcggcttgaaaaaacgaattga

SEQ ID NO: 2957 - DNA, 723 bp, synthetic construct
  source 1..723: mol_type = other DNA
atgatatgtccatcctgtggaagtgaaaacaaggaaggttctaaattctgcaaaaactgcggcgaaaggttgacggatagttctcgccctaccagcaccaacgcgtccgcttcatctcaatcaaagagcaataagaatcttctgattatctgcgccactatcattatctgtgtggccgtggtggccggggctatcctctttatgtcgggccagtccacggattatgaggtggcaagcggggaggcgactaacgaccacagctcctctgccctcaacagttacgactcctccaactcaaatgatgaaagtcaggacgactccgcctcagcaagtgaagattcgagcgactcggccgatgagtataacaagaatcacaagtggggaaagtccttccaggaggcaagcgagtatttccccgaggcttctgagacagtcgttacacacgtgttctatgaagccgacattgacggaaatggctttctgaccgacaacgagtttaaagactttaagagcctagtcagcttcactcgaaagtacgcagctgatgtaacaaacaatgactacgtggacacccccgacctgtgggagggcgatggaagcgttcggacacgctactgcgccgatcatgggagaatcgccgtgggcagtgatgacaggtgcccgtactgtgctaaaaaagggcaggactcccgtacccggagcggttcaaccagatacgtctga

SEQ ID NO: 2958 - DNA, 849 bp, synthetic construct
  source 1..849: mol_type = other DNA
atgaacgaaatcattgataattacaatgtgaatgaaaagatcgagatcgacaactttgaactggaggacataattagcttgggcgtgaacaatctgaccattgcggacgaagaggagttcttcaaactcctgaaagaggcccaactgttcattctggtgcaattgaacaaggaagaagtctttgacgtagacaatcagaaggtcgtggaggtcattaagccgatccctccactgggcttcaacttcatgacactaactgtcaatgaaaacgagcggtcaattgttgcattcacacgaaaggagatcatcaaggaaatcgggctgaaggctgaccacattgtaatgaacatgagagaccttgccaagattctcatgggcctcggagataccttctcctccatcataatcaatccccagaccgagcattcaataatgatcagcatcaacacattcttaagcctctttatggagaaacccaaaaatccatttatcgggagtcttgagcagactctcgacaaattgaaaaacgattatgtggaactggacaaccactacatgtttttcatccgcagcgactacgagtttatggagaacgaaagtaaagatggcgtctttgtggcaaagatgcctctaagggcctcgaccgatcctaacttccaggccaaccttccaatactgcacaagctgatgatgatggaaggtcagaaggtgctctacacggggaatccgaacgaggagcagaccgatttcgatgtgctgatcgctcccggaactgagtttgaaaagtactatgatgaggacggagacacgtccgtttggcggtgcgtgaaacagcccttctatgagtga

SEQ ID NO: 2959 - DNA, 429 bp, synthetic construct
  source 1..429: mol_type = other DNA
atgcaagacgaaccaaacaaaaaaataaacagagccaaggatgacgagaacttactgttcgcccggggagaagtcattcgactgatgaaagaccacctggacaaggacaagatgatcacagaaagggtcaaggttgaaatgaaccggttcctgagtaatgtgctcgtagctgtgtgtgaggaactcaacaaatacccctacaccaccattgattacgagatgctaaaggagagcacgtatccgtatacacgcattaagcagatcaatcaggaaagggagagaatcctggtgcacctgaatgcgatcaaggccgattgcgatgcattgggcatggatatcgagaagactcttaagctcaacgagtccgacggggaggactcagactttgtgcctcataccagccgcgtgaaagaggacgatggcgagtga

SEQ ID NO: 2960 - DNA, 1446 bp, synthetic construct
  source 1..1446: mol_type = other DNA
atggacaatgaatttaagatcaactatctgcttaacatactgaaaaccacgccaaaggtcgtttccgacaggatcataaaagatcagacaagattgaattttagaaaggattattatgacctgaaggaaagcattgataattttctggagcacgacactgatgatcgcttctacatcttgcccggcctccgaggagtgggaaagactaccatagtcttccagctttacgactacctgaccaacgagaggaacattaactcaaatcacattttatacctggatctagaccggttgaaggaccagggaccattcaatctcctggagtatcttgacattttcataaaggacatcaatgaggaagcctatctcaacaactggccactgtttattttcatcgatgagagtcaatattccagcaactgggatcatgtcgggaagatcatctttgacgactataagaacgtatttatcatcttcaccggttctgacgcactgaaccttcagagctcgatggactctgcccgacgcagcctgaagaaggaaatctatcccctaaactttgcggaatacctgtacctgaaatacggctgtgaaattcctagaggcatcagtgattccatcttcaatgccatcctcttcaatgattttgagaatcttatcaaagacgagcgctacattcaactgaatgtgtacaacaagttcaaacgggatattaacaagatttgggacgaatacatccagtatggaggattccccttaagctttgctcgaaagaaccacgcttcaatcatccaactcggtctggacatgaaaaatcgcatagtagagaaggacctcgacatcgtgctgagtgtgaactcacagacgcggctaaacacctactcgctcatcaatatcctcgctctgcagaagcctgggaccctgtcctacaacaaattggcaaagaacttggagatctccaaaaagaccgtgggcaacctgttgaacgccctggaatgcacacagatgatcttccacatagagccgcacggtgccattacaaaaagaaaccgtaggccctggaaatactacttcctgagcagccagatgaaagcggccatctaccaaaattccggccaggcaactaaaacaaaaggggaatatatgggcattctcacggagaatctggttggatcactgttattcatgatgaaaaacaaacggaagcaggattttgggattttctatgaggaggaaaaggagagggctgattttctcatcaataccattgatggtcggataatcccgattgaggccggctacggcaagaagggcaagaggcaggtgataaacagtatggaggaccatgggagcgagtacgggattgtggtgtccaacaagactcagagcattaaaatcgaagagaatgtcatcttcctccctcttaagacattctctatgctgtga

SEQ ID NO: 2961 - DNA, 693 bp, synthetic construct
  source 1..693: mol_type = other DNA
atgactgaaatagattggtttaaatttgaggatcgcgactacgattttcccttctacaaaaagaacccccacattagtaaaatgggctggctcgtgctgttctttgtgtttatcattggaagcatcctgagtatgagcgataagctttcctattcaattctgtgttgcatcgtctttatcgtgccagtattatatttcctcgactgggactataaggccatatttagaaagccgtcgctcaaggacattgccctggccgtggcactgtttatcggatatctgatctacgctatcattatgggggcgatcctcgaaagcgttggtatagtgagcagcggcatcattgaccctggaagcatagactggacagtactaattaagagcgtctttagcctgatgggggaggagtttatcaagttccttccattcatcttcttcctcagggtgctgtacaagtacacggataaccggaaactgagtgtggtgatttccgtcgcgttggtgatggccatgtttgcatccttgcatgcttacaattgggtcatgttcatctacgcactgttcatacagggcttcggctcaattttcgagttcttcgcctacatcaagaccaaaaacatcattgtttcctacatcacccactattgcacagacgccttcatcttcgctatgctactgcttgggttgggttga

SEQ ID NO: 2962 - DNA, 1593 bp, synthetic construct
  source 1..1593: mol_type = other DNA
atggataaagaaacaaaagaacggctgggagaaatccgggctgcgatgaagaaatacggctttgataagattttaggcgaaagcgctaagaacaggatacgcggcaaagatgaggaagaagagagcctgctgttggatagtgaagtgccagtcaagttcagattgatgctgcaggaactggggacaaccttcatcaagctaggccagctcctaagcaccaggcctgacatggtaggggaagatatcgcaaacgagctcgccaacctgcaggacgacaaccctgccattagctatgagcaggtgaaggcaatagttgaaagggagctggagggagacatcgacgagctctttgccgaattttcacatgagcatctggcgaccgcatctatcggtcaggtgcacgaagctaccttaaatactggggagcacgtggccgtcaagatccagaaagagggcatcactgacaagattgatctggatataaggataatgaaatacattgccaaccgggccgatcggctgtccggcgagcttaagaaggtgaatctccctggagtgatggaagagttcgaccgcagcatccacaaggagatcgactactacaatgagtttatgaacatgcaaaggatcgagatgaactttgtggacaatcccaatgtccacattccagcgacctatcccaaatactgtacgacaaaggtccttacgatggagtttattgccggggctaaactgaatgacgtttatgcaagcgaaggggacgagtttgacaagaaactgcttgccaaaacggtgattgactcctatctccaacagttgctcattgacggattcttccatggagacccacaccccggtaacatcatgatcctggaagataatgtgttgtgctacttggatcttggtatgatggggacctttgatgaggacttcaaacgcaatctcgccgaggctatcctgctcatcatggatcaggacatcgacggcgtgatcaaccaattgatgtacatggacatcctggactatgacattgacaccaagccgctcaagcgagacctaaacgatctgttcgggagatacttcggagtggatcttaaccgattcgacggcatccttggcgacctgctgaaactcatgcaggaatatggagtggtcctgcccaatgagctggtgacaatggctcgtggggtctccatggttgaggcaatcgcacacaacctggaccccgagattgatatattcgaatccctcaagcccatcgccaagcgaatcgcccgcgagcgcctagatcctaagagatacctcaagtcgaagaaatcgaacataattctgtatgagcatatgttccgtgccttgccacagctgctgactagaacagtccacaagattgagaacgaggagctccagttccggttcgaagtggatatcactgataaggtttctattgtagcgttagtgtccgctcttatcgtgggttcatctgttgtgagtttcggtccaagagcctttgatatgccggtaatttcaattatcggctacataattgccatcatcctgagtatcgtcggcatacggaagtttgtcctgaaatga

SEQ ID NO: 2963 - DNA, 498 bp, synthetic construct
  source 1..498: mol_type = other DNA
atggacattaggaaagtgattggaataatcctgatcattttggggctgatctttgcgatctacccagtgtacagcgcccaagcagtctcgtggattgccggagtagctctcatcgcctttggtattggcctgatcctcgacggattctccatctggagcatgatggctggcgttagcgcggctaagatcttgctgggcatcattgcggccataatcgggttcatgttcctatacaaggtggacgccctgtccttcattattgcctatcagttctatatcattggctttatcctgatctttgtcggtctgcttgggatttttatcgcaatagatggaataagtcgggccacagccatactgacgttaatcctggggataatttgcattatctgtgctttcttctcacttagccagcccctctacaccgcagtgatcgtgggcatctgcatgatcatggaggggatcaccttcctcgcaagtggcatcattgatgaatga

SEQ ID NO: 2964 - DNA, 795 bp, synthetic construct
  source 1..795: mol_type = other DNA
atgggacttgcgaaggaggctagggacctggaacgggaaaacaaatatgacgacgctttcgagcttgcggaagaggctaggaaattagaaaaaaatggaaaatatgatgaggccattgaactgatcctgaactatctggaccaaaaccctcaatacaagacgattgactactaccacttcgcaaatcccatagaggagatcctatttaacgtgtacattgaggacatcgattcagtgaagacactgaatctggaagagtgtctggagctgatttatttcaccctggccagagcatatggcaaaaagggggacaaggagaaggaagagaaatacctcaagattgccaacaagatcaatccggtctcggccatcatcctgctccgcctctgcaagtactgccagtccatcaatgagaacgagaagatcaaggagttggcccccgacatcatgaaatactcctacaacagcaagatactgatagagagttacctcacactcgccttttcctacttggatgataagcaggagaaagaactctataaccatctcatgcagttttaccttactgtagaaaccgggaccgacttctgggatagcataaaggaagatatcaaataccttgaggagcacgagattcaggtgggcttcaatccagaaatgttcagcatcctaaaatatttgattgccctgcacacaaaacagggccgggaagacactgcaaagtatttcaaggacatcttgtatttaatggaggagtttaccaagtctctgaacgaactgcgatacgatagttga

SEQ ID NO: 2965 - DNA, 1014 bp, synthetic construct
  source 1..1014: mol_type = other DNA
atggattgcatcaaaaacggaataatgggccagattgtaggtgatgcgctgggtctgcctgtgcaattccagccacgggaagagcgggacatagaccccgtgactgatatgatcggggatggcgcgttcgagctcccagctggcagctggtcagacgacagcagcctgatcctggcaacaatggatggcctcattaagagtctgaatggagacaatgtggacagtacaagcctcaacgatataatcgactgggaaattatcatgagaaactttagtgactggcttaatctaggggagtacaccccatacggattttccttcgatatagggggagccacaagggatggcatctacaactatgacgacggttgggagcccctggaatgtggtggcatcggcgagcgcgacaacggaaacggctccttaatgaggatcttgcctattgccttctttatttattacttatccaaaaaatatagtttcatcgaagaggacaagatgacggccgttcataatttgtcgtcactcacccacagacacaagcgcagccagatgtgctgcgggatctacgtgaacatcgctctggaatttattgataatttcgagaatgggaagtgtctagaccttgaggaactgatatcctctggcattaacaaatccaaggagtattacttcaacgacgactcattcgaggaagagttgcaccattttgatcgagtcttctcgctgaacatccagaatctcccgcgtgatgaaattaagagcggtgggtactgcatttcttcccttgaggcaagcatctggtgtctgttgaacaatgagaactacaaggacaccctcctgactgccgtgaacctgggatacgacaccgataccacggcctgcgtcgtcgggggcctggcagggattttctatggctatgaagatatccccgctgactggatcactcagctcgccaaactggactacatcgagaatatgattggaaagttttctcaatctcttatcgattga

SEQ ID NO: 2966 - DNA, 408 bp, synthetic construct
  source 1..408: mol_type = other DNA
atgtatgatttgacaaagatccagaagacgttcaacgagagggtattcagccgattagacgacgagattctggaaagaaatggcattgataaagatgaggaactgatacgcgaagagctgtttcggcagagggaaatcatcaccgtgccatttggacatattgaatatttcctggccattgaggacgaaaaggtcctactctacgtggagaaggcaagccgtatgggctcccacaacatctgcatcatcgacgatgatagttacgaatgtatcgacgtgtacgacgggtatccgcccgagctcaaggagagataccttgaccacctcaagcgcatcaagaagacccggaaccggttcgaggagaatctgaaaaaactgtcagaagagaaaagcataaaggagaaatga

SEQ ID NO: 2967 - DNA, 966 bp, synthetic construct
  source 1..966: mol_type = other DNA
atgcagttcgggaattatgcggtggagatcagcagcgagaatgagaaccatctgatcaactacctgaaattcaataacttcaagtacgaaaaagatctggaaaactgtagcgagaaagaggaatatgtgattgtcatcaacatcatcgagagaatttactacaagatcaagaattatttggctggccccatactctctgaaaaggacttcctggataagatcaactacaataagtacagcattcacaaaaaggcatactcaaacgatggcaatcttatctacgagggttacaccatctacgaacagggctacggggaaatcgcctatggtctgggcacatcctactttccaaacggcaataaatgccacgagggtgtgtttgaacgtaaaggattgctggagggcaaggaattttactcaaacggccagttaaaattcgaggggacctatggacggtgccgcggttatggaccacactatccgagttttggaaactactactcgaaggacgggcaactgctcttctccgggaagttcaaggtcactttcggcggggtcggctatcccatgatcaaggaacctaagtacaagctccttgagaaaggcaggccacggtacatactcaaaaaagatgaggatatcacaaagctaatagagaagaacaccaatattgagaacaagaagtaccctatgacttttgaggaatttgaagagaaggtgctagaactcttcttcgaataccatagcgacgaatttatagagattctgaagaagagattggaggactataagaagattgagcctaactttatgaaagccctgtacaaacactcctgttgggtgtatgacagtccccacatctatggagacacgtgcaaacttcagttcgagaaagagcggctccgacattatcccgtatatcgcctgagggtgattgttgggctggaggacggattcaggggatga

SEQ ID NO: 2968 - DNA, 567 bp, synthetic construct
  source 1..567: mol_type = other DNA
atgatcagcattaatattaaagaaatgagaaaggagaaaatctatgaaggccgggtaaagatgggtcacggggggcggggtacaatccgtctgcataactccaatatcggagaccaattatacgtgatttttccatcctacggcaagaaggaagacaaggatgggaacctggaaattgatgagattctaaggaagaccgttgagctgggcaaggacggcaaaaataacatcgatttcaacagggagtaccggggccgcaagtgtatcatcattaagagggaaagtctgataaaactggagttcgccaaatggaaaataatctatgatggcatcgtcaagaaatcgttcaatggacaggggcttatacgcgtgaaggacatgttcctcggagagagagcatttgtggtgtttggggaaagcctcaacgacagtaacgagaacattatggtgtcagttaatgagatccgcaacaagggaatccaccccgacaatgaccacacgagccgagtcttgctttctaaggattacgtgaactgcaaatgcctggtggtcctccaggaggcgtga

SEQ ID NO: 2969 - DNA, 1491 bp, synthetic construct
  source 1..1491: mol_type = other DNA
atgagcaagattcatctgtccaaatccaagtactgcaaatgcgtccaatgtgaaaagatcctttggctcggccggtacaagcccgaggtggcagcggtggaggataaggagacgatttttgagaacggccgaaaggtgggggagcttgccaaaggcctctttggagaatacgaagacatagaatttgacataaccctcactcagatgatcgagaaaaccaaaaaactgctggaggaaaaacccaatgtcatcaccgaggcctcattcagctatgaaaacaatttctgcagcgtagacatcctcaaaaacgatgaagatggagtggaactctatgaagtgaagagctccacatcgatcaaggagatatacctggatgatgttgcgttccagtactatgtattgtcaagcctgggcctaaacgtgaagaaggctgctctggtctatgtcaacaatgaatacatcaggggggaagacctggacattagccaatattttatcatcgaggacattactgagattgcaatggcaaagcaggatgaggtcagggccaatatagagcacatcaacaactttatggaggctcacgatcgagacaatgagcccaatatggagataggaatgcactgttgcaatccttactcctgtgatttctgggcatattgtactaaggaattgcctaagccaaacgtgtttgacatttctggaatgtataagtcccagaagttcgaaagctacgccgaaggcaaggtcagttttgaggacctccgcagtgccaacatcaacccaagatacctggagcagattgactttgaactaaacgacagagggcccaaggtagaaaagcaggccatcaaagacttcctgaactctctgaagtacccgctgtactttattgattacgagtcctgcaattatcccatccccgagctggaggggaccaagccttaccagcagattcctttccaatactctttgcacattatcaaagaggagggcgctccgctggaacataaggagttcctaggagacatcaacgacaaaaacatcatccgtaccttcgccgagcatatgataaacgatctccaggaagacggtagtgttatcgtgtacaataagtctttcgaatcggcccggaatcgcgagattggagagatgtacccagacctgaaggggcagatgaaccggatcaacgacaatatggtggatttgatggtgccattccgccagaggaactattacacgaaggagatggagggctcctattcaattaagtatgttttacccgctttatatcctgatgatccggagcttgactacggcaacctgcccagcgttcacaatggtggtgaggcgtcagacgccttcctgaatctcaaggggaaaagtccagaagagcaggagcaaacaagagaagatctgcttaaatactgctggctcgacacatatgccatggtgaaaatctgggagaaattcaaagaagtggcaaaatga

SEQ ID NO: 2970 - DNA, 348 bp, synthetic construct
  source 1..348: mol_type = other DNA
atgaagctgcggaacctccatctggactataaagatgagaatggagacctccgctacgagcttcgaaacggggcccactccatgaaagatgcagaaggcttctctcccgaggagttttactccagtctggacaatgtgatcagagtgcttagccccaacaactcattccggccaattgaagcctaccctagcaataacggaccgaaggctctatttgggttcctgttttatttcttgaagggtatgggctgcaaaaagggcctgcagaaggagtttgattacctggagcagttcatcgactatgaaatcgacctcttcatgatagtcaacttcctgagggaattatga

SEQ ID NO: 2971 - DNA, 756 bp, synthetic construct
  source 1..756: mol_type = other DNA
atgcccctggacatcattgaggacatatggaagtatacaaccaacaacaagacatttctgttaatcatactggtgctcttctacctgttttgtatgttcatgcagatcttcgatgagatgaggatctcctatgcactttacctgtcaatgataccttacattttcattgccggctacggaatggccataactaaggacgtaatcgacaatggaaagcgcctccccaaaatcctcatcaaggacgtcattgttttggggatcaaatccactgttgtgttcatcgtctatctgtctgtgcaagggatctttttcagtctagtcagctatctctgcaattttccaatcattgatgtggaagacctattgctggatttttttgaaacagcaccgctgctgtttcaccacaacctcgtgaacacgctgatctttattgtggtggatttcgccgttttctacttcaccatgttcttcatggagatgggactggctaaacttgccgacaccggcagattcttggatgcttttaatctgattaagattaaaaagattatcgatataatcggctggcgactctacgcgaagcattataccgtcattatctttcttctgtgggtgttcagcttgctgatcgacgtagagacgccattctttgtgcttgactacatcttcaaagtctttctcggtttactcctgttcattactcagtattggggcataggggccgtgtaccggatctacaaaatcaagaccaactga

SEQ ID NO: 2972 - DNA, 294 bp, synthetic construct
  source 1..294: mol_type = other DNA
atgattagcagcgaagaaaaggagaagatcaaatcagatatcgtggagaaagtcaattcagtcctcgaaaaatataatgagtcgttccggatggacaaggtaacggtcctgaacagggccgaaaccgtgaagttcatgggaagttacagggtgtatgagagacggaactactgcagcgttagtcgcgagatcaattccttcctgaacaagtacggggacgtggagataaaatccaaaaagattcgagacagcggcatgaagtttacaaccgtgtcctttaacttcgagctatga

SEQ ID NO: 2973 - DNA, 822 bp, synthetic construct
  source 1..822: mol_type = other DNA
atggcagagaatgagataaagctattcaacgacaaacagatccgtactaaatgggatgaggagatcggagactattatttctccgtaatagacgttatagccgtccttacagaaagtagcaatccaagcaggtactggtcagagctgaaaaagaaaatctgcgaggaacagggccagccattcgaaaatatcgaaaggctgaagctgcccgccaaagacggtaaaatgagactaaccgacgtcgccaatacgaagcagctcctgcgaatcattcagtcagtgccctcgccgaaggcagagccttttaagcaatggctggcccaggtgggatctgaacgcctcgatgagattgtggaccctgaattagggatggaaagactgaaatccacctaccgcaagaagggttactccgaaaaatggatctctcaaaggatgagatctattgagattcgagatgatctgaccgccgagtgggaccgggtcggggtggaagagggcttggagtacgctattctgacaaatgagatcagtaaggcatccttcggcttgacgactcggcagcataaaaactataaaggcttgaagaaagagagcctccgcgacaatatgaccaatgcagagcttgtgatcaacatgctcggggagctggctaccactgagatcagcaagacagagaaccccgggggatttgaagagagcaagcacgtggctaagcggggaggcaacattgcgggcaacgcccgcaaggagctggaagctaacacagggcggaaggttcttagtaaggccaacgcgaaggataagaacctcctggaaaactga

SEQ ID NO: 2974 - DNA, 294 bp, synthetic construct
  source 1..294: mol_type = other DNA
atgatcagcatcgaagagaaagaaaagattaaaagtgagattgtagagaaagtcaatagtgtcctagaaaagtataacgaatcctttaggatggacaaggtgaccgtcctgaatcgcgccgaaacagtgaaattcatggggagctatagggtttacgagcgacggaactacggctctgtgtcaagagagatcaactccttcctcaacaagtacggagacgtggagatcaagtccaagaagatacgggatagcggcatgaaatttaccacggtgtcgttcaatttcgagctgtga

SEQ ID NO: 2975 - DNA, 786 bp, synthetic construct
  source 1..786: mol_type = other DNA
atggacaatcgcaatatcctcatcattattggcatcatagtcctaatcgctgcagcggggattattctagtgatgcttacaagtgagaattatgaacgaatggagatcgtgccaaacgggacaagcatcgacgttcccctgaacaagaccacctacgacggcgaatttcagtcggcgcgggtgtggcactgggacaagggaatacttgtcacatacaatagccatgaggataaaaacattctgagagtgagtgaactgggcatttacacgctcaataagattatagaaacgggagaaaaggaaaacatcgatggattcaccagctatgtcataaatgccgatgagatactggaaatcgagctgttcgacgccatcaaactgcactacaccggcaaattctattgcattcctttagctaacggtactaccggcgacgttatcatcatctgttccaacgacagggacgaggcagttcacatggccaaatcaatccagtacaagaatgtctttccggtaaacagcgatttcaataacaccatcgaaactgtggagaacctgagcgagtatctggagtccacagtgaacgactacgcaaacagcaccgattttgacaacgccgtgtccactgtggagaacctcactgggaatctcgagagcagcgccaaggattatgtaaatgatgccaacctgagtgacgtcaagacaaccgtggaagagaaaacgggtattaacatcgatgatgctaagtccgacttggagcaatacatcgggaagttgacatcatga

SEQ ID NO: 2976 - DNA, 231 bp, synthetic construct
  source 1..231: mol_type = other DNA
atggcagagctcatggacaagatatttgtagtgatagggtacattctggcaatcctattcccaattgtcggaatcatcgtgggcgcgctcctgtatttcttgaaaaaggaagatgccttctaccagacacacgggaaatacataatcatcgtcggcattgctatgattgccattaacatcctgcttatcgcctttggcatcattaccatcccgcccgtgggacaggtttga

SEQ ID NO: 2977 - DNA, 861 bp, synthetic construct
  source 1..861: mol_type = other DNA
atgaacgaaagtcaagacattgaagaaaccaccaaggtagacaactcgcgtctggaggaactgctccagctcttcaaggatgaccccagtcctcagaatgtgcaggagttgggtgaggaaatcaagagctcacagctatatctgcccgttgtctactcccaaagcatgatcgaagatatcctgtctggagatgtgggggaagttcgggaatttaaggagcctgccggcttcgatataaacttcctcaccaataacaggggagagaaggccattccactctttacaagcgacagaatcatggaagaggcggggctcagatcctctgtgattgtcatgcatgtggaagacctggtcgactcccttcaggggaccgagaacacttaccagctagtgacaatcaatccgatgactgaaaccggcatcgacatgcccatcctgacctttttgaacatgttcaagaaacgcgagatgagtgaggaggagaagcgcttccttgaatctatgaatcggatgttagaggtgctggaaaaccactcaatagcccttgaggagaagacggcattctttaaccgaggcccccaggactttatgaaagaggtggctgtcgatggggtctttgtacctaacattcctttcagcgtgagcacaatcaaggagttcgaagaggatgtttccccatacctgaacatcattctgatggacgagggaaaaaggatagtctacttcggagagcccacggaggagaatccgtttaatgtactgttggcaccaggttgtgaaattgagatggtggaagaggtggacgagttcacaactgtgtggaaatgcggcaatcagccattctatgatggcatgaaatga

SEQ ID NO: 2978 - DNA, 144 bp, synthetic construct
  source 1..144: mol_type = other DNA
gtggccaaagccaccaacaaatacagaggggactacatcacaaggctgaatgagaccaagtatgtcgaatttaacatcggcaacgcacccaaggctatgatattcagccggtgcgatattagcaagggcggacgcgagacgtga

SEQ ID NO: 2979 - DNA, 321 bp, synthetic construct
  source 1..321: mol_type = other DNA
atgtccttccccacacagatccggaatgagcaagaatttcgcctggcacttctgcattttctgggcgatattaatgtggggctcgtgtataccaagaagtttttcaaggagtttatgggactggacaatagcgtccggcagatactagtgaaccagatcaagaacgcgttgaagaacccaggttgcggcaagttcatgagtcacaactacaagggggaaaaagccgttagggtagacaagcgatatagactgcacttcaaatacgataaaaaagagaacctcttcgagctcgtcagcttctacaagaaagactaccagtga

SEQ ID NO: 2980 - DNA, 1332 bp, synthetic construct
  source 1..1332: mol_type = other DNA
gtgagtaatgaatgtctcagatgtggctatgccaacgaggacaatgaaaaattctgcatcaactgcggtgccaagcttatggaggctgattcaagtattccagacgatataatctcgtgttatttttgcgggtataaaaaccatgaggacaacaagttctgcatcaagtgcggcacgaggatacatcacgaattgccctacgaaaacgaactgacggagatttacactagatacggcgatgtggtggacttcaacaaagtttcctacaatatttattacaaatacaacctccctcaagactgttttctcctaaacagcgagcttaacaactacgaaaagtatcacgaggagtatgatatggaatgtcccttttgccatcagaactccttttccgtgatagacagcgacatcagtatcgggagcgtgaaaattacggagttccacgaagacgagtaccactgcagcagctgtggtttggagattaagctgtgcaagaaggatgataaaaagattcccgggcgccgctacctgatcgccaatatggacaataaggagcattggatctggaagaaatacggcaagactccgctgtacaaatacgaactggacgaaatcttcaatggagggctcagtgatgacgacaaggcaaggctactcagcatccacgcggattataatcgaaaggccattaagatagtcaatcggttcagcatctatgtttctgtgaggtttgctgcagagatcctatcggaggaggagaactctctcaagccaattgacaccaccttctttctggatgacgacgaggaggcctacttcatgttcacagatatcgactacagcaagcctatggtccgttactccacttttgggcagtcccagggtacctacgatgcagtcacttacggccagtctttcgataacgcgttttcctatttgaatgggcgctcattctatgccgacacaatgggatatttttccaccagcacatactcttcaaccgtatcgtatgaaaaggtcaaggtggtagacaggggaattttactgttaaccaacaaacggctgatattctcaggctccatccacagcctggatatcgacatcgacaagatcctgaacctggttcacgaccgccagtcccttatgatccacgtcaaaggacggagcaacattgtgaaattctctaatctcgatagtaacacattctatctgaatctggatggcagacaactgagcctcaactttacaggctacctcctgcggaccctgattgtgaagttcatgagtccaaagaaaaagcgaaatctgttgaaatcaaaaggaagcctttga

SEQ ID NO: 2981 - DNA, 318 bp, synthetic construct
  source 1..318: mol_type = other DNA
atgaacataagtgagaaaataaaagagatgcagggggatttgggcaagtatcatgctctagagaaaaaggaaggagagtgcggcctggaaaacctgattatgctcattctgaatgacgggggccagttcggaccgggcaaaatcatcggtgaaagctccgagtttctggactttatgttttacaagcggcaagggccaatcttctctctctccatcaagaaggaacaccttagcggattctcaattttccacaaggccatcgacgatgagaaacaggcagcggccaacattggcatccccaaggccctgtaccagtga

SEQ ID NO: 2982 - DNA, 324 bp, synthetic construct
  source 1..324: mol_type = other DNA
atgaacttcagtgagaaaatcgaggaaatccaggggaaagtcaagagctacaatagcgagatcaaaggcatgaagaacattccctcagaaaagatgatcagggtgatgatggccgaaggagaaatacttgagccatgcatgatcattggcgaaagcgacgagtacattgatctgatggtggtggacctggacaaggggccggtattcaccgtgtccatcaaaaaggagcggatagttggatttggcacattccacaagcctctggatgagctcgcctatcccgaagaggagctaaacgcggtcccagctgcattgtacctctga

SEQ ID NO: 2983 - DNA, 309 bp, synthetic construct
  source 1..309: mol_type = other DNA
atgcagataatagaaaaagtggagaaggaactggagaaactgggcctgacagtggatacggttgccaacgaccacatcattgaggcgtgcgtgaccaaggtctcattggaggacaacctcagcaaagtaggtatcgatttcgaccagatcgagaagaagctttatccctactccaccttcgtcattcaaatgattcagcatctcgatgaagggggaagtactgaagacatgatccgggccttcctaatcgaggctctgaattacagcctggaattaggcgacgcatttgggatctctctcgaggagtga

SEQ ID NO: 2984 - DNA, 249 bp, synthetic construct
  source 1..249: mol_type = other DNA
atgaacaaacagaacgtgttcgcactgatactgctaaccatcatcctgctcagcgtagtggcggtcagcggctgcatcggaaagagctctgataattcagccagcgactcatcgggggattccgatgattccagtaactccatttttcacagtggcagcgacagcgacgacgatgataacgatgacaataatgacaaggacgacaagaacgataacgacaaagacgacaaggatgatgacgacgactga

SEQ ID NO: 2985 - DNA, 639 bp, synthetic construct
  source 1..639: mol_type = other DNA
atgataggtgacgatgacttcttcatgcagaatgccgactatcactatggagctagcgactcagagaagatgtacggaaggggctatgatggctcttcagactatgttccaagatacagttcaggaggcagctatgggtcctcctctggggcagagagcagcgaagacggtagcctcggaaagtactgtctcatcggcattttgatcgtgcttgggatcgttgtctttgcgaacatcggcattcccgctattactaactccctatccagtagtgtgacagtggatgacctgaatatcacccgctacatctactcgaaccagtacaacagcaaaatcaccaccgattatggataccagattacatacaaggagcgaagctatggccagcatgccacgaatgtgattttctattcgaaaaacgggaaagtcctgtataatgacagccagtacatgggcacttgctacctgggggaagtgccgtacatcatctatttcgatggcaaggcagactacgccatcttcgaagtatacaaaacccaatttgactccggtgagtgcatataccgggaacgggtggacgtcgataacaagaacgtgataaaggagtttattaattacgatacactgtacgatgactga

SEQ ID NO: 2986 - DNA, 786 bp, synthetic construct
  source 1..786: mol_type = other DNA
atgaaatactgcaagatatgtcgtaaggaatttccccgagacctcatgttctgtccggagtgcaactccttcttagagcctgtaagccactcgaaaacccttgacgaagggattgtggagcacggaatcaaccggatcatcttctttgatacggaaacttccggcctgaatcctaactactgcaagatcatcgaactgggaatgctcgtcattgaggacgggaagatcatcgaggagtatgataagcttatcaatattggggaacgcatagatagcacaatcacaagaattaccggcatcactaacgacatgctgatcgatgagggcgtgagtgagggggacgtcgctcaggacctcaaggagaaactgatctcaggcaccctaatgatcgcttataactgccagtttgacttgtccttcgcctacggtctgctgaaaagacattaccctcacgaggcagaggcaatcattgaggatgtgaaatggctagatccaatgaccgtttttaaggaccgcaaggcctacccccacaagttcagcgatgccgtggagcattacgacatcaggaatgtgaacttccatagggcgattggtgatgccaaaggcttgtatgaagtgtgtctctcactgaaggacgaacgggacgacctgggagaatatataaacgtctttgggtataacccacggtacggaattaacggcctcaaattccccttcatagaatacaagaaacactattacaatgatagtatggttagcccaaataatattctgcccaagatttga

SEQ ID NO: 2987 - DNA, 948 bp, synthetic construct
  source 1..948: mol_type = other DNA
atgaaactggaaaactttaaatacgagaccaatgacaataatttgattaattattatgaaattgacaacgacaatcccatactgcttatcatccacgcccaaagcacaaactcaagtagctattctgatgtggtgaaggatcttagcaagaggtttcatttgatcctggtggattgctacggccacggcaaaagctcccacaacagggacaagtacaacatagtcagtcagggggatgacctaattgattttatcaagtcgaaaactgatgagaagatctctgtactgggccactcctcaggtgggctcatcgcctgctacatctcttccagaagtgacctgtgtgacaacctgatactggaggaccctccactctttagcagctctggagagaaacggttcgactattacaactaccacgacctgtccaccgtctgccataacttcatcaatcaggatgaggagaaggactttgtctattactacttcatgaaccagtatatgtggaacttcttccccgaaagctcgcgagaaaagatccggaacaaatccggagcaagtgcactcaaataccgcgaaaaacatccagataagcccttgaaggttcgcttctggccgaagaacgtgttagaggcctttaatggtatggaggagtatgacccttacttcggagagaacttctataatgactccttcaactgtgatatcgactacgctgagctactttcaaacatcaagtgcaaaaccctgtttctcaaggctaacacgaagatcggggaagatggcattatccagggcgccctgactgatgatgacctcaatcaggtgatgaatctgattgagaatattgaggttgaatacttcgactgtggccatgggatacacaacgaaaagaagaaagaatttgtgaaagcggtgatcggaaccacaaagattttcacaatttga

SEQ ID NO: 2988 - DNA, 3282 bp, synthetic construct
  source 1..3282: mol_type = other DNA
atgatgcggaagacaattttcggtgttatatttatcgtgtttattctgttcagcatttctacggtgtcagccaacgatgctcaagttgacatgctgaacgatgctagtgatgtggaactgaaccaggacttgaatgcgcagcccatctcatcgaattgctacgataacaaccagaatctgaaggctcagcctatttcggactgctctgatgagctccagaaatctgacgacgatctcaagctgtccgaggggggatcaacaagtttcaagcagctgtgtgaggatctgaataagagcgacggcgagttcaacctaacgcacagctacaaacacgatgagagtgacgaagagaatacagcggtgttttatatggagaatctggtgataaatggcaataataatattatcgatagcagcaaatcaaatttcaactttaaattttccaatgaagctaacatcaccatcaatgacttgacgttcacaaacttcaacaaatccctctttgtgatcagtgacagccaattgaccttcaacaacgtgaactttactaattgttccagcaatctgtcattgattgcgatcatgtttccgagcaatttgactataaacaactgtaacttctactcaaattcatttgccaattatctcgacggaccctttaacaaattagagatctataatagcaactttgatgggaccaactgtctggattctgctattaaagagaacaggggccagctcgtcatcgaaaattccagcttcgagaacttcaccggggttcatggaagcataataaactacaagggggactatttctctattaaaaactccaagttcatcaattccaattcaaacttcactggcggagctatcattgtaaagtatttccccattgcctacgaggagggagattcatttgtctaccgtcactctaatgacatgctgatcgagaactgcacattctacaacctttcgtcttccagcaacggaggtgccatccatcttgacctggattcaggctctgaagggatcgtcgaaactttaattgtcaagtcttccaacttcacagactgccactccaagtttggaggcgccatatccatcctgggcgggtacctcaacatctcctattccaacttccagaacaatagcgccagcttcgaaggcggggcgatctactccagttggaccaacgcaaagatcgaaggctctaattttacggccaacgaaggaagtcagaacgccggggcattatactttgacaagggtaaactgaccatcaacgactgtaagttcattgataacaaggcgctgaaggaacgggagcgcactgccaacgctatctacgctcatgacgtggcggcctatttctccaattccacttttgacaacggaggagtgtcggtgtatgcagactttgcaagcgacagcaaaattgagaacgtggacaaaaatgatgacatcttcctcatggacaaccacgattacatcgtttcagtggaaagcaagggaataaagctgaacctcaccggaaatgagattaatgtcgacagcctcccctcccacttcgacgcccgagactggggctggacaacttctgccaaaattcagggagacaatactgactgctgggctttcgcaagtatttcctctctggagaccagctttgccaaggcctcgggggtgttatacaacctcagccagaactatcttcaaaagctccaactgaagtacttctattcaggagacaagagaaacagcttgacaggcttttcgtatagcggtccaggctatgctcttagctggtacggggtgttgcctgtggacaatgggtatgatgaccgcggcatgatcgccgacactgaccttgaggatgaaagaatccacgtgcaggatgtgctgtttattgataccggcagggacgacgcggtggaattgataaaatgggccatactgaaatacggcgctgtcacggtgcagcgaggcatcaacgggccttacggggaactaccaaccgaaggggacgacatcgccatcatgagtcatggtacccatttcatctcactgattggctgggatgataactattttgaactggaggagggggatgacgatccgctccacaaattcgcgtggatcactaaggactccctgtccggtttttcgacggctgactacacaaaattcgatgccatagacaactacgcaattgtcccccagagggctgcagttgcctacatcttcgaaaatgacattgactatcacgtgaactatcagaccgacctaacgggactggtcgggttcgatgccaattacaactactactccaacgagtttgtgtcgaagtatgacgagtttatcggcgccgtaggcacctacttcaacgagtcaggcatcgattactcctttgatgtgtacctaaatagtgagaagatgcttagccaaagtggggtgagcgagttcgccggtttcaggacaatcaagctggatgaatatatccacataaaagcaggggatgtgtttaaggtcgtctttaaaagcaactccatccctttccaagcttatagccgccagcattacattgaaggtatgtccctcgctagcgccgacggtgagagctggagtgacctggcacctctcaataagaccgtatgccttaaggcctacaccgtgaaggaggacaaggaggtgagtccaagccgcgcctccacgaagatagattgcagtaacatgaccaccacggccgtcgcaagtgcagatggtcggattggagagtacttcgttgtcacactgaaggaccagaacggcacagtgatcgccaataagccaattaagattgggttcaatggccgggtctacgacagagtcacagatgaaaacggcagcgcaaagctgcagatcaacctcgcatacaagggcacttacaccttcgccatcggcttcctgggtgatgagaactacctcggagcatttgaggtggccaagatcactgttaacaagcagagccccaagctggcaagtcccaacaaatcatataaactgaccgccaaaaccaaaacactgaatgccagccttaagagtggcaatggaaatccagtaagcgggaagaagatcaccttcaccgtcaatggcaaaacgtatacagcgaccagcaattccaaaggagttgctactgtgaaggtaagcctaaacaagaagggcacatacagtttcactgtaaaatatgctggtgatgatacctttgctgccgttaccaccaaagccaaacttacaattaaatga

SEQ ID NO: 2989 - DNA, 1146 bp, synthetic construct
  source 1..1146: mol_type = other DNA
atgacaaaactgggcatgggcatgatgaggcttcccctgttagacgaaaacgatttcaaaagcatcgattatgacgaagtaaacaagatggtcgatctctacatggaaagtggattcaaccacttcgacactgcattcgtctatcacgagggaattggggaagagagcctgcgcaagtcggtggtcgagcggtaccctagggactcgttcaccgtgagcacgaagttgcctctctttgtgatcactgaggagagtcaactcgagggtctcttcaagcagcagctggataattgcggtctggattactttgactattacctactgcacaacgtgagcggtttcacggaaaacgcctggaagaacgtggacctgtattcattcatccagaagaaaaaggaagatgggtttatcaagcatattggcctgagtacacatggaaactccgagttcctggacgggattctgagcaagcaccccgaattggagtttgtactgctgcagataagctatctcgactgggaagatgaggcaatcgagtcccgaaaatgcttggaagtagccaagaaacataatgtgaaagtgatgatcatggaaccatttaaaggcggattcctggctgacgttccacaggaggccgagaagattatgaaagactacaatcccgacaaaagcgtcatctcatgggcgatgcggtttgtcgccaatctcgatggcgtgtgccttgttttcactggggcgtccaactccaaacagctcgaggagaatattgaggagtttaaaaatgctgatccgctgaacgacgatgagatcgagattctaaaggaggtgtctcaaatcattaataagaacatcacagtcgactgcaccaaatgcagatactgtgtggacaattgttcaagcaacattgatatagcaaagctcttcgacatctataataagcacaagctgcttgatacagatgagtggaccccccacggcaacgcttacttgaactactccaagcttccagacgtgggcattgcctctgactgcaccgaatgtgagatctgcatagaggagtgtccgcagaagatcaacatacctgaagttttaaaggacgtggccaagacctttgaaaccggcatctacggatttgggaatgaatga

SEQ ID NO: 2990 - DNA, 201 bp, synthetic construct
  source 1..201: mol_type = other DNA
gtgagcgaaatacccgttgccccagtggtgcgcatcctcaaggaggcgggggccgagaggattacagatgacgccaagaaagcctttgctgacgcagtggaagccagcgctgaggagctggctaaaaaagtcatcaaggccgcagcacacgcgggccggaagaccgtgacggtagatgacatcaagttcgtctgcgaatga

SEQ ID NO: 2991 - DNA, 2208 bp, synthetic construct
  source 1..2208: mol_type = other DNA
atggggttccttgataatgtcaagaaaatctttgatagcggtgaaaataaagaggtgaaacctcggaatggtacgggcaaaatcgataaggtggaatctgtggagagcaaaagtaactatgtgaacttcaatgaaaaggatgagcagcaacaaaattcagaggacctcatcaacgacgaaatcctggatgaatcaacctccaacgagacgagaaacttcacatacctaaataatctgatccatagtggcgtgaaggagatcattttggattcggatatcgtgtatgggaacgaggatgaggaatccaggcatggcattaaactgaacctggataaccttgttattgacggtaacggctacactatcgacgctctgcgagcaagcgagatctttatctgcgatgctaggaatattgtgataaagaacattacactgaagaatgggttctctcaccaggctggggccatcaacaaccagggagagctgactataatcaagtcttcaatcaacaataacgaaggaaagctggccggaggcattttaaatctgggtgaactgaccctggacgaaagcgtcatcgctaaaaataaggcagaacacactggaggcatacttaacttcttcgggaagcttagcatcactaaatccaccctcaaagagaacatcggcattggcaataaggcgatctctaataacggcggggaattgaccataaataagtcccggatcattaataaccagattgacaccaagactaattttgtgaacaaagccaggacagtcttcgttaacaaagccattaaggcgcgccgtgacgcggttattagcaatgggggttatctgcggatcagtgactctgaaatcctgagtaacgagagcaagtacataattttaaacatcgagttcagccgcatctataatacgatcttcaaggctaatgagtcccagtatatcatttacaatgacaactatgaggataacggattgagcagtctggggatctttaactgtaagtttatagaaaacaatgccaaggcatccatagtctacaacgacggaaacttgtgttcaatagacaatgccctgtttgaaaacaatgccagccacaaaaactccaatattattacaaataaaagtaaccttacactgaataacctgaaaataaaagacaacggaaaaaacatactcaacgacgattacattttcattagaaacctctcgccacaaatcgaaagtaaaattattggagaaggtctagctgagaatatcaaagatatcaagccccaggaggagaagtttgattttgggtatctggacaagaagatccatgataacaagaccggggagatcatcctcgaggaggacattcgattcgagaactatgaaatggattattacgagggcggaatcgagctggacatggacaacctcgtcatcgacggcaagggacacacaatcgagggggctaagaaatcacgcatcttccttattacgggcaagaacatcaagctcaaaaatataatttttaaaaatggattcctgtacaaagactacgacaacctcatgaataaccagggaggcgccctaaagaccaactcgaattgctccttgactgtggagaattgtaagttcctcaataacttcagtcaggacggcgggggcgccatccacagcaagggcaacgtagacattataaagagcatcttcaccagcaacaccgtaaaaatgtttggcgggggtggagcaatcaataatgacgggaatctgagcattcgcgagtctaccttcaccaacaacagcgccgagcggtacggcggggctatttgcaataagggagagatctccctgtttgatagcacactcacaaacaacattgccaaggtgcacatttttaagacctcctacggtaaaggtggagcaatctataacaagggcaagttgactattagcaactcctcattatccaaaaacacagcccagatcagcggtggcgcaatctacaactggaagcataatgaaagatacgagccgatcattacaaagcagaggggcagtgaagccatgtgctacgagggggagctgataataaccgaatcaaccctctacaacaacactgcggaggagtcggacggcgccatctacaacgaaggcaagatgaatatcaccgattgcgacatcaataacgactccaataacaagaacacgtga

SEQ ID NO: 2992 - DNA, 1407 bp, synthetic construct
  source 1..1407: mol_type = other DNA
atgaccacgttaaaactgacccgactcaacgaacccaacattgaaaagctgtacgagatgaaatccgccctcagaaacatcctggaagagggggatttcaaaaatctcaacaccatactggacttccaggacaaggacggtagcttcaagctattctccacctaccgtatcccctcagatgcccgcgtggacttctgccatgagccaacttacatctgcagttccattcttatgaaggcctaccttacaggtgattctgaattgcggcagaagattgaaactccactcatccacggtctggaacggtgttgctgtcgaaacctgactggccacgggtacgattcgctacaaggacagatcgacgccctgaacatctttatgaaaggggggcttagggagtttattgatctgcaccccgacctgaactcaaaattcacagaaatgatcttgaacatcatggtcgaatttgatgctcgcgaagagcaaggcatcttcaaaggcacctggggcgaagactacaaggaggacatactcaagataaacgagtacttcagcacgagaaaagtgtttgtgtatggtactctcatgaatggagagagcaaccatcacttcctggaaaacagcatttgtcttggcaaggctgccattgaggggtacgacatgtataatgtaggcggatggtatcctgcgattatacccggaaattcacggatcattggggaactttacgaagtgccggagaatgacatggcgagtatagacatgctggaaggggaggggagcctgtacattcggaagtgtgagatcacaacgggcaacgagttggcatacatctatgaatacgctcaggacaccgaaggactcgagaagatagactcgtggaaggattacgtctggtacgtgtcctatggcagcaacatgctcgaggagcgcttcctgtactacatcgagggaggatgcttcgaaggcagtgcctcctatcgatacccttgcgaagatcccacaagaccgctggagaaacgcgccatcgacatcccatacgacatgtactttgggaattattctgggagctggcacggaggtggagtgtcctttttggataccgagaaggaaggccatgcattgggcactgcatatctgattacaagagagcagtttgagcacgttgcagctgaggagaacggcggacgccccccaaatggtaacggctattggtatgagaatatcattaatctaggggagatggatggctttgagatgctgacagtcaccaataaggatctcagggagtataacaggccttctgacgaatatctggagaccttagagcggggcatcagggaaaactggcctgatatgtctgaggaggacatcgatgactatctgaatagttgcatcagggagtga

SEQ ID NO: 2993 - DNA, 1059 bp, synthetic construct
  source 1..1059: mol_type = other DNA
atgaagcaccgcctgaatctcgacaataaagaccccaattacatcctgctcaaagaaatcttcaagattatggatagcagagaatccaaacgcatcttggtctcctatgggtttaagaacctcaaccggacaattttcgcttttaaaatcatcttcataagcatgttcttcgagattgacatcccattcatcctcaatgagctcaagtccaatcggcggctctgtaagttccttaatatttctgaagtcctgactgcagatcaggtgtataagatcttttcagaaataaacagcgagaaacttataaaaagcctgaaccgcatcctgaacagtaggaacatggttaaaaggagaggaaagaagaccttcattgtggacgcgacccccgtggacttagatattaacttccacagaaacaagaagacgaaggagcatctggagaagattaatctcaaatggagttattcgtcctccaagggttattatatcggattcaaggccactgtggtgatggactacgactcgatgaatcctgtgtgcattctgatccatagcggggctcccaatgatgccggtctttttgaagagatcctggagaaccttcagaagagacgaataatccgaaaaggggacacactgatctttgacaaaggctactacaggtataagaactaccagatcggcatcagcaaatacaaaatcattcctttcattttcccgaaggaaaagttcagccgcacccgactggatgacatcctgacatacccactagccgtctttaacaagacaaagcggatcatgaaggagaagcggttgtacaacagtctgaaaatggagctgatgaagaagattgatagttgggaaaaatttaaaccaatcaggggcaagatagaagattttttcaaattactgaaacagggcctgaacatgcgtgagatccacaaatatactctcaagagcgtagagaagaccgtttacctaaatgtgtttttgggcgcactgattatatcacagggattttactcaaagacgaccattcaacaattgtccgagaactga

SEQ ID NO: 2994 - DNA, 2427 bp, synthetic construct
  source 1..2427: mol_type = other DNA
atgaacaatgagacaaacgctttcactggaaacaacccagaattatacaataggctcaagagtagcatcaacaacgcagagagtattgatatcatagtttcttttctcatggaatctggggtgaaactgattatcaacgacttaaaggaggccatttccaaaggcgtggagatccgcatcctgactggaaactacctgaacatcacacaaccgcaggccctgtatctgctgcgcaaggaattgggatataatctggacctccgcttttacaatgttgccaataaatcctttcaccctaaagcctatatctttcacaatgaatcagacagtgaaatctatataggcagctccaatctctccaagggggccttgaccgactcgatcgagtggaactaccactttaaaaggtcaaaaaacctcgaggacttcgattccttttaccagaacttcgaggatcttttttacaatcaatcgaccattgtggatgacgaggctctgcgcgattactccaagaaatggaccaagcctcggttccccgtgaaagaggctgaaagtattgaagaatatacacagacccctagcgagaccctatttgagccacggggcccgcagatcgaggcgctgtatgctctggagcggagccgtgaggagggctttgacaaggctttggtagtggctgccacaggtattggaaagacgtacctggctgcattcgattcgatcaaatataaaaaagtgttattcatcgcacaccgggaggaaattataaaacaggccgccaagtcgtttaaaaatgtttttccaaccaaaacgattgggttcttttacaaccagcataagcaaaccgacaaagacatgatattctccctggtccagacattgggaaagagcagctatctgaacgacagctacttcaagagagatgaatttgactacatcgtggtggacgagttccaccatgccgttgccaacaattacaagaagatattggactacttcaagcctaaattcctgctgggccttactgcgaccccggaacgattggacaacagggatgtatttgcactgtgcgactataacaacgtctacgaaatccggctgaaggaggcgatcaacaaggggtggctggttccattccggtattatggtatctacgacgatacaatcgactactccactgtcaacatgaggaacggcaggtatgatgagaaggatttagaggagaagctgatgatcaaccgccgtgccaatctggtgtaccaccacttcctgaagtacacctctaaaagtgccatcgggttctgcgcctcacggaaccatgcagaatatatggcgagctatttcaacgagcacggaatagctgccgcgtctgtctactccggcgagcagggggagcactcccagaaccgccagaaggccatcgatgatctgagagatggcaaactccgaatcatcttcactgtggacattttcaacgaaggtcttgatctcccctccatcgatgaggtgctcttcctaaggcctacacagagccccacaatattcctgcagcagctgggcaggggactgcggaaggacaagggcaaaaagtacctcactgtcctggactttattgggaactacaaaaaggcgaatatggctcccttcctactgagcggtaaagactacgattcaagaacccttctgcgagaggctgtcctggactttgagtatcccgaggactgtttcatcgactttgatttccagttggtggatctctttaagtaccaagcaaagagtgaacttaaggccaaggatagggtggtcattgaatttaattctgtaaagacggagttggaccaccgtccaagcagagtggaactctttctgcatatggatgatgccatcatcggcgcaatgaaaagaactcccaagattaatctcttcaaggattacatgagtttcctcaatgacaacaaagaactcatggacgaggaggaggagtttctaaacagccccgcacatgagttccttaaggccattgaaaacacgaatatgaccaagagttataagatgcccatactgcgagccttctacaacaatgggagcatcaagatggccatttcagatgacgatgtctacctggccatgaaggagttttacgactacggttcaaatggggtggacatgctgaaggataaaagctctagagactataagtcatggtccaagaaagactacgtgaatcttgcaaagcgcaacccaattaagttcctcaagaaaacccatggcgacttcttcattgacaaggaaggattcgctttggcacttgctgacaatctagaacagttcatcaatctcgacagcttcaaacgccactttgaagacattattgaataccggacccttagctattataaggatagatttgagaaaaaacaagtatga

SEQ ID NO: 2995 - DNA, 579 bp, synthetic construct
  source 1..579: mol_type = other DNA
atgagtgaaaattactatgactccaacgcagacgactttttcaacggaactgtcaatgtggacatgagcccccagtacgaggactttctcaatgaaattccgaaaaacggccacatcctggatgccgggtgtggttcaggtagggacaccctggctttcaagtcattagggtacaaggtgaccagcttcgacggcagcattgagatgtgccgactggcaagcaaccacaccggccaggaggtcctccatcttcagtttcaagagatagatttcaaagagacgttcgatggcatctgggcgtcggcgtccctgcttcacattccaacaagtgagatagatgatgtgttgaaacggctgaaaaagagcctaaagaaaggaggggctttctatgcctccttcaagtacggaagctttgaaggggagcgcaacggacggtacttttatgacctgacagacattactgccaaggaactcttcacaaaaaacggcttcaatatcaagaagatctggtttacccaggacgccaggaaagagagagaagatgagaagtgggtaaacatcctggccatcaaggattga

SEQ ID NO: 2996 - DNA, 630 bp, synthetic construct
  source 1..630: mol_type = other DNA
atgatctgcccaaactgcaacaaattctataatgataattttgccttctgcccacactgcggtgcggagaaaccagagcccctcacgtgtcctaagtgcggatttaaaagtaatgaatttaagttttgcccgaagtgtggcgctgagctgaagaaaagcgccattaaaaaacccaccaagacctgtagcaactgcgggcatgagaatgcaattaaccggaagtactgtgagagatgtggcacggacttccccagagaagagaacaggaggttcgagacaaaaatcgagcagcccaagcgcatcctgctggactacgtgaataaattccagatcgaggaaaatattaaaaaggaaattataaacgatattaacaatgagaagatcactaccaagactgagatcaccatacgggtccgccaggcccaaaaggagaagaaggagcaggacaagatccggaaagagaaagaggagaaggaaaggatgctcgaaaacgaatactaccgcaactccgagacaaacactcagtatcacacctatgatgacaagcctgacgtgttctacggagggaacgagtatcgtgaaatcgaagaaaacacactaggcgaatacaattactaccgagaatattga

SEQ ID NO: 2997 - DNA, 540 bp, synthetic construct
  source 1..540: mol_type = other DNA
atgacagaatacaccatttgtcccgcctgcaaacggaaaaacagcattaaagagaagtattgcttagactgcgggcagaaactaatagaagaaaaggaaaatgaaatcatcagggatgataaactcgagattccaaaggataagatcatccttctggatctgaactacactctcatcagcaactcctggaagatacgccacgaggagttgcctcagaagatcctgaagcgccaatatgaggacgaattggtggaaaaaattaaggacaactatgtgattctcatcacagctagtccctataagaccagctttgactcactgaagcatattgaagagaataccgacctgaaaatctctgagtcctactggaatttcggcaaacgacctcccgagctgaaggagtactggctgaagaaagcggtcctgccaagtcacggcgatgactcaagcaagtaccttgcactcgagtccaacaaggacacgcgggagatgtacgccaggttcggaatagaggccagaccgaagtcggacttcatctga

SEQ ID NO: 2998 - DNA, 837 bp, synthetic construct
  source 1..837: mol_type = other DNA
atggaatattatctccagcagctgacaaacaaccacttggagtacctgttcgagctcaaatttgttaccagtgaatttgaactgcccggcttggctgacgacatcgactgcaagaaactagaggagtgcgggaagaaatcagagtccttacggattgacggactaggattcgacaacaaaacaaacagctttgtgattatagagtacaaaaatcagtatgataagtgcgtcattgatcaggcgaagtgttactataagaatctcctcgacaagaaagaagcatacatcgaaaagtactacgaaaagttcggcaaggataaagaggtggaatttgacttcgataagacccgtgccataattatcggcccggagttttctgagcaacaaaaaaacagaaaagatccagattttgacttcgagctgtacacagtatcgctgtgcaagtacaacaacaagatttaccgcgccctgtacaagaaggtggactcaaatttcaagcgggagctgtacttcagcagcgaggatttgaaaataactcgctgttccctgctggagaacaagagcgacaaagtgaagaagctctataaggacttcgagaacatcctgtttgaacgattcgatgacgacttcattcttgatatcaggtacatcgtggacggggtctccattaccgccgaaaaatctagcatctgcctgctccgggtcaataaaaagagtatcaagatacatttctatactgacgagcttgaagatgaaacccttaatcacgagaacatctgtgatgtgatcgacaacatcaatacgatctataatcagaagaggagaaataagaaatga

SEQ ID NO: 2999 - DNA, 561 bp, synthetic construct
  source 1..561: mol_type = other DNA
atggaaaatcccgtcgatattacggccattgacggtatcaagcggatctcaaagtcctatgacattgataccagtgagtactatgatgacggactgtatatcagctggataagccttatcaagtccaaaaacgacactgtatgtccagactgcggctctaaactgatgccgttgaccctctgtcccagcgaagagatgatggagctggatgagatgggcttcgatctggagaaccataattattactgccgaaattgcgactacgagctctacatcgacgttctaaacatcgactgcgagaatcaccctatagaatgtgcgtacctctactataagctggacgaaattacaaaatacattcggcacaacgaatactccgacgaattgaagtcgaagatggactactttgatgacgaggagttcaacgcattcatcagtaagctgaaggaggtcgattacatctacgaggacgaagaggggtatgtgaaacttgtggatgatgtggaaaaccactggtttaggcattacataaaatataagcgcttatgcagagagctgtga

SEQ ID NO: 3000 - DNA, 120 bp, synthetic construct
  source 1..120: mol_type = other DNA
atgtccattgacaagctacttctggaaatctacgaactcatcgaaagcgaggattatgagaagagcctcgagctgtgcaaccagatactggagttcgacgagaacaataaagacgcctga

SEQ ID NO: 3001 - DNA, 1500 bp, synthetic construct
  source 1..1500: mol_type = other DNA
atgcgcatgacccccagtagtcactccagcctgaaaaaggcttttttcaaaaagaacacctacggcggcatcaccatgaataagatcaagttgaccaggcaagacgaacccgattttgacgagctgtaccgcatgatcggagaactgaaagacttcctgaaagaggatatgggctctcgaaactggatgaagaatctcgagacgatcttggatttccaggacaccgatggcagcttcaagctatttacaagctacgaaataccatccgatgcaagagtggacttctgccacatgccaacatacatatgcacagccattctaatgaagtcatatctgattggtgattctaagttaagcaaaaaaatagacaggcccctcagacgaggactgaaggcctgttgcatgcggaacctcatggggcacggctatgaggcactggaaggccagatcgaagcactcaatatctttatgaaagcggggctccgtgaatttatcgatctgtatccggacatgagtagaaaattctccaagatgattagcaatatttgtgggtcgaattttgaaatgctagagagcctgaggaacgctttactgggcccctggggggaggactacaaggaggacatccttaagataaacaagtacttcaacacacgtcgggtatttgtctacggaaccctcatgaatggtgagtcaaaccatcatttccttgaaaacagcaactgccttggggccagcactgtggagggctaccagatgtataatgtgggttggtatcccgccattgttccgggagatgggatgatcattggcgagctctacgaagttcctcaagaggacatggctcggatcgacatgttggaaggggaaggcagcctctacattcgcaaatgtgaaatgacttcttccaaatccctcgcctacatctacgagttcctggaggatactgaagggctggatcggataagttcctggaaggattacatctggtatgtgtcctatggcagcaacatgctgtacgacagattcatttgctacattgagggtggatcatatgaagggagttcctcgtatcgaatgccttgcgaggacacttcagcccccgtggaagtgagagccgtcgagattccacatgacatgtactttggaaattactcggggtcatggcacggaggaggtgtgtccttcctggacaccgagaaagatggccacgcgctgggcacggcctatctgatcacacgggagcagtttgagcacgtcgcagctgaggagaatggcgggcgctacccagacggaacgggcaactggtatgaggacatcatcagcttgggagatatggacggcttcgagatgcttacagtcaccaacaagaagcctagggagcagaacgagccatctgaggaatatctggagacccttaagcggggaattagggaaaactggcctgatatgtctgaagaggacatcggtaggtacctgaatagttgtatccgcgagtga

SEQ ID NO: 3002 - DNA, 843 bp, synthetic construct
  source 1..843: mol_type = other DNA
atggtgaattacggggacgatagtttagagaatccggatgatatcacgttgcccttctttgcatatgggatctttaaacctggcgagattgcctactcgaacatcaagaagtacattggcaagaaaaatgaaaaaactatcaactacgctatgaaacagagggacggcgtaccaatcctcctgcccgaagagaacaacggaaagacccacggttatatcttcaagtttaatgataacgaacgggcttatgacacaataaaccataacctaagcaataaactgtatgagtggggcaccattgaacaaggaaagatcaacgtgctgtttggaaaggaccccgacatcggcagtgacgatattgggccagactttgaccgagagaactacaaagggaaggacgacccctttttcaaggaggcgcttgccatcaaacagtacgtcgagtcaaacgatttcactagcaaagacgacttctacgatctgcagaggtattacatcctgctgtggagcgcaattgagcggtgctgtaaactgaaatacaataaggagtccgacggtaagaaccgggaggagttcagcaaggaaaaggagttcattgacgccctcgacaagtgcgacgaaaccaattatcgcgaaatctacaagacagatgatttgacgcctagaaaattcgacaccgatgagccaaagtggtgtatcaactactactatactctcagatgcaacattgtgcaccgtggcaaatccaatgtcaatcgcgatatgggactgcttctgcaggccaccaaggatctactcaacatattcgagcacatactcgacgaaacattcaaggaagagtga

SEQ ID NO: 3003 - DNA, 414 bp, synthetic construct
  source 1..414: mol_type = other DNA
atgaagaaaatcatcctggggacatgtatcctcttcctcttgatttcagtcgcatacgcgggcactgtcgatatattcaccgcccccagccccttgcaaccactgggcaatagtggtttcggagatggacagggccataatatacagatctttgagtttacggaaaacctgtacaaaacctggttcgagaatgataccgactacgtggtggagaagtatgaaggaaacaacggtctttatctgtatgccgatgacgaaaacgactgcgggattctcgagattgttgagaaggacggcaagaagtacatcgtaaactcctggacgccgaaagggcctagcgaagctcagaccgtggtggagaacttacacgactttaatgagctaaaccacctgactccaatcacaacactgtga

SEQ ID NO: 3004 - DNA, 954 bp, synthetic construct
  source 1..954: mol_type = other DNA
atgaatattgattacgacggccacaacagtaccaatcccaacaataactcgatcgtggaaaacaacaacaacaatcagctaagtcttcaagttcctcagaaatatgaggactatgacataattgaagaactccaatgctttaattgcaaccaacataccttcatccagctgaacaaaaagtcccttctctcaaataaggtggtgtactactgcacgaattgtggaatgtccttcgagaagcagggcaatggcttcaagctggtggacatatccgacaaaagcaaccgcatgtgggagctgtacaacctgaaaaccctgacttggcccgagtgggagagaattgccaatggaggactgtctgataaggaccaggcggagaaggacaagcagctcgccatcgaaaaacagaaggaattggaactccagcgcaaaaaagatttggagatcgtagtccaggagctggccaaaggagaagtgaacttaaagccagtcagcagcccagttattctgaaaaagaatgagactgcttaccttagtctgcccaacatcacactaagcgagcctcgggccgtgagagtgtctaagtcagggggatatggcacttcataccggtttgctaaggggttcagtgtgcactctggtgtgggggagagccgaagcgtttctcatgatgaaattatggcaattgataccggcacatttgtcatcaccaacaaacgggtgatcttcgtcggcaataagaagtcggtaaacatcgacttgaagaagatactctccatgaccgtctacaaggatggcatttccatccagagggagaataagcagaagatcgaatatttcacaaaaacaaaccgtcactccatggactttacgatcgacgggaggacccacagcctgccgctcgagggttatttcattaaagcaatcatactggggcagatcgccaacctgtga

SEQ ID NO: 3005 - DNA, 849 bp, synthetic construct
  source 1..849: mol_type = other DNA
atgagaaaggaacggatcaagagctacctgggaattatattcgaccttctggtgattttagacttgattctaatcttcatcagcctgccgatccaaggccttcacttgattgactacgcagggtttgtgcgagcctttgacctgacaatctgctttctcctactcatcgagtttttttacggactctacaaatccgatgctaaagccaaatacttcaaagaacatttcctcgacctcatcgcttcaatccccttcgacttgatcgtatttgccctcttcggtagcagctccattatccttaacctggctcggttcctgcgtttggtccgcgtcgtgagggtgttcagggcggtaaatatcgtgaagaagtatgggctggaaaaggttattcgccggacccacgcagataagatctttattgtcatagccgttatagtggtgatcttcacgatactcctaactctttcgggtcacgagaacatctccgacagtttttattttgtcgtgatcaccctcaccactgtgggctatggcaatgagggatttaacgagccactggcgaagttcgtgacactgtttctgattattgtcggcgttctggtcttcagcaccatcacgggggtaacctcatccttcttcatagataagatgctggaagagggcatcagtgtggatgagaacctgcatttcataaatcagaagctgaacttccacgaaagggagatggaaaaaacaagaaaagaactggccgagattaaaaaggagctggagaagagcaatgagaacagtgaagagctcaagcaggagatcagcgagttaaaagagctgattaaagaaaataacaagtga

SEQ ID NO: 3006 - DNA, 1044 bp, synthetic construct
  source 1..1044: mol_type = other DNA
atgttttgtcacaactgcgggagcgaaataagtgatgatgccaatttctgcgtaaattgtggtgccaagctaatccgactggatgaagagaaagctcagccgagcaaatcctcgagtcgaggcctgtccaacaagaaaaccgacgaacagaaggagacatcctccggcagaggacttttcaacaagaaaacagacgagcaaaaggaaacatcctccggccgcggactgttcaacaagaaaaccaaggagcagaaggaagccatcaaggaaatcaagtcttacacgaagggtaattacaagcgctttaggcagatcattccccggtatggcatacttgcaatggaagtatcacatacgaaggtgttcaatggaataatcaaaacaatcagaaaagaaattgagaacgagaatctgacggccgatcagattgagggaagagtctttcagctgttgacagaagagtatggtgagcctatgtcgcaggaagaggctgatgagctgttcaaccaacagaatctccaaacaaaactcgaaaacgagaggaagttggagcagaagttcggggttccatttcaaaacagggtgtggttcaaatgcactgtggaggagatgcggcacagcactttcaccaacaccaatgaccgggacattgtggacggatacgtctttgtcgaggacacttttttggagatcgttaaggaaagtgtgttcctgaagtcaaaaatggggactcggaaaatcttctacgacaacattgcaagcatcgaccatgatgccaaaggcaggctgaacctgagcagcagtctagaaatctacctgaagtcatctgaccgtgtgcagctcaagcacgtgaacaaagggatggtggacctcgtcaccgggaagtataatgagtacatggagaacaagattaatgacaacgcggagaacgtcaccaatggcaccaatagcaacgtggatgagctgatgaaatacgcggatctctatgagcgcggcctcctgacccaggaagagtttgaacagaagaagaaagagttactttga

SEQ ID NO: 3007 - DNA, 678 bp, synthetic construct
  source 1..678: mol_type = other DNA
atgaaaattaatctgaagagagtcatcttgggaattattctcatcctcatctgcatctcctcagccagcatcatttccgcctacagtatcgattctatggaaatccagggcggatgcattagcacaggcagcggcctggaagacaagacttacgccaccatctacgtgggggaggaatacacgggagcggacgtcctgatacagatatattactcccgggacggtagccagttaaacccgggaaacaaggtcccaaaaacagtggactctctagggtgcatcgaggtgcccagtgcaaatgcatttaaatactacccagaccttgctgagatcaatctctacgatagcgatgggtatctgattgactcaagggacgtatccctgagcatccacagcggagagcaaaccttcggcgacttttatgggtcgtcctcctcaagcagttcctactcaagttcgtcctcaagcggcagctccagttcttcaggtgacggaagtacaactacctaccacagcggcacctcgaacagctatgtggggaactccaacacgggcaaattccatgctcccggctgtgatagcgttgataagatgaagcctagcaacaaggtgtatttcagcagtcgcgatgaggccataagccgaggttattccccctgtgggcggtgcagcccttga

SEQ ID NO: 3008 - DNA, 732 bp, synthetic construct
  source 1..732: mol_type = other DNA
atgagattgaagatcatcctcaagagcaagaagaataggctcaagattccttttaattataatcacatcgtctccgccataatctacaacaagattgccgatataaaatacgcggaggaactacacagcagcaacagctataagttcttcacatttagccagctcaatatccataagttcaagcgcatccactccggatttctcagccagaacggcaaaatagacttcctgatcagttccccggacgactacctgatcaagagtcttgtggagggcttcttgaacgatctgaccattaatttcatcggggaggacctcctgatcgagaaagtcgagctgctaccagtgcccgactttgaagaagagattaacgtaaaaacattaagccccattatctcaagaaccaagaaggaagtggacggcgaactgaaaatctgggatctggcaccaggggaccacttcttcaaaaacttagagaacactcttatctacaagtacttggagtttaatggactggagtccaatgataaaaacataaaaatcttctcagagatgcggaacgtgaagcggaagcgaatcattattgagaaaggggataaacaaacgtatcatagggcatacatgatggatcttattctcaagggggacaaagaactgctgcgcttcgcttatgacgccggcctgggtgaaaagtcgggactgggttttggcatggttaaggtgattaactga

SEQ ID NO: 3009 - DNA, 2160 bp, synthetic construct
  source 1..2160: mol_type = other DNA
atgatctctgacctcgtggatttcggcaagtggctggtcgagaacaacgaggacggtatcggatacatggtgaaggaggatgactaccttctaaagattacgtataataatgaaatcgacgatttcgtaatagatggtatctttgagaacgacaatgagattgttctgggtttctacgaaaagtctatctttaacgacatcctgccgactcctagaggctcaagcgaccagaacatcaccattgccaacaataccaacctcatgggattttcacctttcctgctgaacctggacagtgatttcctcgggcgaaagattaaaccagagaattatgataacgaaagtgattattataaagtcgggagcgagcggttcttgaaaaagaaggcagggggcaagttcaagctggaaaagacactggacaagttcacgcgatcccttgatgacaataagaataacaaacaatttaataacgacataattaccaaactatttgacaatcccaacgagctttttcttaagaacattccctcccagtacgaagacatctttatccaggaattttttaacaacctctcaaaggaggaatacatcaaaattataaacaagttctataaattcctggatatgaataagaacgacatcctggatagggtcataaagtttaagctggaagagaacgtgagctccagattcttcatagtgggcgtgtttggagactacagggacctgatcaacgacctgtgctttctgtactgcaagctgatcaagaccagaaacaagcacatagagaattatgacggggggatctgcagcatcccaaattgtaacaaccattcaatcacctacccgtccatccagttttatgctgccgacaaaaaattttacttcaactatagcaacaacattgaaaatagcagcctccggctctgtgatttatgcaatcggtacatgctctttgcgttcgaaaaactgaaagccaactttaagggcaacatcctggtgatcccaaagacttacgacggcgactactcggaatttcttgagatcatccaggaggataatgatttcgaagtcatcaatgagttactcgaggagaacagtaaaaaatttacatatgacttcctaatatatactccctccaatgctctgttgaaaatagagaagtatattgacaactatcaggctttcctgaccaaatttgacgacatcaatctctataactacggaaatctcaattatttgtacaacgaggtgctagtcaacgacgagagttccctcgatgaggaccgtatcattattaagatttcgaacctgttcgatttccaaatcattttcaaggagctgttctatgaagtggatgatgggcgccttaaatatcccaagatgaactatttctaccaaatctacaacaaggagctcaccggtgagaacggcatatttaacggctttagttcaaaaacagtgaacatattttccaagtataaagataatattttcagcttcatttacgaagcgaatttcgacgcactgaacaaaaacatgattaatacaattgtgttaaattccttaaccatctttcagaaaaattcgatcaagaagagcattcggttcgagattgttaaacgcctgaactactggttcatgttcaaaaaagagtttttgggagatacgatgcttctgaatgagaatgtgcttaagttgcgccagatattcggacaccctaatattactacgggcgaaaacaacaatgaaaagattgaggtagtcttcgacgacgtggagaaaaagcaggttctggatctgattaaggaggacaatgccatcaaatactacctgattgggcagctgatcgcatacatcgacgatttcaagtacagtagcggcaagaagagggaggttttcaccaattttatcacaaatgcccacaggaacaacatcaagaagctctttgccactgagatcctgcagaagaatgtgttctacatcaaccagatgaacaagaagggtaagttcctgttcaccatgctagaatctgattacgggtccctcttcaacgaggaagatctgagctacgaagattacatcctcttgttgtttaccggatattacacaacaaaattcttgaaaaaaaactacgtatacaatggcgacgaatga

SEQ ID NO: 3010 - DNA, 960 bp, synthetic construct
  source 1..960: mol_type = other DNA
atgaccgaaggaacccccgtcagaaactactaccagggaatctacctgacggaaacgataatgggcaacccaaacggggattttatagacaattccccacggaatgtggatggggcggtattcacgactgataagtgcattaaatacaacgtaaggaaatatatccacgataccctggagaacttcggtgagaaagaaaatatcgtgttcttcttcccccgccttatagactcaacaaatgaggaagatatgaagtttaaaactagggaccaggtgttcgaacacttcaaaaactttgaggagatcctcaaggtctcgcctgatgtgcggatgttcggtggcacatttagcgttgataacaacgctaagcagatctatgggcccatacaactgtcctacggcctggacattaatggagcacagatcatccgacatcaaattggcgccccattcgctacaagtgagggaagccagaaaactgtggggtctgagagcgttgtggacgacgcaattattgcctacgacatcacaatcaacccgaataattataaggacctccttctggaggacgatctcgaactctttaagaaagccctgtgggagggcaccaacctgcgcaagaccaccagtaaaaagacagactccaagctgctcatcctgatcaagtttaagaacgacagcgagaacgataaggtggatgccatcaatatgggggagttgaagcagctgatctccataaagggcggcaagtctaaaaagatggacgaaaatactatttgtttggactgcgaaaacctagtgaaaaaaattaagaagtatgagaagtacatcgagtgtatcgatatttattgcgatagtgacgacgtcgaattgaatagcctggagattgacggagagaacctaaaggacaccaacattaaagtcaacatctacgaacctctctcattacttagcgactga

SEQ ID NO: 3011 - DNA, 864 bp, synthetic construct
  source 1..864: mol_type = other DNA
atgaaaatcattgaggttgatatttggagttcctttggttgttttagcaaacacttctccaacacaggaggggtgttgactcatttaatcccgccaaagacaagcatcattggcatcatcggagccattctgggctacgatgtaaatgactatgaagataatgatgacgggaccaaaacgtataagattgagtccttgaacaatataaaggtctctatctatcccctgttcgagttcaagactaagcgggtgatatttaacctggtgagcgggaccaacctggacctggacattaaaaacattaatcaggacgtactcatctccccccgctataagttgttcatctcattcccttcagaacttgatgaggttgaggaactcttcctgaacagggtcaagaataataaaaccatctacaatctgtatatggggcggaacgaatttcccctgaatctagagtttgtcagggagatcaacgctgaaaagcacatatttagcaacgacaatagcgacgagttaaaatccatcaaggtgtacggctcactgaacagatcttccatcaaaagcctgaacctctcttacgaggataacgattccaaagtcgactctgatgcactcagtctcataagttcacttctgatttcgaacagcgccgacggtgtgcgacacctgaagagtttccatgagttcaccatcaaggactaccctatcaaacgcgagaacttcacagactttagctacagcccagtgtccttttacagtagcaagaagttcggagagtgcttcttctctaacctgcagcttaaggacggcgaaatcgaactagtgaatattggcgatgacaagtggctctcgctcatatga

SEQ ID NO: 3012 - DNA, 2826 bp, synthetic construct
  source 1..2826: mol_type = other DNA
gtggtgatcagccacctgaattttaatgaaaatgagagtgtcattgagatcaacagcgactatttcaaggtctacgctcataagaatgagctctttaatgagcacatcagcaagacgctgaacatcttcaagaccatcaaatccgagaacattctgatcaacttctatgactggttcaaggaccaggggtatatccatctcactttcgaggagttcaacttcctgatcgaggagtgtgtccgtttccacgacgtggggaagctgagcttcaacttccagttgaagcggctgaataagaacaaccctgccaagaagaaggagcagattaacgtgctcaagaaatttggcctggactctattctgaaccagtttgagggaaatcactccctgagcggcgccttgtctttcctctcaaaatactacgatgtgctcccaaaaaatgaactattctttcttatcctggcctatgttattataggacaccacacaaaccttaaagacattgtaagtcaggatgatttcttttataaggagttcgaagaaaaccaggcgcttagcactactttaaaattcttcgcactcttctttgggctcaaccagtccacaatcaaccagaagttttttcaggagatcaacgatatcggcttcgacttcctggagaacacgataaaccactacgatagctccttctcctttttctactcctacatttactctctgctgatcagcgccgactcactagccactagtgaatacaagaactcgaccgaccaaatcgattacagcaaattcaatcatagaatatcagataagctgttcgcccacatgtacaaaagcttctacaacgtgaagcataaccggaaccttctgaacgagacatttaacctgaatgacatctgcccggaggatattaacgtgctccgcaaggcgatgcttttggaaagctcagaaaccctgaataacgctctcatggacgatgataagaagatctttttcctgaatatgcccaccggcggcggcaaaacaaacaccagcatgaagctagcattggacatggtaaaaaatacagacgctaatcggattatttacgccatgcctttcatcaacattattgagcagaacttcgatgtcatctgtaagtcctttggtctgaacgaggaagaggggaatatccggcagatatattccgcatctgagaccatcttcaacaaaagcgacgaagagaccctagaaataatcctgagcgacgatttttttaattatccggtgatttgcacgacctttgtttccctgtttaaccccataataaagaataataaaaaatacaagtaccgtctgaacgcgctgtccaactcggtaattattcttgacgagatccaatcgctgccactgcgcaactgggtgagtttatactttatcattaacgagctgagcgaaaaatataatatctatttcctcatcatgtccgcaacgttgcccagtttcgacaagctgaaactcgaaaacattagggatgacgacaattttctgaactacaacaacgtgagcctgatcaacaaccccgagaagtattttaaccacgacttgttcagcagaaccaacatcaatggaggcatcaaaaaacttggaataaatgacgactgcagtatagactacttcctcgaaatcatcagagaaaatttttcccaggactataacaagggacttatcgtcctgaacaccattaagtcaagccgcttgatttatgataagttaaaggacttttctcaggagtacaacttcgatattgacttgctcaactccagtatcttgcctaataggcgaaagaatatcatccataaaatcaaccaggaggacctgtcaaactatatcctcatcagtacccagagtattgaagctggagtggacgtaagcttcgacttcgttattagggatttttcgatcctcgattcaatagagcaagtgcgaggcagatgcaataggtccagggaactcaacgacaagttccatgattctaacatcaaaggtaacgtctacttaattaatctcgaggatgataatagtaatctttataaatacatctacaaagatgtggaacttaagacacgcattaaggaaaccattaaccttttcaatgaagggtttgagctgaatgacgacctgaactaccagtacagtaacatattgacttattatgataatgttagcttagatataaatgacgtgcacgacagcatggaccagtcattcctacggaatgaccggcgcaacatcgtgttctggaataaaatgaagtattccaaaattcagaaaaagaaaggcattcacattatcctgaatgatctgaagcagtactctatctttattccactcgatattaagatctacgacgatagcttaaatctggacaagacaatagaggacatggatctgaacgagctgcgagagatttacgacgaatttgggaaacactttattttttcactgaacgagatcttgtttatgaaggagaatagtgatttcctcatcgaaggcgactatgtgatcggggaggaggtcctaaaccacttccaaacgatggtggccagagtcaaagatgactacaaccaaaagctgctggttgagaaggtcttctcatctatcctcagcaattttatcatgaatatctcctttaataattccgatcttgaggaacaaattaaggaactggataaagaatcctacttctacatcctcgagaagaacatgatcggtgactctgaggagcatttctattcggaagaatacggtttcaactttaagcccactataacaaatatactgtga

SEQ ID NO: 3013 - DNA, 507 bp, synthetic construct
  source 1..507: mol_type = other DNA
atgagcgactatatgaaaagcatcaacgggacccaaattaactactacttcatttgcaaaaccaagctttggctctttagccacaatatccagatggagcaggagtccgataacgtatcactgggaaagcagctccacgaaacatcctataagaaagaaaaggagttcctgatagacaatctaataaatgtcgacttcatcaagaacaaggaccccattgagatccatgaggtgaaaaagacccaatcgatggaaatatctcacgaataccagctgctctattacatgtactatttgaagaaagagaaggacatcagcaacacggtgggctacctgaattaccagaacatccggaagcagatcgaaattgagctgactgaggagaaagaagaggaactggagacagttttaaacgatattaagagtatcgtcgattccgatgtgccaagtccgaaaaagtcaaggatctgccgcaaatgtgcatatttcgagttttgctttgcctga

SEQ ID NO: 3014 - DNA, 969 bp, synthetic construct
  source 1..969: mol_type = other DNA
atgagcaaaaagaattattacctgttaagcgagggaatcctaaagcgaaaggagaacaccatatacttcgtgaacgaaaaggggagcaagcctcttcccattaacaagatatactcgatgtatgcctatggccaaataaccatttcctcacaggtgatcagtctgtttgccaaagaaggaatccccatccacttcttcaactactacggctactacaatggcagcttttatccgcgggaatccctgctgagtggcgaccttctcatcaagcaggcagagcacaatattgatttctcaaagagactgaagctagccaagctgttcgttgaaggggcggccaaaaacatcctgaaagtgctggcatattacaaaattgagaacaacattaagaacaccttaacagagttgaacgaatcttccaaaatcacagaagtcatgaatgtcgagggtcgaatccgtgcagagtattatcagtacttcgatgacatcctgccagatgagttcaaaatggaggggagatccagacagccccctacaaatatgatcaattcgctcattagctttggaaatagcatgatgtacgctagcgtcatcactgagctgtacaacacgcaactgaaccctactatctcttacttgcatgagcccgctgagcgcaggttctcactcgccctcgatctgagtgagatattcaagccaattatcgtagacagggttattttttacctcgtcaacaagaagatgataaccgaaaaggactttaatcaggaccttaactgctgtctcttgaacgataagggacgcgccacttttgtgaaggaatacaataagcggcttgagacgaccatcaagcataaagacctgggccggaaagtgtcctatcagaggttgatccgcctcgaagcgtataaactgaagaaacacgtgtttggtatgaaagagtacgacccattcgtgatttggtggtga

SEQ ID NO: 3015 - DNA, 267 bp, synthetic construct
  source 1..267: mol_type = other DNA
atgtacgtgattattgtgtacgacatcaaagtagagagggtcaacaaggtcaaatccttcctgcggcagcacctcttttggatacaaaatagcgtgttcgaaggagagcttacaaatagcgagtataaggccgtcacggacggcctgttgaacatcatcgaggaggacgaagatagcgttatcatctaccagctaatgatggaagagagtctgacccgcaacgtgctgggggttgaaaaggcatcagtggatgacgtgattctctga

SEQ ID NO: 3016 - DNA, 702 bp, synthetic construct
  source 1..702: mol_type = other DNA
atggacgagtggaaggtcggggacccttccgattggggagaccatgttggggtgccagacattccctatatgggctacatcaacgatgatggctatgaagaggactactccacattccctgaggaaaacgggggcagcaagcccaaaagcctgggctctccagaggaagatcacggcaagatattgttagtgaaggccaaggtatacctgaaatggggaaacctggacggtgccatgtcatgcatcaatcaggccatagacatcttcaagaacagcagacggatcggttactatgagaatagtcttcacgtgaaaggcatgatttacgagaaaatggagcaatatgccagagctctctttttttaccacaaggcattcaaagtcggagagtgtgtgagcaatgctttcgatgaccgaaataaactgattgatggagacaagatagacatcctgaaagagcagttcaaggactatcgcaccgcctacccctttggctcatctctgaagagggatgatttcattatctactgggacctcgcatggcggatcaacgaggatagttccgacacggaaaaactcgagctcgcgttggaggtgattgggttcgtcaagcgcatggcgccgtcgatcgaatttgtggggagggaaaaggaactgtacgaaaaccttgaaaaggagattctagagaagatcaacaaatga

SEQ ID NO: 3017 - DNA, 180 bp, synthetic construct
  source 1..180: mol_type = other DNA
atgggcgagtgtccgtactgtggtaaggacgtggacttcaccgaagtctgcccacactgcggggccgatctgtccgagttcgatgacaggtgtcccttctgcggagtactgataagccgggcggcactcatctgccctcgctgcgggagcgatgtgtacgaattttggtatggcgactga

SEQ ID NO: 3018 - DNA, 480 bp, synthetic construct
  source 1..480: mol_type = other DNA
atggatcgaaaggacatcatcatcataatactcgtgctcattatcatttcactgttggccctgggacttcataaccaccaggttacggaccaggggaccgacctataccggactgtgaaagtgtctcccagcttttcgctggatgtgccactgagtagcaacttaacaagggaaaacgtctccgaaaacatgtatattgtaaacgactaccaaaacgatattcagatcatcagtttcaatatgaagaatgcctctaaaatggacctgatcgaggacggctaccagtatctcaaaagagaggagtcatacaagttcggtgcagaggagatcattaagatatccaaccataccgtgtggcacaataaggatgatggcagctacattgccttcttttccccgaacaatacagaagacaatatcatgcttgtcactcacgacaacatcaccatggctcgcatcctgagcagcgcgcggtattga

SEQ ID NO: 3019 - DNA, 1206 bp, synthetic construct
  source 1..1206: mol_type = other DNA
atgacaagcgagattatgatcctgacaccaacggctgtggtgctcgccgcggactccgccgtgaccataagcgacataaagacttatgacggagccaacaaacttttctacctgagcaataaacctccaatgggagcattaatatacaatctcgccgacttcgtcgatattcccatcgaaaccatcattaaggagtttcgacgcaagattgatggcaaggaggatcttagcctgattgaaatcaaggatgagttcgagaaatatctgcaccagataatctccaagtcacggtctacgctcagtttccaggagcaattggattattttatcgaatttattcaggaagaattgtcttacgtcgatttcgacgaatttaaaatcggcctaaaagacgagcttagcgattttgatattggtctgctaggcgacttcaaggatgaggtacagtcacagatcgacttgtacgaggataagttcagtctggcccttcccgacgattgcaacggtctggatgaagaagacttcatatcggacctgaaaaagctcttcatctgcaatatgttcctgatgcccttcattggcatagcaatatccggcttcgagaaggatgaaatgttccctagtttcatccactttaagatcaattacttgtacgatgaggaatttcttctgagggacgtggaatttgggtcaatcggggatgaggaagttatcttaaaggccctggctcaagatgacgtcattaacaccttcctaaattccattgactcaaagaccgagagggcactcgaggatttttttatcgagttcaaaaattttctgtttaactatatcgaatactgcattaagagcaacgaggacattagtgaggagaacgaaaacttcctcctggagaacatcagcgacatggagttttctgacgaaaaggtgcggaatatctttattgggttcatcgagtgtctgaaagccaaacagaagaagccaatcctcgactccatttctgtgctgcccaaaggcgagctctccaacctggcggacagcctgatcgggatcacttcgctcagacgcaaaatcgaagacgaggtagagacagtcggaggaccgatcgacgtggctattatcaccaagggggacggcttcgtttggatcaaatgtcatgactccttcgataaggacctgaaccctcagttctttgacagtaactga

SEQ ID NO: 3020 - DNA, 177 bp, synthetic construct
  source 1..177: mol_type = other DNA
atgcactatctagaaaagtacaaactgaagtccttccggaggaaaccgaaggtctttcgcagaaagtacaaccccttcccagaggggttcgtggagaatttcgtgcgaaaaagctttggcgagatcctggattcaaagatggacaacagtaaccagctcagcaaggaagacaaatga

SEQ ID NO: 3021 - DNA, 333 bp, synthetic construct
  source 1..333: mol_type = other DNA
atgaacctatacaaggacatattctacctggcaggcttcatttgccatcagaaaccggagcggagcttccacatttcccactgccaactgccattctgtgccaggtgctgtggtatcatcatatcagtgatcgctagttttatcctcgcacagtttgtagccttccccatgaatgccctggcttttctgctctttgtccctatgattgtggatgggcttgtgcagaagtataccgactacgaaagcacaaacttccgcagattcatcacgggcttcctctttggattcgcgtatgtctatgttttctacatgtttgggctgaacgccttgtga

SEQ ID NO: 3022 - DNA, 681 bp, synthetic construct
  source 1..681: mol_type = other DNA
atggagtatgaaattcagggcggaaccttccctattgtagtctgcacactgcaagagggagagacaatgaagaacgagacgggcgcgatggcttttatgacttccggtatgaaaatggacaccaacacaggaggcggcctcctaaaagggctgggacgcgccttatctggggataccatcttcctgaactactttacggctcagagggatggcgagcaggtcggattctccgcctgtagtcccggccggatcatgcctataaggttggatgggaccaatacgatcatcggccaaaagaatgctttcctcgccgccgaagacagcgtggacattgacatccactttcgaaaaagtctcggcgcaggtctctttggaggagagggttttgtgctgcagaagttctccgggacaggagttgcattcctggagattgacggggaaattatcaagaaggaactggccccgggcgagaagctgctaatagatcccggccatctggccgccatggaggaatcggtgggctttgacatcgaacgggtcaagggcgcgaaaaacatccttttcggggagggtctcttcttctcaagacttacagggccagggaccgtgtggctgcagaccatgccaataagcagcttggctcgcgcacttgtgccctacctgccaaccactactgaatga

SEQ ID NO: 3023 - DNA, 252 bp, synthetic construct
  source 1..252: mol_type = other DNA
atgcggcgcattgacgagctgaccatagagatcgatcagacgagcttagagcttgagcaaaccaaaaaagaactgagcatcctattcaaggagctgaggtcctttaagaagaagattgagaacggcatcgaaatcgacagaaaggaatatgaagactgcgtgttcaacaataagctgttgcagatgaaacgaaggcggctgattacacacctcaaattcctcaacaaggagttttacgaaatcctctactga

SEQ ID NO: 3024 - DNA, 861 bp, synthetic construct
  source 1..861: mol_type = other DNA
gtgaagattttgaaaacttggattgagaaacttgacatcattctaagtatactgattgtgctggacatctcatttctcacagctagcttcctgttggatttgaacacaacctatatcaatttcatgcttctgttcgacaccacgttatgctggatcttaatcgtctccttcatctttaagctgctcaattcggatgacagaaaggcctatatgagggagaattatctggactttctggccagcatacccatggaccttgtgctgctccctttcagttcattgcatatcagcttgataaacatcgtgatcctcgttcggttcctaaggctgctgctgctctttaaggagtcctacaagtatgtcaagaagttcttcaaggccacctcctttgacaaagtcgtcgccctcttcatcgtgatcgtagtgggcagcacattcgcgcttgagtactttgatcccgcaatcccaaacctctactacagcctgtggttcgtatttcagaccattaccacagtggggttcggtgatgtgattccggaaagcccagtgggacagctgattgcgctgggcctgctgatggtgggggttctcatgttttcaatcttcactgcaagctttgcttacctctttaacgaaaaggtgttccgagaggaaaatgaggacttccacgaaaagataaacacggtccgcgagaatcttgccgaaaacaaggaacgcgtcgaggagatcagacaaagtactctgtccaccagcgaagagattgctgaagttaaagagaagctaaacaaatccgaggagaacatcaaaaacctggaagagcggatcgattacctgatagatatgattgagaaaaaagaatga

SEQ ID NO: 3025 - DNA, 579 bp, synthetic construct
  source 1..579: mol_type = other DNA
atggatttcaactttcaccggattgccaatgagatcgcaaagatcccagatgagaagatcaaagacttgtcgtgggaagatagggtcaaggagctcctgagcttcagacaatactataaccagtatcacgaatcctatggcaaggattacttggactttctggaaaaagccaataaggaaggggacctggagaaaaaggaggacctcatttacttctttaaaaaggagacgctaacaaaggacattaatctggacgggctgaactatctgtttgtgaacatcttcctgaaatatggttttgaatacctcgactacaacgataccatcaacaatctaaaggacaaatacgatctgaacttcaagcatgactggatcagtctccttagcaaggaggacctgtccctgttcgagtctataaatctcctgaattatattcagcgcagcgactactgggactacgagcacatgcccttgtcatacgctatattcgatggaaccatcgataacatcctgaagggcatggaaaacaatctggacgaggacaacctcgaacttcttgatgtgttattaaaaaaatga

SEQ ID NO: 3026 - DNA, 1413 bp, synthetic construct
  source 1..1413: mol_type = other DNA
atggctgtgtataaatgtagcgtgtgcggatacgaatatgacgaagagaaagagggaaagcctttcagcgagttggaacgttgtcctgtttgcaagcagccggccagtgtgtttgaaaaaattagtgataattcaaccgaatccgactctaactctaacgaaatctcatctaataacgaaaccgccagtgagctgtcttacccaaccgaaacgtcacggacagacagctctattgctcacatgtccgacatacataagatggctgtggaggggacctccatcattgacgcgatgtccacacggttgccaatgcccagctgggatgacattctaataatggcgaaccagttgaacccctttcccctggaagagcacgctgatgtgagtacgactacagtcatcggcaagaatgccctgaaacccatggttctcgaaagccccatctacatctcccatatgtccttcggggccctctcctacgagacgaaggtggctcttgcaaagggttccgccatggcaaagacggcgatgtgcagcggcgagggaggcatcctgccagacgagatggccaacagctacaaatatattttcgagtatgtgcccaaccactatagcctgactaaagagaacctgatgaactcggatgcaatcgagatcaaaatcggtcagggcacaaagcctggtatgggaggccaccttcccgccgagaagatcactctcgagatagccgagctgagggggaagcctatgggggaagacgtgatcagcccgtccctatatggggagatcaaatcaaaggaagacctcaaagaccttgtaagtcatttacggaaagagtcagaaggcagacctattggcgtaaagatcgctgccggaaggatcgaggaagacctggagttcattagctacgcagagcccgacttcattacaatcgacggccgcggaggcgctactggtgcaagcccaaggcttatacgcgatgcgacatcggttccgaccatctacgccctggccagggctcgcaagtatctcgatgagaataatctggacattgatctggtgataacaggaggcctgcgagtctccagcgacttcgccaaggccctctccctgggggccgatgctatcgcgattgcaaccggggcactgattgccgccggatgtcagcaataccggatctgcggcagtggcaattgcccagtcgggatagcaactcaggacgaggccctcagaaaaagactcgatatggataaggcttcgaagagagtctttaactacctgaatgtcagtaatgaggagttaaagacctttgcacgaatcaccggtcacgacgacgtgcatgatctgtctgtggacaacttggccaccttcaacagcgaaatctcagattacaccgatattcgccacgtctga

SEQ ID NO: 3027 - DNA, 3894 bp, synthetic construct
  source 1..3894: mol_type = other DNA
atgggctttaagagacttaaaagacttttttcaagcgacaacgataatgaaatggagaagaatgaagaaaaaaataaatccggcgaagaaaccttctatgaggaaagcgatgagaaggctttttatacagaatacgatgatagtggctttattttagacaataactcggacgattctttcaacaatggttctgacgatgacctgtcgctgaatgatggtctgaaggaggacctgaatggtagcgacgacaatttatctctgaacaacggtttcgaggaggatagcttcggttctgacgatgatctgaccctgaacaaccagccgtcctcaaacagaaacttcaattatctcaataatctaatacatagccaccagaacgaaatcaacctggactcagacatcgtcttcgacagccagatggacaacacctaccttgaaggaatcaacctggatatggataatctgacaatcgacggcaatgggcgtacaatcgacgctcagaagaaaagccgcatctttaacgttttaggagagaacatcagattcaccaacatcaccttcaaaaacgcctacagcaacgaggacggcggggccatcagcattggcaattacagctctgtgtatttcgaaaactgccacttcatttccaatgacgctggagagaacgatgggggcgccataagtattggagagaactccatctgtaccattaaggattcggttttcaagcagaacaaggccgattccgggggcgccatcgtgaacgaggggacgctgaagatcatgagttccaacttcgagtataactcctcccaagtctttggcggggccatctacacccatcacagtaaggtggagattgcctatagcgtcttcaaaaacaatatctcctctagcggggggggaatatacgtgctctttgactgtgacatgattatcgaagagtccctttttattgataacgctagcatgtctgaggggggcgcgatggccaatgagtacggcggcaagatcaggatacacgaatccctattccgcaacaaccatagcctgattggcggcgccctctgcaataagggctccccagtggatgatggtaagaatttggtgagtgtatctgactccaagttcgaatacaactctagtatcgagaataatgacacaatctatagcactggcgtgctgaagctcgagggcaacaccttcaacgaaaatgaccgtattcttgccagcaataatcctgagatcatcaactccaaatacgtggaagccactgaagacattattgacctcgcaaaaagtatcgattattcgattgcaggggaaagcaacctctttgaattgctggattcagacattcgaaatttcaattatcttgagaatctgatccgatcgtccggtggagagattatcttggattcagacatcatcttaggtgatgacgaggactacactgacggaattaggctgtcaaatgagaacctgagaatcgatgggaacggatattcgattgacgcgaaaagtaggtctaggatcttcagtattagccaatgcaatatcacttttgaaaacctccggtttaagaacgcttattccgaaggcaatggcggagccatctactctgtaaacagttttctcaccttcaagtcttgctctttcgagaataactccagcgacaatggaggcggaatcagtacggaaaacagcaccaacgagtttaagaccttgagcaccgaaaacaaccgtaacgagttcaagaccctgctgtttgaggattgcagctttgaaaacaactccagcaggagtggaggagccatctccacagagaacaacgatctaattcttaaaacgtgcctctttgatcggaacgaatctaacctgggtgcagccatcatctgccagaacggcaaggtccggctcgacaactgcgggttcaaggagaacattgccagcgacggagctgccatctactattcttcacttcccataggcacttacataaacgacgattcagtcaattttctggagatcaatgactccgtgttcgaggctaaccggctgaccggcaccaatttgactgtaagcattatagactgtgactgttcaatcagtttcaactcactgtccttcaaggacaacaagttcgattacggggacctcatcaatcaaaagtacttggagaacaaaaatagcataatcaaatcctccaaattcatagggaacggtggaggcataaccgcttcgaacctgaaggtcatctcgtgtgaatttatcgacaatcgctccaacgcattcagcagccaggagtacttctatgatgggtcaagcgagattgaggactgtacgtttaaaaacaaccattgtgccatctcaagccacgagagcagcctcaagattaaagacgcacggttctacggaaatgactcggcaataatgaatcgcggcaaggcgtacatcaatgactcccgctttagagataactctatggcaatcgagaactctgccaattcatacatgttcgcctcaaatctgaacctcctggataatgcttccggggagtcccacgatatgataaatcagggtcacttgagcgtgatcgatagcgacttcatcaattgcaataagactctgaacctgatttgtcaagaggacaacgaggatgcggttctggatattgaaggctgcagcttcaagacagatagcaagcggccaatctccataaatggcggttcatcgagcattctatattcccgctttgaattggaccagtccaaaattgctatcttcaacgattcaaaactgaacatcgatgcactcagcttcaaggattacgagggcaatgacctggagggcaaactgatatacaacaacgactaccttaagagcaagacacgcgacatcctcgataagatcgacagtagcgagagtgccattacgaaatacgcctacgagacactgcccgcggactggaaaggctttgactacctgataaacctaattaaagaatccaacggggaagtgaagctcgattgcgatatccttattaatgacattgaggaagactactacggcgggggaatcgagctctttgaagacggcctgacaatagacggccagggccacacaatcgacgccgataatctcagccggattttctatgtggtgggcaacgacatcgtcctaaagaatatcaagttcatcaacggattcgagcccttggaccagctgttcaaccgaggggccggagctatctatattgttcatggggcatccttaaaaatcgtgaattgtgagttttaccagaacagtagcaagagtttcgcaggtgtaatcgccaacaagggggacctgacggtcattgattccatctttaggaataacttttcaaaccgggcaggagcattcctcgaatcaaggggggagtcccacttcatcggctgcaggtttgagggaaacaatgctaaaagcgctgggggcgccatagcggtgagtcagaagggcaagacaatcgtggaaaaaagttcctttaaggaaaatgagctgagcctgaaaggaagttcttcagggggggccatttccaactcaggggagctcgacgtgattgatagtgagtttattaaaaataaaagcgcagcttcaggaggcgccataaattccagctcgcacgctatcttgagtgttcgaaaaagtgtgttcattgagaacgcctctttccttggaggtgcaatcaacgcggacagatatggtgatttgattgtgatggatagctgctttaaggccaatgcggctgcttatagcagtggagccatttatgacagcactgatgagtctggggttcatggatgtgaatttctgactgaaagcgacaaggtcaagtacgcgctggaggactga

SEQ ID NO: 3028 - DNA, 1527 bp, synthetic construct
  source 1..1527: mol_type = other DNA
atggaggaggaatacctgactgtgacgaaactgaattaccacatcaaacggttggtgaactccgattcatcgcttaaaaacgtgtatgttcgcggtgagctctcgaattttaaacgctatcccagcggccacctgtacttcacccttaaggaccaaaacagtgaaatcggcgggatcatgttcaaggggcctgcaagccggctaaagtttgagcctaaaaacggcatgaaagtgctcatcaacggctacgtggacgtctaccccaagcagggaaactataagatctatgcgcagaagctgacagaggatggaatcggcgatctgtatatcgcctatgaacagcttaaaagaaaactctctgcgctgggctggttcgatgacgaacacaaacaggaaatccctaagtttcccaaaagggtcggtgtggtgacagcttcaaccggagctgccatcagagatatcgtcataaccattaagcgaagatggccattatgcgagatcattctctttccttcattggttcaggggaatatggcgccaaaaaacattatcaagcagatcatattggccgacaatgagtttgatctcgacaccctgatcataggacgcggggggggaagcatagaggacttgtgggccttcaatgacgagaccctggcaaaggtgatcttcttcagcaaaacgccaatcatcagtgctgtaggccatgagatagattggacaatcagcgactacgttgccgacctgcgcgcagccacacccactgccgctgccgagcttgcagtgcctgacattaacgagatcgagagcaacattaagaatctggatgacaggctaaacaaggtgattgacaagcagttcaatgaaaataaggatagcttcgaaaagctagtcaaccggaacctcttcaaaaaccccgacctgctctacaacaagaagatcatgtacctggatagtgctaagtcccgtctggccgtctgttccaagaacatgatttatgacaataagattcgggtgtccaatgtcaaaagttctcttatattcaagaatccaaaaatgctctttgagtcaaagtcaaacaagtacaatcagctgaaatataacctgaactccagcgggaaaatcttaattggcaaaaaggaaagcaaattggacaagtacaggaatagttttgtcttcaagagccccaacaggctgttcgaatccaaggccaataggtactttaaggtgcgaactaaccttgaatacagttcgataaacctgctgagagacaagaaagacaatctgaatgagattaaaaaatccaaccccattaagaacccgcaatccattctcgagccgaacgagatccgcctggataagtatattgacaagttggatgtgctgaacccactcaacaccttaaagcgaggttacacggtatctcgggttgatggaaaggtggtttccaaggcaaaggatgtcaaaaaggacgacattctggaggtggaatttgacgatggcaatgtaagcaccaaagtgctctga

SEQ ID NO: 3029 - DNA, 252 bp, synthetic construct
  source 1..252: mol_type = other DNA
atggagaacatcgagtacgtggaaagcaatatcgaaaatctctccttcgaggagagtctggctgaactggaacggatcgtaaacaggttggaaaccggcgaggtgcccctggacgacgcgattgatgagttcaataaggcaatgaagctagttaaaatctgcgacgagaaactcaacagcgccgaagaggccattgccaagatagtcaacgagaacaaggaagtggtggattttgaagtcgaggaggagtga

SEQ ID NO: 3030 - DNA, 735 bp, synthetic construct
  source 1..735: mol_type = other DNA
atggtgaaatttgagatcaaatcccatgacgggcccggacgatacggcaagctggatggtatggagagccccgttatcctgaaggaatctgatttgaatatggcgccagatgagtcgtcagcctatgacatcgagagggaaatcgccgaatggtccgttaacgaaaccttaaagctcgcccgggaatatgaggacaaggacatcgccgtgattcacgggagcaaatacatagatctccgcgtcaaatgcctgaaggagctggaagagatgggctattccggcttcatcatcgccaatgcagatgaccttttgctgcatccccgcgacctggtggacttgatcgtagagctgagacggaacatgaaatcaagcagtatacttattttcccacacgcggaggcacaattcattcctctcctggcctatatgggaatcgacgcattctttgatgacattggcgagtactacagctacctcaacgtgctaatgagccctaccaagaactacgacctgaaggtctatgaactctatgatctaactcgcgaagagctggaggaatataacaagaatacaattgactttgtgttaagggaagtccgggagcacatgaaaaacgggagcctcaggaatcttgtggaagagagatccgctacgagtccgcagtacgcttctgctctgcgtatactggataaggagtacgccgactacctgctcgagtacagtcagctgtactga

SEQ ID NO: 3031 - DNA, 447 bp, synthetic construct
  source 1..447: mol_type = other DNA
atggttgataaggacctggtggtgccaaggtatctgaaccagttgatggatatcgtcaaaagctacgaaatgtacattcggtcgaacatcaaagacctggacatcaccatgggggaggtacccatactactggcaatttatgacgatgagggactcaatcagatagacctggtcaagaagttccacgtgactgaagccaatatttccaagacgacaaaacatctgttacaaaaaggcttcattatcaaggagatcgacagtgacaacaacactaagaaacttctctatgtgacagaatttggcgaggagatctgcaaggagctgattgaattttacgaggtgtggaagaacgagataatctccgatgtgccgaatgagaacctcagcatctttagccaggtcttggataccttcaccaacaattcacagaaatacttcgaaaagtga

SEQ ID NO: 3032 - DNA, 1077 bp, synthetic construct
  source 1..1077: mol_type = other DNA
atgtcggtgctggatcgacttaaatccctaatcgatggggccaaggaggatatcgacagtagtttaacgaaggaggccgagtctattaaggaagcggctgatagcatgcagacaagttcagaggaggaaatcgagaatataagcgattctgagactaattctgacgaggaaacctcaaaagttgaagacgccgaggaggaggtaatcattcctatccatgcagaagaggccgaggacgctcctgaggaggaggcggaagaggtgccagaggaggctgaagaggcccccgaggaagtggaggaagccccggtggaggaggctgaagaggagactgacgaggaagtttccgtggaagagattaccgaagaggcccctgaagaagaagccatagaagaggtgcccgaagaggaagtgtcgttggagacggaggaaattattgaggagccctccgaggaagacagcaccgaggacgaagagccttccgaagaggaagcctcagaagaaaacgaagagagcgacaacatgacactgctgaaagagaatgatatatatagcatggatgacatcgataaggaatttacccagaagttcatcgatgcgggcattgaaactgtggaccactgcttccagtgcggcacatgcggcggtggatgtccctccgggagaaggactccgtaccgggtccggcagatcgtaagaaagtgtctgctcggactcagggaggaggtcgtctccgacccagcactgtggatgtgcaccacctgctacacgtgccaggaacgctgtccccgcagtgtcaagatagtcgacatcattaagatggcccgtaacgaagcagctaaagcgggatatatggccgacgcacacaaagcaacaggcagcttcgtgatcaaattcgggcacggggtgccaatcaacgacaagaccaaggagctccggaaggctattggacttgacgagctgcccccaacagtgcatagctacccagatgctttggaggaggttcaaaagatctgtgcagcctgcgagtttgataaactgatcggctttaacatggagaccggtgagctcgaatga

SEQ ID NO: 3033 - DNA, 885 bp, synthetic construct
  source 1..885: mol_type = other DNA
atggagatcgcatatttcctgggttgtataatgaacaaccggtatccagggatcgagaaagcaactaggatactcttcgataagctggacatcgaattgaaagacatggagggcgcgtcctgctgtcctgcccccggtgtgttcggaagctttgaccagaccacctgggccacgattgctgcgcgcaaccttgccattgcagaggagatgggcgccgacatcatgacagaatgtaatggatgtttcggctcattacgggagtgcgaccacctcttgaaagagaaccccgccaagaaggatgaaattaatgctatcttggccgagacgactgacaagcaatacaagggagagaccaaggtgcgacactttgcagagatactgtacaacgatgtcgggcttgacaaactgagcgaaatgttcaccaaggacctcgggattaatgtagctgtgcattacggctgccacttcctaaagcccaccgccgaagtggggattgaagagtccgccgaaaacccaaccatcctggatgaacttgtcgagatcacaggcgctaagtcggtggactacaaaaataagatgatgtgctgcggtgctgggggaggcctacgcgccagagacattgacgtgacactgagctatacaaaagaaaaactcgatgccatggctgaggcgggggtagatgccatcgtggaagtttgcccattctgccatctccagtttgacgtcggccagactgaggtgaacgcaaagtacggaacggatttcgcctttccggttatgcacttagctcagctgtacggactggccatgggcctgagtgcggaggaactgacctttgatgcacagctcatcgatgccgctcctgtcctggagaagctggcatga

SEQ ID NO: 3034 - DNA, 270 bp, synthetic construct
  source 1..270: mol_type = other DNA
atgttcatcgcaatcttgggagggatatttagattcaaggatcttcccgaagagtacggcagctacgtgcagtttaaagccgctattgaaggccgcgatgaaatcaaggacaacgacgagatagccattctggacattacaggcaccgggagccaccatgtactattcctggaccggtataataacatcaatgagatcaagaaagaactcagggaggcggatgccaaagtgaacgtcaccacgctgaagatcctggagggacacctctga

SEQ ID NO: 3035 - DNA, 528 bp, synthetic construct
  source 1..528: mol_type = other DNA
atgagcgatttgcctatagatcaaagctggttagtgatcgctaaccttagcaatgacctgcacaagcggggaatccaaattcccaaacagatcaacagtgatctcgggctcgtaaagtcccagattggcttttacaagaaagacccaacccatccagacatgatcaacgagatggcacgcgccgagatgtccttgaatcagatacagggcatcctgctgagtttcgctgagaatattggggaagactactataatgaatggctggacaagctaaacagagcgaacctgggcgagaagatctacgagacgcccagcacccagtccaaattcctgatcaacgcccctcccggattttcgtatgccaagatgactctgaaaaagccactggccgaggacagggtgcaggaaatcgccgaatactacggtctgattcttgagtttgactcagatgtcacaatagcactctatggggataaacccgacattcaggcggcactcaaggagatggccccgttcttctcagaatga

SEQ ID NO: 3036 - DNA, 717 bp, synthetic construct
  source 1..717: mol_type = other DNA
atgaaaattctggccattagtgatatacacgggaaaaggtccgaaaacctgatcaattacctaaaaaaggaagacatttcgttagtgctgattgcaggagacatcacagactttaaacttgaagggtacgatgacccgctggacttcgtcaagcccttcattgacgaactggtcgaggaggcggatgtagatgtgtttgctattccaggtaactgcgaccccgccggaatatgtaacgctatcaaggagagcgggccggatgagaagcctgcattctgtttgcacaatcaactcatcgcctatgaaaatgtggtgataatggggtacggcggatctaaccccactccattcaacacgcctggggaaatcgatgacgataagatctatctccacgtgtacgagctcctggccgagtacgactatattggcaacgattccatcccccgggtaaccatcttgctgacccacgcacctccttatgacaccaaggccgacactatcgagagtggcgctcacgtgggctcacagggcgtgaaaaagcccattcatgagtttcagccaaacatcaacatctgcggacacgttcatgaagcctgcagcatcgataaggttggcaatacaaccattgctaacccaggtatcctggaagagaatcatgccgtccttatagaggtcaacgaggacgcgagctacaatgtggagatcgtggagctctga

SEQ ID NO: 3037 - DNA, 1152 bp, synthetic construct
  source 1..1152: mol_type = other DNA
atgagctatcaggaaaacaatgctagtgacaaatctctccaggataaagacatgaaagcgaagcagcgccaggacaggatcgtgaagaccagcattataggaattgtggtcaacctaatccttgtggccttcaaggccacaatcggcattctcgtaaattccattgctatcacgctggatgccgtaaacaacttgactgatgccctgtcctccattatcacgatcattggggccaagcttgccggcagggccccagataaggagcacccttacgggtacggccgtattgaatactttgcctctgtaatcattgcagctatcgttctttgggcgggaatcaccgcactgatggaaagttggccaaagatctttaaccccgatgtgacaagctataccacagtgtcactggtcatcgtcgccgtggcagttgctgtcaaattcatactggggcgctacgttaagaacgtgggcgaggagatcaactcacaggcactggttgcctcgggcagcgacgcgttcttcgatgccatcctgtcgttctccactctgattgcggctttagtctccatcttcttccacatctctctcgaagggatcttgggagtgatcatttccatcgtgatcattaaagcaagtatcgatatgctaaaggaaactgtggacagcatgatcggagaacgggtggacagcaagctgagtcgggatataaaggaggctatttgtgagtttcctcaagtctacggagcatacggcctgagcctgcataactatggtcccgacagcatggagggttctgtgcacattgaagtggacgacagcctcacagccctggagatacataatttgacccgactcatttcaatgaaaatcttcaatgagttttccataatattgaccgtcgggatctacgctagaaacgacgacttcaaggatatcagaaatgacctttatgagatcaccagcaaatatgacgaggtcattgaaatacacggctttctggcctacccggaagagaaactgatcacctttgacataattgtggactttgatgccgaccgggaggaggtgaaagataagattttagatgagatcaagtcactccaccccgatttcacgtattgcatgatcgatgactacgacctcagtgactga

SEQ ID NO: 3038 - DNA, 915 bp, synthetic construct
  source 1..915: mol_type = other DNA
atgattatcgttcgcggttctgtgaacaggaaagagtacaccagccggttctcaaagggcatcctctcccgatcactgattcggagcgaactgagcccagataaggcatatgaatttgcctcgcgaatcgaggaggatctgaaaaacaagggcgtcactgaaatcacgacagatgagattgccgatatcgtggtgaaactccttgacgaggaggaagagaaaagtgtctccgaacggtacctcaattggagaaaggtccgtgaagctaaagatcctctaatcatcttgattggcggggcatctggagtgggcacctcctcaatggcgttcgagatatccaacaggctggggattaagaccatgataagcaccgacatgatccgcgaagtcatgcgaaagattgtaagtgaggaccttagccccgtgatccacgagtccagttttttagcctatagatccatgaaagtggcgccacccccagagttcgacttcgtactggctggttttaaagaccaggtggccactgtaagcgtcggggtggaggctgttatcgaaagggcactcaaggagggcatcagtattatcatcgagggagtgcacatagttccgggatttatccgcaaggaactgatggaaaaggataacattgtcatgttcacactgaccctcagcgacgaggagatgcacaagaacagattctactcgcggtgcggggacatctggaataacaggcctctggaaaagtatatggggaactttgaggccatccgcaagaccaatgcctacctggaagaccaggccagaaaggagggcactcccataatcgacaatattgatgtgataacaacggtggacttcattattgagacattgacggagacctacggaggcatgaaacatgtgcggaaagactga

SEQ ID NO: 3039 - DNA, 369 bp, synthetic construct
  source 1..369: mol_type = other DNA
atgagtaaagatgtgctgacagtggagctcgatgaagctaccgtcttcgcattcgagaaactgatgaaacataagataagcgccatgcccgtggtcgatgaagacggcaagatggtggggattgtcactgcaaccgacctcggccacaacctaattctggacaagtaccagtatggtacgaaggtaaaggatgtgatggtgaccgatgttgcgtacgtatcatctgactgcacaatcaaggaagccatttccgtgatgtttgagaaagccccaggagacagcatcatcaaccagctgccggtcttggacaatggcgagctggttggaatcatctccgacggggacataattaaaatccttaaggagtga

SEQ ID NO: 3040 - DNA, 2028 bp, synthetic construct
  source 1..2028: mol_type = other DNA
gtgctcctgatgaggaagaagatccttttcctaactttgatgatactcatctgctttactttgaacagcgtttgtgctcagagcctggataatatcaactacgctaatgatggatttgacagtgatgagatgatcaattgcgacttgcacaaggattcatcgcagaagtccctgaaatcaaatgctctctccaacaagaaaaccaccaatacggtgaagctgaccgatatgaaaaaggctgaaagcaatgatgtgaagcagacaggcgctgcaaaagccagcaatactaagagcacaagcaaaagcacaacgaaaacaaatgcgacaaaaagcaatactaccaagagtaccgccaccaagaccaccgcaaattcgagcagcacgaagaaggccacgcagaacacaaccaccataaacacccagacgctggccaaatcttcaagcagttacatggcctatgttgagaagaacgctaagctccaggaaccaattacgatcagcaagaagaaatacaagtctccggagtacttgtatctggtttctaaggctgtaagcaatatttccaaaaccaaggtggagatcaaagacaagctcatcacaaactactccaataccgactgcaagtcagttaacggcaccattaataagactgaatacgtacaggtcgcgaagaaaacagttagcttcatcgagaagaatcaccgggctcctaattggattgcctcatctaaaggcaacatcccacggaaccagctcattctggtctttagcaagtgcctggaccagtataacaaaagcggcaaactgcccagctccattaagctcaatgacttggacctgaacaaaatgaagcagaagattgacagctccaagaaggtcaacagtaccagcactaagaagaccaacacaagcagtactaagacaaacagtaccagtgccaagaaaaccaacacaacctcgaccaaaaagaccaatcccactgccacaagcacgaacaataacaaatccctcgtcgagtccacgttagattcaataaaatctatcctgaacaatatagagaataaactgaatcccaccaacaaggtgctgtctacaaccggcacgaagaagaacacagtgaccgtgaactcttccaaggtcaatgtgcaaattagcagttcttcaacggtcaatgtgaaaatcagcgcgaaagacaatacaaatagtggaaagaacacaaattctgggtcggccaaaaaaaccaacactacaagcacaaagaagaccaacactacctcgacaaaaaagatagatacaaacagtacaaagaagactaacactacgtccaccaaaaacaacacctcgtccgcaaagaaaactaacactacgtccactaaaaacaacacaagctccgcaaagaaaactaacactacgtcaactaagaacaacaccagcagtgccaagaaggtcaacacatccagttccaagaccaacaccagtgctaaaaacaacacctccactactgccaaaagttcttcaaactccaaatacctgtcgacgtctgtcctgaacgacaaataccttggcgaatctctaaaaaagtatctggccgtgggtaagaattgccaggtaaccaacaaggccattaaaaccctcgccaacactcttacctctaaacttaagtccgactataagaagggcgagaagatcttcaattgggtgcgagacaatatcggatacgaaaagtaccgcaacaccaaaaaaggtgcactaaagaccctgcaaacccgcggagggaactgtgtggatcatgcccacctgatcgtggcattatccagggcagcaggacttcctgccagatacgtgaatgccaacaactgtaagttctcttcagggtatgtgtcagggcatgtgtgggctcaagtcctggtgggcaatacatgggtggtcgcggacgcgacatccaatagaaataaatttggtgttgtaaagaactggaatgtgaacagctataaactcgtggggaagtactcctcaatctccttctga

SEQ ID NO: 3041 - DNA, 1674 bp, synthetic construct
  source 1..1674: mol_type = other DNA
atgttttatgagaagaatttgatcaagaaaaatcctctgagagtggatatcaggttcggtctcgtctacccaaacgtatacaaaactgctatgagctctctgggctatcagatcctttacaattacgttaatcttcgggaaaacacatactgcgagagaatcatctacccctcgtaccgcagtctcgagaccaacagccccctgggggacttcaacatcgtatcattctccctgcagtatgagcaggactatttcaacattctggagatcctccgtgacgcaaacattcctctgaggcgggcggaccggaccttagaagacccattgataatcgccggcggcccatgcgccacggccaacccgcttcctctgtctgacttcatagacatttttgtggtgggggaagcggaagctgtcttgaacgatctaatcgacaactataacgagaataaagacaaatttacaaataaaaacgaatttctctccacgttcctggacattaagggcctatatatatctgaatttaataacaaaaccgacattgccttgcttgatgagatgtctgatgcctaccacataacctgccctataattaccgagaccgacgataaggaccttatcccggtctttagtaactcaattctactgaatgtgtccagggcctgcacacgcggatgccgattctgcatgtccagctacctctaccgaccactgagggagacagatctgcagcagctgttcgatattgcagaagaagcccgtcaaaacactggactgaataagatcagcctcataggtgcagcggtgagtgactactccaaggtcaatgagctcactgaagggctcaaggatatgggttttcaggtgtcgacacccagtatgagaatcgaatcaatcacccgagaaacactcgtatcgctccgcgagagcggccttaagaccctcaccatcgctcccgaatccatctaccacctgcgcaaaagaatcaataaggacatctcagatgatgacgtgttccgggtgatcaaagacgccgtggacttaggtttcaatctcaaactgtattttctgatcggcctgccctacgaggatgaggacgacattaaagagctggcatgcctgatgaagcagattgactccatgaagtacttgatcgactcaaatctgaacgagtccattaaaaaggaggaagttctgactaaacataagagtaaatcctctggaaaaaaaagcaagtccaagcaacggaaaaaggcccgggtgagtatcaagttcagcgtcaaccctgtgattcccaagccgcacacgccccttcaatgggaaggctacgacatgaagagaatcaagtcaaagataaaatatctgaagaagaacttaaagggcttggacattaagtttgacagcggaaagatgggactcattcagtacgtcctatcctgtggggatagggatatcggcgatctgctggaagagagcctgaatcgcaaaatcagcattaaggagtggaaggaaaacgctccaagctatgagattggggataacctgccctgggattgtatcaacgttagtgtgagcaaggagttcttggagtctgagtatgagaagatgaaaagcggagagcagactccatggtgtgaggatggctattgttacgggtgtggggcttgcaactga

SEQ ID NO: 3042 - DNA, 1116 bp, synthetic construct
  source 1..1116: mol_type = other DNA
atgttaaacccggctaaaagagtggaagccatagagctgagtcagattcggaagatgttcgaggtgaccaatgagaatgccatcaatctgggaatcggcgagcctgacttcaacgtgcccgaaaacattcgcgaggcgatgaagaagtcaatcgatgatgggttcaccaaatacacttccaacaaaggcatcatcgagcttcgcgaatccattgttgaaaagctcagtaaagacaataacatcaagacagattctgagaacataatcgtgaccaccggggcaagcgaggcactctactgctgtgctcaggccctatttgagaagggagacaacgtgctggtgccaaaccccggctttctctcctactactcggttgtgaatctggcggaggccaatattgtagaagtcacaactccgatggaaaatgagttcaagatgaaggttgaggatgtgcaggaaaaactcgacaagaataccaaggctctgattataaactctccatccaaccccaccggggcggtcatggataaagaggatgtcaagggcattgccgacttggcaacagaccatgacttctatatcatcagcgatgagatctacgaaaagatcatctttggccggaagaactacagtcctgctgagtattgcgacaatgtaatcacccttaacggttttagcaaatcgtacgctatgacgggcctgaggataggatatatggccgccaacgaggagatcacggaaaacctccttaaggtccaccaatactgcgtggccaatgcaacgtcaattgcccagatgggagctctggaagccctaacagggcctcaggacagcgtagaaatgatggctaatgagttttcacgtcgacgggacttgatagtctccagcttgaatgatatgggttatccaactgtgaactgtgaaggggccttttatgtcttccctaaagtggaaaggcccatggacttcgtgaaaaaggcggccgaggccggcgtcattagtgttcccggtgcaccattcggcagcctgggagagaaccacgtgagaatgagctacgccaactcctacgagaacattgaaaaagcaatggacatcctgagggatctggagtattga

SEQ ID NO: 3043 - DNA, 915 bp, synthetic construct
  source 1..915: mol_type = other DNA
atgaatagagaggaacgagaccgcataggaactcgtgcgtccgcagtggccattatcggaaacatcctcctcactgtacttaacatctcagtggggctgatgagcggaagttacgctctgatctccgagggggctcacacaatttccgatatcgcgacatctgtcattgcatacgtgggattcaagatagggagccggcccgccgacaaagagcatccactgggccacggcagagcagaagccatctcgggccttatcatcgtggtcttcctgtcgatcgtcgccattgaggtcatccaaggcgctttccataagctcttctttggcggggctttggaagtgccagatcccatagccgtggtcatggcctttgtcggtattctggttaacctcttcatgagcagctacatcatccgcctgggcaaaaaggctaggagcccggcgattgtagccgatggaaagcaccagagggtcgacatctttgcctcactggcaatcttcattggaattatggtgtcccagtacggctaccctatgctagacccaataatcggtatcttcattggggcattgattgctaggacggccgtgattgtagccatagacaacctaaacaacattatgggtaaattgccttccgatgagctgatcaaggaaatacgcgacgtggccaattcagttaccgatgtctgtagtgcccatgacatcaaggtgaattattttggcagctatgcgaccgtggccctccatgtggagctgccgcctgacatgagcctgcgggaggctcacaaaatcacccaccgggttcaggacaagatcctggaaaatgtggacatggttcaggcagtgcacgttcacccctgccccgagggggtgcagtatgatcacagtcaattacttgacgaggattcttga

SEQ ID NO: 3044 - DNA, 2349 bp, synthetic construct
  source 1..2349: mol_type = other DNA
atgctctttgtcatgatcgcgggggtatctgccagtgatattatggatgcatcagataacccaaacaatgatgactcgatcaacctagtatctcaggagtccggtaatgatcaaatttctaatgaagccatttccgtgtccaactccctgagcgctaatgatgattcgtacagtccggaatcggaaaagatcagctctaaaataaagacttcaaataatctgagtgcgtcaaacagcacaaaaaccactactaaggccgccgcggccaaaacgacgaaaactggcactagtctccagccatctagcaccagtatctactccggccagtatctggtcatcacactgaaggacaagaacagtaaggcgttgagtgggcagaaggttctgattaacatttccaaattcaaaaacacatacacaaaaactacagattccaaaggccaggtcaaattggctgtgaatccagttggcagctttaagctggtggtgtcatacgctggaaatggaaactactcctcttcaaagtattccgggaccctcaaggtgtcaaaaagtgatacaagtctcacggtggccagcacttccgttaccatgaccactcccttagttgtgacccttaagaataaaaagaccaatgaggccttatccggcaaaaagataaaattcgttatggaccgcgtgagctactcaagaactaccgacgccaaggggcaggcaaaacttaaggtgaatatgaaatatgtctttaatgtcacagttaaatttgacggtaccggcaacctgaaatcgtctaaggtgaccaagaccattaagcccaccaagatccccgtaagctttgtctactccgccaactctgtgaaatacggccactccatcacagtcagtctgaaaaacaacttgaacaacaaaacgctctctggcaaaaagattgtggtcaagacaagcgactctaaaaagtcaacaacaaagacgaccagtagcaaaggaaccatcagcgtgcccatcaattctgtgggggatgtcacggtaagcctgtcctacgccggtgacagctcctataaggctgcaagtagcagcaagaaaatcaagggactgaaggattccagtaaaatcacgagctccacggggaccattcctgttggggacagctataccgtgactttaaaggattcgagcggtaaggccctgtccaataagaagatcgtcttcactttcgacggaaagtcatacaccaagacaaccaacagcaaaggccaggccagcttggccatctctaaagggcccgggacatattcggtgaacgtgagttacggcggcgacagttatcatagcggaagcaagctcagcaagaatgtcaagacctccaattcaatgattagcatcgccaacgtgattaaggctgcaactaccctgcgagcgcacgttgactataccaaccggtttaacaagtcctacgtggtgaccatcaatggactcaagtattcgccggacgaatttgcatacatgatgtctcaggctatagtcaagatcaacaatggccaaaaaagcgggtatgtgaccttcaagaaccttactggagactacgactccaaaggtagctccataaacggcaatctgatgaaaaagaactacatcagcttggccaacacactcattagcagcgtgaacaagaacaataagatacctgcgaacatctctaccaatctgggcaagatcgaagccaacctttatatcttcggtctcgctaaggccctgcagttctatggagaggagaaatacctgcctaaatacctgatccttaaaaacagtttcattaaaggctcatcctcaacgactgtcactcagaaggcaaagattctaaattgcaaggaggccttcaacgccacggagtttgagaaatacttgaagacaggcggaaagtcggcccttaactcagcgatcgtcgctaaggcaaaatccctcaccaaaggtctgaccagcgataaggccaaggccaatgctatattcaagtacgtgagggacaaggtgtcctacagctactactcagacagtaagaaaggagccgctaagacatataagacaaagtctgggaactgctgtgacaaggcaaacctaatcgttgcaatgtgcaggtctgtgggggtatatgcaagatactctcacgctcagggctgtaccttctcaagcggactggtggcagggcatgtatgggctcaaacatatgaccgggctacccagacgtggtataccgctgacgccacaagctcccgcaactccctgggcaaaataaacaactggaatactaagaaatacagtcaagccaagaattacgtgctgattccattctga

SEQ ID NO: 3045 - DNA, 453 bp, synthetic construct
  source 1..453: mol_type = other DNA
atggcaaagtacaagcgcgtggctgtgggcggaacattcgacaagttccactacggccacagaaaacttatctccaccgccttcgagattggggaaagtgtcgagatcggagtaacctcaaatctatttgccagcaacaaaggggatgtcgactcctgcaacacgcggatggctaacctcaacgcgtttctgagcaagtcgcacgacaatttccatatctcccggctcgatgatgcctacgggccgaccatttatgacgaaaacttcgatgccatagtggttagtgaggagactgagccaaatgcaataaagatcaatgagatcagggaaagcaaaggcatgaagcccctggacatcgtcgtggtgagctttgtgctggccgacgacggaatccctatttcatctacacgaatccgccagggtaaaattaaccagaagggcgaattgatttga

SEQ ID NO: 3046 - DNA, 975 bp, synthetic construct
  source 1..975: mol_type = other DNA
atgatttttattcaacgagatggtgccgagtccaggaaactgtcttacgacaacaaagtgtgtctcgcttgcggtatctgtgcagacacatgcccaaccgactcccttgccattgccgacgtgctcgccatcgctagagggcaggccgagggcaacaatatcgtgttggaccaggatacatgcgtgctgtgcgggctgtgcagctttgcatgcccattcggggctctggaatttgatataggcggccaagatgccagtgaattgcccaactatcccaagtggactcacgaaagctcaatcagtcaggatgactgcgagttttgtggacgctgctacaccgcatgtcctcaggatgcaatcctattcaagagagagctgcccgataggaacgcgctgctgaagggggagatctccatcaatgaagatgactgcatctattgtcaggtgtgtgccgaaatctgcccagccggcgccataagtctcacggcatctgacggcaagatattagacacaatcgaagtggatgaggacaaatgcgtatattgcggagtgtgtaagcgtgcgtgtcctcaggaggccattaagaccgtatgttcaacctgcatgtacagcgatgagattgagaagatcgctatcaccggcgacatattcattacagaggactgcattaactgcggatggtgcaaggagatctgtcctgttgacgcggccgaggtcactaaaccgttcgatggggagatctccgtcacggaagaggactgtgtcgcgtgcggatcgtgtatagacatttgttcatgcaacgctgtgagcctccaggacaatgttgccgtgttcaatcaagactactgcgtcctgtgcggcgcatgtgcccgcctctgtccccaggaacggatcgctattaaccggaccgatatgaaactgactaacatcagcagcgcttcctggaaagccaacctggaaaagctacttaattga

SEQ ID NO: 3047 - DNA, 204 bp, synthetic construct
  source 1..204: mol_type = other DNA
atgaaagaaacactgattaaggagttcaaagacttgaaagaggagacgggacaggccagcgtggaactgatactcctaatcggctccatcctcgtgatcacaattatctgcgggacttacgtattcaatgtgaacagcaagataaacggccagtttaatcaaaccatgaccaaggcacggctgttccttctgaacaaggtctga

SEQ ID NO: 3048 - DNA, 237 bp, synthetic construct
  source 1..237: mol_type = other DNA
atgaatcgactgcccagggaaaccgtatttgagcagataaaacggaacttcgtccaattgaaggatgagacgtctggccagggggctgccgaatacattctcctattcggcggagtgatcgtgattgcccttgcaggtctgctcatctatcgctcatacttcagcaacaacaccagtgggctgaacgcgacacaggacatcaactccatcagagacaatatgagcaatgtgctgtga

SEQ ID NO: 3049 - DNA, 2094 bp, synthetic construct
  source 1..2094: mol_type = other DNA
ttgtctgactccctggatttgttcacaggggttctgctgacagccattggtttagttctgatttatggaagtataatctaccgtctaatcgacctcgtgttaatcctgggtgtgctggtcaccctattcgggctgtacaaactgctgccagctttctttatgcggctgctcagttccagaaaatcaagctcacgaaataagctttccaaggccaatgtgagccaagattcgcttctcaaggcaggaatcgaagagataaacaatttcctggacggcgaggacaacaaggagaatagtaaatctgtcttaagagctccaagggaaagctcactagatgctcctaaccagatgacctttgaagaatatatgagcaagtccaagaccgattatgcaaccaattacagtccgaaggaggtaaagcctatctttaaggaccgggacgtggacgaatccaagcaggtgctgcgcacaaagcctgtcaaagaggaaaagagcaaattcaagctgccgtcatttaagcggaactcctccaagaagccaaaatccagaaacttcgccttccgcaaggataaggacacagagcgaagcccagacaagctctacttcactccaaattacgaaaaccccatgatggtgagccctaagcccaagaagaagtcggagaataaactgaggctatctgacagcccaaagcggagcaaagagatctccgaggccctggcaagtgtaggcacgactgaaacagtctacgacaacaacgcttcagacgacagctatagctacatgcccaaggagatggacgatgaactgatcgtgcctatcgatgagatcgatctggatggcccccaggaggcccctatctacacgctgtcccagagcgagaacaccctttacaacaacgtgatttacgacgacgtcgattcagacttctacattaccccaatccatgcagagagcaacgaagacaactctcctgatgaagagggggactatggggagggcggagacctctatctcgaggtcgagcccgaggacacctcgtatggaaacgatctttacatcgagacagagccggaagataattattacggcaacgacctgtacatcgaaacagagccggaagacaactattacgatgacgaggacatttatatagagtcatacgaggaggagcagagctatgaagatgatgatggctacataaccgttgaagccagtgacgatgacctgcccattccaaggccaaaggagatcagcacgccccagagtcttccccgccccacttcaatcgcttctactaatcccatttctaaaaaggaagttgggtccaacctgtcccggcctcacaagaaggtgtccacccttcccaggccaagcgtctctagcaatctgcagcgcccccacaaaaaggcagaatctacggacgccgtgtcagtgaaagacgagtctaaagccgccgaggcaagtattgctaaacctaagcccatcgccaaacctaaacctgtggctaaacccaagccgaaggaggctcctaaaagcgatgagcttataagcaaagaggaactcgatcagatcatccaagaccccaaggataacaccattcagatcgaccccaacaatccagagtccctgcctatcccaaagctcctcaacagttatgtcgtatgcgagaaaggaatactgacctctcaggaagccttcgaagaggtggccagtcattccagtcaagagattttgttggaagcgccgacaattaaggatatgggggaacgattcctctcaagcatcgcggatattaaaaccagaattatcgtgcaggaatttgatctggccgacatctcgtacgtgttgttgctcagctcgctgattaaaaaaggagttgagatcaaaactttgccgatggtaaactcctttaacctcatcggcgacgactctcacgcgctcatcatttccaatagtatggatgaggacgactttgaatatggtgcggtgtacactgataagccctccatagacaacattaaagagctgtttgaatcctcgtggtcaatagccaatgatctcgacatcggcaatttaaatgaaagcgagtga

SEQ ID NO: 3050 - DNA, 714 bp, synthetic construct
  source 1..714: mol_type = other DNA
atggagatcagatggcttggtcacagtgcctttgagattatcagtgatgaaggcgtgaaaatactcatcgacccattcatcagcaataaccctacctgccctattcctgtagaggactttgaggccaacatcatctgcatcacccatggtcactctgatcacttcggggacgctatggaaattgcaaacaatactaacgcgacactagtggcaaatcatgaaatctccctctttttgggggaacagggatttgactgtgtgggcatgaacactggcggaaccgtttccattctgggaatcaatatcaccatgcttgatgccaggcactcctcgtcaatcgactttacagaggaggtccggcccggcggagaccccggaagcttcctgataaccctggaggatgggacgaaaatcttccatgccggcgatacaggcctgttcggcgacctggaaacggtggtggggaacatcttcaagcccgacattgctatggtgcccataggggaccgcttcaccatgaacccattccaagccgctttagcaagcatgtggataagccccaaggccgttattccaatgcactacaatacattccccgctattgagcaggacccggccgtcttctcaaactttgtctatcagctcaatcctaacatcgatgtcgtgattatgaacccgctggagacttacgcgccagactttgataaggaatga

SEQ ID NO: 3051 - DNA, 687 bp, synthetic construct
  source 1..687: mol_type = other DNA
atgagagaattgaacatggacgagataaaaaacgctgagaagatcgagtcctttgaccaggtcagcgccaagctgaataagaccgagaaagaagagatagtgattgatgagatggacattgttttcctgctcgataaaagcgggtcaatgtttggtatcatcgatgacacgctcggaggctttaacagcttcattaaaagggaaaaggagaaggaagtgaaaacgcgggtgactctggtgcttttcgatcacaagtacaaggtcctgtacaccagaaaaccaattgaagaagtggaagagctgacagaggaggactattacgccgacggctgcactgccctcttggatgcaattggaaccaccatcaatcgaatcgagaaggaggtctgtgatgaggtgctttttgtaatcaccacagacggcctggaaaactattccaaggagtacagtagagaggacgtaaagaagctcatccgaagccataactggaatttcatcttcattggggcggacatagactcttacgaagaagctgccagcctgggcatccccagcacacgctctgccaactatgagaaaagtcgccgcggcgttggttcactgtacaggagcgtgtcctatgcaaagcggctacggtccagtggagaatcgttagacaaagtcaattggaagagggggctggattga

SEQ ID NO: 3052 - DNA, 663 bp, synthetic construct
  source 1..663: mol_type = other DNA
atgacaactgtggcggaaaccgtgtataaatgtcccctttgtggattcgcccatacgactgactgcatgacaagcacctcggcctttggagcgccagatctggatgggcggccttccccgatggcccgactgacaatctacctcttcattaaggaatgtccaaattgcggctttactagctatggcttccccgagcacacgagtgtgtcaagagagttcatccagagcgacaattacttgaactgcgataatatagacttcaagaccgaacgcgctaaactgttctacagggtctatctaatatcaaaggaagaagggatgatgaacagggcactgacagacctggtccactgcgcttgggtatgcgatgacgacgatgatgaggagaactccatcaagctccggctgctcatcaacgacctgttcaacgagttatatgactttaaaagtgacgaggaggactacgcccatttgattaagctggacttcatgagacgtgggcacctcttcgatgagcttatcgaggaggttcgccacaagaccttcagcaaatccttttacaataaggtgaaggactttcagatggagaaggcaaaaaaccgggacgccggcaaatacacctttgatgatattgaaggctatgaagagtacaagtacggttga

SEQ ID NO: 3053 - DNA, 2010 bp, synthetic construct
  source 1..2010: mol_type = other DNA
atgaaaagtatgaccaatgtagacattaacattatatgccaggagctgaatgagctgttggccggagctagagtggacaagtccttccagcctacaaaagacacagtggtgatgcgcttccacaaggccggaacaggccggatggatcttgtcatccaggccgggaaaagaatccacatcagccaatatcccctggcaaacccccagagtcctcccagctttcctatgctgcttcgtaaaagggttaagggtgccaatgttgtgagcatccagcagcacaactttgaccgggtcgttgagatcaaaatgaagaaggacattacgtacaccctcatcgtcgagctctttgccaagggcaacattatcctgttaaacgaggagaacgaaatcctcctgccactgaagcggaagcagtggagcgatagggacatcagcagcaaaaaggaatacgtcttccctatcgagcacggaatcaacccaatgacgatcactgaagatgagttcaaggaaattatcaagtctagtgatgatgagattgtgagaatcttggcgaaaaatggcctgggcagtttgtatgctgaggagatcatgctaaactgtgagataaacaagaagacactttcctccgaacttaccaaggaggacatactggagatttatggagccttgaagaaagtcttcgaaggcctggagaaaaaagagtttactcccatgattgtgaacaaccgcaaggagatcgaggagcttaaaaaacagaacccagacaagcaatacaaggtcaaggaggacgtagtggccatacggctgcaccagtacgaaaacttcgaggaggaatccttcgacagcttcaatgaggcctgcgatgagttctactcctcgaaggtaaagcatgaaatcacagacatccaggaggccgtgtggaacaagaaggtcgggaaattctccaaaaggctggaaaaacaggaagagacgctgcgcggcttcgaaaaaactatcgaagattcccagaagaaaggcgagctcctatttaccaattacgtccaggtggaaaacatcttaaatgtaatcaaggacgccagggaaaaggactatggttggaaggagataggaaagaccctcaaggatgccaagaagtctggaatggcggaagcacagatcttcgaatccatggaccccctcggtaacatcaccttaaatattgatgggattagcatagcccttgattcaaagaagtctattcccgacaatgcggaggtctactatgaaaaggccaaaaaggctaagcgaaaaatcaaaggggccaaaattgccattgagaacacaaaagcccagttgaaggacatggaagagaagaaggaaaaggcaatggctaacatcatggtgccgcaaaagagagtcaagaaaaacctcaagtggtatgagaaactcagatggttcgtctcaagcgacggaaccctggtggtgtgtggccgggatgcaggcagcaacgaggcagttgtgaagaaatacctcgaacagaatgacgtttatctgcatgcggatatacatggggctccctcagtggtggcaaaaatttcatcggataaactgaataacaatctgctgaaagaactgggcatctttgccgcttccttttcaagtgcttggagtcgtaattacggcacccaagacgtatactgggtggagccagagcaagtgtctaaaacccccgtgtcgggggagtttgtgccgaagggggccttcataattcggggcaaacgaaactacatccgaggggctaagctagagatcgcaattggaattgtggactatgatggggaaaagcgcattatggctggcccggttgatgcactgaaggcttacactgaaaagtacgtgaccatcaagccaggttatactaagaaagagaagatcgcgaaagagatcctctctcgcataaatgaggacaatattattgaattggatgacgtggttagggtgctgcctagcggtaaatgcgactttgtctga

SEQ ID NO: 3054 - DNA, 273 bp, synthetic construct
  source 1..273: mol_type = other DNA
atggacacaacggttaagaccgtcagtatccaccttgtggccgcagtggtggcggctattatcagcaccgcctttactctcggctggttcggttttaaaaataacgtctttgccttcgtgatcggggtagtgattctgtatttcattggacagtactgcaaaaaggcattcggcgaagagataagcgggttttccacatggctctgggatggcatcctacccttcggatttttctggttcatcctgtggaccatattgactaactacctgtga

SEQ ID NO: 3055 - DNA, 8640 bp, synthetic construct
  source 1..8640: mol_type = other DNA
ttgaatcgaaatagcaaaatcattctgatttcgctgttcacactgctcttgctggccatccccgcgggcttcgcggccgatattgaatcaaacagccacaataacctggatgattcaaatacagtaaattttgagattaacgccaattccaaggataccaacctggagagtaacctcaatactggcaatttagaaatgaatagtaataatacgaatctggatatgaacagtaacaaggcaagactggccatgaatagtaatgccagtgacctggaaacactcggtttgacacggggggagtttgagaacgggtcaaacaatccctctctcgagtattcatccaattcactctcagacaatagcaataataaatatatatccccatctagtgataaaaacacttatggctccaacaaggtaggtgacggtaacgtgaacatctactactttgacgctagtgctagtgacgacaccggtaacggctcgttagaaaggccttataagaccctcaagaataaccggatcgtggaaaactccattaattatcttgccaacggagtatacaacctcgatgctacaattaacaaaaataacatcagctttattggtgccgactcttcaagaaccattatctcctacgctagcactgcctttatcaccaacaatatcctaaactttgaaaacatcacattgaaaggactgaacatccagaacagagggaacctaacggctcggaacaccatcttcataggtggaaaagggtattgggatcgatcttacaacaatattttcggaggggcaatatacaccccccagaacgagaactacacgaccataatcatcaactgttccttcataaacaacaccgcagactatggcggagcaatctatgcctgcggcggcaacgtgacggtggagaactcctccttcataaacaacactgccgagaggtttggaggcgccatcgcctctgagaataccctgaccaacaatatacgcaatgtcgagtttatccacgacgtgtcacttaacgatgcagggggcggcttgttcatctcattcacccagttaaacggcactgacttgcacttttacaattgcagcgcagactttggcggtggaattaccgcgctgtactccaacgtgtccctcaataggttcatcggcaaggacaacaaggcaagatacgatgggggggcgatctatcagttctactgctcgttgctcattgaaaactccctctttgcgaataactctgcaaacaatggtggaggactctatgtggacaattcaaactccctgaaggtgacaaagtccaacttcacacagaacaacgcaacagagaagggaggagcaatctattcactgtggaacaccctggccgaaggcaactccatctccaacacccgcttcaacaacagcttcagcaacaacaatgccaagaactactctaatttctatgagggcaaggatgtcaacatgaggatcggcagcggcaatgtcaccctataccatcgtaacgagacggagatcgatgagattcccagctattacagtctgatagatctgaatcaggtcacgtccataaagaatcagcagtccggtggcaactgctgggcatacgcctcaatcgccgccctcgagtcagccatcattaaggccggcggcgaggcgctggacctttcggaggagtctatgaaaaacctgatagtcctcttttcagactatgggtacccttggctcaccaataacgggggaaatggggacttcgccaacgcttacctgacctcttggctcgggcctgtcttcgaggatgacaatccaggcgatgacagatcatacctctctcccgtcctcaactccagaatacacgtgcagaacatccagtacctcggccggaacaactacaccgacaacgaccgaatcaaggaggcgattatgaaatacggcgcagttgctacaagctattatatggacaactcctattacaactacaggacttccgcatactattgtccgtcagccacgagctccaaccacgcagtggccattgtcgggtggaatgacagctactccaagagcaacttcaaaaccaccccccaaggagacggggcctggatcgtgaaaaacagctgggatactaattggggggacaacgggtacttctacgtgtcgtactacgacatcctgatctttccgctggggtctatggactggggccatgcgtacgtcttgaacgataccatcaagctcgacaagaactaccagtacgacatttcagggctcactgactatttctacaatgcctcctctacagcatggtacaagaccaagcatactgctgatgaggacgagtacctggctgccgtgtccacctacttcctgacaaccacggactacacaattttcataaaagtgaatggcgaagagctctacaatcagagcggcaacagcgagtacggctaccgtaccatctacctaaacgacttcattccactcaaagcgggagacgtctttgagaccatctttaagatcaatgtgagtggagaaacgggtatcccagtgtctgagggctctgccttcaacaaggtcctttatgatcggaaccagtcattcgtgagctacgacggcattaactggctggacatttatgatatctattggacatataactccgacgtgtacgggtcgcactactatgtgtctgcagcactctgtctcaagagcttcagcttcattaatgaaatcggaaccaacctgaccctggagtttaattacagccttgataacgagggagaccggatcagtccagtgaatatcatcgctcacgtcattaacgagtacggtttcaatctagacaacgggcaggttaaattcatcatcaacggtacagaaacaatcgcagacctgatcaatggatacgcgaacatcagttggaacttcacagatattgaaaatgaggtttacgcccttttcgagaaaacaggatacctcagtagctccgctaatgagactgcaacactgtccgagaagtatgtcaccctcgacctgaatactctgctgagtgaagacaagctcaccatcactgtagacagctctcgcaagattaatgagactctgatactagagatcaacggggaaaagcacccctttaacctctcggagggccacgttgtgtacgacttgtacgatattgaagatatagactacttaattcgggcctacctgaatgacacggggttctacaactgcgaagagaagagcacaatctttcggctgaatacagaaattacagagatcattgcttcgaactttacaaccgatgattatagcaatgccatctatgagataagtttggttgacagtcagggtattgggatcgccaataaggaaattctttttaatatatctggcaatttgacgaataataacaacaacaataacaattttaacaacattatatttaacctgactaccgacaacgacgggaaggccaggattcctatcaaccttccaggcggaaatttcacaataaacgtccaatccaaagggaactacctttattcgtcagctgaagtggccctgaagctcaaggtcaaggataaagtacgcctagacattgatctcaacttgaacttcaacgatctggaagtgatcattgagctgaacagatcactgaacgagactgtgaacttcagcttcgccggagaaagctcaatcatccgattagaaaacggacgagctagcgttaatttcacagggctcagcaacaacaattacacagcaatcgcttatctcgagaacgacatcgattacctgagtaacatcgctcagaagacaatagaaatcaacatacgaaacctgataatccaggccgatacaattaacactaccaaccgttactatggcaattatacaatccttctcacggatgaggaagttaatgaggtagccaacaagacactgaatgtgaagatcggtgaagaaagcttcaataaaacgtccgataacgatgggaaggtgatcatccctctggatttaggcattggcgaatacgaggtgattatcagcttcaatggcgataaggacttctttaaagcgaatgcgacgcgaaccatcaccgtgttggaaaagctatttgccaatatcaccgtttccaccctggtggatgaggccacaatagacatcattatcgataagaagatcaatgagactctgaatatcagcatagaccagagcgagtatcccgtgctgttcgagaatggaaccggccagctgatcctcgacggcttggaagagggcaaccacatcgtcaccattgatctgctcaaatacctcctgtttgaaagcaaagagttcgagatcgacaaatccataaatctaagctctgatgactttaactgttacgagcacacaaacagcacttacaccgtgctcctgaccaacaatggcaaagccctggccaacaagaccattcgcttcgtcctaaacgacaccacaaccattcggaacacagatatggaagggaaagccagtattgacattgatctgagcccaggagtctatgagctgaacattacttattatgatgatgagcggagcgtgatcaatacagtctacgtgttgtccaacataaccaatagcacagatcctaaattcaatgtgacccttgatatggacaccgttctgagtcccgacaagctaactatcaacgtaaactgctccaagaagattaatgagacgttaattctcgaaataaacggggatcagcactttataaacctgaccgacggattcgtaagctttgacttgtatgagcttgaaaagattgaatatgtgatcaccgccaaactaaacaacaccgacctttacagatttgaagacaagtcagtgaacttcgagcttaaccaggaggccacagacattattgcttccaacttcaccaccggtgactacagtaatgaacgctatgagatcaccctggtggactccgaggggattggaatctccaataaggagatttcgtttaacatttccaacagtctgatgagcaatgagaattatatcatctttaatcagactactgacaatagcggcaaggctagcattccaatcaacctggctaggggaaattacacaattaaagtccagttcaaagaggactacctgtatttagcttccgagtctactgtggatctgaaagtgaaggaaaatgttaagattgatatcgagtttaaacaaatgatcaatgacctggaggtcatcattgaattgaacaagactttgaacgagaccgttaacttctccttcgcaggcgagagctctatcatcagactggacaacggcaagttctccatcaactacaccgggctggcgaacaataactacaccgtcatcgcttatatcgaaaatgacaccaactatcatagcaacattgctcaaaaaacaatagagatcaatatccgcgagcttatcatccaggccgataccattaacactatcaaccgttactatgacaattacagaattttgctcacggatgaagagggcaatggaatagccggtaagacccttgatatccgcatcgctgagggaaactatattgaaacgagcgacaatgacggaaaaatagtgattcctcttgacctggggattggagaatacgaagtgaatatcctttttaacggagacaacgagttctttaaggcgaacgtaaccaaaacaatcacggttctggaaaagctatttgcagacatctccatcagtacgctggtggatgaggctacaatagacattattatagataagaagattaatgaaacccttaatgtaaatatcgaccaaacttcataccacgtaatatttgaaaatggcaccggccagttgacggtagacggcctggatgaagggaaccacatcgtcaccatagatgttctccggtacctcctgttcgaaaacaaagagttcactatagatcggagcataaatctgacttcagacgactttaactgttatgaacacaccaacagcacgtacactgtgagccttagcaacaacggcaaagtcctggccaataagaccattaagttcatcctcaataatcaaatcatcctcaggaacactgacagcgaaggcaaaacttccatcgacatcgatctcagtccaggggtctatgacttgaatatcatctactatgatgatgaacggagccggaccaacacaatctatgtactgtcgaatattacccatagcacagatcctaagttcaatgtgactctggatatggacacagtgctcagtcccgacaagctcaccatcaatgtgaactgctccaagaagattaatgagaccctgattctcgatatcaatggaaaagagcagatcctgaacctgaatgacgggttcgttagcttcgacttatatgagctggagaagatccaatatgtcattacagccaaacttaacaacacagacctgtaccgcttcgaagagaaaacgatcctctttgagctgaaccaggaatccacagacataatagctagcaacttcactacagacgattacagtaacgcgatttacgaaattcgcctggtggattcctacggcctggccatagccaataaggagattttatttaatatttcgaacagtcttatgagcaatgagaattatatcattttcaatcagatcaccgacaactcaggaaaggccagcatccccatctaccttcccgggggagattacacaattaaagtccaattcaatgaggacgacctgtatctgtcttccgaatctaacgctcacctgaaggtgaaggacaaagtgaggatcggcatcgagtttaatcaaaacatgaacgatctcgaagtgatgattgagctgaacaaacccctaaacgagaccgttaacctgatcttcgcaggggaatcctccaatgtcaaactggagaacggcaaggcttctctgaagttcactgggctcgcaaacaataattatacagcggtggctcatctggaaaatgatagggattacattagcaatatcggcgagaagaccatcgagatcaatcttcgtaacttgatcatcatcgccgactcaattaaaacgaaaaatcattactgggacgattataccatccttctgactgatgaggaggggaagaatgtggccaataaggcactgaacattaagatcgacgccaacagttttatcaaaactagcaataatgatggaaaggtgattatcccgctggatttaggtctggggatgcacgaaatcaatatcgcatttgatggagacaatgagtttttcaagtcaaacattactaagaccatcaacgtgattgaagagatctctgtcaatgtcaatatttccactttagtagataatgccttaattgaccttaagttctctaaagaccttaatgagaaaattgacgtcctgatagatcagaacctgtatcctgtgtctctggagaaaggtgccggacagattagggtcaacggcttggaggaaggaaagcacatcttgaccgtggatcttccagaatacctcctgttggaaagtgaagagtttgagatcgacaagacaatcactcttatctcggacgacttccgctgctatgagcattcgaacagcacctacacggtggtgctggagaacaatggcaaagctttagctaacaaaaccatcaagtttgacttgaataagattgtgaccatccgcactaccgataacaacggcaaagcctacctgaacattaatttgagccccgggacgtacaagttgaatatcgcctactatgataacggccggaataagattcataatatctacgttctggctaatactagtggtgataataagacaaacgaaactaattcaagtagtaacactaaccccatcaacaaccagacaaataacacgaaccctacgaataacacaaagccaatcaacaacgaaacaaacaacacaaaccctaccaacaacactaacaccaccaacaatactaatacaaccaacaatcaaactaataacaccgacccggttattgttagaaaggggactaatatactctgtcagaacatgattacaactgcattcgacagcaaagtggacggccgcatcggtaaatacttcgttgtgacgctggttgacgccgactacaagccgatggccgacaaaaccatttatattggttttaacggtaagaaatacattaggaccactgattcttcaggtcaggctaaactgcagataaacctggcttatgaggggagctacacctttgccatagcgttcctgggagacgatgactataagggcagttttgtggtggcgaacatcaaggtgaacaaacagatcccgcagctaaaatcgtcggataggacgtatagatcaattgccaagactaaaacactgactgcatccatcaagaccgcccaaggcaacgctatcaccggcaagaaggtcatatttactatcaacggtaagaaatacacggcaataatcaacagcatcggtattgctagcgtgaaggtgagtctgtctaaaaaaggaacctatagatttaccgttcagtccgaggctagttctacgtatgccagcacgaaggtcacgcataaattggtgattaaatga

SEQ ID NO: 3056 - DNA, 1818 bp, synthetic construct
  source 1..1818: mol_type = other DNA
atgtccagtatgtcgagtgtggccgggttatccaaatacatcagaacattgcctaaagccaaaagcacttttctaatgatcatcgtcttgagctttatcataggcgcggtgctctttttagtcaagcccatgagcctcggaagcggtctggagaatttcttctacggtggtgcctttggatttgtggtttacgggctgcccgctatcatcactggtgccaccgatcagaaatgggtgagcaccctaaaggggataaacctcaagatgaagcattccatgttccttgccctggttagcatgaccatggccggggtaataagcatcatcgggaccatcataggaaatatcctccacttcgacctgtttatcaactccatcctgtttggcatagtaattgcatttgcattcaatatcttggtaatatggagcgtgactcggatcaggctcatcaaatccgtgctggttgccatcattcagcccctgctcatgattggagtcctgattatcacaagctttctgaacaacctcgaaagcgtctttgagctggggatatttaccaccttcttcaaggttatcatcgcaagtgctgtcttcctgctggccatctattcgttcatttctatcgtcgaatccccaatgaaaaagaacttaggcttcggcgctctggagatcctcagtttcttcattagccatatgaacgaaggctccaagagcattgaagagctgttcgacaatgctggagaggctattgacacacttgtgggggtctgcagcttccggaagcccgacggggatattaaggccctgttcatttcgccttgcgtgcaccctggccccctaggcgacattggtgggtcaaatatgccgacaatcctggccaacagatttgattcgtttgccatggtggcgcacggaccatccacccacgacttcaatcccgtgagcagcgatgagatcgttaaaatcgagtcatcagtgcgtaccgcactggaaaatatggaatacagctcaaaggctagccgcttcgtccggtactcccacaagaaagccaacataggcacccagttcttcaataatggatgcgtcatgctctcaacattcgcaccttccgggagcgatgacatcgagtttgcggtggggctcgccacgatgattgaaagtcagaaggagctggaaatcgacaacccgattcttgtggactgtcataactcattcaatgcagagaagggaggagtgctgccaggtaacccagagctcttccagctactggatacaatcaaactgattgaaaaaaaagacttggagcacgagattaaggtgggctgttattccacagaccttgggggctttggcaagcacgaaggaatcggtgatagcggccttaaaaccatggtcattgaggtagacggccaacgaactgcttatgtgcttttcgactccaataacatggaacttggctatagggagaccatattcaatgccgttgaagatctggagattgatgagatagaggtcatgaccacagacacgcatagcgtaaacaccctctccgcaggctacaacccagtgggaactgtggaaaaggaaaagatcattgagtatgtgcgcgaaagtatcattgaggcgattgatgacctggagactgtggaggccggcacgaggacggagcgcatcgaaaacttgaagactttcggccctaacaactcaacagagctgatctctacgatcagcagtatcgtgtctgtgagtaagatagctgctcccttgatctttattatggccattatctttgttttcatttggatctacctgttttga

SEQ ID NO: 3057 - DNA, 531 bp, synthetic construct
  source 1..531: mol_type = other DNA
atgatagaactcaaaactccaatcacagacgatgacattgacaagctgaaggccggagatgtgatcaccatctctgggcagatcttaaccgcgcgggaccaggcgcataagagaatccttgagcaaggagcccccttggacataaaaggcgctgtgctcttccacgcaggccccattattaaggaagagtcagatgacgcccagaccaaatacgagatggttgctgtaggtccaaccactagcatgaggatgaacccgtacgaggccgatgtcctagacatgggtgctaagattattatcgggaagggcggcatggatgacacagtgcgagaagccctgaaacgcaacaatgcagtctatgtggttgcaacgggaggctgcgccgcactctacgtggataaggtcaaggagataaaaggagtggactggctggatctgggcatgcctgaggccatctgggacttggatgtggaatcctttgggcccctgatcgtcgctatggacagcgatgggaacagtctgtatgactga

SEQ ID NO: 3058 - DNA, 3978 bp, synthetic construct
  source 1..3978: mol_type = other DNA
atgcgactgagatattttgccatcattagtcttattcttctgatctttctggttcccgttagttttgccagtgaaacgaatctggatagcatcgagctgaatgatttagctgactcttctaccgagatagatgacagcactgatctgaaccaggattatagttctaatcaggatctgagtctgaaccagaacagtgactccaacctgagcaatgaacaggagttatattcgaacaaactcagtgagaactctctagattcaaattcccagagttccaacgacttatccaactccttatacctctcgagcaacggagtgcgcctagccgatttgaacagtagctttgcccagttcaatacaagcctcaacgattccaatacgatctatgtgaactcatcctatattggttcggatgagtttggcactcaatcgaatccttacaagaccgtgctggcgggcatcaatgctgcgacgactgatttaaataacgtctatattgcaaatggggtttataatataaacaccacaataactgtgctgaaatccatcaacataatcggggaaagtctgaatgtgatattgaatgcttccaacgaaaacaacatcttgtcagttaaaggaagctctgtcgaggtctcaatcttcaacctgacattccgaaatggctatgctaataaaggaggggctatttacgtggataaatcttccctcaacattattggaagcctctttgacagtaacattgcctacgtcactagcgacaacggctacggtggggctatctacaataacgctggctttctgaagctctacaacaccacattcaaaaacaacaaggtggtagcagcctacaacatagtctctgaaggttttgggggtgcaatctataacgagcttggtgaaatgacggtgctgaactcgaagttctacaataactcaatcgacatccggaacatatccaaaagctcgtacggtgcgggaggagcaatcttcaaccgtgccggatttgtcaccatcttcaactccagcatcagcaataactcaatctacaccaactactcacttggaggggctatctccatctgggccagccgcaacgtctacatcatcaattccaccatcaacgacaacatcattagcggaagttacggcttcgcctctgtgatttcaaacaaggggaccctcctgcagatcgaaaactccacaatcagcaacaacaatatcaacgctagctcggtggagaacagtactatctacaacatcaacggcaatttcaacctgatcaactccaagatggaaaacaataagatcaagacaattaagaccaacctcctgatgtgccttgaggatcagcttattgtgaacagcagcttcaatctggcaaacgagttgaaaggcctcaacatgacgtcccttccttcccactacgacctgagggaggaaggcttggtgactgccgtaaagaatcagggaagctctggcgcctgctgggcatttgccttctactctgcaatggaatcataccttctaaaggtggagaacattagctacgacttctctgagaacaatatgaaaaactgtatgggcgacggcagcgagaacagtaccgactgggatgacggcggagcatacgtggtagcacttgcttatcttctccggtggagcggggcgatcaacgagaccgacgatcctttcaatgcccgctccaaagtgtcccccaccaatctaacgagggtcaaatacctcacggacgcactgtacatacccctgcgacttggggcgctggacaatgaccaaatcaagacggctatcctaaagtacggtgccatattcgtgccagtgtattcaaacatcattaaagccaattccaaatcaggctactccgatatccagtatatctgcaaccacgccgtggctattgtgggttgggatgacaactattccgccagcaactttaaagacactcccccgggcgacggcgctttcatcattaaaaacagctggggcaccagcgggggagaacagggatactactacatttcctattatgacgctagctttgccgcttccatcgagacatctgctgccgtggcggtgacaaacgttgtaaatacgacaggtgagtaccggaacaactactactacgacaccttcggcaatacctttgaaaccataggctacaattcggacaccatttggtttgcaaaccagtttacggccatcagtgacaatcctctgaatgccttcggcctttatacctatggggattccacctatacagtgaacatcacggtcaacaacaaatcagtttacacatcgagcggaaagatagtgggggcaggcttccataccatcaagctcagccggtacgtgcccctgacaaagggagacacattcagaatcatagtaaagctgacaaccccctccactctgttccctctcgccgttgagaccaactacagcggatttaccccaagggcaaagtccgactacaaccagtcattcatcagcccagacggtaagacatggtatgacctccggaacagcagcaacaacagggctgtgaagttctatgaggacatgtatttctatacattaaagaatgccagcgtttgcctgaaggcatataccgccttcgccgatgagctcgaattgaacctgtcctcaaacagtcccatttactacacgggagacactattaaactgaatctcacggtcactaaccgtggggatctggccagcaactcatctatcgcggttcctctggacaaatcttatagcatcgtgtcctacaagatatccgagaacaatgggaataagtcatatgatattcactacaacggttcaagcttcaacatggctagtggcatttggtccattccgtacctggagaatgaggagtctgtgagcctgatcttgagtctgaagatgaatagtaataatgacgttaacattaaagtcagcgccaacagctcgtcatgcagcgtaaaagacaatgtctatgccaacatttctctcaaatataagattccaagcaagttcgccaacattccatccatcaatacaactgctcgctcgtatgggctcctgaactttaccttgctcgatataaacaataagcccctcgcaaataaaaatgtgaatctgttgctcctgaagctggatgatgaggaggatgaagaccttagcctgaatgatactaatctctactattcagacagtagcatttctaatgcgtcggtaatctccaatctgaccttaaaaaccaacggcaatgggattgtgcagtacaaactgaatcttacattgggagaatacctattcaagctggcatttgatgaggacaagaattaccaagcgagtgactacaactattccctgaacataaccaagcgcaagagtactaagatcctgtgcaaggacatggtaacctatagtgtcgtggcagaggtggacggcagaagcggcgaatacttcaatgtcacattgactgactgtgacggctacgctatggctgataagtttatccaaattgggttcaatggcaggatctacaacagaaccactgactccgagggcaaagcaagactccagataaacctgaagaatccaaatgcctacacttttgccatctgtttcctcagcgatgatgactattatgcctcatttgaagtggctaaaattactgtgaataaaaagaaaatgtccctgaatgtgccgaataaggcctacaaggcctctgaaaagagtaaaattctaacagccacactgatcgaaaacaataagaagacagttgctaacaaattgttgacctttaccgtcgatgggaagacctattcagccaagactaatagcgccggggtcgccagcgtcaaggtgagcctgagcagcaagaagatttatagtttcaccgtcaaattcgccggagatgactgttacggttctgcgaccaagtccgcgaaggtgattatcaaatga

SEQ ID NO: 3059 - DNA, 6198 bp, synthetic construct
  source 1..6198: mol_type = other DNA
atgaaactgaaatacctgatgtttattggcctgctgcttatagggctactgatcatccctattagtttcgctggggatgcagacagttactctgcatactctggtgattctattagtctggaggacgacaattcttatctcgaaagcaacacagttttaaaggattctaaaaattcattacaatctatcgacgacgattgcttgatcggcaacaggactctggatgatacaagttattctgattcaacgaactccgaggatctgacaaaccctgatagcactaaccccgactctaccaatagcgaagatttgactaacctagagagtagcgcaaataccgactcatcatcggaaatcaaaacaataaccaagagtctaaatgaccagaataccaacataaaaagcctgaattacgatgagtacgcagactacatcaatctaaacaaccagctgataaactacgactttgccatcagcgactccaacacaatcttcgtaaacgcctcctacaccggtagcaccgagaatggaagtcaggctagtccctacaagtcaatctactctgcctacaattatgcattcggcctgtcctcggatacacggacaaacgtgtatatcgcgaagggggtgtacacagtgacacggagaatgaccatcaacaagaacctaaatctcattggcgaggactccctgaatacaataatcgattgcaatgggaatggtgccttcttcattagtcctcgacggagctatactaccgtgtacagccccttgctaaacatcttcaacctcaccttcacaaatggacgctattccagtggaggggcaatctacattaacgaaagtacagttaacttcgtcaacgtgatttttaagaacaaccgagcggaagcttcctattacgggtctgtagaagggggagccctatataacaacaaaggcttcgtgcgaatctacaactgcctgtttgaaaataacaccgccaacgatacgtcagatgcatgtggcggcgctatctataacgacatgggtgagatgaccattatgggctcccaattcataaacaacacagctaaaggagagaatgctgccgggggcgccatttacgacttttcagggattctggtgatcttcaactcgacaatcagcaagagtagccttctctccaactatagcatgggcggggggctggctagctggtcaagccataacatattcataatcaactccacctttgacagcaatgagggccatggaaagtacgtcttcggctctgcaatcgccaataaggccatcatgatgtatatcgaaaactccaccttctcaaacaacctggcaaatggaaccagcgacaagaacggaacattcttccacctgaatggggtccttgacttcgacaacgtgaatttcaccaataaccgtgccatcaatccaaaagaggacatcttgatctgtctcgaggatcagtttatcatttccgaggcttttagccaggaggatattgctgaaatccttagtgagatggaactgagccagctgcctagctcctatgacctcagggactacaatctggtcacttcagtgaaggaccagaagaacagtgggtcctgctgggccttttccactctggccgccctggaatcctacctgttaaagtatgaaaacacaagctatgacctgtccgaaaacaacatgaagaatctgattggagcctacgggctgaacggcaccgactggtatgacgggggaaaccactatatgtcgcttgcctacctcctgcgctggagcgggcccgtaaatgagtcgcaggaccccttcaacgatacaagccacaactcccggacattcacaaacatcgtgaagcaggttgaggatgtcttatatgtcccattgcgactgaactatctcgatatcgatcagataaaggcagcgatcctgaaatacggcgccctgtatacgacattgtgtagcgatgattccttcgacaacaacccggactactactgtgacgtcatctccatttccaaccacgccataaccatcgtcggttggaatgacagttactcggcagataattttgcggtgagacccccaggtgacggagccttcattatcaaaaacagttggggtcccagtgagggctacgatggctattggtacgtctcctattacgacaagacacttgccggctacggctatgacgccatcgctgctatggcattcacgagcgtggccaacgcctccacctataagaacaattaccagtacgacactctcgggaacaccttcgagtcaatcggctatggctgcagcactgcctggatcgccaatcagttcaccgctctgaacaacaatcccttggctgctttcgggctgtatacctatggcagcagcagctatctggtgaacattaccgtcaacggcatctcccggctggttcaagaggggaatgtcaaaggtgccggataccataccatcaagctggatgatgttgtggagctcctgagcggggacatcttcaagattattgtcaagctcagcactccagattccaattatcctgtggctatagagtctaaacgcagcgactatagcagtcgtgccaattccaatcctggcgagtccttcatcagctttgatgggcaaaactggcaggacctgtacgaagtgggcgacatccttaagttctacatgtatatgaataacaagacttttactgagcctaacatctgcctgaaggcctacacgatcggtccatctgatgtgcacctgcacgcgagggcaaatgcaaccacgtacacccagggggatacggtggagattaagattaccgtatccaatgaaggcgctaccgtgaatgacctgaacatcagcatgaagtggaacagttcatttttcctcaagagtttcactaagctgaatggtgagtttgatagcacaaaaaagatttggcactttgacacattctccgagggccagagcagcaccctcaccctggtcttcactatgaggggcaacaacgatgtggccagcctgagctatgactacaactattcaggcttcaatccaggtgatgccaacacgactcaagtgttaaatctttattatggaagcctcaccaaatttgtcgaggtcccgaacgtcagcactagcgtgaagtccggcgacgtggttgacattcaattgactgaccttcagtctattggcatctccgacaagcagatcgttatctccctgttagaaagcgacaacgaatacctcttcgagaacgtcacgttaataaccaatggcagcggtcaggcagggtttgtactggacctcctggaaggtaattacgtgttcctggcctcctttgcaggagacgactcttacatgtcgtctaacgtgacctttaatgtgtcagtatcaaagagcaacactagcattagcttggataacctggacccttccaatatcactgtcttttcaaaatctggggatgtaatcaacttcaccctctcggatggaatcaacaatctctctgacaagaacattgttatcagcctcattgaaagcgataatgactatctattcgagaacctcaccttaattacaaatggcagcggtcaggccgggttcgtactggacctgctggaaggaaactacgtgttcttggctagctttgcagaggatggatactacaaggcctctaacctgacattttacctaaacgtgctcagaagggcttcgagcatggaatttgattcctctagcctaatttacaacgggtcaaactggatcagcttgtcccagtcaaatgatctgatagaatttatcctcagcaaccagaccggtcctctggccgataagacgatcatcctcacagttgaagatcttaactcagttgacctcgccgaaaatccactgatttataacctgactacgggcccaaatggaattgcctcattcaaccttaacctcactaaatccaattacgaaatcattgccagctatctgggggacgaatgttactcgccctgtgagttcgggttcaatctgagtgtgcttaaaagaaacgctcctcatatcgtggctgacgatatagcaataaactcttccaacccctaccaggcgcacctactggacgatgatttcaatcccatcgcaaatcagtccctgctgtttgcgttcgctaagaaggacagtcaggacctgttcaattactctgcaatcacgaacgaaagaggaattgccattatcgatctgtcagacatcgagagcggggactacaacctgcttatcgcttttgagtccaatgacctttatgacgactctattctcgagattgatgtttctgtagtgaacgatagcttaaatggcgacaacggcacgaacgacactggcaacgggacgaatgggaccgacaacagttccaaaatcaacaccctgtttaaaattgacatgtcggacctgaccgtatcggctaatgtggacaagacaatcgaatttgcgttactcgacgagtcacttaatccactcgcggacaaaacgctcaatttgacgattgttgatttggacgaggatactgagctgattacagactctgatggcattgcgagttgcgtgctgaatctggatgagggggtgtacgaatttgtccttagtttcagtggagacgagaattactctccctctcgcctgatcttcaatctttccgtgagcaaagcagataacggtaccagtccgggtggagataacggtactagccccggtggggataatgctactaacggcaccgaccccagcgggggcaatggaacggcccctattaacgacaatggcactaatggaaccgaccctagcggcggcaacggcactagcccgggtgataacggaactgaatcatctaaaatcaataccctctttaaaatagacttgtccaatttgaacatctttgccaatcttgagaaggtcatcgaatttgagctcttggatgagtcccttaatcctctctcaaataagacagttggcctcaccataagcaaccttgacggcgtcagtctgattaccgacagcaacgggatcgcctcctgcccgattaacttggacgagggagtgtacgagtttgctctcaaattccttggagatgacgactactcagagtcggctatgatcttcaacctctcagtgtcgaaacgcattgcccagctgttgtccggggagactctcatcaatctgagcagtgagaagagggagtatgacgtgtacctcgtggatgataaattgagtccattggccaatgagacaatcctgtttgccctcagttcaatggatggccaagtcttgttcaactatgtggtaaagaccaacgatgaggggaaggccagcctgtccggcctggccaaactcaatgagagcaattacattgtcaagaccgagttcgcgtccaacgacttctttgagggcgctgaactaattaagaccataactttaatcaaggatgcgccaaacggagacgacgctaatgacaccaatggcacaggaaaccagacggataatggaaccgacaccggaaacaaaacagacaatggaaccgatacaaatggcaccaacggttcggatgtgccggtttcccgcaaagccacaaagatcatatacgaggacatggtgacccaaagtgtggttcccgacgtggatggcagaattggagactacttctacgtcacactggtggacggcaacaacaatcccttggcaaacaaggaagtgaaaataggatttaacggccggatctacaaccggactaccaatgccacgggcggagtgaaactgcagataaaccttaaaatgcccttcacttacacctttgcaatctgcttcctcggtgacgatgactataacgcatcctttgaagtggcgaagataactgtgaataagaagaagatgagtctgactgcgccaagtaagacctataagtcaactgccaagaccaaagccctgacagccaccctgaaggacaacaacaacaaggccgttgcaaataagaagatcacgttcacggtcaacggcaagacatattcagcgaccacaaactccaaaggagtcgcttccgtgaatgtgagcctgtccagtaaaaagacctactcatttaccgccaaatttgccggtgatgcttgttacggggctgtgacaaaatcgggaaaaattacgattaaatga

SEQ ID NO: 3060 - DNA, 318 bp, synthetic construct
  source 1..318: mol_type = other DNA
atggcggacatcggcgaagccgcagagaagaagctgaaaagccggatcaggaaactgaaaaagtgcaacaaggatgaagaggaaaaggtgaagttcttcaaccagctgggcctcagcttcaccatcagtctgcccacgaaaaatccggagaagcaggaggactttataatgctatacaccacacctgaaggacacatagtccatgctgagtacagctactccgaaggggaggagtttgcctccatggacattccagagaaggatttgaaggtgatcattgaatcattctcggattatgagctcaaacttctggactga

SEQ ID NO: 3061 - DNA, 1143 bp, synthetic construct
  source 1..1143: mol_type = other DNA
atgattgtaaacaatagcctcgacgagctgaagaaacgggaaagcgcccttaagatcatcaggtccattgtggagaacgagggccgcagctctctgtacgacgtcactggactgtcgggcggcttcataagcagtgaagaggagctggatctcctggagacctatgtgggccctgccatcttcgaggacgagctccaggtggttgcgaaggagcatctgggcggggagaaggcacttgcagtaaaccgcacctcctcaggcatcctcgccagtattctgtccttggtgaaggagggagagcacgtaagtcactttttagcccagtaccctgcccacccgtcaattccccgctcatgcaacattgtgggggctgactatgacgaatatatagatctaaacgaatttaaaatagaggacaatacaagtctagtggttgtgacaggctccaccatggaccaccaggtgatagatgaggacacgtttaaggaagtcattgatatggctcacgataaggacatcccggtgctggttgatgacgcgtccggtgcacggcttaggacggccgtcttcaatcaaaagagggcctgcgacctgggggcagacctcgtggtgacaagcacggataaactcatgccaggtccccgaggtggattgatggctggaaaagaggaactgatcgataaggtcaaggtcaaggcaaaccagttcggccttgaagcccagccccctctcatcctggccatggtcaatggcattaaaaactacagcgaagacaatctgatcaatgcaatctctcgtaaagacaagttctacgatatggtgtcgaaggactacgaaatgtttgaaaaaaccccaactggggtgatggtcactgaagatgctctgaaaaaacaggtggacgccttagatattgagacagagctcagcgagaaagacttgagcttcctatgggctatgattctgctcaaggacgaaggaatcatcaccatccccgctgtggggatgccaggggcctctgcgaccgttcggtttgacctgtccacccaagacgttatcgatatgaacctgggtatcttgcatgataaggtggacgattcatttaacaagttcttcagacagctgagcagatgtggaaaagtctga

SEQ ID NO: 3062 - DNA, 912 bp, synthetic construct
  source 1..912: mol_type = other DNA
atgaaacgcgagatgatcaagctcctggtgagctacgacataatttccaaagaggaagccgagaagattgattcaatcaacgatgaagccattgaagagtcaatcaaggagctggggtttggaaaaactgagcacattacgaaggaaaggatatccgagtttctcgaaactgaggagctcggggaagagattctatgcttccggaaggtcttctcgaccaacagtatttccaaattcctggccaaccatggcgccaaggaagggacggtactgatttccgagatccaaaccaacgctagagggcggtccggcaagaagtgggaggctccagacggcggagtttggatgagcatgattttaaggccggatgtcccccccgccaagataggcttgatcacactcgcaaccggtgtggcaatagcgagagctatccggtcatttgacgtggacgcgaaaatcaaatggccaaacgatatcctaatccacggcaataagatatctggtgtgcttactgaggtcattgcaacattcaatcagatcgaatatgtgatcgtgggtgttgggatcgacagcaacctgaagttggaggacttcagtgaagacatccgagaaggcacaaccaccttggaagaggagatccctgtcaaagtcgatgagaatgagctcatcggtatcttcctgaatgaatttgagaagatctatgacatctacctgaatggggatgtggaagagattcttagcgaatggcgtgccctgagcgacaccataggcaaatacgtaagcatcacccagacagggggcaagacaactcagggatacgtggtgggaatcaacaaggagggaagtctgattattgaaaaacaggacggaaaccttgagaagattatctctggcgagctgcgcacgctgtga

SEQ ID NO: 3063 - DNA, 1494 bp, synthetic construct
  source 1..1494: mol_type = other DNA
atgtttgagaaggttctgattgccaacaggggggaaattgccatacggattatgagagcctgccgcgagctcgacatgaagagcgtggcggtctactcagatgcagataaaaccagcctgtacactaactatgcagatgagagcgttcctttgggaaacccctctcccagccagtcttatttaaatattgaaaagatcattaatgcggcacttgacacaggagccgatgccattcaccccggctacggattcttggccgagaatccagagctcggacgccagtgtgagaaaaacggcatcaagctaatcgggcccaagggggagcatattgaaaagatgggcgataagatcacttccaaacagctgatgaaagaggctggcgtcccggtcatcgaagggacccctgagggaatcgatgacgtggaagaggctaaggaaatagctgaagctatcggctaccccgtgatcatcaaggcgtccgctggaggcggaggtatcgggatgagagccgtctattccgaggaggagctggtccgggcacttgaagccacccagtcggtggccctcaaaaactttggagacgcgaccgtcttcatcgaaaagtacttagaaaagccaagacacatagaatttcagatactggcagacgagtatggaaacaccatccatgtgggcgaccgagagtgctccatccagcgaaggcaccagaagctgctcgaggaggccccgtccccaatcatgactgaggagctgagggaaaggatgggtgaaagcgctgtgaaggctgccgaatatatcggatacaacagtgcaggtactgtggagtttctctacgacaatggggactactacttcctggaaatgaacacccgcatccaagtggagcacccaatcacggaaatagtgacgaacacggacctaatcaagcaacagattaaaatagcctgtggggaagagcttgaatacagtcagagtgatatcacagtcaccggccatgctatcgagtgccggatcaatgcggagaaccccctggcagacttcgcccccaacccaggcaagatcacaggttaccgctcacctggcggccctggcgtacggctggacagtggtgtgtatatgaactataccattcccacattctacgactcgatgatttccaaactggtgacaagcggcagaaccagaaacgatgccatcaatcggatgaaaagggccttgagcgaatatattatcctcggcgtaaagaccacaattccgttccacaaggccatcatgcgcaatgagtcatttctggcaggggacctcaacacccacttcgttgacgagcataagaaagggattgaagaggagatggagaaggtaattctggaggatctggagcgagtgaatcgtatgaaatctacttttatgcctgggaaaaagatagctgccatttctgccacagtgggtacgtacttcaatgctgcacaagcccagcagatgaaaaagaaatga

SEQ ID NO: 3064 - DNA, 120 bp, synthetic construct
  source 1..120: mol_type = other DNA
atgattagtatcaaaatcgtgataaaccccagctttgacatggtgaagagcaccctcaaggaaatgatcaagttctccctggagctaatgaaaattttcatcatggtcctgttcgcctga

SEQ ID NO: 3065 - DNA, 831 bp, synthetic construct
  source 1..831: mol_type = other DNA
atgatttttaattattccagtgttatcatgaagattcggaagaagaaacagctggagatgatcctgcaaaacgtgccctcgcacccaaacccaaaagtagagctggagcagtactcaaccccatcctctattgcctccgatctgatatggaatgcatataccttgggagacattagcgacctgagcgtgttggaccttggatgcggcactggcatattcgcaatcggctcttggctgatgggggccggctacagcctcgggctcgacattgaccctgagagcatcgcgctcggggaaaaaaccatcatcgacctcattggcctaaaccaaccgagtgacgtagatgtcttcaatatcaacttcatcgtgggagacatcaaccagtacaactcaatctccgaactcctgaatgataagagtattcagagcgatgaaaaatacgacaagctgatcgaatactacaatagcaacagcctgggggatgactcgaaccttaataactccaacgacggtttgatgaacggctcctttgatgagaaggacttcaagttcgccacgttattccagaaccctcccttcggttctcaggagcggggaacacgccacgccgatagaaaattcatggagtttgctatggccagtgctgaagtgatatactcatttcatatgaaaagcacagaggagtttgtgatcgattattacaatgaccttggcggggatataagccataagttcgtctataatttccccctgcccaagatctatgactttcacaagactgagtcaagggatgtcaaagtggtggttctacgagtcgaaaactttaagtga

SEQ ID NO: 3066 - DNA, 816 bp, synthetic construct
  source 1..816: mol_type = other DNA
atgcagaacagtaaagtgtccgtctttataccgaacagctttctcgctgagaccaaggacctaaagctaaaaacctctaaggtgggtctcatcggccgagccctggcggtgttcgaggtggatgaggtggtgatctataaagatctgtctattccagacagcgaacagactgacgacggggatttcattgcagaagtcctcaattatatggacaccccccagtaccttaggaaaaaggcaattcctatcaaggccgaattgcgccacgttgggatactcccgcctttgagagtgccacatcacccaactggcaagcctgagctgggcgattaccggcagggattcacggtaaaacgcaataagaaagggaccttcgtggacatcggtatggataagctggcgttttgcaaagagcaacttacagtaaacaagattttctcattcaagattacgaagtttgctaaggaggtaatcgtcacccccgacgaaccagatgacatttactggggattcaagacattaagcaccaataaaagtctgaaaaacagcctgaagctggttaatcccgacctggttgtggaaaccacaaggtatgccgagacaatcgactctatctttaacgaactgaaaacaaaggtggaaagctccaaccacatagccattgtctttggcggcccctactcatcgatcagtgagaacgtcgagtcctccaagtgggagacggtgaaaatcaacaccatccccaaccagggaacagagactgtccggaccgaagaggctgtgatcagcactctcgccatcttcaatatactgtga

SEQ ID NO: 3067 - DNA, 1011 bp, synthetic construct
  source 1..1011: mol_type = other DNA
atggtgagacatcaccagccacggaaagggtccgtggcattcagccctcgtaagcgcgttgcgaaggagacacccagaatcaaggcgtggccaagtaatgaagaaccaaagctgctgggacttgccggctataaggcggggatgacacacgccatggtggtggacaatgataagaacagcccatcccatggaatggaggtgttcacgcccgtcaccgttctcgaggttcccccccttgtgatcttggggataagatcatacgaaaaaactgctcacggactgaaggctatcactgaggtgattgccgataacttggacgaggagctctcgaggaaaatcaccctccctaaggactacgaccaatccgaagctattgcaaaaatacaggatgctctggagaagacggaggaggtccgcgtcctcgtccacactaatcctaagatggccagcgtgcctaagaagaaacccgaaatctttgaatgcgcactgggcggcagctccgccgaggagaaactaaactacgctctgggcattttagggcaggaaatcagggccagtgatatcttcagcgagggacagtatgtagacgccattgcaaccaccaaaggcaagggagtccagggggtggtgaagcggtggaacatccgaatccagtatggcaaggccatgcgcagtggaaaagggcggcacgtgggttctatcggtccatggtctccggagcgcaccatgtggacagttgcacaggccgggcagatgggataccataagagaacagaatttaataagaaagtcattaagatcggcgacgtgtcagaagtggatgctgtgaaccccgctggcggcttcattcgatatggcctggtcaaaaacgactacgtcctggtaaaaggctccgtgccgggtcccaccaaaaggctggttattctcaggcaggccatccggccgaagaaggccgacgatgcagcgcctcaagtgaactacataagcacggcctcaaaacaaggtgtatga

SEQ ID NO: 3068 - DNA, 765 bp, synthetic construct
  source 1..765: mol_type = other DNA
atgaaggtgaatgtttattcgattcaaggggaggtcaaagaggagatcgaactgcctgccatttttaacgaagagtacagaccagacctgatcaaaagggccgtcctttcagcgcagtccgcacgaatccagccatgggggaatgaccccatggcaggtaaacggacctcagcagagagctgggggtccggtagaggcgccgccatggtgccgaggataaagaccggcgccagagcagccttcgtgccccaggctatcggcggacgaaaggcccaccccgtacgtgccgctaagaaccaccatgagaaaatcaacaataaggaacggcgctttgccatccgcagcgctgtggcagctaccgtgaacgaggaattggtggccggccgcgggcaccgcatcgagaacctcgagcaggtgcccgtaattgtggaagatgatctggaaactgtcaagaaaacaagcgagacccgggagatattcaaggccctgggggtgtatgatgatgtcatcaaggccaaggacagcaaaaagataagggcgggccgaggaaagacacggggacggaagtacaaatccggtaaaggacctctcgtggttgtaagtgaagacaaaggcattggactaggcgcaagaaaccacgctggggtcgacgtggtggcggtcgacaacctgaatgccgaactgcttgctccaggcacacatgcgggtaggctgacgatttacactaagagtgctgttgagaagttaggcggactcttccagtga

SEQ ID NO: 3069 - DNA, 261 bp, synthetic construct
  source 1..261: mol_type = other DNA
atggacccatatacaatcattgtcaaaccccatgtgacggagaagactatgaatctcatcgaccagaacaacgagctgaccttcgttgtccggagaaccgccacaaaaagccagatcaaaagggcgttcgaatttctgtacgacgagaaggtggtacgcgtgaacactcacataaccagcaaaggactaaagctggcctacgtcaagctcgctgaagagggcgaggccgaagatgtggcagtgaagatgggggtgttctga

SEQ ID NO: 3070 - DNA, 726 bp, synthetic construct
  source 1..726: mol_type = other DNA
atgggaaagcgactaatacaccagcgtcgaggcagaggaacacctgctcatcgggtggcctctcacaggttcaaggacaagatccaatacagggcttacgatgaccttgagaaggaagggagcctgaaaggcaaagtcgtgaaaatcattcacgacccagcaaggaccgccccgattgctctggtcaagttcgagaatggggagaagcgacatatactggcgcctgagtcaattcagattgatgatgaaatcgagtgcggtatcagcgcccccatcagctttggaaatacattgccactggccgaaatccccgagggtacccctatctacaatattgagaacagacccggagacggcggcaggtttgtcagatcctcgggaacctatgcctcactcataactcatgatgccagtcaggccgttgtggaactgccaagcggggaactcaaatccttcaacccaaggtgtcgcgcaagtatcggggtggtggctggaggcgggcgcaaagagaaacctttcctcaaggccggcgtcagatggcatgcgtataaggctaaaggcaagaagtttatgacagttagaggcgtggccatgaacgcggtagaccacccccacggtggcggtaaccgccagcacccagggcggccgaccactatcagccgccacgcaccccccggacggaaagtggggtccattgcagccaagcggacgggcaagcggcgctga

SEQ ID NO: 3071 - DNA, 411 bp, synthetic construct
  source 1..411: mol_type = other DNA
ctggctcgcaagatatttaaatacagaggatatactatcgaggagctcaaagaaatgtcccttgacgagttcattgagctgctgccagcacgccagcgcaggagcctgaagagaggcttcctccctcgacagcagagcgtgttggataaaatgcggaagatgcaaaagatggataagaagggtggcaaaccgctagtagtgcgaactcactgtagagacatgatcgtcattcccgaaatggtggggaccacgttcggaatctacaacggcagggactttgtggaggtcacattcacccctgaaatgctcggctgcttcttcggtgaatttgcccccacaagggcccgggttcagcatggagacccagggatgggggcgacccggtcaagtatgtttgtgcccctgaagtga

SEQ ID NO: 3072 - DNA, 468 bp, synthetic construct
  source 1..468: mol_type = other DNA
atggccaaaaacaaatacgcctataacaatccagatgcggacgaatctaagacagcccgggctatggccaaaagcattaaggtgtccccaaagcattgtgtggagatctgcagtgccatacgcggcatggacgttgccaaggcaaaagcatacctgaatgatgttatcgacatgaagaaggcggtgccttttaagagacacaaccgggatgtcgggcaccgtaaaggaatgaaaggctgggctgcggggcgctaccccgtcaaggcttccaaggcaatcctaactgtgatagaaaacgccgaggccaatgctgaatataaaggtatggacgtcgagaacctcaagattgagcacatcagctcacacaggggaatggtaatcagaggcgccaggccccgggcattcgggcgagtcacgcccttcaacacaccgaccacccatattcaggtggtgctggtggaggcttga

SEQ ID NO: 3073 - DNA, 756 bp, synthetic construct
  source 1..756: mol_type = other DNA
atgatagaaaaagatttcgttacagaggggctcagacggacccgaatagacgagtatctagagaaagaactggagcgcgcaggttacggcggaatggagatacaggtgactcccctgggaacaatggtgattgtctatgctgagcggcctggtatggtgatcggtcgggggggcaagaccgtcagggccatcacccaaagcttgaagacgaagttcgacctggacaacccacaggttgaggtaaaggaggttgccgtgccggagctcaacgccagaatcatggcttccaagattgccaatatgctccagcgaggcatgcactttcgcagggtggcttacagcacaatccgtaaaatcatgggcgccggcgcccagggcgtggaggtgacaattagtgggaagatccgcggatcacggtctgctgtggcaaaattcaccgagggatacatcaagaaatgcggcgaacccgccaccagattcgtaactgaggggtttgcgacggcacctttaaagcccggggtgctgggaattgtggtcaggatcatgccacccgaagcaaccctgcctgataaggtggatatcattgccccagttgaagtggaggagccggtggtagaggccgcggaagaagacgtcgaagagatcgaagaggaagtcactgaagagattgaagaagtcgaggaggacctggaggagcttgaagaggagcttgaagacctggaagagttggaggctgcggaggaagatgtcgaatga

SEQ ID NO: 3074 - DNA, 207 bp, synthetic construct
  source 1..207: mol_type = other DNA
atggcaatcctcagaagcaaggaaatctgggagatggaaatagaggacatcgaggaaaagctggtggagctgaaggcggagctggccaagaacgtgtccaaaagcgcagccgccggggtaaatgagaaccccggcaaaattagggaactcaaacggacaattgctcgcgtcctaaccatcatgaaccagaaacagaaggagaattga

SEQ ID NO: 3075 - DNA, 345 bp, synthetic construct
  source 1..345: mol_type = other DNA
atgtcaaagatctgtgacgtgtgtggactccccgaagagctgtgcgtgtgcgaagagatcgcgagggaggtgcagtctgtaaaagtgtttacagtgcggcgccgattcgggaaactaatgaccatcgtcgaaggcattgacgaacacgatatagacattaaggagctgaccaaaacactgaaagccaagtgcgcctgcgggggcacggctaagaagggtcagattgagcttcaaggcgatcataaggcaagagttaaggaggtcctcagtgaaatgggattcagcagcgacactatcgagatccgggactccgataagaaatacaacaagaggagacgccactga

SEQ ID NO: 3076 - DNA, 336 bp, synthetic construct
  source 1..336: mol_type = other DNA
atgataagctcaaataatatcttctaccatgaactcatcgggctggagctgaaagtcgtggactcgtccaaccccagcctcatagggctgtgcggtaccgtgattgatgagacaaaaaagacgctccttatcgaggtggaggaaaaagtcctaagtgacgacctgggcagcaatcaacagaaccactttaacctgatttataaggagaagctgattcagaaggacgtgtccgtattccagttcaaggtgccagatggaaccatcgttgaaatcgacggcaagatcttattgaaccggccggaagataggatcaagaagcgctacaaaaaaatttga

SEQ ID NO: 3077 - DNA, 321 bp, synthetic construct
  source 1..321: mol_type = other DNA
atggttgggctgaacgtgaaggaaccagaaacaaaatgcgacgaccctaactgcccgttccatggtaatctgagcgttcggggacaggtcctggagggggtggtgaccaccaataaggcagagaggactatcacagtcgagcgcagtttctacaagttcatacgcaagtatgaaagatacgagaaacgaaaatcccggattaacgtgcacaagcccgattgcatcgatgtggaggtgggcgacgccgtcaaaatcgcggaatgtaggcccctaagcaagacgaaacactttgtactcgtggaggtcaagggcgacgattga

SEQ ID NO: 3078 - DNA, 399 bp, synthetic construct
  source 1..399: mol_type = other DNA
atgaagccgacaacctcaagcgtgacaaaggccctaccaatcggcgccagactgcagtgcgtggataacacgggtgcccgggaaatcgagattatttccgtcaagggatttaaaggggtgaggaggaggctcgatgtggctggagtaggcgacatggttgtggccagcgtgaagaaggggaccgctgacatgagacgcgaagtcgtcaacgccgtggtggtgcgccagaagaaagagtaccgacgggcggatgggctccgtgtcaaattcgaagacaatgcggccgttatcatcactcccgagggagtactgaagggttcggagatccggggccctgttgccaaagaggcagctgacaaatggcccagcgtcggcagtgcagcatccatactgatttga

SEQ ID NO: 3079 - DNA, 342 bp, synthetic construct
  source 1..342: mol_type = other DNA
atgagcattcagccccggaaacaaagaaaggccctctatacggcgccactgcacatacgccggaaaatcatgagcgcaaatttgagtaaggaactcagagcagatattggcaaacgttcactacccatcaaggtaggggacaaagttcaggtggtgcgcggagacttcaagggccacgagggaaaggtggaatctatcgacgccaagaggtacaaagtgaccgtggaaggcgtcacactgaacaagcctgatgggaacgctgtctttcttccaatccatccgtccaacctgatgatcatagaggccgatctgaaggacgagcgaaggattaaggaggagtga

SEQ ID NO: 3080 - DNA, 735 bp, synthetic construct
  source 1..735: mol_type = other DNA
atggcaaagatgggcagcagaaagcatctgaaaagatataacgccccgaagacctggcctatccatccaaaagaagatacttggacagtcaagcctgcccccgggacgcacgccatcaatgactcattgcctctgctcgtgatcatccgcgatatcctggggatagccgataacagcagggaggcgaaaaggctcatcaacacaggtaatgttctcatagacggacgcgccaagaaagattacaagtttccagtcggattcatggacatactgtccatccccaagacaggggagaattaccggatactcctggacacgaagggccggctaactctgcaccccatctctgctgaagacgctgagttcaaattagctaagatcgtaaacaagagcaccatcaaaggcggaaaaacccagctaaaccttcacgacgggcgaaacgtgattgtggaagaagacaactactcggcatacgatgtggtctgcctcaacattcccgagcaggagattaaggaaaacttcgaatttggcgaggacgtggttgtgctggtgaccggtggcaagcacacaggagagctgggcaaaatccaggaggtcattgtagaccagtccagtaaagcaaataccgtcattatcgagaaggcgaataaggacaccttccttactctgaaagattatgcctttgtgattgggaaggatgaaccagccattgacctgttggaggtgaatcaatga

SEQ ID NO: 3081 - DNA, 522 bp, synthetic construct
  source 1..522: mol_type = other DNA
atgaacccaatgaacgaagtggtcatagccaaggcaaccatcaatatcggggttggagaggccggcgaaaaactgtcacgcgctatgaccctgattgagaacatgacagggcagacccccgtgaagacatactccaaagtcactaacccagaatggggcataagaaaacggcagcccattgcctgcaaggtgaccctccgtggggagaaggctgaggatgccatcaaaatggtgctagatggaatcaacaacaggctgaggccaagtcagttcgacgcacagggtaatgtgtctttcggcattcgagagcatatcgacattcctggaatgaggtatgacccggacattggcatattcggcatgaacctcagcatcacgtttgaaaagcctggttaccgcatcaaacggcgcaaaatccaaaagaagagcattcccaagcggcacagaatcactcccgaggaaacgatgaagttcatggaagagaattttaatgtaacaatcgcggaggaggaagagtactga

SEQ ID NO: 3082 - DNA, 153 bp, synthetic construct
  source 1..153: mol_type = other DNA
gtgattgtcctccccagaaaatatggcaaggcctccaagaagtgcagtcgatgcggagaccacagcgcgatcgtgagccgctacggcctgaacctgtgcaggcagtgtttccgggagatcgcaccaaaaatagggtttaagaaatacaattga

SEQ ID NO: 3083 - DNA, 393 bp, synthetic construct
  source 1..393: mol_type = other DNA
atgaccctcatggacccccttgcagatgccctaacaaacatccggaataacgagcgccaggtgaatgaccactgtacgattagcccagcgtccaaactcatcggacgggtgctgagcacaatgcaaaaggagaattacattggcgaatttgagttcatcgacgacaacaaggctggcaagttcgaggtggagctggaaggtaacattaaccagtgcggggtaataaaaccgaggcatgccgtcaagaaagatgaatttgagaagttcgaaaaacgctatttgcctgcaaagaacttcggcatcctgatcgtcaccactcccgaggggataatgacccacagggaggctaaggaaagagggatcggcggacgactgctggcctacatgtactga

SEQ ID NO: 3084 - DNA, 534 bp, synthetic construct
  source 1..534: mol_type = other DNA
atggtcctggctgcagctataagggaggagattgaaatcccggagggcgttgaggtgataatcgatgatgagatatccatgaaaggccccaacggcgagatttctcggaagttcacataccccaatgtgactattaagaaggaagacgatatcctagtgctcgaaacggccttcccaaaaaagaaggacaaaagtatgatcggaacgacacgggcacatctgaacaacatgatcaaaggagtgaccgaagggtttacctatcacatgaaaatcgtgtacgcccactttcccatgaccgttaaggtcgagggagacaaggtgaccattgacaacttcattggggagcgccaccctagaagctcaaagattgtaggcggggccaatgtgcaagtaaaaggtgatgaggtgatcatcacaggagtcaacaaagaagacgtcggtcagactatggcgaatctggagcaggccactaagatccgcggcaaggacccacgagtgttccaggacgggatctacctcaccagcagggaatga

SEQ ID NO: 3085 - DNA, 345 bp, synthetic construct
  source 1..345: mol_type = other DNA
atggtgatcctgatgagcaaagatttcaagcgccaggagtatgcccggtacaagaagttgggaaccaaatggaggcggcccagaggtaagaccagtaaaatgcgtaggtacgaggcaggaaagcctgccatgccatccatcggctaccgcactccgagggctacaagaggccttcacccctctgggtacaaagacgtgctcgtatataacatgaaggacctcgaagcgctcgacgcagagacggaagcggctcgaatcagcgcctccattggcaaacggaagaaggccctgatgctggagaaggcctcagaactagggataaaagtcctgaatcgccagctgtga

SEQ ID NO: 3086 - DNA, 447 bp, synthetic construct
  source 1..447: mol_type = other DNA
atgaatctaacaacccagaggagactggcagcctccatattgaaggtgggcgtgaaccgggtgtggatcgatccggaggaagtagaagaggtgtcgcgggccattacacgcgacggcgtcaaacagcttatagatcagggtattatcaaagctaggccaaaaacggggattagtagctatagatctaaaaagctgaaggagcagaagaagaagggaaagcgaaaaggcaggggctcagtcaagggagcaaagaacgcgcgtacacctaagaagcaagtttggatgaaaaccatccgggccctgagaagcgatctgaaggagatgcgggacactggggaaatcgaccccaccacctatcgcaagctctacaagatggctaaagggggagccttccgcagcaagtcctacatgaaaacttacgcccgagaccacgacctcatcaaatga

SEQ ID NO: 3087 - DNA, 582 bp, synthetic construct
  source 1..582: mol_type = other DNA
atggccagcgggtcaaattacaaagtggctttccgcaggcggagagaaggaaaaactgacttcgccgctagggcgaagttagtggatgtggacaaggcacgactggttgtgagaatctccaacgctaattgcatcgtgcaagtgatcaatgtcggcctcacaggcgatgagacggtcgtaagcgcccacagtaaggaactgaacaagctgggctggaaaggcggaaacaagaacaccagcgccgtatacttgaccgcctacctctgtgggaagaaggcgctcgccgcgggggttgagtacgccatcgcagacattggcctaaaatcccccattaaaggagctaaggtgtttgcagccgtcaagggtgctgctgacgcagggctggatgtgccgtatggcgagtcgatcataccaagtgaagaccggatcaatggagagcacattgccgcatatgccgagagccttgatgaggacgaacttaacaagaagttctcccagtatctggcacgcggtctgcagcctacagacctgccccagcattttgaagagattaaaaacaaaatagatgaggccgaggtctga

SEQ ID NO: 3088 - DNA, 642 bp, synthetic construct
  source 1..642: mol_type = other DNA
atgtcgtttaatatggatgattgggagcccaaaacgaatttagggaaggaggtgaaagcaggcaacattaccgatattgatgagatcttcgaaaagggtctcccaataatggaacttgaaatcattgacgccctgctgccggacctggaagaggaggtcatggacgtaaacctcgttcagcgaatgcacaaatctggccggaaagtgaactttcgggtgatagttgctgtcggcaaccgtaacggctacgtggggttgggacagggtaaggcgagggaagtaggccccgccatccgcaaagccgtggataacgctaaatacaatgtcatcaaggtacgcaggggctgtggagactgggggtgcgtctgcggaagacaacatacagttccattcaaggtgacagggaaggcaagcagtgtgaaggtgaccctgagacccgcgcctgcaggtgtgggcctggccatcggggacgtcgggaaaaccattctcagccttgccggatataaggacgtgtggtcccaagccagcggccagactcagaccactgtcaacttcgctaacgccgtgttcaatgctctgaaggagtcctgcaagatgaaggcatcagagcaggacctaaagaatatgggagtgatccagtga

SEQ ID NO: 3089 - DNA, 459 bp, synthetic construct
  source 1..459: mol_type = other DNA
atgtatttggtgattcgtgtaagggggacaactggggtgatacagggcattgcaagtaccctggagatgctccgcctaaacagaatcaatcacgctgtcctggttgaggaaaacccgagctacaaagggatgctgcagaaggccaaggactacatcacatggggagagatcgatgccgagaccctcacggagataattgagaagcggggacgactggtgggcggagctcggatcagcgaggagtacctggcggaaaacaccgattattccagcttcgaagaattggccaatgccttacttaacggtgagctcaaagcgcaagacattaatatgaaacctgtctttcggctgcatcccccaagaaagggatatgagggcatcaggcactcgatcaaagaaggcggctcactgggttaccgcggggaagacatcaactcccttgcaaagaggatggcctga

SEQ ID NO: 3090 - DNA, 444 bp, synthetic construct
  source 1..444: mol_type = other DNA
atgattcgcaaaggcaagaagatcaacaagatgagaggtagtaggagcaacgggggcggctccgtcaagcgccgaagaggagcaggcaacaaaggtgggaaagggaaggctggagcgggcaagcaccattggagcaccactgtcatcgagaaccggtattactttggaaaacacgggttcaagcggccgcagaagaccatccacaggtcatacccagtaaacctcaatttcctgaatgataaggccgaggagttcctcgagaaaggaatagccacgaaagacgaagacgatgtgattgtcattgatgtgacagacctaggctacaataaagttctggctacaggctcgcttgacatacccctggtggtgaagagccctgccttttccgaagcagcgatcgagaagatcgaagaagccgggggagaggccgtggagttgttctga

SEQ ID NO: 3091 - DNA, 1371 bp, synthetic construct
  source 1..1371: mol_type = other DNA
atgttcctcgagaattttaagcccatatttcagctgcttcctgaggtgaagactcccatccatcgccaggactttagggaaaagctgaagtggacggctatagtgttagttctgtactattttctaactctgattcccttatacgggctcagccccgcggccgtggaccagtttgcacagctgcgtgccgtgatggcaggcagcttcgggtcgattctgacactggggatcgggcccatcgtcacagcgtcaattgtcctgcaactcctcgtcggggcaaagatactagatttggacttgaccttgcacgagcacaaggccatgtttcaaagcacgcagaaattattggcgattatcttcactatatttgaagcaggcgtgcttgtcttcacaggaagcctggtggccatcgacccatctttctacccaatcatgctcctccagctggtgattggagctattatgatcctctatctcgatgaggtggtgtccaaatggggattcgggagtggcgtcgggctattcattgctgctggcgtagcagagaccattatcgtcggcacatttaacttcttgccagcctccgctgccagcaccactgctagcggcatccttccggcgtttatccagtcaatcatcggtggagcaccgaatttccagatcttgataccattgatcgctaccatcgtcgtgttcctgatcgccgtatatggtgagtccatgcggatcgagatccctatttcccacggccgggtgaagggacacggtagaatccgaggggccgtgggcaaataccctctgaagttcatctatgcaagtaacatgccggttattctcacctccgcgctgctggttaacgtctcccttattgccagtctcttccagaaacttggcttccctatatttggagaggtgtcaggcggaagggccatcagcggactggccttgtggctcaccacccctaacagcataagcgtcctgtttaccaatccccttagggtgctgttctacgccattgtgttcctgggctgctgtgtgctcttctcatggctatgggttgaaatcagcggctccctgtcggctaaggaagttgccaagcagctctacaactctggcatacagattcccggttttcggagtagcaaacgccaactgtatactatcatgaagaaatacatcccagctctgacaatccttggtggcctgttcgtagggattctggcatttattgccgacctgaccggagccctgggcggcggtacaggggtactgctgacggtggggattgtgtacaagctctacgaagagatcgcccaagaacagcttatggagatgcatcccatgctgagaaaattcttaggaaacgattga

SEQ ID NO: 3092 - DNA, 558 bp, synthetic construct
  source 1..558: mol_type = other DNA
atgaagctggtagtgttaacaggcatcccaggaagcggaagtactaccgtgcttaaaaaagcgctggaagaggttgattatctgcatctgaactacggggatattatgactgaaatcgccgtggagaaggggcttgttgagacccgggacgagctccgaaaactgcccgcagacacccagaaagagatccaaaaggcagcaggaattagaattaaggaaaagtcggaatccgaaaatgtcatcgtagacacgcactgcaccataagcacccccagcgggttcttgcccggcctgcctaaatgggtcctggagggtctgaatccagaccacttcgtgctcatcgaagcctatccggatgagatcagggtgcggcgcacaaacgatgacacaagacagcgcgatgctgagtccgctgaagccattcagctgcatcaggagatgaacagggccgcttcaatggcctacgccacactcaccggcgcgactgtgaagatagtctacaaccacgacaatgagctagacgacacggtcgccggcctcgtggagtttttgaagtga

SEQ ID NO: 3093 - DNA, 609 bp, synthetic construct
  source 1..609: mol_type = other DNA
atggcgtaccagggaagttttcttctagggatctcctggttgcagccagtgttcgatgcaatgaacgccgtcctgaatcccctggtgcagttggaccccacacctaacaaccctgtactcaccgtctttgtgatcagcgccctcattagcctgctcacagttaccgcacagaagttactggtggaccaagacaagatgaatgagatgcaagctaattccaaggccctccagaaggaactcagggaggctcaaaaaagcggcgacgccaagcagatcgcaaaagttcaggccaaacagacggatatgatgcaggaccagagcgaagtgatgaaaatgtcattcagacccatgattgtcacaatggtgcctatcctgctgatattcgattggatgtggcaatccgccatacgctcgctgattgtggtattcccgccagcggtgtattattgcaccctgacgccaatcttccactcactaggccagatgctttacggcggtaacattactaccatcccctttggggtcggctggctgtggtggtacttcatctgtacttttggaatgagtcagatcattcggaagtttatgggattcaagaacgggttctga

SEQ ID NO: 3094 - DNA, 267 bp, synthetic construct
  source 1..267: mol_type = other DNA
atgcctgcaaatagattccgaagcagaagttacaagcgtacaaataccaagacccccggcggcgtcaacgtgctcaggtataagaagaaaaaacccagcaagcacgtgtgcgcggaatgcggcgctgtactacacggggtgccacgcggacgcccgttcgaggtcaacaagctggccaaatccaaaaagaggcccaaccggccatttgggggaaacctgtgtcctgaatgcacgcggaagcatttcaagcaggaggcccggaaatga

SEQ ID NO: 3095 - DNA, 519 bp, synthetic construct
  source 1..519: mol_type = other DNA
atgatcattacaatcggtggcgtggcaggcagtggaaccactacggccgcaaaggtcctgtctgagaaactgggggtgccgtacatctcagccggggccatctttcgtgagatggctgaagagcacgggatgacgcctgtggagttcggcaaattcgctgaaaacaacaccgacatcgataaggagattgataatcgccaggcgaaactcgcagaggaggctgacgatcttatcattgaaggaagactgtccgcatactttattgatgcggacctgaaggtgtgcttcaccgccccactagacgtccgagccaaacgcgtatgtgaaagggaaaacaagtcggttgagactgcccggctggagataatcgctcgggaggagagcgaagccataagatacagggacatccataatatcgacatcaagaacatggacatttatgatttgataatcaacaccaatagcttcgaccccgagagcatttccgaaatcattatcacaacactcaaggtgatatga

SEQ ID NO: 3096 - DNA, 168 bp, synthetic construct
  source 1..168: mol_type = other DNA
atggccgctatagaggtgggcagaaagtgcatcaagaccgcgggccgggaggccgggaaagagtgcgaaatcgtggcaattatcgatgaaaacttcgtagaagtcaaaggagacgaggtgaagaataggcgctgtaacattaaccacctggagcccatcatggaatga

SEQ ID NO: 3097 - DNA, 2514 bp, synthetic construct
  source 1..2514: mol_type = other DNA
atgatcctggtgttcaagatgggcattttcgacaaggtgaagtcagcttttgagagcagtaaaaacttcaagtacctggatgacttgattcatagcgggctgaacgagattgttctggacgatgacatcagccttagtaagaatgagaaaaacaagtactctaacggcattgagatcgagatcgataatctggtgattgatggaaacggccatgccatcgatgcccaggggaatggtagcatcttcctgtgcactggtaaaaacatcgtggtgaagaacatccatttcaagaacggcatccactccaatgggggtgcaatagaaaaccggggggagctgactatcatggattccacctttgacggcaataacgcctccctgggaggggcggttttcaacgacggccctaaactaatgatcgctaagtccaccatcaccggaaacatcgccaaagagggcggcggggccatctataataacgatggcgaggtgtatatcagcgaatccatgatcaacgagaacgtcagcagttttcatcagtatagcggcggagcaatttacaacaagggcgagttgactattgagaaaagcaccctcatcagaaaccacgccagttttggcggagcaatagggaatattggtcagctgaacattatcgactccacaatcagcaacaatgaatccagtggtgacggcggtgcaatttttaacgataacgctagcctgagcatttccaattcaatgattgaggctaacgtctcagatgggttggaaggcgggggggcgatctacaacaaggagggcgagcttaacattaccggatctgtcctgaagcagaacgaactggtcggccagataggaaaggggggcgctatttataataatggcggcaacctcaatatcgccggttcaagcctctgcaaccactccataaacttttttgggggtgcgatctataacgacggcggcaagatcaacatcgcggaatccaaattcaatgagaactcctccaacaggaatggcggggcaatatacaacgaaggtgaagtgaatatccggaagtcatccatcaagaaaaacaagtcggacggcggggtaatagagaatataaacggagatttcaagatttttaattgcgaatttttctcaaacgaatctcaaggaaacatcatattcaatcaggattcattagagattaactacaccgactttaaggataaccgatcgaagtcgatgctgctgaacgatggagtcaaatccaagatgagccttgttaaaggggagatcaatggtaacgacgttaaggacacacttatcctcaatgaaggaaattctctcaccatttctgaaactgtgtttgagaacaacttgatccccaacggggatgccatcgtcaacagcagtaatctgattctgacaaacccaaagataaatgacgacaatcaggaaataagaaaccaagggaacctccttttaaaaaggtcctctctagatatcaaaggcaagatcaatggggaggggaagattgaaacagatgaccattccaatgaagataaatttgacttcgggtacctggacagcctaattcacggcagtcccgacaaggagattgtgctggataaagacataaaactggaaaattacgaggtggatttctacgaggggggcatagagctggatttcgatgacttgattattaatggcaatggcaagacgatcgacgctcgaggaaagtcccgcattttcacaataagtggaaaaaacatcacgctcaagcacattacattcaagaacggacacagttacaaaaattacgacaacccgttgaataacaacggaggggcaatcagaatcaatgccaatgccaatctcacaattaccgactgtaaatttttagacaacctctcagaggactatggtggggtgatctattataacggctctggagacctcgtactcaccgcctcaacaatgaaaggcaacaccgccgagaacgacggcggtgccatcttcagtagcggcgaggtgaaaataaacaaaagcaaatttatcaacaacagcggaaacaatggcggtgctattgcaatcgtaaacagtaatgataaggccagcgtcactgagagcatcttcaatgaaaacgccgccgattcgaagggaggagccatctggttccataatagtaatattgcactggccgactgcactttcaatgacaactatgctacgtgtggagcggcaatttaccaggaaattagcaagggcagcatcagcaattccacctttaagaggaacctatcatcgtacgcctactggcacgacggaaagctggtgacgaataagaaccacgctatcttcatcgacaccggttctggactgaacgacttcaatcaagaccgggacaatatcatcaactgtgatttcattgacaacaataataatctttacgctcagaaacacgatctgatcaagtctcgcctcgatgagcacttggctctgtggaaacgcaatctttga

SEQ ID NO: 3098 - DNA, 834 bp, synthetic construct
  source 1..834: mol_type = other DNA
atgctcgaggtgcggaacattaaatactcatacaataaggattatcaagcactgaagggagtgagcctcaaggtcgaagagggtcagatggttgctcttcttgggaaaaacggtgcgggaaagtcgaccctgttcctccatttaaacggcatatacgaacccgacgagggccaggtctttatcaaaggggaagagttgaagtatgacaagaagtccctgctgaaattcagacagaaggtgggaatcgtcttccaaaaccccgatgaccagatctttgctccaactgtcgaagaggacgttgccttcggcccgctaaacctgaagctgcccatggaagaggtgcaaaaacgcgtgacggaggccttggcacgagtgggcatgagcggctacgaaaagaccgctcctcaccacctttccggcggtcagaagaaaagggtagccatcgccggaatcctggccatgaaaccagagattatggtgctggatgagcctacagccgggttggaccctcagggggtgacagcattgagcaatctactcaaggaactgaatgatgaaggaatcactgtcataatcagtacgcacgaggtgaacctggtacccacctatgcggaaaaggtctttgtactggtggatggggagctggtggccgagggcaccccaaaagaaatctttgcacagccagaaattctcgagcaggccaatctcgaggttcccattgtgacagagctcttccaggagcttgagaaagagggctacgacatgaacgatgactacccgctgaccattgacgaggctaaggagaagttcctggaactgttaaacaaaaattga

SEQ ID NO: 3099 - DNA, 693 bp, synthetic construct
  source 1..693: mol_type = other DNA
atgaaatttgatatggattatattgctcaccacaacgagctcagcgaagcaaatccttattataaactgtttatcaccatcattttactgattgtcactctcgctctcgacaacctgtactttgacattttcatgttcatactcttctccatcataattcttggagttgcgaagatcaacatccgctcttacataaaattcctgaccattccaatggccttccttatcataacatgcctatttctgatcttcttctttggcagcggcaaggtcatctaccagaccggtttctttggaatcgtggtcaccgacgactcctggcattacggtctctacacgtttttcagggtgctggggtgctttcccatcctaggcttcctcgcccttacaactcctattgccaagatcttccactgtctggaaactcttaaggtgcccaaaatcgtgattgagatcgggctgctgatgtacaacacaatcttcatcttcttgaatgagattgatgtgatgcagaaggcacagaagacgcggctcgggtataactcctactggaatagtttgcagtgcctgggctcgctggtaagcaatatatttctgagatcactggaaaaaagcgagaccttgcaaaacagtttagattcacgaggctacgacggagagctgcccgtgtatatcccgccaaaggaggaatga

SEQ ID NO: 3100 - DNA, 288 bp, synthetic construct
  source 1..288: mol_type = other DNA
atggagcggacaacccttattattctggccgtgatctgcgcgataatcttcattgcaccgctagtcatgtacagcggcctgggtgaggatgacggatactttggcggagccgacgacgccgccggcgaggctatcgaggaatctggctttaaaccctggttctccagcatatgggaaccaccttcaggggaaatcgagagtctcctctttgccctgcaggcggctatcggtgcaatcatcattgggtatttcttcggctactggaggggacaggggaaggaagagtga

SEQ ID NO: 3101 - DNA, 666 bp, synthetic construct
  source 1..666: mol_type = other DNA
atgcatattatggagggatatctgcctttgacatggtgcatcatatggttcgtcgtgagcttcatcgttgtcgcgtacgggatctatcagataaaacagattgtcgatgagacacctgactccaaggccctgctcgcggtcagtggagcattcatgtttatcctgagcagtcttaagctcccttccgttacgggaagctgctctcacccgtgtggcaacggattaggggccgccctcttcggccccgctgtgactgctgtgcttgccactatcgtcctcttgttccaagccatcttacttgcgcacggcggcctgaccaccctgggggccaacatcttttcaatggggattatcggccccttcgtggcctggctcgtgtacaaggcatgcatcaaggccaacatttcgtcaaccattgcaattttctttgcagccttcctcggggacctgctaacttacgtggctaccagcttccagctggcttttgcattccccgctccctcctttggcagcgccctgacaaagtttctcgtgatctttgcagtaacgcaggtgccactggccattggtgaaggcatcctgaccgtgatcatatgggaccggctgaaagcttacaagccaaaactattggataaactgggtgtactggctccaaatgaagcctga

SEQ ID NO: 3102 - DNA, 687 bp, synthetic construct
  source 1..687: mol_type = other DNA
atggagaaaggaaaattatacggggtcagcattggccccggagatccagagctcatcaccgtaaaggctatgaacatcataagtaaatccaagtatattgccactccccacactggaacaggggaatccctggcactgtcaatagtgtcccaggcgatcgacttgtccaacaaggagatcatgctcttggagttccccatgacaaaggataaggacatactcaccaaaagccacaacgaggctgccgaagcaatcatcaaggtgctggacagtggcgaggatgtggcaatgctaaacctcggggacgtgaccatctactcaacgtttgactacactaaggataaactggtggagaggggctacgacgtgcaggtaattccaggtgtcaccagcttctgcgcctctgcctctgagcttaagatcggcctgacaacgatgaatgagcctctccatatcattccagccagcggaattgacatcaaagaagctctgaagatgccgggcagcaaggtcttcatgaagatcgggcggtcgatgcctaagctgattgaagccattgaggaactgggtcttcaagacaatgtgtatgcggtggaaaactgtggcctggaaaatgagaaggtgtataaggggctaaaagagtttgatgaaaaaatgggctacttcaccatcgtcgttgttaaatga

SEQ ID NO: 3103 - DNA, 1140 bp, synthetic construct
  source 1..1140: mol_type = other DNA
atgcaagataaacgactggtcaaccagcagttattgcggtgcgggtacacaacaggaacatgtgccgcggccgctagcaaggctgccactaccatgctctttgagaaggagcgcgtggattcagtctcgatcacaactccaaatcagacgagccttaacatagatgtgctaaaccctcagctgactgacaagaaggcatgctgctgtatccaaaaggacagcggggacgatccagacattaccaatgggatactggtcagcgcagaggtgtccctgaccgaatctaagggtatcaatatcgacggaggtaagggcgttggcagagtgaccaaacccggtctggaccagccggtgggaaacgccgccattaactcagtgccccgcaagatgatcgaggattccctgaacgaattggccaggcattacgactacgatggaggattcaacgtcatcatcagtgtccccgaaggtgaggagatcggcaagaaaacattcaacccggaacttggaatcgtgggaggtatttccatactgggcactaccgggatcgttgagcctatgagcgctaaggctcttgctgattccatcaaagtggaaatcagcgtaatcgcagcagagagcaacgagtccattctcattttcctcggcaatttcggaaagaaattcaccgaagaggagctgaaactgtcgacgagccccggcattatgtgcagtaactttatagatgtggccttggacagttctgttgagtatggctttaagaatatccttctgattgggcacattggcaaattcgtgaagctcggcatcgggctcttcaatacgcactcccacaacggggacggccgtatcgaagcattactgtcatgtgccctggaggccggggccgacctggagaccctaaaggccataaacgcttgtgtaaccaccaatgccgtcctggacatcttgtatgaaaaggagctcctggacaagaccatggaaatactgaatgacaggattcagcatagaattgataaacgggtgcctccagaggcgaacattggctttatctgctttgcaaacagtggggagtacgagggcatcctcttcgaatctgataatgcgaaagaactcatgacaatttggaaaactgactga

SEQ ID NO: 3104 - DNA, 756 bp, synthetic construct
  source 1..756: mol_type = other DNA
atgattcattttgtgggtgcaggcagcggtgccgttgatctgataacagtgcgaggagctaacctcctgaaagaagcagacgtaatcatctacgcagggagcctggtcaatccggacttactgaattacgctaaggactcctgcgaaatttatgacagtgctaaaatgactctggacgaagtactcgacgtgatgtttgaggccgaaaaggaaaacaagatgacagttcgcctgcacacgggcgactccagtatttatggcgctatccgggagcagatggacagactggatgaggtggagattgactacgatgtgtgtccaggcgtctcaagcttctgcggggctgccgcctctttgaaggccgagtataccctgcctgatgtcagccaaagtgtgataatcactcggatggcaggaaggaccccagtgcccgagaaggaaagcatcgccagcttcgcagagcacggcgccaccatggtgattttcctcagcacagggctcctgaaggatctctctaaagagttggtcaaggggaggtacacggaagacacccccgcggcgatagtctataaggccacctggcccgatgagaagatcatgcactgcacggtgggaactctatacgaaaccgccaaggagaacaacgtgacaaaaacagctctgatcatcgtgggagatgttctagactccgagtactccctttcacgcctttacgccgatgacttttcgaccgagttcagacaggcgaaaaaatga

SEQ ID NO: 3105 - DNA, 1023 bp, synthetic construct
  source 1..1023: mol_type = other DNA
atgaagatttcaatcatcggcttcaccgacaacggcatggaaatcgcctataaacttagcaactccctatcagaggacaacaacatatccttcactcgatgtggaaaaggagagctgtctatttggaccgaagagcacttttcggattcggacgctcttatcttcattggtgcgataggcatcgccctcagggccatcgctccttacatcaagaccaaaaccaaggaccccgccgtggtagtagtggacgagctgggacagttctccattcctatcctcagcgggcatatcggtggagccaatgaactggcactccagatcgccgatattttaaacgccatcccagtcattacaacagcaacggatatcaacaatctatttgcaatagacacgtgggcgaaaagccaaggcctcaagatcctgaacccagagtgcatcaaactggtgtcctccaaattgctgaagggggaaacaatccacataaaatctgactaccccatccaggggaacttgcccaagaaggtccagatcaacgatttagaggattctaacagtgactatgacgtcataatcagccacaatgattacagttacatggagaacaaggatattcttctcctcatcccgtcaataatcaccatcgggatcggctgccgcaaggatataagcttcgacaacattgaacgctccgttctgaatatcctggataaggagaattatcatatcctgtctctgaatgccattgccagcattgacaagaaggctaatgaaaaggggattctggagtttgcaaggaaatacaacctgcccttcaatacttacagtgctgaagagctgaacagtcttgagggagacttcacaaagagcgaatttgtgaaaagcgtggtggaggtggacaatgtctgtgaacggtccgcagtgattgagagcaacggcaacctcattagacggaaggacacctgcgatggtgcgggcgtgactgttgctttggccatgattaatccaattctgtcatgggactga

SEQ ID NO: 3106 - DNA, 732 bp, synthetic construct
  source 1..732: mol_type = other DNA
atgaaatgtgtgagcgttgtagggattggtcctggaaacgagctgtatctgagcattgcagctaaggagactcttgaagattccgacctgattgtcggctacaagaaatatgtggagctagttgaggaatacttgcccgagaaggagtacctctacaccggcatgacaaaggaggtagaccgatgcaagatggcgctggagaaagcaagcgaaggcaattgcgtatcggtggtctgctcaggggacgccggagtgtacgggatggccggcctggtttatgagctatctgtggattatcctgatgtggaaatcgacattgtgccaggcataagtgccgtcctgagtggttccgcggtgttgggcgctccaataggccacgattttgcagtgatcagcctgtcagacctcctgaccccctgggaactcatcgaaaagcgcttggccctggctggagagggggatttctgcatctgcctttacaacccgtccagccataagcggaaggattatcttaaaaaggcctgtgagatcttactgaaacacaaaaaggaagacacggtgtgtggttacgtcagaaacattgggcgggaaggggaggaataccacatcctgagcctcaaagagctcaaagacactgaggtggacatgttcaccaccgtcttcatcggcaatgccaacacaaaggttatcgacaataagatggtcacacccaggggatacaagggagtgtga

SEQ ID NO: 3107 - DNA, 759 bp, synthetic construct
  source 1..759: mol_type = other DNA
atgcacaagattgtactatttggaggcactacagagggaagactgttgactgaatttctctctcaaaataaggtgccatccattgtctgtgttgccaccgaatacggggagaaagtcttggattatgagcccccagtgatagtgcagcctaaacgccttaagcccggccccatgcggaagctcttccaagaggagcagaccgagtttgtcttcgacgctacacacccgtacgccacggagatcagcaagcacatcaaggaagcctgtgacgaaatgggcatcgagtacatccgggtgctgcgagaatccattgagatcgagggtaccacgaaagtgtccagcatggacgatttgatcgattatctgaaccagactgaaggtctgattttctcaagtatgggggccaaggaggctgaggctttaaccgcgctagagaacttccctgagagggtctatctgcgcatgctgccttcgcccgaagggatcggccattgcctcgatctggggtacccgatgaaaaacctttgcggcatgcagggaccattctcaaaggagttcaacatggcacagttcaaggagatcggtgcagacatactcgttacaaaggaaagcggcaatgtgggaggatttctcgagaaaaccgacgcagcgaaggaatgcgggatggaggtagtggtgctgagcagactgcttaatgaagaaggcattagcgtggaagaggccaaagacgccataatgagtaaatgcctgaggcgttga

SEQ ID NO: 3108 - DNA, 1188 bp, synthetic construct
  source 1..1188: mol_type = other DNA
atgaaggaaatcaacatcatcggaatgggaatgtccgagaagaccctcactcatgaagcgctggagctcattcaccatgcagacatcctgattggtgctaaaagactcatcaatgagtttagcaaacttaacaagccgagtttcaacgcctatctgagcgacgacatcctgaaaataatcgaagaaaccgatgccgagaaaatcgcaattcttgtgtccggagacgttggcttctacagcgctgcggagaagctgacagacgtgctaaaggactacaatcctaacctgatcaccggcatctcgtccgtttcctacttcttcgccaaatgtagtcttccctggaaggatgcaaacctgatcagctgtcacgggatagacacgaatatagtgtcatcagtgcgaagaaacaggtatacctttgccctgacgggcaagaacattccagaactgcagaatgagttggtgaaatatggcttcggcgatctcaaggtgtgggtgggagagaacctcggttcagaggacgagtttatcaatgactgtcgtattgatgatttatgtagtcgcgagtacggcagcctgactgtcttgattattgacaaccccgatttcgattctaagtcacgcacaggcatccccgacgaggagtttatcagggggaaagtccccatgacaaaatccgaggtccgggccgtatgcgcatctaaactcagtatcgggcctgacgacatcgcttatgacattgggtgcggaaccggctcggtaaccatagagatggccctgagcgcctacaatgggaaggtctatgccttcgataagaaggaggaggccattagcctcctaaatgaaaactgcatcaaattccacattgataatgtggaagcaatctgcggactggcgccagactgcttgaaggggcttcctacaccggacgtggccttcatcggtgggagctccggcaacatggatgaaatagtgaactacctctaccaattgaaccccaatatgcggtttgtcatcactgccataagcattgaaaatgcaatggctgcgctggactccttaaaggatattggaatagaggctgaaatcgttcaggtggctgtctctaaaggcaagaagattgctgacctgcacatgctgattgcccagaacccaatctttatcatcagtggtgatgccaacgaatga

SEQ ID NO: 3109 - DNA, 1362 bp, synthetic construct
  source 1..1362: mol_type = other DNA
atgaataggttcctgatttccgggaccagcagtaattgcggcaagacgacaatcacaatggccctgctcgccgccttcaaaaaccggggtcttgatatcgcttcattcaagtccgggccagattatatcgaccccatgttccaccggaaggtgtttaacgtaaagacccataaccttgatccctacttctgcactgaagagatgctgtgtgagcagtttattcgcaacaaaggaaacgacctgagcataatagagggggccatggggttttacgatggaattggggtggaaggaagagccagcgcttgggaggtggccaaatccatcaaggcgccagcggtgctcatccttgacgcaaagggaatgagcaatagcgccgccgctatcataaagggcttcaaggaatttaaagaagacagcatggtagagggcgtcattttcaataatatcagcccaatgctctatcccctcctgcgagacattgttgagagcatcggcataaaggcgtacgggttcctgcctaggcgggaagagtactcaatcggaagccgtaaccttggactgatcacggccgatgagattcaggacataaaagacaaaatcaatgggttaagccagctggctgaagagtacattgacttagacggcttgtacgaactggccaagtcggcccccgagctgaagactaatgattttataggcgaggtgctcaccgactcccaaaatgaggaaagtgcagattcaagtaataaaccacgcattgccgtctctcgagacaaggctttctgctttatgtatgaggaaaacatcgagatcctagaggatctagggtgtgaagtggtgtatttcagcccgctggaggacaagaaactgccagataatatctccggtctgtatctctgtggaggctatcctgagctctacaaggaggagttgtccaacaacaaggacctgtgctcatcactgaaagaaattatctctaacggtatccccaccattgcggagtgcggcggctttatgtacctgcacgactccatcgagaatgtccctatggtgggcttcatcaagggaaactgcattaaaacagataaactgcagcgctttggctatattgaaatcaaggcattgaaggataacctcctctgcagcgaaaacgatagtatcagagtccacgaatttcactactacgactccgagaactgtggggaggacttcatggcaaagaaagcctctaacggcctggaatatctttgctgtcacggttcggacagtttgtacgctggttttccgcatatttacctacccgcaaaccctgacttcgcacggtcgttcgttaggaatgctagaaactggaagcattga

SEQ ID NO: 3110 - DNA, 639 bp, synthetic construct
  source 1..639: mol_type = other DNA
atgaaaattgagctggagcaggtcgagccggctgaaatcgaaaatcgaagtatggagataatcgagagcgaactgcctcacgaaattgaccccaaactggcccctatcattaagagggccgtgcataccgctgccgatttcgactacgtggacaacctctgcttctcagaggacgtggttgataaggccctggaagcgatcaagaacggggcctgcatcgtcaccgacactcaaatggcaaaggccggcatcaataaggccgagctgaaaaagcacggcggtgacgtcttctgctttatgagcgatgacgatgtgagagacatggctaaaaagaatcactccacgcgggcgagagcatcgatggacaaggcgagccagctggacaggccactcatatttgccattggaaacgccccaacagctttgatacgtctgtacgagttgatccaggagggcaagctcaaaccagaacttatcattggagtccccgtggggttcgtaaacgtggtgcagagtaaagagctcattatgcagtgtgatgtgccctacatcgttgctcgcggccgcaaagggggaagcaacgtagcagcagccatctccaacgcacttctatatatcttacgggatcaaatgaagtga

SEQ ID NO: 3111 - DNA, 789 bp, synthetic construct
  source 1..789: mol_type = other DNA
atggtggataaaattattttagtggtgtccttcggtacaagctacaacaacaaccgggcccttaccattggcgcgatcgaaaaggatatcgacgaggccttccccgattacgagatgagacgagcatttactagtcagatggtaataaacaagctgaaacggcgcgatgacctcgacatagacaatgttcaggacgccctggagagggcagtgaatgacggtgtcaagacagtcattgtacagccaacccacgtgatggacggcactgaataccacttcaaaatcaaggacaccgtcgacaagtacattgataagtttgataacatcacaatcgcagatcctctgctcatcacggatgaggactttgaagacctcatcagcagcataactaaagacgatgagtcaagtgatgaaaccgccattgtgtatatggggcacggctctccagccgagtcgaatatggtgtataccaaattgcaatccatgctgggagaaaagggcttcgaccactactatataggcacggtggaggccaagccggattatgacgacgtcctggctatggtgaaggaaggagactacaagaaaatcatccttaagcccctgatggttgttgctggagaccatgcgcagaacgatatggctggggacgaggacgatagctggaaatccatgttccaagacgaggggtacgatgtggattgcctaatcgaggggctggcccagtctaaagacatccgcgacgtctatatcaagcatgtgcagaaggctattgacgatttgtcatga

SEQ ID NO: 3112 - DNA, 393 bp, synthetic construct
  source 1..393: mol_type = other DNA
atggaacgggagagctactactttctcctcctgctaattgggcttgtgatctgtgctggtgtcttctacttccagttcaactatgccacccccacatacctgatattcaacgcgacggaggtcaacgagggaggctccttcacaggggtcctgaatgatgcttacggcttccctgtggttaataagacaatcacctatcacaagccaggatacgaaatggggactttggtggacgtgcagacggatgacaccggagagtttgtgatcgaaaacgcccaatacctgccggacgccggcgaggacaattattatggtgcattcacctttgcaggggacggcaaatatcagggatgcagctttgatggcaacatcactgtaattcccaagaaatga

SEQ ID NO: 3113 - DNA, 669 bp, synthetic construct
  source 1..669: mol_type = other DNA
atgtctaatcaggatgaagagaactatatggacgatgagctgctccttaatgctcgaaagcctaaaggtgagctgggggagaagctaattgagaacatgaacataaaccacgagtcccttgcacagtggagcctcaatcacctcgagatcgataaggatgatttcattttggatattggctgcggcggaggagtgaatgtggagaggttcctgaagatgacagacaacaaggtctttggtctggactactcagagctcagcgtcgagaaatccatcgaactgaatagggagtcaatcgatgacggcagatgcgaaataatccaagggagtgtgtccgacatgcccttcgaagaagggattttcaacatcgcgaccgcctttgaaaccgtgtacttctggccggacttcgtaaacgacctcaaggaggtccatcggatcttaaagaaagacggaatattctttattgccaacgaagccctgccaaacgagtacgacaagcggcagcagcgcatcattgaattgctggagatgcacatctacagcaaggaagaactggaggacagcctggagaaagccggctttagtgacgttaaatgctttatcaaggaagccaaagactcgttcacgggcgatgatgcatattggatctgtgtgatcgctaaaaagtga

SEQ ID NO: 3114 - DNA, 963 bp, synthetic construct
  source 1..963: mol_type = other DNA
atggacgattatttaatcaaatcaaagagtgaaacgaaccctgagtacggctgcaacccatacgaacggcctattgaggagcacattgccaaaggcataatcaacttggacaagccttcaggcccgacctcccacgaggtggactcgtgggtgaaaaggatcttgggatgcaataagaccggccacgggggcacactcgatccaaaggtgacgggggtgctccccatcggcatcgacaacgccacccgcgtgagccagctcctcctgccagcaggtaaggagtacgtgtgtcttatgcacctgcaccgcgaaataccagaggaccaggtgaaagggattttcaatgaatttaccggcaagatttaccagacgccccctgttaaaagcgccgtcaaacgagaactgagggtgagaaatatctactactctaccatctatgagattgaaggacaggacgtcctctttaggataggctgcgaggccgggacatatgtccggacctactgtcacgatatcggtgaggccctgggctgcggagctcatatggctgagctgagacgcactagagtagggcccttcgatgagcgaaacaacgaccttgtcaacctgcatgacctgacagatgcttatcatttctatctagaagacggagatgaagagcatattcggaaggccatccagcccatggaggtggcgagcagtcacctgccccagatcttcattaaagactctgcagttgaggcgatctgccacggggccaagctgggggcaggtgggatctgtaagctatccaaggacatccaaaagggcaatcttgtggcgataaagagcttgaaaggagaactggtagctgccggaactagcctgctgagttcccaagagattatgaacgcagattccggtctcgtggttgacacaaataaggtctttatggatactggaatctacccgaaaggctggtga

SEQ ID NO: 3115 - DNA, 183 bp, synthetic construct
  source 1..183: mol_type = other DNA
atggatgacaaggagaaagtgatcgaggcattcaaaaatagcgaagagccactcaacgccaaaaaagtgagtgaactaagcggcgtggagaagaaggaggtcgacaagatcatgaaagagctgaagaaggacgaaaccattgtatcccccaagcggtgctactggacactggcggaaaagtga

SEQ ID NO: 3116 - DNA, 552 bp, synthetic construct
  source 1..552: mol_type = other DNA
atggtgaaaaacaataatgagagattcgaacttgatctgtcgaaaaacgaaacccctgagtttagcaatgaggagatcttgagcaaaatgaggcggggcttcaataaccagtatgtgtgctttgagtatccgttcctgtggcagaatatgcccattgacgaagaggatgagtttacagacataatgctcttcaacaaggccaacaacgcaattgtgaaaatctcaacgcagccctgtctcatcgataacatcgacgatctgaaggaggagattgaaaaggacctgaagagcaatggctgcaccatccaacagtccgctatggaaaagatggaaacccaggacatttgggacgtcttctacaccactaaagaagggctagaggtggagcagttctctatcctgaaggataacaacctctacaatctggaattatacaccaaaaacaaccgcgaccaggccactgtcaagtcctttgtggacgttatccaaacattcacaatccttaagccaacgtacaaggtagatggagacagttatgagaagatagagtga

SEQ ID NO: 3117 - DNA, 339 bp, synthetic construct
  source 1..339: mol_type = other DNA
atgtcagtgtttgactatatctgccaccgccgacccgaaagaagcttcttctacaagggtcggcagttcccagtatgcgccaggtgcaccggattctacatctccggcatagccagcattatcctctttaaatactttccgctgcctaacactctaaccacactcgctattggaatcttgctgctgatcccctgtgcaattgatgggacaagtcagttatttgagatgagggagagcaataatgtgctccggttgatcacgggcctgctgggcggggttgggcttatcatgatatacgaagtggtcctgaacttcgtcttcctgaacttcatttattga

SEQ ID NO: 3118 - DNA, 144 bp, synthetic construct
  source 1..144: mol_type = other DNA
atggatgggatggaccccgaagactacctgatctacaactactatttcgaggaggaggagaataacggcctgagcaagaacgaaagctgctgtggagtgctcatggtcctcatgattctaacaatccttctgaccgtggcctga

SEQ ID NO: 3119 - DNA, 504 bp, synthetic construct
  source 1..504: mol_type = other DNA
atggcccggagggaagagaatacatttgatttcctgggactgttcacggaagaaataggcggcaagaagaacaagagtaacggtgcaatcaaattccagaaggacaaactcttcatcgagaaacggagcagattgaacggaaagctcaaggacagctacgaaatcagttacgacgaactcgattcggaaagcatcgatcgccccgctatcaatagggtggagatcaaattgaaggacaagaccatatcactgaagaccctggaccacgagatgctggacaactttgaagacaagcttttagacattgtggaggggcctaaacttgccgtcgaagattctcccgtagcgaacgctccgtacaatgccgcagagattaaatccgattccaaaattggggagatagatattccagaccagattcgaaagtatcatgagctctataaagagggcatcatctccgaggaagagtttgagaacaagaaaaaggagctgctggacctatga

SEQ ID NO: 3120 - DNA, 867 bp, synthetic construct
  source 1..867: mol_type = other DNA
atggaaattaagtccatcccccaggtaattaaggagatccaagagctggtcgacaaagaggattacgagtcagcctacaatatagcaaaagacaatgtggatctgaacaaggaatacacagaaggggaatatgtgtttaagaacctgctggaggagcttttgttccaggttctgatccagaaggagatcaagaagaagatccccatgattctggactacagcagcctgtactccaattacggcgaagtgctgattcagctggataagattgacgatgctaagaagagctttgaactttcgcgcaactacaatccaatcaacattaaagccaacttcggcctgggtgacctgtacaagatggaaaacaagctcaatgagttctataaactcgccatcgagagctttaaaatcgcctattatcccaaagaccttgcaaagagttttagaaacctctcctactacttcttaaagatagccaaagaggagaatgctgatgaaaacctgaaaatagcgatccacttgaagaagatcagcaaagactatgatgacgaatcagagctcgccaaaacggagttggatgaaataaatggaatcattagtaatttcgataaagagaccgtcgaagcgcttgagagcacagacttgaaggaatgtcgaaacgagctcaagagcaaggggctcccgtatgaggctggaattgagatcatcaccatctgcaagaacctaggcttccagctggacgaggctaagaaggtcgtgccagccttatattacttcaacatagcatacgacctaactaaagaccctgacatcaaactcgtgattgatgacctgaacgagaaagtggagaggcggctggatgaatga

SEQ ID NO: 3121 - DNA, 450 bp, synthetic construct
  source 1..450: mol_type = other DNA
atggaagacgactttaagcacctggtgcgcatatccagaaaggacgtggatggcaacaagacgatcgaacaggcattgacacaaattaaaggggtaggactctccctctctcggtcaatctgcctgacgctggggttaaatacaaccgataagattggttacatcagcgaagatgatgtgaccaaaattgaggacctgctagagaatccccagaactacagcatcccggattggatgcttaaccggcgtaaggattatgccaccggcgacgacctgcacttgatcgagtcggacctggacatgactcttagggacgacctgaacagaatgaaaaagacccgatcatacaaaggccggcgccatgaggttgggctcccagtgaggggacagcgaacaaagagcaccttccgccacagtagcactgtcggcgtcagtcggtccagaaggtga

SEQ ID NO: 3122 - DNA, 537 bp, synthetic construct
  source 1..537: mol_type = other DNA
atgggacatccgcgtaaggccaggaaaaagtatgacactccacctcatccctggaacgcagaacgaatcaaaactgagaataagcttatgagcaagtatggcctgaaaaacaagaaggagatctggaaagcggacacccttgtgcgcaaatacagcagggaagcacggtacctactcgggttcagccaggaccaggtgcaggtggagaccgaagagttactcgggcacttgaaaagaaccggaatcctcgatgaagctgcccacctggaaaacatcctggacttgacggtggaggatatcctgaggagacgcctgcagacaatagtgttccaaaagggtctggcgcgcacagccaaggaagcccggatgtttgtagttcacggccacattgctctgaacggcaagaagattaactcgccctcatatgtcgtcaaacggggagaagaggaggcagtggggttctaccactcctccccagtcgccaagcagattgaggagtacaataaggccgctagtcaagccggcgagaatcagtga

SEQ ID NO: 3123 - DNA, 393 bp, synthetic construct
  source 1..393: mol_type = other DNA
atggcaaaggacgaaaagtggggaatagcgaatatttacagctccttcaacaatacaatcctgaccgtgactgatattacaggcgccgagaccatttgccagtggagcgggggcagggtggtccgggcagaccgccagcagtcaagcccctttgctgccatggaggccgccaaccgggctgctgaggacgccaaggaaaaaggattcgtcggcctgcacatacgagtgagggcgcctgggggaaacgggcctcgcagtccagggcccggcgcacaagcaaccatccgtgccctcgccagagctggcattaaaatcggtaaaatcgaggacatcacgcccatcccgcatgatggtactggacgcccaggcgggaagaggggcagacgggtatga

SEQ ID NO: 3124 - DNA, 849 bp, synthetic construct
  source 1..849: mol_type = other DNA
atggagattgacgtcaaaaaacaggacgaaaactctatggttttcatagtccgggatgctgaggtgccctttatcaatgcaatccgcagaatcgccatgatgcgggtaccaaaattggccatcgaggatgtgttcattgtcaaaaacgattcggctatgtttgatgaggtgctggcccaccgcttaggcctgactcccctcgtgtctgacctcgaaagtattgaaggccttgtcatgagagaagattgtgactgcaaccacgacgaaaacggaaactacgtggataagggggagtactgccctcgatgtagcgtgtccttttccctgaatgagaccggtcccaaggtagtgtacagccgtgacctgaaaagctgtggggactcaaggatcaagccagtatacgacaccataccgcttctgaagctcaaagaggatcaggacgttgaattggaagccgttgccaagctaggcatcggaaaggaacatgcaaagtgggtgcctacaaccgtttgcgcatataagcagtatccggagatcacgttcaatgaaggggaggatgtggtctaccaagtggcggacgcatgcccaaggaatgtgctggacgctaaccgcgacgatggagtcatcgaggtcattgacattgagaactgctcactctgcaagacgtgcgtcaggacagccaaggccgccgggtccaagttcatcaatgtgggatatcgggagaacgatttcattttcaagatagaaactgacggtagcatgccccctaaggaggtgctgctgaaagcgtgtgatgtgctggacgctaaaaccgacgagtttatcacattcagtgagggcggcagctga

SEQ ID NO: 3125 - DNA, 366 bp, synthetic construct
  source 1..366: mol_type = other DNA
atggccagggagataaagaaaactaaccccaaccttatcgcgctaatttacaacctgcggaaacagtcttatgaggaaggcgtagctatctggaaggatgtggccatcaaactcgagaagccggcccgcaaccaggcggaagtcagcctgtcccacatcaacaagaataccgttgagggagaaaccgtggtcgtgccaggcaaggtcctgagtgacggcaaattggaccataaggtgacaatcgctgcactcgggtttacgaaaaacgctgaggccaaaatagaaaagttcgggtgcgaagccctctcaattgcagagctggccgaggcaaatcctaagggaagcaatgtgaagattatgctgtga

SEQ ID NO: 3126 - DNA, 429 bp, synthetic construct
  source 1..429: mol_type = other DNA
atgatgattatcaacggtgagggccacatcctgggacggctagcttccgtggtcagcaagcagctcctggaaggcgaagagatcgtcgttctcaacgctgaaaaaataatgttgacggggaataaggattgggcctacgccaagtacaagcagagggtggaccgcgccagcatctcaaaccctcgggacttagggcccaaatatccacgcagacccgaggatattttccgtaggaccgtaagagggatgctcccaatgaagaaagcaaaaggtcgaaatgcgtttaaaggattcaaggcatttgtgggcgtgcccgaggagtacgccgatgcggagctgctgacaatgccggaagctgagtataacgacattaagaaaggcatggaactgggagagatcagtaagcttctgggcgccaagttcgactga

SEQ ID NO: 3127 - DNA, 399 bp, synthetic construct
  source 1..399: mol_type = other DNA
atgaaagtggtgcacgccagcggcaagcgcaaaacagctattgcgaggggtaccatccgtgaggggaccgggaaggtgaggatcaataaggtcccgctggagctctattcaccagaactagcccggctgaaactgaccgagcccctcgagctggcaggcgaagtggccgacaacgtggacatctccatacgcgttaacgggggaggcgtgatgggccaagcggaagccgcacggatggtaattgctaaaggtcttgttcagtggactcaggacatggatttgaaagaggtctacacgcagtatgataggacaatgctggtcggagacccaagacggagcgaacccaagaagtacggcgggcctggagcccgagctcgcaagcagaagagttacagatga

SEQ ID NO: 3128 - DNA, 171 bp, synthetic construct
  source 1..171: mol_type = other DNA
atgataccaatccgctgtattagttgcggcaaacccgtctccgcatacttcgacgaatacaacagccggctggccgatggagagaagagcaaggacatcctggacgatatggggattacacgatattgctgcaggagaatgctcatctcacacgtggaaacctgggagtga

SEQ ID NO: 3129 - DNA, 219 bp, synthetic construct
  source 1..219: mol_type = other DNA
atggctgcaaagaagagcacggccaaaaaactgacacggtttgagaaggcaagggtcctgggggccagagcgatccagctgtccatgggcgccaagcccatggagcacaaggagattgaaaagttcatcaaaaacagcaagagtcttgacccgattgacatagctaccctagagctggaattgggaatcctccctctcgatgtgcgcccaaaagaatga

SEQ ID NO: 3130 - DNA, 1248 bp, synthetic construct
  source 1..1248: mol_type = other DNA
ctggattcggtaatcgaggatgtgcgggtgagaaaaattttagatagccggggcaacccaactgttgaagtggatattatcacttggaacgggtttgggcgcgccgccgcgccaagcggggccagcacaggttcccgcgaagttgtatccttccctgaaggaggggttgatcaggtaatcagtgaggttgaagacttgatctcttccgaacttatcgggatggctgccgaagacattgaggacatcgatgaggtcctgcgagagatcgacggaacagacaatatgtctgcaattggcggaaacaccagtgtggctgttagcatggctgcagcgaaggcagccgccatgtcctttggaatgccactctacagcttcctgggcggcaacttcgtcagtgaaatgccatatcccctgggcaatatgatgaatggcggcgcccacgccggtccaaatgccccggacattcaggaatttctggtggtgcctataggtgctaaggacgtggaggaggccgtcttcgccaacgtggctgtccacaagaagctaaaagagctcctctctaagaaagaccccgatttcaccggtggaaaaggcgacgaaggggggtggatacccaatatcacgaatacgcaagccttagagatccaggctcaggcatgcgaagagacacgagacgagcttggcatcctgatcaggcccggtctggacatggcgtcatctgagttttgggacagcgaaaaggaaaaatacgtgtactcccaggacaatattgagagggatgtgggcgagcaagtggagtacgtcaaggacctgattgaaacatacaacctgttctatgtggaagatccctttgatgagaatgacttcgagggattccgtgagctcacctcgaaggtgggaaacaaatgccgcatttgcggtgacgacctctttgtcacaaactcacggctccttaagaagggaatcgatgaaaaggcagcaaacgctatcatcataaagcccaaccagatcggctcactgactgagacctatgcgaccgtcaaactagcgaaggaaaacaatgtcatgcctgtggtgtcccataggagtggcgagacgtgtgatgagaccatcgctcacttggcagtggccttcggcgcccctatgattaaaaccggggcaatagggggagagagaatagctaaactgaacgagctgattagaatcgaggccgagttgagcaacccgaagatggcccggctgttctga

SEQ ID NO: 3131 - DNA, 192 bp, synthetic construct
  source 1..192: mol_type = other DNA
atgagcaccgtgataatcgatgcaagcaagtgtgagaacgccgactgtggcgaatgtgtggacatgtgccccatggagatcttctccctcgacggggataaaatcgtaacggatcacgaagacgaatgcaccctgtgcgaggtgtgtgtcgacatgtgcccaaatgattgcattacaattaaggacgagtga

SEQ ID NO: 3132 - DNA, 597 bp, synthetic construct
  source 1..597: mol_type = other DNA
gtgtccgatctcctgatcccactagataattacctcgctgccgggttacacattgggacgcagcagaagactcatgatatggaaaagtatattttccgggtgcgctcagacggcctatatgtgctggacgtacgtaaaaccgacgagcggctgagggccgtcgcgaagttcctggcaaaatacgacccggatgacattctggtggtggctacccgccaatacggccaggcccccgttaagaaattcggcgagataaccgggtgtaagacaattcctggccgatttataccaggtacactcaccaacccaggatatgccaaatttatcgaacccaaagtgatcgtcgtcactgaccccagaagcgatagtcaggccatccttgagtccaagcaaaacggaatccctgtcgttgggctgtgcgatacagaaaatctgctggcaaatgtagatatctgcgtgcccagcaacaacaagggtcggaaggccatcgcgcttatatactggttgctcgcaaggcagatcctcagagagcgcggaattttgggcgaagacgaggacctggacctggagccttctgactttgagcttaagttctga

SEQ ID NO: 3133 - DNA, 897 bp, synthetic construct
  source 1..897: mol_type = other DNA
atggataacataaaagacaagaagatcaatgataagattcagaagcagctcgctaatgagtcagtcaacgagcttctgagcattacaggaatcaaaagcaatgttatccaacctttaacagtagaatacgtggatgtggcggacacccgcatcgcagattatgtcggattggaagaaaatgactccatccggcttctcgagttccacaccggcgcacccaacgaaaacttggactttaaaatgttcgattattcttccatgatttataagaaataccggaagcccgtgaacgccgtcgcgatttgtacagaacgaataaacgagccagaaggcaagctggagtggggtgaccgcaacaaatactattacgacatcgtgacctacaaagatatcgatggggagctggagctgaatatcattaggaacaagaacaagttcaatcagaagctctcgtcactggagatctttactttaaaaatgatcctatacacgtccttcgacaagaaaccacacgagataatgctggacgcctgcaaactaacgaacgaggctaacctgaatcagtacctgttggatgagatcaaaaagtttcaggaactgacctgcagaaaaataatcgatgaacaatatcatagggggattgccgacgtgatcgccatgaaaaataccctcttttacgaggacctgaagaagagtgaagaacggggcatacgtatcggagagaagagggggattagtattggtgaggacaagaaggagttccacatgagaatccatatcattaaaaacctgctcggcaagattagcaatagcgacctggccaagtctctcgacatcagcgaggaagagcttgaagagttcattaaggagaacaacctgactccgtccaaggactga

SEQ ID NO: 3134 - DNA, 246 bp, synthetic construct
  source 1..246: mol_type = other DNA
atgatcaactgggcggccgaaatgaagacgatgaaaaacacactcttctacgaagacttcaagaagagtgaggagcggagcatcctgattggggaggataaaaaggaatttcacctgcgcatccacataattaaaaacctgctcggcaagatcagcaacagcgacctggcaaagtcgctaaatttctcagaggaagagcttgaagagtttatcaaagagaataatttgacccattcctccatttga

SEQ ID NO: 3135 - DNA, 849 bp, synthetic construct
  source 1..849: mol_type = other DNA
atgattcgggaagctgtcgttgccggtacattctacgaaaataacgtcaaatatctgcgcgagagcattgaggactgctttacacaccggctcggcccaggagaaattccaaagctttccagagtaaacaaggagaaagaggtcaacgccatcatggttcctcatgccgggtatgtctactcagggccgacagccgctcacgcatacagcaagttggtgcaggacggctatcccgagaccttcgtcatcatagcccctaatcacactggctttggagaacacgtgtccatcttcaacgagggctcatggattgtccccaacggggtggcagatgtggacgatgagctggcaaacgcgatcataaatcaatccaactacgcgaaggccgacttcctggctcataggaacgaacacagtatcgaagtacagatccccctcctaaaatactttgatagcaatttcaagatagtgccaatctgcatgatggatcagtccccccaagcatcaatcgaccttgccaattctattttcgaggcggccaatgacctgaaccgaaaaatcaccctgatcgacagcactgacctgagtcattttaagagccaggaaaagaccattgagcatgataacctcgtgtttaatgaggtgatcaacggaaataccgagggcctgtaccaggtggttaaaaaagagcagattactatgtgtggctacggtcctacgatggtaagtatggagtattgcaagaagttaaaccagaagaacttcgaactgctccagcactcgacgagcggcgacatcaccttggattacgcttccgtggtgggatatgggtctggggtgtggttctga

SEQ ID NO: 3136 - DNA, 984 bp, synthetic construct
  source 1..984: mol_type = other DNA
atgagaaagatgtctgtggcctccgctcccggaaaaaccatcctcttcggagaacactccgtggtgtatgatgagcctgctattgcaggagccgttaacaaaagggccagcgtaaagattcaagagagtctaaacaattacagcaccctgaagtcctacgacctgggctttgaagtcatcctgaacacacggagagggacctacaaactcgtaaagggcaagccaggcatcatccggtacattttaaatgcaatgggcaaattccacgaccacagcaacatcgacatgacattgggactcaacctgcccataggctcaggactgggctcttcagcagctgtcactgtggctacaattgccgccctgcatgactaccatggggtgcctataaccaaagaaaagctggcagaggaggcccacggggttgagcaggacgttcagggcattgccagtccactggataccctggtgagcactaacggagggcttgtttatctctcccgcgaaaagcgcatcgtccgcttcgacaagcccctcgatgccccttttgtcatcggctttaccaataagtatggcaatacaggcaagatggtgaagcatgtcaggcacctgaaggacaattatccggagctgattaacccggtaatcagcactatgggcaagattgcaaacgaggccagaatcgcgattcttaagaacgacatcgataggattgcggatttgatgaacctcaatcaggggctactcgatggactgggcgtcaacacatacgagttatcgcgaatgatctacacggcccgggaaaatggtgctctggctagtaaaatcaccggttccggtggaggggggagcataatctcactttgcaaaaatagcacggtggacaatgtggccaatgcgataaacaaggaagacagtacgatcaaagtgaaattctccggggagggtgtgttggtgaaccgacgttcgcccccattcaactga

SEQ ID NO: 3137 - DNA, 816 bp, synthetic construct
  source 1..816: mol_type = other DNA
atgatcatcctgaaaattggcggtagcatactcaccgaaaaggattctgcagagcctaaagtggattacgctaacctgaaccgcattgcagaagagatccggcagtctctctactcagacgaaatgagcaatgacctgattgacgggcttgtaatcgtccatggtgccggctccttcggccatccacccgctaaaaagtaccgaatcggggagccctttgacatggaagactatctctcgaaaaagataggattctctgaggtccaaaacgaggtcaagaagctgaactcaatcatttgccagtccctgatagagcacgggattccagctgtggcgattccgccaagtgcattcatcacaagccacaacaagagaatctatgactgtaatttggaactgatcaagacctacattggagagggctttgtgcctgttctctttggagacgtggtcctggatgacgaggtgaagatcgccgtcatctccggggaccagatcttacagtacattgccaaattcctaaaaagtgataggatagttctaggcaccgatgtggatggggtgtacacaaagaatcccaagactcacgatgatgcggtgcacatcgataaagtaagctcaatcgaggacattaagttcctggaatccactacaaatgttgacgtgaccggcgggatggtgggcaaagtcaaggagcttctcgacttggccgagtatggcataagcagcgagatcatcgacgccaacgagaagggagccattagtaaggccctgcagggtatggaagtgcggggaacgaaaatctccaaggaatga

SEQ ID NO: 3138 - DNA, 1053 bp, synthetic construct
  source 1..1053: mol_type = other DNA
atgatatccgacagaaaattggaacacctgctgatttgcaagaactacgacgtctcctataacgataaaacgaccggctttgaggacatcgagctcatccatagggccttgcctgagatcaataacgacgatatagacctgagcaccgaagtatttggcaagaaactggattcccccctgttcatcaccgcaatcactgggggacacaaggctgccaaggatatcaataaggagctggcgattatcgccgaaagccggaatatcggtctgggtctcggaagtcaaagagcagctatagtgaaccccgagctcagggacacctatgatgtggtccgggagaatgcgcccgacgcattgatcctgggtaacatcggcgccccacaaagcgacctggcaatcgacgctgtcgagattctcgacagcgacatcctggccattcacttgaatccgctccaggaatccattcagcctgaaggagatgttgacgccaggggatacgtcgattcaatcaaggagatctgtaagacagtggatgtgccagtgatggcgaaagagacaggcacaggcatacgcgctgaagacgcaatagagcttgagaaggccggggtcagtttcattgatgttgagggcgccggaggaaccagttgggctgctgtagagacctatagagctgaagacagataccttggggagctattctgggattggggcatcccaaccgccgtcagcactgtggaagtggtaaattcagtggagatccctgtggtgtcctctggggggatttcgtttaggacgcgatgcaagctacgcgctattgccctcggcgcagatgccgttgggatggcgctgcccgccctcaaaggagcctacgaaggtcaggaggctctgaaccagatggtgaaccggttcaacgagtctttacggattgcaatgttcctgttaggggccagcaacctggaagagcttaaacgctcagacctgatcattaaaggcgaaactaagcagtggcttgaagcccgtggctttgacacaaagcattacgcccgacgctga

SEQ ID NO: 3139 - DNA, 1350 bp, synthetic construct
  source 1..1350: mol_type = other DNA
atgacagtggaagtgatagctattggtgggtacgaggaggtggggaagaacatgactgccgtcaaggtaggggaagatgtgatcatattcgatatgggcatccacttagaccgaatatccatccacgaggataccgatatagaccggatgcacagtctggacttgatcgagcgtggggtcattccagatgacacgctgatgaaggatgtcgacgggaaagtgaagggcatcgtcttctcccacgggcacctggaccatattggagcggtggccaaactggcgcacagatacgatgctcccatcatcggaacgccctacacaacagccctcattgagaaacagatcaagggcgagcgcaagttcaaggtaaacaaccccatcagaccactcaatcccggcagcaagatcaaactgtcaaaggacatcaccttggagtttgttcagtccactcacagtattccacaggcggtgttccccgtgttgcatactagcgagggaataattgtctacgccctcgactttaagtttgacaatcatcagaaggtctctccccctcctgactataacaggctgcgcgagcttggaagaaaaggagttttggccctgattgtagagaccaccaacgcaatcaactacacagaaacgcggacatactctgaaaaggtggcacgaatcatcctggaagacctgatgaagagagcctttaaaggccaaaaagaaggaatgattgtgaccaccttcagcagtcatatcgaaaggattcaaaccattgcagacattgcaaaggacagcaatcgggagatcctgttcctgggccgttccatggaaaggttctgcggcatcgcccagaacctcggaatactgaaactgccacagaatgcttacgtgtatggctcgccaaaggccgtcaacaaggcgctgatgaaagccgaggacgatagggatcagtacctcctggtcaccacagggcaccagggggagccggatgccctccttccccgaatcgccagcgcacggactcccttcaatgtgaagaaaggcgataatgtgatatttagcgctcctatcattcctaacccgaccaatgccgctaaccggcatattctagagagcaaactgaaggcaaacggtgcccgcatctatgcaaacgctcacgtgtcaggtcacgccggcagggaagaccatagggacttcttaagaatgctacgccctaaacacatcattccggctcacggcgagcttgagatgctcgtggcttatggtgagctcgctgaggaagaaggctatcgcatcggaaacaacgttcatatccttcggaatgcccaagcccaggtttttaatggtgattga

SEQ ID NO: 3140 - DNA, 996 bp, synthetic construct
  source 1..996: mol_type = other DNA
atgagcgacgtgacggatgtgctcaaggagtacagcgccgatgtcatcaaaacaatcgaggagaatctggctcccgttcaacctcaaaacctgcaggacgcctgcatctacttaaccaaggccggaggcaaaatgttgaggcccgccctcactctgatatcctgcgaagcggtgggtgggaataaggaggatgcgttgaagaccgccgcagccatcgaactcatacacacatttagtcttatccacgacgacattatggatgatgacgacatgcgccggggcatgccctccgtgcacaaggtatgggacgagccactggcgatcctggctggggacaccctattctcaaaggccttcgaaatgattatcagcagcaaggaggagaacgctcatccggaacatgttgccaacgcccttgccacggtcgctgatgcatgtgtgaaaatctgcgaaggacaggcctccgatatgagctttgaaggggactttgacgtcaaagaggccgaatactctgaaatgatttataaaaagacaggcgcactgatcgcagcagcaaccaaggctggagcgattatggggggcgccgacgagaaggaggtcactgccctgtacgaatacggcagaatgattggtattgccttccagattcaggatgactacctggatgtgatcagtgacgagaaggacctgggaaagcctgttggcagtgacatcgccaaaggaaaaatgaccctcatggtggtcaaggctctagctgagtccgatggtgaggaccacgaacggctgctggagatcttgaaggacaacgactgttcacaggatatggtgaatgaggccatagatctcttcaacaagtatggctcaatcgattatgcttataatctggccctcgaaaacgtaaacggggctaaagaggctatcgcattcttaccagactctgatgcaaaatcgatgcttattgcactggcggactttgtgatagcccgatccagctga

SEQ ID NO: 3141 - DNA, 873 bp, synthetic construct
  source 1..873: mol_type = other DNA
atggggtttaaagacaaggtgttgtcctcgagcaatcaattcaactactataaggacaactacgagaaactgcttaatgagaataagcagttgaagcagaagcagaaccagctgatcgaagagaatgagcagctgattaaggagtttgagctgaataagcaaatcataatcaataaagagaatctgagcaccgaaagcaactactgcccctactgtgggaggatctccaattttgaaccttacggggtggtcaaacgcgaaaaggctatgtgtccatactgcaagtctctggagcgacacagattaatctatctattcttcgagcgcaactacagttcaattttcaaaaacaaggacatcaagcttctgcactttgcccccgagagaattttctacaactatttcacccagttcgaccatgtggattactatcctgtggacattgacccggaaacatacgcaaaacggggcctgaagctgaaaatgaaggtcaacatggaggaggttccatatggcgatgaggagtttgacttcatctataacagtcacgtcctggagcacgtgccaaatgactttaaagccatgggcgagttatatcgtgtactcaagcaggatggagtctgcataacagtggtgcccctatcaggaaacgaagagaccctcgaaaaggaagagtataacactcccgaattgcgggagaagcactacggaaacaaggatcatctccggttttacggtctggatgtgaagcagaggctggaaagcgttggcttcaaggtaaaagtttccaaactggaggatctcaaccttactgaaaaagagattgaactcttcaacgtcaaggaatctctcatcttcgtgtgcacgaaatga

SEQ ID NO: 3142 - DNA, 660 bp, synthetic construct
  source 1..660: mol_type = other DNA
atggacttgccctcaggagacaactacgagaataccaccgtgaatgaagccattcggcagatcaatgatacaaaccgcgacctaactgtgctgttctataatagtgaggacaatagtactgtcgcccgggtagaatttgagtttaccatcaatgatttcaaagccaccgccaccgagcagactgtggcgaacagaactgtctggtacaacgaggaaaacgggacgtacatggccttcctcggcaactcagtgacccatgacaacatcatcatcatcacaaatgatgtggagatactggaacacctcatctcaagcgtgaagttcattttcctgaacgaagacggcactgttaattccacatctgatatggtcaacaaccagagcattaacgtcacgggcggtacggcgtccaatggaacggatgcaagtgcatctacagccacctccaacgttagcagctccaactcccaatcgacaggcaatgatggatattactggagcgggcaggatcaggactacattaaggagtacaccgacagcaatggcatccagcacatagaccgccgaaacgggccgaatgaggcttacgacccaaacacccaaaggcactataccgatggtgtggaggacacagcagcttataaccaggactttaactga

SEQ ID NO: 3143 - DNA, 573 bp, synthetic construct
  source 1..573: mol_type = other DNA
atgatagagaaggtacggttcgaccagatcgccgatatcttcacgggagtccgagtcaagaggtatcagaaaggtaaagggaccaccgtggagcggcccatcctaaagaaaacatactccgagaacagtagcaaactggacctggagtatgaggaggtgtcggaggagatccatgagagattctactcccaggaaaatgatattgttattctccttgcaggaagtaaagtgagcaagatcgaggaggcgggcatcatcattcccatgtattacgctgtggttcgcgtcaaggaaggctacgatgtggattttatctaccacctgttgaaaagcgacatcttcccgagggaactgcacaagatcgaagaggggaccaccctgaagattataaagacaactcaccttaagtctatttacctccctgtgccagacttagaaacacaaataaactatggcaaactgtttaacttgatggacaagcgcatcaagctgaatatggaactggccgaactcgagaagcagattgaaaagtcaattatcaacgagatgctcctggaggaaaaaactttttga

SEQ ID NO: 3144 - DNA, 1905 bp, synthetic construct
  source 1..1905: mol_type = other DNA
atgagcagccgcctgggacgccaactatgggataaatatgaggaactgcgtacaaacagcatggttggtttcctgacagatgaagatttccagaagtactttctgggtttcataacctacaagtatctctctgagaacctggaattgtacctcgacaaggaattggagaaggacgacctcaagtttgaagaggcctataactttgagaactacggcaaggtgctggcgaaaaaagcaatctataacctaggctactttattacaccgaaccacctatttcggaatgtcattgcctcctacaaccagggtgcagacattagtcgcgaattgaaatgggccttcgcggaaatcaacagttcctgtaagaaaaccgaaagtcaggaagactttgagaacctctttgaaagcgtgaatctccaggccactccattaggaaaaaagcaggaggacaggaatcgggtaatctacaatatattgaacgccttggacagtgtggacttcggcttggacgagttcaacagctcactctcgttaatcaaccattacagcgagcctgctcgagagcttggcgtgaacctggacgcgctggagaaggagcttctgagcgatcccaataagaatatctttctggacgattctcccctgaatgaaagttctagcatcccactgaacgaggctccattcgaagagtacgcatccatggaactgttcctggacgacattgctcctgttgaagagttcgattcgatggaactgtcaaataaagagaatattgtcacagggctcgagaacccaaatcatcccaacagcttagtcaatgagggatggaatgacaggtcctatgacagctaccgcattcaaaagcagtattccataggcgacgcctttgagtacctccttgacaagttctccctaaacgcctcaaaatccgctgatttttacactccaaacgatgtgtcagtcctggtttcaaagctggtggccaccaacaaacgcgccattgacagtgtgtacgatccgtgctgcggcagctcctcaatgctcctggagctgaacaaacacgtgtccctgaacctgatctgcggccaggaagtgaatgcctattactacaatattagtaggcagaacatgatcttacacaacattcactttaaggactttgacataaagcagggagattccttggatagccctcatcacatcgggtatgataaattcgatgtggtggtctctcagatccccttcaatgtaagttggaccgccaagaaaagcttcctcaatgaccaacggtttaaggagtacaatgcactcgctcccagggtgaaggcggagtatgcctttatccagcacatgctctatcatttggacgatgacgggattatggttgtgatcgctcctcacggggtactgttcagatccgcctcggaggaatcaatcagaaagatcatcgtctctaagatgaattatctggatgcagtcatcgggcttccgagcaatatgttctatagcaccaacagccctgcatgtgtgctgatattcaagaaaaacagaagatatgatgatgacgtactcttcattgacgcttccaagaacttcaataagataaaacttcggaacaatcttcggaaagaggatatcaacaagattgtgggcacgtacgtcagcagggctgaggtggacaaatactcccgaagagtcagccttagggagatcgacgagaacaactgcaacctgaacatcccccgatacgtggacacgtatgaggaagaggaaattaacatccaggagatctacaaacgccgggaggaagcctcgcgtgagctgaaggaggttacttacgaaatagatgagctctgtaaggaactgggaattgagaatcccctgatcaacaatatcttcgaatga

SEQ ID NO: 3145 - DNA, 921 bp, synthetic construct
  source 1..921: mol_type = other DNA
atgagcaaaacttatatatttggacataaaagtccggataccgattccattactagcagtctggtaatgtgtgacttagaaaacaaactcgggaatgcggacgtcgtgtcgtgcaggctgggaaacctcaataaggagactgaatttgtgctggactacttcgacattgaggccccccaattgattgagagcatcgaagatgatgccgaggtgatcttagtggatcacaacagtcctagcgagtctgtggacaatatcgaaaacgcaaagattctcaagctggttgaccaccacaagatcgcttttgagacctcctaccccctgttcattcgcaccgagcccgtcggctgcaccgagacaatcctctttaaactgtataaggagaacggcctcacgccagacaagaccatcgcatccctcatgctgtcagcaatcatatcggacacactgcttctgaaatctcctacaacaacggaggatgacaagcaagcggtcaaggaacttgctgagatcgcccagattgattacgaggaatacggtttggaaatgctaaaggccggaaccgacctgtcaagcttctcaattgaagagatcctcagcctggacgccaagcagattgacttcaaggatgtcagatccatcgtaaatcaggtcaacacggcagatatcgacgacgtgatgacaatgaaagatgatttggaggccgggatgaataaaatcatagaggatgaaaatctagaccttttcatgctgctgatcaccgacattgtaaacagcaactctcaggtgatcgctctcggcaaagacgtgtgcctggtggaaaaggcctatggggtgaaattggaggacaacactgttcttctggagggcgtggtctcccggaagaagcaggtggttccaataatgaccgaaaacgcttga

SEQ ID NO: 3146 - DNA, 354 bp, synthetic construct
  source 1..354: mol_type = other DNA
atgtcaaagttttgtccgaaatgcggttgcgaaaatctggatgaggcctctttctgcctggaatgtggcgcttctcttccaagcattgaggaggtgaaggaacggtcttcgcatggggctggaacgagccaccagagcacattttcctcaaacttgaatgaggaaaacggcttcaaccaggagaccagtagtttcagtcagtccaactccaactccaatgaggcaagcaacagcagcaagttcaaaaacgtaataaacgaggcgaaccccgccaataatgacaaccaagactacgccatctgttgcctggtcatctttgtgctgctactcatcgcattcctctgcaatttttga

SEQ ID NO: 3147 - DNA, 396 bp, synthetic construct
  source 1..396: mol_type = other DNA
atggaaataaacgacttcggccatgacctggacgagtctgcacagttcctcgtgcagaagctcttgattctccacccgtgggatgaagaatgggaccttagcgtcaccgccaatttggtgcccttctataaggagaagatcgacatacagatcagtaagcagggaaaatgcgatgaggagttttttgataagctgatccgattctcctcaattcttgatacaaaccaggtacggctgctgttcatggaacaactggtgggtatgccactgatcctggatggcaaatacctaaacaacgacgagcgcattgacctcctcatcgagagcttaaatgggaggctgaaaagagtcgacaatgggctgtacctatttttcaaccacgaggaggaattttga

SEQ ID NO: 3148 - DNA, 1170 bp, synthetic construct
  source 1..1170: mol_type = other DNA
atgatctacaggaaactaggcaagacggatttggaagtgtcaaatataggctttgggtgcatgagactgccccataaagagcatttttaccagatagatgaggcagaagctagtaaaatgttcgattatgccatcgatcacggaataaactactttgacctagcctattcatttcattctaaaaacaaaaacctggggggaaatgcagagccctttgtgggtaaatacctggctgagcggggaaaccgagaagacatggtgatccagaccaaactccccggatggctggttaataaaagggaggacatggacaagttcctcgatttgcagctcgaaagactgcagactgattacattgatgtatacatgctccattcccttaagatcgacttctggaacaagctgtacggcatggatgtactggaatttctcgacagcatcttagaagacggccgcgtcaagtatgtcggtttttccttccacgatgacttggacgtcttcttcagcatcatggatagctacgacaagtgggatgtgatcctcacgcaggtcaattatctggacgaggactacaaatccggccttggcggtctggagtttgtgggaatggccgggctgggcaatgttattatggaacctttaaggggcgggagcctcatcacaaacatccccgacgaggttcaggccctttgggacactgccgataagaagcgcaccccagtggaatgggcactggagtacctttgggacaagccactggtaacctctgtgttcagtgggatgtccaacatggagcaggtgaaggagaacattgccatcgcggaaaactgccagccggattgtatgagcgagcacgatcgacaaatactgaaggacgtggctcaagtctataagtctcgggaagagattccatgtacaggatgccggtattgcatgccttgccacaaccgcgtggacattccccactgcttcaagcagtataacattgcgaaatcgttgaattacattgacaagaccgccgctccatacttctggctggtgaataaggatgagagagccgacagctgtacattttgtggggagtgcaatatccaatgtccgcagggcatcgacatccctgcagagatggagaaggtcttcgacttcttccacgaggaaagtcagtattga

SEQ ID NO: 3149 - DNA, 828 bp, synthetic construct
  source 1..828: mol_type = other DNA
atgaaccacgacgagctaataaacctggacgcaatcgactgggaagaagtgtggcagaagagcctgaaaaagagttttaagaaggagaagaactgggatgatatagccaaagatttcggtcagtggctagaaaacgacgactatccggacgtcttgcttgaagagatgaggattgatgaagaggacaccatcctggatatcggctgcgctgagggaaccataagcaggaagctcgcgaagaaagccaagtcactgactgggatcgacaaatccaaattgatgctggaggaactgaataagaaagccgaaaaggagcgcatcgataatattaccacgatccaaatggacatcaacgaactgaattatgaggagatcggcgactacgacatcatcctcgcttcccgctgcctcaatggtatttacaatataaagaacacactgacaaccctgaacgagatcgccaacaagtatgtgtacattacggtattcgggtcgaaaagccataaatacaaaaaagagaagtgcgagattgcaggaaaaccctttaaggcaggcactgactacatggtcctggtgcttcttctcaaaagtctgggaatcgaagccaatgtggtgcagttagagtgtaagaatctcaaggaatatcgggacttcgatgaagccatcaacagatctgtgtggcgttttggggagttggaggaagatcgagagattgcgctgagacagtacttcaaggagaccctcgtcaaaaatgaacggggcaactgggttaacccaaaggacaagacagatttagttctgatttggtggaagaaggaggaggagtga

SEQ ID NO: 3150 - DNA, 825 bp, synthetic construct
  source 1..825: mol_type = other DNA
atgacgaagaagattatcattgaggatgagaacgagatcgattgggaccagctgtggacggcgaagatggacaagaagggagaccgaggcaaagactggtctaaggccgccgaaaagtatagtgagagggccagcaaagataactacaccgaacaattgatctcaaagatgatcatcagtaaagaggacaccgtgttggacgtgggctgcggagaggggagcgtcaccatccctctgagcaaagaggtcaaatccattactgccatcgacgcaactgacaagatgctggagatcctcgacgagaagatcaagtctgaaggtattgagaatataaagacaatcaaagaggatatcaacgatgtaaatctggaaaaatacggcaagttcgacattgtgctggcaagccgcgtcgtcaacggcataaaaagccccaaaaaggttttctccaactttaatgaaatggccaacaagtacgttttcatcacacttttcggaccaaacaattggaaattggagaaggatttccacgaatacctgtcgaaggagtacaacggggctccctcatataccatcctgctcaatctccttgcagagatggggatttacgcgaatattataaacctcgatgtggggccggtgagaacttataagacaatcgaagaggccatagataatggcaaatggaacttagctaaatttagtgaagaggaacaggagaaactgcccaagtttctcaacgaggtgctaattcgggataatgaaaccggtctgctatccaactccgaagacaaaccagactgggtgctgctttggtggaagaagtga

SEQ ID NO: 3151 - DNA, 816 bp, synthetic construct
  source 1..816: mol_type = other DNA
atgagttttcagattgacgacccggaggacatcgattgggcgtacttctgggctaagaaactggagagcaaaaaggacagggccaaggactggaataaggccgcgcccaactttggaaagtctgcaaagaaggacgattaccacacaaagattatagaaaggatcaatgtcagcaaagaggacacgatcctggacctgggctgcggcgacggaagcataacaatccccctcgctaagaaggctaaatcagtcactggcgtggattctgcatataagatgcttgagatcctgaacgagaacgccaaaaaggaaggaatcgaaaacattcgcaccctggaagaggacttatcaaatattcgagtcaatgatgtgggcaaccacgacatcgtggtggccagcagatccctgaatgggatcattaacatccgggagaccatctccaacataaacgagattgccgacaagtacgtgtatatcaccctattcgggccaaacaattggaaaatcgaaaaagagttctttgagagcattgataaggaatatgtagagtttccatcgcacagatacttcttcaacatactggttgacatgggtatctaccccaatgtggaaaacctaaacatcggccataaacgcgagtacgaaaacattgaagaggccctcgaaagtgggaaatggcggttggagctcctggacgacgaggaaaaggcacagctttataaatatctcgaggatattctggaggaggatgataatggtaagctctccaaccctaatgataaagccgattgggttttgtactggtggaagaagtga

SEQ ID NO: 3152 - DNA, 495 bp, synthetic construct
  source 1..495: mol_type = other DNA
atggatgggcggctggacattgacagttttgagaaggccatcaacggcttaaataagaacctatacgacgtcggagcactctttcaggcgaatatgccgcttctggcctccgaagccagccaggccgctaaggagaattgcgtgaacaagatggcagaccgagtggacgaacgcctcgactccttcagagaaaactatggatattacaacgacttctacgagaaactgaaagagaacgtgaaaaatgacaccatagaaaaccccgaggagtatgatgtgttcctcgaacacgccagcaacacttttccaaagtacattgatgagttgggccagaccatcgatagtctgtctggcatccctatcaggacagaaaagtttgattcaacgatgagggagctggggtcgatcattgagaatttccgcttcgacttcaaacggaccctgacagtagctgatgtttacaaggtccagaaggagatgaaaagccaagaatga

SEQ ID NO: 3153 - DNA, 264 bp, synthetic construct
  source 1..264: mol_type = other DNA
atgaaagccgtgtcttatatcaagagatccaataaccgctacgtactcgtgatgaacatgaatggaaaattcaagatgccctcagagatcgccagcgaaatggacctacggatcaaccagataagtgcagtccttagcgatctgaaaaaggaggacattgtgacgtgcataaatgaagaagagaaggttggcaggctctacaagctgaccgacaaggggctggaggcttacaaagtcattaagacaaacgaagagatccagtga

SEQ ID NO: 3154 - DNA, 1671 bp, synthetic construct
  source 1..1671: mol_type = other DNA
atggacgagttagaagagattgttttcaagcacgccctcctgaatgccgccaagcataagggatcggcaaaccctggagcggtgatgggctcaattatgagcaatgagcccgaactgcggccccgcgcaaaggagatcgggccgatttccggtaagattgtagcccaagttaacgccatgtcgcctgaggagcagaagactaagatggaagagctcggagtggaagtggaagagaaaaagaaaaagaaagaggaaggcctgcccaagcttccaggcagcaataagaatgtggtcatgcgtttcgcccctaacccaagtgggccactgcacatcggccacgcacgcgccgccgtgcccaacggtgaatatgtgaaaaaatgtggcggaaaattcattctgcgcatcgaggacacagatcctaagcggatttacgagcccgcctaccagctgattcaggatgatttgaaatggctgggtatcgagcctgacgaagtctattaccagagtgaccggtttgagatctattatcagtacgccgaagagctgataaagagaggggcagcatatatgtgtacatgtgacgggggggagtttaagaagcttaaggacaactgccagccctgcccatgccgcgacaatagcgtcgaggagaatatggagctgtggaaacggttccccgagatggaagctggagaggctgtgctgaggattaaaacggatataaaccacaagaaccctgccatccgtgattgggtggcgatgagaattgttgaagaggagcacccccgccttgggactaagtaccgggtctaccccatgatgaacttttcagtatccgtcgatgaccatttgctcggcatgacccatgttctcagaggcaaggaccatctggctaacagcgaaaagcagaaatacctttacaaccacatgggctgggagattcccgaatttatacactacggtcgattgaagatggaagacatcgcactgtccacctccaaggccatggctggaatcgaagagggcacctacagcggatgggacgacccaaggttgggtaccctcagggcgatagctagacgaggcatccagcccgagacaatcacccaactgatggtggagattggcatcaagatgtctgactcagccatcagctggaaaaagatctacgggctgaatagaaatctcattgaggagaaggtgaacaggtatttctttgtaccgggccctgtgaaaatcgacatcgccgatgtgccagaggacattctggggtgggaggtcatccggccgctccacccagactttgaggaacgaggcaacagaacgctaatcttcgacaaggaactatatattccgaaagccgactgcaaagatgggattatccggctgatggacgctgtgaacgtggagatcagtggagaggacgtcaagttccatagcgaatcctttgaagatgctcgagaggtcaaagcacgcatcatccagtgggttcctcttgatgcgatcaaggctaaaatagtgatggacgatgcctctatagtggaagggctctgcgaaaaggactgtggtgatctgaaagtgggcgatatagtccaactcgaaaggttcggattcgctaggctagatgagatcaaagatgatgaattaatcttctacttcgcgcacaaatga

SEQ ID NO: 3155 - DNA, 447 bp, synthetic construct
  source 1..447: mol_type = other DNA
atggataaaaagctcgcagtgatctttatcgggattcagggaagtggaaagacaagcttctacaaaagatacttcccagactttgcccacgtcaatctggacacgtttaagaaacgcagcaaggaaagaaaattcttcaacatgtgcatagaggaaggaaagtcctttgtggtagacaacacaaacccgactaaattcgatcgccagcggtatatccccaccgcccgtgagaatgggtacgagatatggggctacttcttcaactcccctttggaagagtctatggaaaggaacaatcagcgagagggccttgctaggattccccgggtgggtgtcctctcaacctataagaagctagaagtgccagagtatgatgagggctttgacaagctgttctacgttaagatcaaagacgggcaatttgtggtcggcgagctggaggaatga

SEQ ID NO: 3156 - DNA, 2289 bp, synthetic construct
  source 1..2289: mol_type = other DNA
atgaaggaggttaccgctattctgctcgttattatcgccctcattgggatcatctcaataatcattgtgaaattgtattaccgggagaaagagaaggatcatgataaagagagattagaggagttcctgaacagtagcgattacaattccagcattgaaagtcacgagaagatcagcagtaggcaaaaagcggagggctctaaaaagcctcagaaagtccagcgccgccgccgagtgcgcaaggtcccgaaggagagccagaaccggaatgaaaacctaagcgaggcacagatttacgcgaacacactccaaaacgcctccaacaacgatctgtttgtggattatgacggtgataataggggagcccagaggacccggaaggtgagacgggtggccaaagctgagacagccgaaaccacccaagctaacggcactgccgctctgttaagacagagggcagaggcggctaaggcccgcgagcaggctcctaggaccaaggtcagaaaggtgaggaaggttaaatcccaagaggacacagtgcagaaggttcagagaactccagaccgagtcaaggaacagatgaacaaggaagagaaagtgaagcccatccaggagcctattacaaaagagcacaaggaaaccatcaacagcgtcagacagggtgaaagtgaggtcaagccccgtcaagtccctatgacgaaagaacagaaggagttcatttcatcggaaaccgccaagaaactgattgttgaggatgacgacggggctgtgaaagtagttaagagtatcaaacccgctgaggacatcgaggaaatcaaggagagcgctctgattgagaaggcggaaactactgaagaggcgaaggtgaaagtgactgaagagacgcctaaggtagaagagaaggctgaaacggctgaagaagaggcccctaaagtggaagaagaagtgcaaaccgaggaagctccaaaagtagaagccgaaccagtccaagagactaccgaggaagtgaaaaccgaggaagcccccaaagtggaggcagagccagtccaggagacgacggaggaagtgaaagctgaggagaccaaggtagcagagaaaccggcagaagaggttgcggaaaaagtggaggctccaaaagcaggaaaacccgcagaagaagtggccgagaaggtagaggccccaaaggccgaggagatcaaagaagaggtgaccaagcccgccgaagagcccaaggcagaggaagtgaaggcggaaacgactggggagatcaaatcagacgcccccaaggtggaggccgaacccacagaggagcccacagaggaaatagaggtcgcagaaccgaccgaggaacctacggaggagcctactgaggaaatagaggtggcagaacccacagaagagcccactgaggagatagaagtggaggccgtggacgattacatagaagcccttgagacagagggcgtgtatcaggacgacctccacattctcctaggtgaggagaagatcgaggacgaaggccctgagaacgagtttgtcacaatcaattccgatcggcagtcaagctctgggggaaacgacatattccgggacgccataaactccatccgcaagttccggggagcaaacacccagcagcataaggtggaagagatcaaagaggaagtcgttccagatgactacatccacaactttgggaacggcatcgaagagatcggagacacaatcacaatcactccgatccgtgaggacgagatcgacgacctggcctataatcagccgaatgaggatgtagacgaaatctataaggaggtcaatgaagaagaatacaataagaccattgactccgagctggatgaggcatacgaggatgttacagatgagacttccgaggaggaggccaacacctacaccgtggaggactataagcagatcgagaaggaggaagaggagaaaaaggcccgagaagaaaatacccagaagattctggacctgaaggggattgaatccaagaagcctcgctcatcgaagaaggagtctgtgtctacagagcagccagaagatcccgcccagaagcaactggtcttcaccgagcagaggagcaatgttgaagaggtgtatatcaatggcaagttgattgaactcaaacttggccagaccgtaatgtttaaccacaacaatgaaacgtactctagccagatactgaagttgaaaccaggattcgtgggcgtcaaataccgaggcaaaaaggtctggattaaagccaccgatgtgaagcgggtgctttga

SEQ ID NO: 3157 - DNA, 1233 bp, synthetic construct
  source 1..1233: mol_type = other DNA
atggtgaaaatcaacgagaattaccttttgctgcagaacagttatctgtttgtggaagtgaacagacgcgctgagaaatatatggaggaaaacccagataaggatgtcatcaaaatgggaattggggatgtgaccaagcccctgaccccaacggtcattaaggcattcaaggacgctgttgatgagatggccgacggagagacattcatggggtatggtcccgagcaaggctacgactttctggccgaagccatcatcaaaaacgacttcaaccggtggggcgtcgatttagaccttgatgaggtcttcattagcgacggggccaaatgcgataccggtaacatacaggagatttttgaccttgacaatgtcatcgctgtgactgaccccgtgtaccccgtgtatgtggacacaaacgtgatggcgggcaggtcgggcctcataaaggacgatggcatgtacgcgaatatcgtgtatctcccatgcacggaggagaacgactttgtaccagctctgccagaggaagatgtagacttgatctacctctgtttccccaacaaccctaccggcaccaccctgacaaaagaccagctagctaaatttgtcgaatacgccaaggaaaatgacgccctcattctgttcgatgcagcgtacgaagtattcataacagaggatgacgttcctcacaccatctatgagatcgaaggggccaaggaggtggccattgaatttcgcagcttttcaaaaacggcaggattcacagggacacgttgcgcttacactgtcgttcctaaggaaatcaagataaagacctctactggcgatgagcagtccgtgaatgctctctggaacagaaggcagaccacaaaattcaatggagtgtcctacccggtccaaaaggccgccgaggcagtttacagtgaagagggccagaaggagattatggaaaacattgagtattacctggagaatgcccgaatcatccgcgaaagcctaagtgatatcggattgaatgtgtacggtggagttaactccccttacatttgggtgaagacccctaatgacatggagtcctgggacttctttgacctgctgctggaggatgcaaacatcgtggggaccccgggctcaggctttgggcccagcggtgaaggatatctgcggctcactgccttcaatactttagaaaatacgaaggaggcaatgaaccggatctctaagctgagcttctga

SEQ ID NO: 3158 - DNA, 681 bp, synthetic construct
  source 1..681: mol_type = other DNA
atggaggctgactttagccttgtgaatgagaacgatgatttgcaggatctgttctcgaaatacggcgctctggcactggagaaacaggaaaacctctccaagctggtgggcgatagcgagcccgaactcgatatcgaaaacggcatagtcaagttcggggacaaggagtttcctattcaacttctagggttcctggacccagatgaggacacgtggtcatgggcctgggacaatgaggaaatcggtttccccgaagagctcattgaggaggccaaagaagtaaaggaatttggcgaagatcagaatatcgttcagttcaagcaaagtatgtttgccgccagcttcgaggaggcccacatcttatccatgacagtgtcttcaatcttcggagacgacgcatactgcggagtgaactatggaaacttcgtcttctttgtgaccataaaaagcgacgagattccaagttctgagggtccggaggaattttccaacatcttcaacgaatttcaccgccggtttgaggtaaatcatctgaaggcgttggagtcctatgcaatgctgaaggggtatgaatacaaataccgagacgacttcgcgctggtgaagatcggcgacaatagggtggtcgtcgggctcaccgagagaaaaaacgttcagagcatcaagttcattctggcctga

SEQ ID NO: 3159 - DNA, 627 bp, synthetic construct
  source 1..627: mol_type = other DNA
atggatagtgaactgatcgaggagataagctttgagattcagctgttgctcaagatgggcttctacaacgacgaggagattttagagataatcgacgacgaatttattgaagaggacattcccaaggagaagcttctggaaatcttctccaatgtcaaagagaacttcgactgtccaaagagcgattcagaggactttttgaacctgaaagaggcgtttctgaacctatctaaaaaccacaatatactcacgatccataatgccggttacgacatcgaagagggcatccaggactcgtttgagctcttcacccaccttcgcaacaataaatatgaggtggaagggttctgcttctacagctttgaggatatcgaaatcgcaattgaggaaaacagcctgctgatcgccttcggcgatttcgagtttgacgaagacaaagggctcaagatagctaagacagtaaaggatgagctagtgtccaagggattcaatatcaactgggacgaatcaatcgatgagaggattgaaatcgtggacttcaattggcaaaaggcctacgaagatcgggattattccatggacggagcactgagtgactatattgaactgaacaacctcgaggattga

SEQ ID NO: 3160 - DNA, 669 bp, synthetic construct
  source 1..669: mol_type = other DNA
atgaacgcgcgctcctttgagatcatcgaagaggccatttcaaacggggtgtggacttggcttgagctggattgctacagcaattcactctacctagagttcgaacggctgcaactgttgtctaagtccattgtcaatccatttaagccggtacaggaaagcacctacaacgattataggggcgaactcgcaatccgatttggcacaaacatctatctcgctattctttacgatgacgaggactctttcgactttctggaccttgaagaggatatcctgaatagcttcctcaattcggatgccaagttaagcgataacgacagctacttctatcgccagttcaaaaaggaaatacggggattcaagttccaggacgaggactacagcagtaatctcaccaaaaaatataagaaggagatagtgctggcccagctgcccaataaaaaagatagttatgactttctgctgagcttcgagctagacaactttgcaatcatcgtgaagggagacattatttcctgcttcaacgatttcgagtccttgagtgatggcgacataaagagagcttccaacgactggatcttgtactatctggattactggatcaaaaaggggacggaagaggagtacgacgaagacttcctgtgtgagaacatttcatttgactga

SEQ ID NO: 3161 - DNA, 543 bp, synthetic construct
  source 1..543: mol_type = other DNA
atgaatcagcttagaccaggctacaactttttagccactcacgaactgtttttcgatgagattcctcatcagagggccattcacctggcaaactacgaatttttctggaacatcctcgacgagctgggcccgttcggaacagaagagtcataccttgccttttgcgagctatgcgattggctaatcgataaccccaatacgcccataatagaatgtttccgatggatactgtccagctgggacattgaactcgaggattttgacgacaaggtcattgagaacgagaatatcctcaagattatctatgacttggacttctatgaggatttgatgatgctggacttcaccatcatcagcaccgggttcggccagctcatcctgcaagggaaaatcgacgctgacgtgaagaacatcattcagctctccctgctgcggcagatgaactctcacgtgctggatgagtatctgggaagtaatatgcagtacaaatacgaacgctacctgtatcttcaaaagctgctcgacatcttggaagaggcgtga

SEQ ID NO: 3162 - DNA, 1020 bp, synthetic construct
  source 1..1020: mol_type = other DNA
atgacctgtagtatcctggtgggaggggcctggggcgatgaaggcaagggaaaatgcattacatacctgtgcgatacagacaaaccggatatagtggctcgggcaggagtcggtccaaacgctggacattccgtggagtttaatggggaaaaatatggactgcggctagttccatcggggtttgttcaaaccgaagcccagctgctgattggcgccggagtattagttgaccccgaggtgcttttccacgaatttgactacctgagcaaatacaacgtgcgcgagcgaacccttgtggaccccaggtgcagcatcatcgaacctgagcacaaggagcgcgatcaggcttcagagcacttggccaaaaagataggaagcacaggcagcggttgcgggcccgccaactcggatagggtgttgagaactgcaaagatggcgaaggagattccagagctggccgactatttgacggacgtgtctctcgcagtcaacgacgcgctcaatgatggccaggacgtcttcatcgaaggctctcagggcttcgccctctcactctactacggcacctatccttttgtaacaagtaaggacaccacagccagcagcttcgcagcggatgttggggtcggccctaccaaggtggatgaggtcatcaacgtgttcaagtcctatatctcccgtgtgggggaaggtcccttcccaactgaaatgagtcaggaggaggctgagagcaaaggcctggaagagtacggtgtagtgacgggaaggcggcgcagaatcgggtactttgatatggagctggcaaaagagtcatgcagaataaatggggctacacagattgccctgacctgtgtggacaagctttacgactgtgcccgggtcagggactatgctgaactctcccaggagaccaaggacttcatctccgaaatcgagcaggagacgggcgtgccggtcaccattatttctactggccccgacctgcaagacactatcgatctccgaaaggaactactgtga

SEQ ID NO: 3163 - DNA, 1185 bp, synthetic construct
  source 1..1185: mol_type = other DNA
atgcggtgtgttggtacggtggtgcgcggaatacgaacacccattattaaggagaacgacgatctggccactatcgtggtagattcgttgatggccgcaaaagagagtgagggatttgagtttagggacaaggacatcgttgcaataacagaggctgttgtagcaatctccgaggggaactacgtgacggtggatgacgtggcggaggatgtggccaagaaattcccaagcaaagaaatcggtgtgacgaatcccatcctcagcagaaacaggttctcaatcatcctcaaagggattgcccggggcatggataagattaccctgcttagcagcttccctgccgatgaagtgggcaacggcatattagacgaacgagctctggatgaaagcgagtttaatctaggaagcgtcatcactgaagaggactacgaaaagaacttcagttcctggattcacccctttaccggcatcaacatggtggatttctatagggaattgatcgaaagcgaggattgcgaagtggaatttgtcttttccaatgacgtaaagaccattctggactataccaacgacgtcttgacctgcgacatccatacacggaagaagaccacgaaaatgcttaaggagaaaggcgccaatgtgtatggactccatgagattctcgtggagcccatcggcgattcagggtgcaaccccgagtacggcttgctcgggtccaataaggcaacagaggaacgcttaaaactcttcccaaaaacaggagataaactggtcaacgaggttcagaagagactgattgagcttaccggcaagcagatcgaggtaatggtctatggtgacggagcgttcaaggaccctgtcgggaagatttgggagctggctgatccagtggtttcaccggcccacacagccgggctggtgggctaccctaatgagatcaaactcaagtacgtgagtgataatcaattcgctgacctgcacggagacgagctgaaggaggcgatcaaggaagagatacgccagaaggctgaaaacctaacaggccagatgatcaccgaaggaaccactccaagagtcctgactgacctgatcggttccctttgtgacctgaccagcggctctggcgacaaagggactccggtcatattcattcaggggtacttcgacaacctggccaatgactga

SEQ ID NO: 3164 - DNA, 384 bp, synthetic construct
  source 1..384: mol_type = other DNA
atgaaagatatcattaacccaaatgtggagatccctgatgagcaggtagcaatggcctttttccgatctgtcagatgggttaacggggtctactgtcccaagtgcaagagctacaatgtgaataacagaggaaaccagggcaggacgcgccggtatgtgtgcaaagactgcgggtcgaatttcaacgactttagtggtacaatcttccacaagagcaagataccgctcaatgtgatgctgtatatcctgttcaacctggatgagaaaaccaccactcagctgtccgaagagcttggctacagccggcaatgtatctcacgcatttccaaattgtttagggacaagctactcagcaaccccgagtttttcgacattgaagaatga

SEQ ID NO: 3165 - DNA, 948 bp, synthetic construct
  source 1..948: mol_type = other DNA
atggataagaaaacactcgctattatagcgattatcgtgatagctctggtcgccgtgggtgcttactttgcaaccagcggtggaagcagtgacaatgtagtccggatcggccacttgccatcagaccatgacaccgcactcttcgtggcaaaggagaagaagctgtttgaagatcaggggctcacggtggagctaacacaatttaacaatggtggagacttaatgactgctatggccagtggagatattgatatagggtatgccgggatcacccctgtaatgtcttccattagccaaggagtgcccgttaaagtggtctccggggcccagattgagggaagcgcgatcgtggccaataagaacagcggcatcacgaccgtggccgacctaaaaggcaagactgtcgcaacccctggggaagccacaattcagaacatgctgctcacctcggccctgacacaggccggcgtctccactgattcagtggaatttacaaccatgaaagcggcccagatgacagacgccttgaaggcaggccaggttgacgcaatgatcatctgggagccttactcctcaattgccgtgaagaacggagacggcgtactgatcgaaaacagttctgagatcattccaggccacccctgctgctgtgtggtggccagggaggacttcatcaaggaccaccgcgacagcctggacaaggttctcaaagctcatgaggaggccacgaaattcaccaatgaaaaccccgccgaagcggctaagatgctgccggaggacatcgtcccagatcaggagctgcaggctaaagtgatcgcagataccgttttcatatccggccttgatgctgagtacaagcagaaggtcatggacttcatggctctggaagtgcaattggggcttctgaaacagccccttactgaagagcagatcttcgccgatctgtga

SEQ ID NO: 3166 - DNA, 744 bp, synthetic construct
  source 1..744: mol_type = other DNA
gtggaaatcaagaaaaagtttcttccatttatcctaccggccattctgctgattatctggtacctcattacagatgggttgcatctgatcccttactatatcctgccgagtcccttgaatgtgtttaacgcggcatggaccctgataactaacggaaaactcttcatgcacacctccagcacactgataaaggtgttctcaggtatcattctggcatctgtagtggccattcccctcggcatcatcctcggctggtacgagacccttgaccggctgagctccctgatcataagtatcctaaggcccatccctcccatctcatggattccattctccattctttggtttggtataggactctccagcgccgtgttcgtgatcttcatcggctgtgtgttctcagtgctggtatacacaattgacggagtgaaacgaaccgataacgtcttgatcgaagccgctcagacgctgggggcaaacaattgggacatcctgcttaagatcgtcctcccatccacgctgccctatattgtcagcggactcaaggtcggcgtgagcatagctttaatgtgcaccgtcagcgccgagatgatcgcttcgagccgggggttagggtatatgattctgactgccagtcaattgttccagcctggaactgtggttgttgggatgattgttattggcataatcggcattctgtttgactacggctttagaaaagcgcaggagcgcatcttctggtga

SEQ ID NO: 3167 - DNA, 762 bp, synthetic construct
  source 1..762: mol_type = other DNA
gtgttcatattggcaattgacataaagaacgtctccaagtcatttgttactaaagacaaagatttcatggccctgaagaatattaatctccatgtggacgacggagaactaatctgtctcttggggccctccggctgcggcaagaccaccttactgcgaatggtgggggggctggagaaacccgatgagggagagatctatgatcggggagagcttgtaacaggtccttccaaggaccgcggcttcattttccagcagtatagcctgttcccctggctaaatgtgctcgataacgttatgtttggactgaacctgaacaaagacacaagcaaggaagagaatctcgctgctgccgaaaggtacctggaaagggtcggcctggccgagtttaaatacagctacccccacgaactgagcggggggatgaagcagcgagtggcgatcatccgctcactgctcaaccacactcctgtgctgcttatggatgagccattcagtgcagtggacatgctgaatcgccatagtcttcaagagcagctcatcggcgtgtggaaaagatttaacaccacgattttattcgtaacccacgacgtcgacgaggccgtctacttggccgacaagatcgtgattatggataagaacccgggcagaatccaagatgttgtggaggtgccacttgagcggccaagacagagggaatcgcgggagtttctggacttccaggatgaaatcgaaaagctgctcggtgtctgggagccttga

SEQ ID NO: 3168 - DNA, 801 bp, synthetic construct
  source 1..801: mol_type = other DNA
atgatcgggctgagcatcgccggatttgacccctccggcggggctggaatcagcacagatatgaagacaatggctgcccatggcgtgcacccctgttccgtgatcaccgccctaactgcgcagaacccaaaaaaagtgtttagcgtgcaggctatcgaaacctcctatattagacagcagatcgactccatattcgatgagtaccccatcaagtactcaaagacgggcctcctctactccaaagagatcatccagctggtcagtaaaaaggtcgaggaactgaatttgcgcatagtagttgacccggtgatggtggcaagttcgggtgggcaacttgcaaagaaggagatggcaaattcactgaagaaatacctcttgaaaaacgccctgcttgttactccaaacgtcaaagaggccgaggagctgtcgggaatcagcatcaaatcaatagaggatgctaaggaagccgcctataagattggagaatgctgcaatgtaatgattacgggtggccacctggacggcaacaatgtcatttacaataagcaaaaggatgagctcagcattctgaagcagaacttgatcaagaccgataaccttcacggcaccgggtgcagtctctctgccgctatctgtgccaacctcattatactgaacgaaaaggacaaagacagcaaggacgagaacaacctagagattgcaatcgaacggtctaccaaattcatttacgaagcggtgaagaaggggaggtatggcacattaaatcctaatttcaacagcaatctggacttcctgaaatga

SEQ ID NO: 3169 - DNA, 705 bp, synthetic construct
  source 1..705: mol_type = other DNA
atggataagatttatgcaataatccctgtcaaccaatttgcaaatgctaaaacccgcctgtcgcccttcctcacacctgaagaaaggagggatctattgaaggccatgctcaaagacattacagacacactcaagcccattgtagacaaggtcgtgatcatcagcagagatgaggaggtgctggcctacgccgaagagctggagcttactacaattgtcgaggaggagtacaaaaaatccaaggctgttaacagcagcgacgacaaccccttaaataaggccctgaaacaggcgatgaagtggagtcggaagaagacccgaaaagtgataatcctgccatctgacattccattgatcggaaagaccaacgtaaagctcctaattgaccaggcaaagaattttgacttcatcatcgtgccctcaaagggcggaggtacgaacactctgatcataaagccactggcgatcgacatgaaattcgaggggtttagcttcaacaagcacatcgaagaggccaagagaaagaaattggttccgattgtgcatgattcattctatatggccctcgatgtcaacaccacggaggatcttggcgaaatcatgcttcatggcaatgggaccgaaaccaaaaaatacctggagagtctggggatcaaggtggagtcctcccacgaccacgaacggctgaaagtgactcgcgattga

SEQ ID NO: 3170 - DNA, 1407 bp, synthetic construct
  source 1..1407: mol_type = other DNA
gtggagaatttcagtgaatggttccatgagatcttagagaaggccgagattacagacagtcggtacccgattaaaggcatgagcgtatggctcccttacgggttccaaatccggagagcctgtctgaacatctaccgcgacctgctggactcggaacacgatgaggtcttgttcccactgctgattccagaagaggaactggcaaaggagggcatccatgtgaagggctttgaagatgaggtctattgggtgacccacggcggtcagaaggagttgaacgagaagcttgccatccggcctacaagcgagacggcaatgtatccgatgttctccctctgggttcgctcccacattgacctgccaatcaagcagtaccaagtggtgaacacattccgatatgaaaccaagcataccaggcctctgatacgggtgagggagattaccacctttgccgaagcccacactgtgcactcaagcccagaggaagcggcagagcaggttgaaactggaattgagatctataaagagctctttgatgagatgggaattgcctatctcatcagcaagaggccggtctgggacaagttccccggtgctgagtacactatggcctttgatacgatcatgcccgatggaaagaccttgcagattgggacggtccacaatctgggccagacctttgcaaagacctttgagataacctttgaaaacaaggagggcaaccacgaatacgcctaccagacctgctatggcatctcagatagggtgattgcagccgcgattgccgctcacggagatgaaaaagggctgatcctacctcccagaatcgctccaaagcagataacaatcattccaatcatcttcaaggatggaggagaggaggtaatggctaaatgcctcgaaatcaagaaatccttagaaagcaaagggatcagagtccaaatggacacacgcgacatacgacccggtaagaaattctttgactgggaattgaaaggcactcctcttcggttcgaacttggtcccagagacctgaagaacaatgtagctatcctgggccgccgtgacaccggggaaaagatagagataagcctcgaggatgacctccccagcaaggttgaggaccttctaatggagattgaagaaaatctaaaagccaagtcctggaaagcccaggaggataaactcatcactctggagagtctggacaatgtgggcgaaattgtcgatgaggagaaagtggtgaaattctactggtgcggagaagaggaatgtgggaaggagatcgaagaggagacagaggtggacattctgggcatcaacgaggagaacataaaaacagacaagatctgtccccattgcgggaagcccgcaaagcatgttgcgctgatggctaaaacgtactga

SEQ ID NO: 3171 - DNA, 1044 bp, synthetic construct
  source 1..1044: mol_type = other DNA
atggactctaaaaaaatccagatgccccgagaagtacacattggccccaatgttctcgatgaagtgggggaaatttgcaaggacctgcgtctatttgacgaggcccttgtagtctccggctttcacacatttgacgttgccgggcagcagaccgttgacgccctcgaaagttctgatttcggggtggacgtcgtcaaggttaaagatgcatcggtcgagagtgtggagaaggtgcgggagaagatcgccaacgcctcggtggtcctgggcgtcggaggaggtaagataattgacgtggcaaagcttgcttccacctatgagcattcctacttcattagtgtgccaaccactgccagtcacgacggaatcgcctcccccatggcctccattaaaaatgacaagggatcaatctcaaaaaatgcaaactctcccatggcggtggtggccgacactggcataatcaacactagcccttttagactaatcgcttcaggctgtgcggacatcgtgtccaactacaccgccatcaaagattggcgattggcttacaggctgcggaatgaaaagttcagcgagagcgctgctgcccttagtgagatgacggctaaactcattatcaactcctccgacagcatcaaggaaggcctggaggagagcgctagaatagtggtaaagtcactgttcagcagtggcatggctataagcatcgcaggttcaagccgccctgccagcggttcggagcacctcttcagccatgcattggatcggatcgccaaaaagccagcactgcatggggagcaatgcggggtgggaacgatcatgatgatgcacttgcacggcggggattggagagcgattcagtctatcctgaagaccattggggcaccgacaaacgcctccgaattaggactggatgatgatgagataatcgacgccctcacaattgctcatacactcaggccagaaaggtataccattctgggtgacaacggcctgacccgcgatgcggccatcaagctggcgcgcaaaacggaggtgatctga

SEQ ID NO: 3172 - DNA, 441 bp, synthetic construct
  source 1..441: mol_type = other DNA
atgatcactctcattggtaagaaactggcaaaggaaggagagagctttatattctacgagcccgcggaggaatgcagtacctgccgattcaaagcctcgtgcatagattccctagaggaggggcataagtatacaatcacggaagtcagagatgtggaacagaagtgtccgattcacgaggatgagaaggtgcaggtggtggtcgtggaaaagggggagaccacaatcctgaccgattccaaaggggtctttgaaggcagcagcttcgagtttaatcggcaaggctgttcaaacaaggactgcgactttagggacatgtgtttccctgaggagatcggaaaaggcgaaaaatgcgtttacattaaggacctcggcaagttcaacgactgcccacgcggaaactctctgatcaaatgtgtggtaaagatctacgacaaatga

SEQ ID NO: 3173 - DNA, 669 bp, synthetic construct
  source 1..669: mol_type = other DNA
atgagtcaaatgaagaaagattgcgggtacgctgccgcagagctggtcaaagacgggcaggttctcgggctgggcaccggttcaacaaccctctatttcatcgaaaaggtcgggatgcgggtgagagacgaaggcattgaggtgatgggaatcccaacttcctttcagtcgtccttgcttgcccgcaagtggaacatcccaatcacgagcctggacgagcacgagattgatctggctgttgacggtgcagacgagatagatccggacttcaaccttatcaaaggcggcggcgccgcacatactatcgaaaagatcgtggactactccgccaaggaactggtcatcatcgcggatgatagcaagctcgtgaatgtgctcggggccttccccctgcccatagaaattatcccagtgagcctcaaccctgtgacaaaggccttggaggacatgggaggggaagtaaatattaggatgggccaggcgaaggatggacccgtcataaccgacaatggcaacttcatcctggacgtgagctttggagagatcgacaatcccatttcaatggagaaagagctgaacaccctacctggagtggttgagaacggactgtttacagaaatggtcgataaggtgattattggtagtaaagatggcgtaaaatacttatga

SEQ ID NO: 3174 - DNA, 1335 bp, synthetic construct
  source 1..1335: mol_type = other DNA
atgaaagtggtgatagtcggtggcggagcgggagggatctccacagcttccaatctgcgcaaactggacgaagaagtcgagattgtggttttgacgcgggataatcaagtgtcttactctccgtgcgctattccgtacgtactgtccgaccgcatacactcatttgatgacatcgtgatgcgcacagtggacgactataaggcaaaaaacattgacgtgatgctggagacggaagtgactggggtcgactcggctaagaagcagatcacctatagcaaaaacggtgttgtgcagaccatgaactatgacaagcttgtgctagccactgggggatcgccctttgtcccccctatgaagggggtggacttggacggcgtattcaagatccggacgctggatgacggaaagcaagtgaaggaatgggcggaaaactgcaaaagcgctctggtgaccggcgccggtttgatcgggattgagatcgcctacgcatttaaaaagatgggcctgaaggtaaccttatgtgagatgctcccacagatcgttccacggagcctcgatcccgatatggcgaagatcctgacggactacctgatcgaagagggaattgatgtggttctgggccagcccatcacagagcttaaaggggaagatggcaaagtcaagaaggctgtcttcgaggacggcacagaagcagatgcagacatggtgatcctggctacaggcgtgagagccgagcttaatctcgccaaaatggcgggctgtgactgtgggagatgggccatccttgtgaatgataggatggctaccaccgtacctgacgtctatgcagttggagactgcgtggagtcttacagtgctatcctccggtcaaacactgtgagccagttaggaaccaccgcagttcgtcaagccaagaccctggctcagactctcgccggcaagcgctcaaggttcaaccctgtgctcaactccatggttagcaaagtcggcaaactggagttcggtgcagtcggcctgacccgaagctttgcccagcagaacagcataaaggccgtggtcggaaaggttgaggccctcacaagggccaggtactatccaaatgccaagcctatgaatgtaaaggtcatctgtgatgcagatggtacaataattgggtgccagataattgccgaggaacgagtcgccgagagaattgataccatgacattggccatcactcaggagctaacctgcttcgaactcagtaacatggagttcgcttacgccccccccgtgtccatggtgactgacccactggtgattgcggtggaggaagtcagtaaaaagttcaactga

SEQ ID NO: 3175 - DNA, 2076 bp, synthetic construct
  source 1..2076: mol_type = other DNA
ctgacaaagatattcatcagttgtgccctgccctacgccaacgggccctgccatctcggtcacctccggtccacatatattccagcggatatctatgccagatacaaccgtatggcggggaatgatgtcttgatggtgtgtgccaccgacgagcacggaactccaattgcagtgaaagcagatgcggaaggcaagaaacctatcgaggtcgccaagcgctaccatgacatgatagcccgggacattgaaagctgcgacatcagcctggacaactttgcacgcacaagcgacgagctgcactataagatctcacaggacttcttcctatacctgtacgaaaaggggttgatctacgaggaagccattcagcagctttactgtgaaaactgtgagaagttcttgcccgaccgatacgtggaggggatctgtcctgtctgtggggctgaggcccggggcgaccactgcgagtcctgcggacgggctttggagccgaccgagctgcttgagccacactgcctcacctgcggaaatacgccagtgataagggacagcacacaatatttcttcaagctcagccatttccagaatcaactcgaggagtatattacaaccaacgagtacctgcctcccaacgtccgaaactacgcgcagaactggctgaaggaaggcctggaggattggatcatgacccgggacatgaaatgggggattccagtgcctctcgaaggcgctaaaggaaaggtcatctacgtgtggggcgaggccttcatcggctatatttcctctgccgcggcatggagcagaaggacgggcatcccctgggaggactattgggacggccacgtggttcacttcattggaaaggacattatctaccaccattcgctcttttggcctgcgatgctgatgggccatgactgcaagttacccgatgacatttttgcaggggaatttctgtccctcgagggccgaaagatgtctaccagtaagaactgggttgtctgggtgtccgactttgtaaaagacttcgaatcagacttgctgcgcttctacctaactatcagcgcaccgcttaacaaagacacagatttcagttgggacgactttggaagaagggtgaacgatgaattggcagatataatcggcaacttcctgcacaggacttttacattcactcataagttctttgacggtaaggtcccggagtatgccaatccaagtgaagaggacctcgaatttgaagctgagattaaggagctgccggctaaagtgggggagcttatctcaagcatgaagtttagggaagggctggttgagattctcaagaccgccaaatctgccaataagtacttcaatgaccaggagccctggaaggccgtgaaagaaaacccacagaaggcctctaactgcctgtacctctccaaccagttctgcaaatccctagccattctgctgaaaccttatatccccaacaaggcagatgccatctgcgatataatcaatattagtaaggaaaacgtgtgggatgatgccagcatattcctagagaatggtcacgagataaataaggccaagccactctttaagaagattgaagataaggttattgaggctcagaaggaaaagctgtatgctaacctcgaggattcagaggagactaaagacgataaggacaataaaaaagataagaaagacaagtcgaacaagaataaatccaataaagacaaaaaagataaatcgaagtcaaatgatggggaaaaaatggatctgatcagcatcgatgaatttgccaaagtggagatccgcatcggaaagatcgtagagatcgaaaagatagagaagtccaacaaattactgaagacccaaatcgacattggagataagaccatccaggtgattgcaggtcttggcaaaagatacgctcccgaggacctgcttggcaaaaaggtccctgtggtaaccaatctgaaacccgctaaattgatgggtgaactgtctgaaggaatgatcatggctacggagagtgcagctatcttaacgcccgacgattgtgaaatcggcgagctgcttatgtga

SEQ ID NO: 3176 - DNA, 1578 bp, synthetic construct
  source 1..1578: mol_type = other DNA
atggatgaaagcctgatgataacagagtctgagaaatttcttaatcagattgagagggagaagttagatctcaccaatctgaagtctgacttcagtgacttggagtcatatctggaggtgtacgaacttttgaaaagcaactttgacaagctccaggacatgaaggaaagtatggacgagcgcggttatactgccccattccgtagtctcaaccggtacggttcccgggtgagtgaggatgtggactacgaggaactaggggagctgaaccgccacaacactattttccgcaacaatgcctccgctaaaaagaacagcttcgatagggtaaaatacgccatcgccgcgcaccggattgccctgggcaaccttgaggagtacgccaaaatcagatgcaaggactgtcagaagagctacaaggttagcacattcctggaaaactcaaagacctgcaaatgtggaagcacggattttgagctgaaggtgaaccactccggaatccatcggctcgagatcatcccttatctgcccttgtccggcaattatatggtgctgctctccagcctgtccgggtggggcagggactccttccgcagaatcttgaacatactgcagcagaaacgaaaaggtgtcgtcaagacggtgactcctatcatccgcataaaggaaaacggcagaaccatcactaaacgagtaaaccttgatagtgagttcgccgattgctatgaagaggaactcagacgtatatatggcaagggagtgcgcatagaaaggcttgaatttcacagtacaaagcccacaatcgttaacgataagtacacccggaccaatctggccctggcttatgtcaagcatgcggaagacattgtgtcaagacatgaggaagagatttttgaggaaaacatcaaggacctcaacaacctgaagacctacgatgagcttatctactcagtcaatctggaaaaacctgaatacatggatgaggatgacctggactcttggagagagcaaaagatccaggacaatctcctggaattgggcctcatggacaaatacgggcacctggataagcaattaaagaaagacctaaaggaaagggagagaatcaagtcgaaaattttcgccgacatcgcaccaaccctgattctgtgggacatttccaaatactacctctgcacatcctatgaccgccggaaaaggtatggctctccattcccgttcattcggaacgatttagaccgccagcagcggaaggtgtttgccaatccccatgctaatgtcgtcgggctcctgagggagaaggagaaaaagcacatgatagcaattgacgagatggatctcctgctgtacaaaaagttcaaattggaaaagcgaatcaagaacacgaattttaagctgaattacgcagcactaggacccgcgatcgtgtttgctaattcggactacaacattaaggaagtttcgagggcttataaagtgggagagaaaagcgtaaaacgagagattatgaatatcaagagctttcgtaagccgaacagcaaaaaatcacgggagttcctaggcaagatcaaggggtga

SEQ ID NO: 3177 - DNA, 708 bp, synthetic construct
  source 1..708: mol_type = other DNA
atgagttatgattttgatgacttcgacgaggacttcgatgatgacgagtttgatgagtctgaggattacgatgactttgacgaagatttcgaggacgatttcgaggacgattttgaagacgacttcgacgactttgacttcgatgacgacttcgacaacctcgactcaaaaagcaaggaagatatcgacatatttgatgaaaaaccccttgaaaccgacagcgggtacgaacgcaccgccgtggaggtgcacgtctcgagtcccctgagttcacgcaagttagtggagcttatggacacgtatccgtccctaaagaggatcacttgtcccaaaagcatttatgatagaatgagctcaaagtacatcaaaatcctgaaggaagatttgaacatcacagtggagatcaagtacaactggggaaagaaaaaatacacaaaaaaggaagtcgattcggtcattgaactgttcaacgaggggaagcgaagcggtgagattgcatcccagctggacatgcctatttccaatgttaactatatcaaatccaaatacagcgaccggatcaatgtaaagcattacaagaagaaatatgatgacgagtgcagactgaggataaagtccatgaaggaggacggcctcaagccaaaagagataagccagaacctgggcattccagtgcggtctgtgtactacatcctcaataagaagtga

SEQ ID NO: 3178 - DNA, 14790 bp, synthetic construct
  source 1..14790: mol_type = other DNA
atgaataataagacattatttatcattgggctgttcatatgcctgctgttcaccatacctatggtaagcgctgctgatgctgactccaacttaatcgataattcagtgatcggaacaaacatcaactcacaggcaatcacaacatctgacgcaagcatcgaccactcgagcaatgccaatgccatcaacacgaatattaatagcgatgacattgtgtctaataacaataacaataactccatcattgacattaacgattccgacattgagagccagaaggacggctcaagtaagaatattatcaagtcgaccaacaaaaacacaaatgactccaacaacgaaactgaggacaacatcctcgtgactgatatcaatctgggcaaaaataataaaaattcaaatgataaaaatatcctcagcgctaatgccctaactgccgatggaactggtacaactttcggcgacttgcaatatatcattgaccaagatacaaccggtaccattactctcgataaaaattataaattcgagtctggcaccgacgacgcttatctcgatggcatcacgataaacaaggccattacgataaatggcggaaaccataccatcgacggagaccacctggctcgcatctttaacattaatactggatctgcctccgacattgttgtgctcaatagcatccatttcattaatggtatggcagatggcagtggcgataatgccaatggcggcgcgatttatattggttcgccaacgaccctgaattacattaccgccatcaattgcacagcgactgggaacggcggtgccatatatgcccatgcagacggcaccaatattgcagcgaactacctatacctatataacaacactgccgtgaacggcggcgcactgtacgtgtatggcaacgattatacagtcaccgtcgtggacgcccgatacaatagcgccagcggcaatgggggcgccatgtatgcatacggcaactccttccacctgaacaaggtgaacttcatcaacaacacggcatacggcgaagattcagaggggggggcaatcttctttgcccacaattctgatgattccattgtgaacaactcctactttgcaaacaactctgcaaatcgcgatgggggcgcaatagtgtgggatcaaggcgcacacttcggcgaactgtataattccaagttctacaacaatactgctaaccacagctcaggcgctgtgcgttggagtggggagaatggcaccattgacaactgtagttttattgacaacaaggcgtatggaaccaatttagaaccgggtgactttgaccagggcggcgaccagattcttggcggcaatggcggggcgatcacctggctcggttctgtgggtattatcaggaactccaacttcaccgataactacgccgaggccaatgggggagggatgttccttatagctttcgacatcaatgaccccaactccatctgtaacgacacccatatcatcaactgtaacttcattagcaacgacgccggactcaatgggggtgcattagactgggacggtaaggcgtacaacgggtctgtgtctgggtccaagttttataacaataccgccgcccggagtggaggcgcgatcttctggaaaggcaatggaggcatcataacacagtctgactttaagtataactctgccaatgggactcatctggtgcagcccgaaggattcctgacccctggcgggaacggcggcgcggtaatcatcacagggtccgacgtgaatatcacatattccaatttcactaacaacagtgctcgcgctcggggcggagcggtttacttgcagctcaataacaataccatggttttgaatagttcatttgagaataatagtgccggcaccaatggtggagcactggacttttatactggggcggaaaacggtaaggtaattaactccacatttctgaataacaccgctaaccggagcggcggtggtatatactggaatggcgaaaagggcgtcattaatggctccatcttctatgataataaggccctcaatcagggtacatacgtgaacggaagccaaattaccgatgggggcgacggcggcgcgatcatttggacaggctcacacgggacgctggagaatagcacctttaagaacaacaacgcgactaaccggggtggagctattttccttgagaagcataatctggaggaccctaacgactattgcaagaacattacagtgttgaattgcacatttgagaagaacagcgccgggaccaacggcggtgccatcgactggtttgagggtgccgagaatggcaggattattaactcaacattcaccgaaaactacgcccggagatctgggggcgcggttttctggaatggcgtgaacgggactatatccaattcaacatttacccttaacgaggtcggtctggaaggtgccgacacgggaaccggcgagacaattcccacgggagatgacgatggtggagccatcaagtggacaggggcaaacggcttgattgaaaactccatctttcgcgaaaataaggctttggaagggcgggggggagccatttatctggagaacaacgagaacgggacggttaacaactgcaccttcgaattgaatagtgcctttacaaacgggggggctatagactggcacgagggcgcaaagaatgggcagcttatcaattccaccctgacaaacaacacggcgggacgtagcggtggggcagtttattggaatggacacaacgggacaatcaacggaacaaacttcacagacaacaaggcactgggaactcaccacacggagggccagacggaaggcggagatgggggtgcaatcatctggacaggctcctatggtactatcgagctgtcgaacttccataataacagtgcacggtggaggggcggagcaatcttccttcagaagaacgtgcatgaaggggaagagcattgctataatacaaccgttaagaatagctactttgaggagaactttgcaggcagtaacggtggggctatcgattggtctgcaggcgctatgtatgggaaactgatcaatagcacattcataaacaacactgcggagcggagtgcaggcgccgtttactggaatggcctatatggggaaatcctcaattccacatttgaaaacaacaccgccatagggaacttcactcacgacgtgcggcccgaggtggacgaaacctacactgtgatcggaggcaacgggggggctgtggtgattactggaagccatgccaagatcgatggaagcaactttacattcaacaccgcaacaagactcggcggggcaatcttcttccacgacaacaccaacgggaccataaacaattccatctttactaacaacacggcagggctcaatgggggcgcccttgacttctacgagggtgcgcgagatgggcaggtcctcaactccacctttatcaacaacactgccaaggacggaaaagggggcgccatcaactggataggcacaaatggcaccgtggatggctgtgacttcataaacaacacggcaaacggatctgatgatgagtctggtgcaggtggggcaatcaacgtcgatggtattaacacctacatcgcaaattcaacatttaccaacaacagctgctgggacgatgggggggctatctgttggaatggtgacctgggtaagatctacaatattacctgcttcaacaacagcgcgataggcaaggaccacaaatcgagcggcgggaccatcagtatttatggttcaaacctcacaatggacaaggtgaacataacactcggtacagtgtcctcagtgaacgacgacaaggtttccaaaggtggagggatctttgtgacagggaactatgtgaacatcaccaatgccgagtttacaaactgcagcgcattggccccgatcgacgattcctctgccggagcactctacattatcgggaacaataccaatgtggtgaatgcaacattcaagaacaacacggcttatgaggacggtggcgccgtgtacattctcggggaaaactgtaccctgaacaacacactgttcctcaataacgtggcccacaacgacggcggagccatccagtgggatggcaacaatggccgcatctacaacctcactgccgacggaaactatgccgacagtgcaagtggctcctctaaaggagggaccctcactattgagggcaacaatacagtgatccagaaaatcaatatttccaattcctatgtggatagcgaccacgacctcggagccggcaagtcgacccagggtggagcgatattcctaaccgggaatgactgtaacattacagatgctgtgtttgacaactgttctgtcaaatatgtggccgatgaatcatcggggggagccatgtacatcatcggtaacaataccaacgtggtcaatgccaacttcacaaacaactcggccgtggaggacgggggcgccatatatattgacggggactattgcaccttgaacaatacggtgttcatcaacaacaccgctcacaacgacggcggcgctgtggactgggagggtaactatggccacgtttacaatctgactgccattgacaaccatgcagatagtgcacatggcagtagcaaaggcgggactatcctgctggaaggggggcattgcacatttgaccagctgaacatctcaaactcctatgtcagcggtgaaacctacacagggacaaagcctgtgcaaggcggaggcatagctatctccggtaatgactgcaacatttccaattccgtctttgacaattgttctgtgagatatgaaggaaccaattccagcgggggggcattgtacatttggggtaacgatacccatatcgcgaactgtaatttcacaaacaactcggtgccttccgacgggggggccatctacgtgggaggcagcgacgtgaccgttgtcgattcaaacttcatcgacaacaatgcctcccagtcgggtggcgctatcttcttgacggacaataagaacagtcagatcaatgggagcaccttcaagaacaattctgcgaaagtgaacggtggagcgattgacttctatgcaggtgcagaagacggtctcgtatctgcgtgcgagtttgttaacaacacggccggcgcctccggcggctccatttactgggaggggacccgcggggtgatcgagtactctagctttgatggaagccgggctcttggcaatcagacaagcgatgccaacaatgggcggggaggctcgatcatttggctcggagaccacggcacaatccgtggctgtgactttaatgacagtcagtccgctaaagagggggcgacactgtatgtggtgggcgaccttattaaggtgcagcaaagcaactttaccaactctcaaaccaataccagtggtggcatttacatccaggggtcagaaggcactataagtaattgccatatggagaacacgactgctaaggagtccggtggagcactttacgttaaaggcaactacatctacctgctggattctgacataaacaatgccacctccgttaataatggcagcgccatttacattactgggaacaccacccacatagagaatagcaatgtcaccaattgcagctcaagtagcggaaatggaaccatcatgattgccggctataagaccgtcatggacggcgtcaatgtagacaacaacaaagcggtgtctgctggcgccgtgctaattagtggatcgcagaccaaaatcagcaactcgaacttcacccataacaatgcctccaaggatgccgggggcataatgatcaatgggaccgacaataccattacaacttcaaatatctctgacaactacgccaaagagaacggcggagggatctactacaccggcgatagaaatacagtaagttactcgaatatcgaccataacagcgcgaacaatggtgccaatgtctacatggctatcaaagctaaagattgcaagcttatcggctccaatatcacaaacgccaaggcccgaaactttggtggtggagtggagtggtgtgagaacagcgaaaatggactgattcaggactgctacttctataactgtactagcactgcccacggaggcgctatccactggtaccccggcaaatatggggttatcgacaattgcaccttcgtggaatgccatgtcgcgggcaccaaaaacgggggggccatatatgccggtgcaaacacgaatgtgaaacccgttggaacagttcttagcaacagcacattcatcaactgcaccacaggcaccaggggcgctgtcaactggaacagtcaaggggggctcatctacaataacacctttattaactgtggtgtcgccaacacatctgtgactacatcttgggggggtgcccaagctctgcagattgagaaagggaacaacacgcagattatcgcctgcgagttttataactgctccggcatcgggggaggaggcgcattgagagtccagggtgacggccatagtgggtacaatattacaattgcgaactgtacattcgacaactgtaacaataccggcctggcggggggcgtctatttatccgatatggctcgaaatataactttcgaaaacaatacctttaccaacaactccgcccccaatgtgggcgccttcttcatggaccctaaaacggtcattgttagcttcgtgaacaacacatttattaataactctgccacgggctcaagcggttatgcgggggccgctcagttaaccggaaatctcgaagtcatcaattcgacattcatcgagaactcagccgtgagtaaagccggcgccattaatgctgtggaggattatgacggaaacaacaacctggccatcatcggatcaactttccagtacaacaaagctaaagagggctctgccatcaatgctatcaacctggacatgactgacacagttttactggaaaaccaagcagcattcgataagtggacaaaccagcgcaattcaagagctaacggccatgtatctataaacggtacgtttgtcggcaaagacaactacttgaacgggatcaaggccaatggagccactttcgacaatgtcacatattgcggggtcaatggcggagggctgtatgaagacactgtcaccaacaccgacgatgtaacttccgctaagtccaccaatgaggttcaccagttaatagtcctggagatttatgactataataataatctcgtggataccaagaccacatttactgatgagaatgggaaattcaacttcgaatttgacatggaaaacccccaggactacagctacaaggtgatccaccctgaagataactattacactggcgcagagtactcgattggaaaggccatctctaacatcacaatcaaaagccagaacatcactcaccccgaggatgagaatataacctttaaggtaaccggaggatcgggaacaccgaccggcaatattaccgtctttatcaacgataccgaggggaacgtgatctttaatgatacaattatcctgaactccaccggggaggcaaagctgttcttcccaaggctcaacgccagcgaatactacatagaagccaagtataacggggataacaactacctgccggacaatgacacgtccatcttccacgtgaatatggccgagtcattcatcaaaatcggaatcgagaactacacctataacgagactaggaacatcaccatcacagtgccatacatagagtcaggcaggatctccgttatcgtcacgaatgagaacttcacgcagctgtacacagtctatgtgaacgaaggaaccgaagaagtgcaaattcaattgcctatactggatgcaggcgtgtacgacatcgaggccatattccacggaaacaacaattactatccaagccaaaataccaccaacttcacggtgtttaaggctgcgtcaatcatcaacatcacagccgacaatgtgtccgggggagtgcgagagacggtggatatccacatcgatcctgaggtggcaacgcagaatataaatctgaccgtgtatgatgctcagggtaatattgtggatcagtactatgacctgggtctgcacgattcccggatcacgcagattcttacactccttcccaaagggaagtacaatgtgacggtaacttatccgggagacaagaaccataatgcatcgtcaaactcaacaatcttctacgtaaccaatgatctcttcccaattgagatcaatgccactaatatgacctatggggacgaccagatcatcaacatcaccgtgcctgccaatgcagacccagacaagctctacattaacataaattgctccgattggccgggaaataagactgtgacggagctgggactgacgattgatgagaatgggttaatacagatcgacacgacgaacactaatttatttgccaataagatagatgccggcaattacaccatcaatgtgtattaccctggggacgatgacttcctgtccaactccagcagtgtggacttcgaagtcgccaaggctattccggagatgaatgtgacgccaactaacattacatatggaaacctggaggatattctcgtcgagattgcccagaatggcaacgtgaccctatacgtcacgagcgaaaacgaccccactctgaacatcactaagatcgaggtggaaatcattgagggtaaagtctactggaacgtcaatgatacatacctgccagccggcgaatatatggttgaggcaatattcaatggaaaccgcaattacgagtctgtcaacaaaaccgaaaagttcaatgttaccaaagccatccccaacattgtcatcgatgtcgatgacatccatgtgggggacagcgaatacatcaatgtgaccgtcgaaggcgtcgaacacggcaccaccccacagggcaacattaagatcattgtccgcacaatcgatcagatcgtggagctgaatgccacgggccagtacaacctgacactggatgatgaggtgcagggcaatggcataagtgtcaccgtcatttattacggcgatgataattataattacacagagaaaagcgtttactacgatgtcactaaaaaagaaacttccatcaatgtgacaggagctacgcctatttcatatggaactatagaaaaccttctcgctgaagtcaacgaaaccggcgtgacaggaaccattaccatttatgtgaacagcaccgttgacggatttatcaatcagacccatgtagcgacaatcacggttgacgacgcaggcaaagccacttgggatatagatcagatcatcctgcccgtcggttcatatgacgtgactgcagtttactctggggatgacaaatttgaaggtagtgtcagcactgtcaaagtaatcgtggtcgagaaggctaccgattacgacatcagcgtggaggccaataacaccgtttatggaacggatcaggtcatcatcgtaactgtgcctgacaatgccaacggtactgtgaccataaccatagagggcactgaaatcagcctgacctcacaggtggaaaacggtaaagcagtctttactatcccaaacgacctagttgacttcctggaggtgcacgacaattataatgtcactgccacctataatggcgacgacaagtacgccgccggagtcaaggccagtgacctgttcaatgtgaccaaagctgaatctcacattaaagtggttgcagaagatatcgattacactcagatcgaaaacattactgtcatccttccagatttcaacgcgaccggtaagatcgtgattacaattgtgaacaagtctgacaccactcagatcgtcagaactttggaggtggaccccttcactaatactacgggggttatctatccctttgaaggactcttggtaggtaattacacagtgaaggtcgagtactccggagaccacaactataataacagtgaaaacactaccgactttgaggtgcgtaaggttgaccctaccctaactgagaactcaccggatatcatctacggggccgacgagaacataacggtgaccatcaccggcgctacaggaggtgtggaccccaccggaaccatccaggttattgttgacggtgtcaccattgacaccattacgatcggggataaagacctggaatttattgtgaccaagcctggagtcgacccacagcacaatatcaccgtgatttacagtggcgacagcaactataacccagtgaccattaccggggagtttgctgtaacgcagaacaacactatcgagatggaggaggtctcccctaacattgtgtatggtaacaacgagataattacaatcactctgcctaatgatgccacaggcaccgtctatctggtggtcaacggaacttattacacccctattgggattgatgagaaccaccaagctgtatttaccattgtcgccccaatcgtaggagagtacaacttcacagcttactactccggagatgagaactacacagccaacaatataagcggcgcattcaatgtaaccaaagcggatgttagcctgtcagaatctcacactgccacaattacctatggggctaacgacaccattactgtcacaattactggggtggagggccctgagggagtgctggccccaactggcaccatcaaggtgttggtggacggagaggaaatcggcaatgtcaccattggggatgacctggtctttaactccatcaggccatttgtggacccccaacacaacatcacaatcatttacagcggagacaataactacaattccaaagtcatagacaacaccgtgctcgacaccctggttttcgaggttatcaagaacaacaccctggagatcagtgaagactcgccagacatcttctataccgagaacgagaccataactgtgaccattgctggggacgccacaggtaccatcacggtcacagttggcggagagcaggtgggagaggtggtcactatcactgaaataacagaggatgacaaggtgttcaccttcaacattacaaagcctgagggcggagtatatgatgacctgaccgtggtctacagtggagattccaattatgactccgctaccatcaatggcgagtttactgtctcccctatcgaccctaatatcaccgaggacagtccggatattgtttacacaaacaacgaagttatcacaataactgtgcctgagggggctaccggcaatctaacggtgactgtcaagaacagcaaaggggatacagtggagaccaaaaaattggtgatagggacggacgatttggttgtaactatcgagaagcccgctgtagacaactacactttcacggtggactacacgggctgtaccaactacactgaaaagaccattacaggcgagtttaaggtaacaaaggcctcaaatgagattacagtcgtgtcgaccaatataacctacggacaaactgaaacaataaccgtcacagttcccgaaggggcaacaggcaacgtaacaattaccgtgggcacatacacggacatgctggaaatcccagaaggcagcactgaagtggtgttcactattcccaaaacagccgccgatgagttgctgagtgtgagtgataactacattgtcttcgctaactactccggcgacagcaactacgaatccgtggtggccaatgccccgttccatgtcgaccccgccaacactacactcactatagaggtggctgatatcacctacggggaggacgaaataatcaatgtgaccgttaatggagtcaccggtggagacattcccactggatttgtcacaatcaagctcaacgggaccgacattgagttgaccaagccggtagacagtgaaggaaaggtacaattcaacgtgtcaggacttgtggtcggagaatacactgttaacgctacatttgtttcaagctcaatcaattacaatgatagcaacaacacggcgaagttcaatgtcacgaaagccgatgtgaaggaggccaacatgaacatcaccgctattaacatcacgtacggcgacgacgagaccataacggtgatcctgaatgagaccaacatcaccggaaacgttaccattaccatcaacggcacggagatcgagaccaaggaattggtggacggtaaggtggtcttcaccgtgcccgatttagaggtaaacggatacaacgtcgtggctaactactccggcgaccataactataacgcaatacctatcggagccaatttcaacacagactttaaggtggataaggctaacgtaaccgtggttgtgactcccgtagatataatttacaaggagacagaggagattaacgtgactgtgactggggtgttcatcaacgacaatgtgaacgacaacctgaccggcaaagtgaccatctacatcgatggcgttgaaaatcaaactaaggatattagtgctgtggacgaatacggcatcctgcacttcagtgtggagggattggctgtcgggacccataatgtgacggccgtttatcacgatgataggaactacaatgataacaatgcaaccgaggactttgaagtcatcaatgctctgcccgaggatatgaaggtcatcccccagaacatcacttaccacatccagacagagaccattaccgtggatctgggagaagtcctgaacggaactgtccagctgtacataaacgacacacttgtcgcgacatttgaggttatcgaccagagaacagtaagctacaccaataattccttagctgtcggaaactacaccgctaaggccgtgttcacggcaaatggcgatttcgtgaacgctagtgcaaacttcacggtgtctaaggccccggtgacggttgacgtggtggccgaggacagtgtgtacggcgaaacccagaccattaccgtaaacgttgataataccgttcccgataaatacaacctcacagggaacgtgagcattacaattaatggggtggactacggcaacaagacggttgatgctaacggacaggccgtgtttgagataaccggcttggaagctaacgataactaccaggtgatcgccacctactacaacgatcccaactatctcgacaatacagggcaggacacctttaaagtcagcaaggccgacgtcaaggatgtgaataaaaacattaccgccatcaacattacttatggggaggatgagaccattaccgtcacccttaatgaggataacattacgggaaagattaccattacaatcaacggcactgaaattgagactaaggagcttgaggatggtaaagtggtctttacagtaaaggacctggaagtgaacggatacaatgttgtggccaattacagcggggatactaactataacgcgttcacaatagccgacaacctcaacacggactttactgtgggaaaagctaattcaacggttgaggtggaggctatcccaagcattgtgtacggcaacaacgaaaccattaccgtgagcgtgccaatcagaaaccacacagggacaattaccctgacaataaatggcagtgactatgtttttgtaaaacatctaactgctgaggatggagatacaattgtcctcactaatgtaagcggccttgccgtgggaaactacaatgttacggtaaagtatagtgatgatagaaactacaacgatagcgaagcttctgcactgttcgaagtcactaaagcgacgcccagccagatcactgtggaagcgcagaatatcacgtacactgaggatgaaatcatcctcgttaccgtggctgatgagaacgcgacaggcagtgtgaccatcaccattgacctcggagactccacttacacaaacaccaccaacctggatgagaatggacaggctaagttcaatgtcactggtctggtagtaaaccactacacagttgtggccaattactctggagatgcaaactacactggccagacggcctcggccccctttcgcgtggataaggctgcttcaaatgtgaccatcgatgtggcgaacatcacgtatggcgaaatagaatatgcaaatatcactatccctaactacaacgccagcggtcgagtaatcatcaaagtggatgacaaagcctatgatatcctcccaatcaacaacaatactcctgttaaactggaactggatgggctggctgtgggcacgcacacgattgacgtagagtacttcgatgacgacaattacaataagtctgtcgcccacgtcgagtttaacgttactaaagccattatcccagttgatccggctaatgccagcagccttatagtgctacccaccaatattacgtatctgaacaatgagaccattgtggtcagcgtgggagccaacaatgctacaggcaaggtgacgataaccatcaaagacaaggatggcaatcccgtggacatcgacccatctgtggtcacaagcaagaacatcacagaggaaggtagccaaagcgtcaccttcactgtgcccggccttgcagtgggaaattacactgtcgaggttgattatacagatgacgccaactacgaaaacgcccagaccagcgctaagtttattgtggacccagccaattcaaccgtaaccgtggaggcggttaacatcacctaccttgataacgagactatcacggtcacggtgcccatcaccaatgctagcggcacagtggtaattaagatcaatggcacccaaaaggacgaaaggactgtgagctga

SEQ ID NO: 3179 - DNA, 8160 bp, synthetic construct
  source 1..8160: mol_type = other DNA
gtggaaggattagctgtgggcgagtataatgtgacggtcgagtactccaatgacccgaactacaacaactccaacgcatctaccctcttccacgtggataaggccaacattcccgatgtgccaaataccgaggggcttgtggtgattcccacaaacatcacatatctggaggatgagtccattacagtgaccctggatgtgcccaacgcaactggcaaagtcaccatcaacatcaatggaaccgacatcgagacgaaggagattggcggtggcactgtaacctttactgtgtcagggctggcagtgggcgagtataatgtaactgccaaatacacggacgatccaaactacaatgatgtcaatgcctctgcactctttaatgttagtcccgctgcctccaatgtgactgtggtgcctacaaatatcacatatctggagaacgagaccatcacaattagcgtgaacgtcactaatgccacagggaccctcgtggtcaagatcaacggcacagaagtgaacacaacgacatttacaggggaggataagccaaccattgttgttaccgtgcccgacctcgcagtcggcgagtacaatgtcacggtggagtacatcgacgaccccaactacaacaactccgatgcctctgccctgttccatgtcgacaaggccaatatccctgatgtcaacccagacaccggcatcgtggtggtgcccacaaatataacatacaatgatgatgagacgatcaccgtcaccgtgaacgtcagtaatgccaccgggaaggtgaccattaagattaacgacaccgacatcgtgttaagcaagaacatcacggaggacggctcccagactgtaacattcaatgtgcccgggctggtggtcggcgactataacgtgactgcagaatacacagacgacgccaactataatgatgtcaacgcttctgcactgttcaaggttgaacccgcggcctccaatgtgactgtggtgccagtgaacattacgtatggtgagaatgagacgatcacagtcagcgttgacatcaacaacgccacagggaatgtcaccattaagattaacggcaccgccgttgaattgaccaagaacatcactgaggaggggtcacagactgtgactttcaacgtgccaggtcttgcagtgggcgaatataatgtaactgctgtgtaccacgatgatgtgaactataatgagtcgaatgccagtgccctcttcaacgtgaagaaatcagcgccagtcaatctgaccgtcacggcgacgaacgtgacctatggcgagaacgtaaccgttaccgtcacggttcccgatgacgctacgggcaacgttaccatcaccatcggagattacacagacaagaaggagatcactccgggatcaaacacggtcgagtttaccgtacccaacctggaggtgaataactacgttgtctacgcgaactactcgggggactccaactatgagagcgggatcgtgaacgcccccttccatgtggacaaagctaattcaaccgtgatagttgaggccacgaacataacctatggagaggacgagacaatcactgtgactgtcccgaacaataatgccaccggatgggtaactgtcagcgtgaacgggagtgaaatcggctctaaaaagattgggaccgacggaaaagcaacattcacagtcaaagacctggaggccggggaatatgaagtaaccgtgacatatgatggagacagaaactacaatggaaacaacaacctgaccagattcacagtcgataaggctaacatcaccgaagataatataacggtggttccaacaaatatcacatatctcgacaacgagaccatcgccgttactatcggcgtgaacaacgccacaggcatagtcaccatcaagataaacggaactaacatcgagctcagcaagaacattacggaagatgggtcacagactgtaaccttcaacgtccccggcctggtggtgggggactataatgtgactgcagaatacacagcggatcacaactataatgacgtcaacgcttcggcactgttcaaggttgagcccgcctcatctaatgtgaccgtcgaggcggtaaatatcacctatcttgataatgagacgatcacggtcactgtgccaatcactaacgcatccggtaccgtggtcattaagataaatggaactcaaaaagacgagaggaccgtatccggagacaatccaacctacaatattacagtggggggactggctgttggcgagtataacgtgacggtggaatactccaacgaccccaactacaacagcagtaatgccagtaccctgtttcatgtggacaaggcgaatattcccgatgtcaacccagatacaggcatcgtggtggtgccaacaaacatcacctacaatgatgacgagacgatcacggtaaccgttgatgtgccgaacgctactggaaatgtgacgatcaggatcaacggaacggacgttgaattgactaagaacattactgaggatgggtcacagtctgtgacattcaatgtgcctggcctcgtggtgggggactacaacgtgactgttgagtacacagatgatgctaactataacgacgtcaatgcgtctgccctgttcaaggttgaaccagctgcgtccaacgtgacggtggttcctacaaatatcacatatcttgacaatgagaccatcacaattagcgttaacgtaaccaacgccacagggactgtggttgtcaaaataaatggcacagaggtgaacacaactacctttacaggggaggacaagccaactattgttgtcactgttccagacctggcagtaggcgaatataatgtcaccgtggagtacaccgacgatcccaattacaacaacagcgacgcatctgccctgttccacgtggataaggctaacattccggatgtcaacccagatacagggatcgtggtggttccaacaaatatcacatacaacgaagatgaaaccatcaccgtcaccgttgacgttcctaatgccacaggtaatgtaaccattaagattaacggaaccgatgtggagctcaccaagaacattactgaggatggcagccaatcggtaaccttcaatgtccccggcctagttgtcggggactataacgtgacggtggagtacacagacgacgccaactataatgacgtcaacgcttcggccttgttcaaggttgagcccgctgcttccaatgtggccgtagtgcctacaaatatcacatatctcgacaatgaaaccatcaccgtaaccgttgacgttcctaacgccacgggtatggttaccatcaagatcaacggcactggcgtggagctgacgaagaacatcactgaagatgggtcacagacggtcactttcaatgtgccagggcttacagccggggaatacaacgtgacggcggtttaccatgatgatgtgaactacaacgaatccaacgccagtgcattgttcaatgtcaagaaatccgccccagtcaacctgactgtcaccgctacgaatgtgacgtatggagataacgtcaccgtgaccgccaccgttcccaatgacgccacaggcaatgtaacaattacaatcggagactacacagagaagaaggaaatcactcccggatcaaacaccgtcgaatttacagtccctgacctggaggtgaacaactatgtggtctacgctaactactctagtgacagcaactatgagagcggcattgttaacgctcccttccacgtagacaaagccccgtcacacgttgaggtggatggaatagacatcaattacacggacctggaaaccatcacagttacggtgagcgacaataatgccactggatttgtcaccatcacaatcaacggcacggacattgagctcaccaaagaagtgtcggcaggccaggccgtttttgacgtaaaagacctcgttgtgggagagtacaacgtaacggccgtataccacagcgatagaaactacttgaacagcactgcgtccgacacattcaaagtggataagtcagatgtcaagaacatgaccatcagtcctgtaaacattacctatggtgaaaacgagaccattacggtacggatcactgacaataatatcacagggaacataaccatctctgtcaatggcactgagtacggtcccgttgaacttgacaacggtgtggccgtctttaatgtgccgggattgattgtgggtgattatgaagtgactgccagctatagcggcgattccaactacaaccctgcaagctcaaccgagacatttaccgtggacaaggagaaaccaaatgtgcacgtggtctctgaaaacatcgactatggaaagaatgagacaattactgtgattgtggatggatttaatgtcaccggcaatgtgaccatcaagattaatggcacagagatagcaactaaagagattaatgacaaaggccgtgcagtctttgtggtaccgggcctccaggccggggagtatgaagtggtggccatatacaacggggatgacaatcacgaatcttccgaaggcagtgacacctttacagtcgccaccgtcacgccaaacatggatgtggaaacggaggacatcgactacggcgacaatgagactataacagtaacccttcccaaagatgcgaaagggagtgtgaacataaccattaccgacgagaatggcacggtggtgtatgaaggtgaagctcagctcgaagatggcaaggctacggttgacgttcccggcatcaccccggggccctacaacgttactgtcaagtatcctggagacaggaactataatcccaccaacaagacagtccgcttcaacgtcgacaaggtagtgcccgatgtcgacgtcgataccgtgaacattgattacggcgacaacgagactgtgactgtgacagtgaaccctgtggacgggggcgtcacgcccaccgggagtgtaaatgtcaccgtcagagactcggatggtaaagtggtttatgagggcaatgtggatctggttgccggcaaggctaccctggacgtccctgatttaggggcaggagattacacggtggatgtccgctatggcggtgactccaactacgacgattcaacgggaggctcaagcttcaatgtagccaaagtctcccccgatatggacgtgcaaactgaggacattgattatggggacaatgagactgtgactgtgaccctgcccaaagacgcgacaggcactgtgaatgtgaccattaaggataacgacggcaacgtcttttatgaaggggaagctgagcttaaagagggcaaggtgactgttgatgttcctgggctgccggccggcgattacactgtggacgtggcctacggcggtgacgacaattacaacccagtcaacagttccgatagcttcagcatagataaggtcagtcctgaagtcgatgttggtacggaaaacattgactatggtgacaacgagactgtgaccgtcacagtgaacccggtggagggaggatcggctcccacaggcaccgtgaatctaaccgttaaggacagtgacggcaaagtggtttatgaatgccaggcagacctggtggaaggcaaggctacggtggatgtgcctggtttgccggccggcgattacactgttgaagtggcctacggcggggacgagaattacaccgctacaaactccaacggaaactttgctgtgggtaaagtgaaccccgacatggaggtggatggtgaagacattgactacggtgacaatgagaccgtgactgtgacccttcctaaagacgcgacagggactgtgaatgtgaccgtgaaggacagtgacggcaatgtggtttatgaaggggaagctaagctggacgatggcaaggctaccgtggatgttccggggttgccggccggggactacacggtggaagttgcttatggcggggatgacaactacaacccagtcaacagttccgatagcttcagcatcgataaggtggcgcctgaagtcgatgccgacaccgaggacattgactacggtgaggacgagcctataaccgttaccatcgaccccgtggagggaggttccactcctactggcactgtcaacgtgaccgtcaaggataaggacggcaatgtcgtgtacgaagaccaggtggatctggtggatggaaaagtcaccctagacattccagatctggatgccggggactacaccgttgatgtggcctacagcggggacgagaattacaccgctcggaactccagcggaagttttacagtcaacaaggcaaaacccgagctaaacgtagactccgaggacatcgattatggggacgatgaaaccatcaccgtcagcctcccagaggatgcaacaggcactgtaaacataaccattacagacaaggacggtaaaaccaaggtgttcaatgatgttcctattgagaacggcaaggctacaattagcgtgcctgatttggatgcgggagactataatgtcacagtggactacccgggagatgacaattacctggggagcaaagctacctcaagctttaaagtggtccgatccaactccaatatcactctggagaccgagaacatcacctacggtgacgaagagcctataactgtggacgtgaatccagtggaaggaggagtcacccctaccggtaccgtcaacataaccatcacagataaggacggaaatacgaaagtgttcaatgatgtgcctcttgagaacgggaaggccactgtggatgtgcctgacctggccgctggaaactacatagtggatgtaaaatactccggggacgggaattacgacccagacagcaccgagggagcatttgaagtggcaaaagcagtgcctcacattgaaattcacgtttacgacatctactatggcgacgtggaggtgctcacagtcacatgtgatgcccccggcactgtggacatcactgtgaatggagtcactgtaacagtacctttagatgacggatatgataagcgggtgttcagtagtatcgtgcgggcctacagcgggaaggccaccctggaccttgtgaacctggccgttggcacataccctgccaaggcagtctataacggaaatgaaaactacacttccgtctctgacaatgacaccttccatgtatacaaggagaataccactaccaagatctctgtcgatgatatcaagctaggtgaagacgcagtgattgatatcgaagtgacccatgaggacggctcggagaagatcaataccaacataactgtcactgtcgatggaaaagattacactgtggagctcatagacggaaaaggcaccctgaccatccccgacctggatctcggaaaacacactgtcaaagcggtatatcctggaagccacaactacacaaacagttcaaacgctaccagctttaaagtgacaaaagttactcccagcttcgatatttcaaccgagaacatccaggtcggagatgacgaaaccgtgaccgtgacgctcccagacgacgcaacaggaaccgtaaccctgaccattgacggcaaagagtatactgccacagtggagaacggcaaagctacatttgtgattcccgggatcaaggccggcgaacacaaggtcaacgttgcctacagcggtgatgacaagtacgcccccgctaaacgcagcgacagctttacagtgagcaaggtgaaacctgacatggggatggacgctccggaaatcaaagtgggccaggacggggttatcaccgtgaccgtgccagaggacgcaacaggtacaataagcatcaccgtggatgggaagacctacacggcaagcattaaggatggcaaagcggtgttccacatctccggactgggtccaggcacacatattgtcaaagcctactactctggtgacggcaagtacctagctggctcggtcgacggaaccatcgtggtcgagcctaagaacggtacatccccccaggataagggcaaagcgcatgggggaattgatctggaaagcaaaaagaccggtaatcccatattagttttgttcatggtattgttcagcctgattctcatccccatcaaaaggcgacgcgacgatgacgaagaagaggagaatgaagaccaaatcaatcggatagactga

SEQ ID NO: 3180 - DNA, 1026 bp, synthetic construct
  source 1..1026: mol_type = other DNA
atgagcagcctgatcagcattccaactctgcctctgattgttatcgccttgatctgtgggattctgtcgtttatcagtactcggttggttatgccttggcttattggtaagctggagcaggcggaaatcattggaaaggacatccacaagtcctcccgccccatcgtcgctgagatgggtggtattggcataatcttcggattcatcatcgggatctttgccggaataattctctttccagtgctgaccttccagcttgtggtggtccttctggtggtgctgctggtgggaatcatcggcatggtggatgacttaattgtactgtccagtaaagagaaactattccttctcttcctggccggcataccactctggtgggttgcccctcccaatgtaggcctcctctatatgatcatgattcccatagccgtctctatcacgtcaaacttgaccaacatgctcgcaggcctcaacggaatcgaaagcggcttgggggtgatttcaatgaccagcttaacaataagctgcatcatcctgggaaagtacgacgtggctattataagcatgacaatgcttggcaccctgctagcattcctctactacaacaagtatccggccaaagtgttcccaggggataccgggaccctgatcattggggccacaatcgctgcaattgcgtttattggccgggtcaagctcatcgccttcattgtcctgctacccaacattatagatgccgcgctgaagttctacagtgctggcgtcatggaacgacaacagcacaatcccacgcagctcaatgaggacggcaaattagtgaggcccgagcaaggattcaaatcccttatccgcctggtcttgagaaagccggtggatgaaaagactgctgtgatgatgatctggggaataggcatcatctttgggattctgggtatcatcgttgccctgctgatgcctggggtaacgcatgaccagacatttgcacagtttatccacctgaaagactatttctactacttgggctga

SEQ ID NO: 3181 - DNA, 141 bp, synthetic construct
  source 1..141: mol_type = other DNA
atggcccggccaatcagcccaacacccacgctgtacggcgaagacgcacgcagatttctcaagaaaatgaacgagcctccgaccgagaaagaaaagaagttctggaaggaggtggagagccagaggttcgtccccttctga

SEQ ID NO: 3182 - DNA, 225 bp, synthetic construct
  source 1..225: mol_type = other DNA
atggatagccagtacatcaaggacaattattacttcgagacccttaacgagagccacaacctgaacaacttctactgtgaggatgaggaattgaatgaatttctgaaggaggacgccctgaaacagcaaaaacagaaactcaacctgacaaagctaattatctgcgacgacgaaatcataggcttcgtgtccctgctccggtggaacaagaataagaggtattga

SEQ ID NO: 3183 - DNA, 507 bp, synthetic construct
  source 1..507: mol_type = other DNA
atgatcaaaaccgacaataaaggacaaatcaccgtcgagctgctcttgcttctgtccttcactttcataagcatcattgccctgacaaacatcattagcgatgcgaacgaggtaaacatcgccatggctgcagcccggaacggcgccttcgaaggagcttccagtaacggcctggcgatctaccccaaggatacctttgacaactattcaaaggacaagcgcaaggaaggcctgttcaatatgaaaaacattaagatcattaagattgcccagacctttaaagggaaggacaacttcaacaaaacgaggattcagctaaaggtgtacgccagctcaaagatcataaaaacaaaggaagagaaggagtctgcaggggatcggataaactacaacatgagaagggcaatcaccaattcctttaaaacggaaaatatcagcaatcgactcttcaatccagccttctcggacagctatagttttacaactgctaatgtggagtgggtgtga

SEQ ID NO: 3184 - DNA, 465 bp, synthetic construct
  source 1..465: mol_type = other DNA
atggactccaaaggtctgatcaacattgagcttttattttgcaccatcatcatcgtcatgattctgatcgtgaacttcccgatcctcgagcatagcatagacagcgcaaatgatatggatgaaaactcccagggccggttccttctgaactcgatatcaactagtatcgaccaggttaattccaataacgaagggttctccaagaaaatcaagctaccacaatctgtggacggaaactattatacgatcctcgtgagcagtaatgagattattttggaatttaacaacaagaaggggaaagccaaaatccagcccattaatctggtcgattcaaagaacaggacactgagcaaggcgcagctgtacaatggcggaagctacattattaaaaagaccctcacaaacaataatgagagccacatctacaaccagagttctataataatcatgcaagtagagggctga

SEQ ID NO: 3185 - DNA, 1344 bp, synthetic construct
  source 1..1344: mol_type = other DNA
atggtgattgtttcttacctgaacccactgtcctccgagggccaaaacatagtcagaggcctcagtagtctggacgacatcttcgccccaaacgatgatttaatcgacattgtcattcatagccctcgtcagaccattagtaatcaggaatacgtgcccgagactctggccgacttggccatcaaccgcatcaaatggtatatcgataaaaagaacaataaagatttcaatcccagcaactacgcctatttttttaatgaagagatcgctgaatacgacactatcgcattccacatccttgcccaggctgttgcaagccaatttagggcggggtcccgggagatcaagctctttgtcgaatcctatggactgctggtggaggacagattgatcagactcctcgaaaccgaaaaacgagagcttgttgaagagatactcggggactttctggtgcaggacggcatagaatgggccttcctgaaggatctggtggccagcaaacggatctcccttacagacctcgtattggataatggtaaaatcgtcctggacagggaagagttcgtgtataccttcggcgatgagttcactgaccgctcgccagagcgcatctatgacatcctaattggagacggcctcaaggaaatgatcgtgtccaagctgctcatccaaaagtcagaggaatacgtagcccatattcaggatatgctcagaacaattgagccccacccggccatcgtgcgactgggcgagatgcttggcgagacaattacagagctgatgaccaaatacagcagcttctatgcagctggaggagcctacgggaatatggaaatcggcaagctcgtgagggaggcattccctccctgcattgctaacaccgtcgagggggtcagcagcgggggacgcaacgatgctatcgtgctgctgcttacgagttttgtgtcatacgcacggctataccccggaatattcggtgcggatgccagtgtaaaggtgagcgacattgactcaaacctgaacatcaccatgaatgagatactgcctttgatatacgaggcagcggataactgtacgcctcccttgttcgaggaccagccacaggagaagatcaacatcacttcaaaattaggctttgggatgcacgagacacccgagctggagcacgaaggtgagaccaagtggtacacgcctatgagctgtgaaaagattaagatgcacctgccgcagctgtgcaaggagaataaggattgcgctaagattaacaatccattaagctattactcgcggatgaggtggattctatccaagaaaggtggggaatctaaatctgaggaagaatga

SEQ ID NO: 3186 - DNA, 2484 bp, synthetic construct
  source 1..2484: mol_type = other DNA
atgcttaacagaaaggcgttgatcttttccttgattgtgttatttatgctatccatcagcgctgtttcggcgagcgataataccttcaatgagggcaccgggctgaatgaagacattgctgacttaaacgatttcagtgatttgaatagcaatttcaataacggacttagttccaacgccgtgcatggtctcgacgatgacagcaataacaacttaagcagcgaaaacatgatttcctccagtgatgatgagaaacaagatgatctggaggggagcgacagcgattccattaaagacaatctcaattcaaactctatcaaagaccagaacaactctaactctagtacagccgacaagtccaatacaaaaatccaaacgaaaatctctgccaaggacatcaatacatactataaggaaaaatcaagcctcgtcctgtacctgaaggataataaaaaccaggccctctccaacaagacaatcaaactcagcctcaacgggaaaacatacgctcagttgaccgataaactgggcaaggcctcattctctctttatggcctgaaaccaaattcatatgacgcgaagatagaattttatggggacgacgattacaagaagtcggtgcggactgttaaagtcaatgtaaagaaagtcgacatatccatcaatacaaaggacttctccacatatctcaacagcaacatcttcttttcggtaaaggtcctgaacaagctgactaaaagtcccgtggaaggcatccggattcagttcaatgtgtattcatcacagaaaaactataaaaactactacgccctaagcgacaaggatggcatcgccaccctcaagaagaacctaaaactcggctcatatgatgtgtacacctacgtaaaggacgacggccaaaaggactatataaactaccgaaacaccaaaaacaaggtctcaattaagatctccgcgcctggagagatgggatgctcatccatctatatccacgtcaatgagaatgaaagcgctgtcgccttccgaagggattccacatatgccgctgacttgtacatagtcgcccagaagtggcatggccgtaatgccgtgaagcagtacaagctgactggaacctacttcttccatgcgatcgtcacttccgacgggtggctggtcggcactgggggagcagacaatcccacaatcaacaagaagattgagagcctggcaggtcagatggtctcatccaataacatccaaaactccaagcttaacaccatcagaaaatatgagcggtcacttggcatcggccacttcgcaattgtggaccccaaaggaaactacgccattgtgtggaaaagcgggtatgtgaagggaaagctgaagaatggccaatacattgatgtgcccaattcaagaggcatgtttcgcaagggcagctacaagagcttttccaaggacactgcaactgcagccctgaggatcgcagccacagaccgatttggagtaaaccgcagggacatcacggtgttccattataagagaagcactaagaactaccagacaagcgcacaggtgaaagcctacgctgccaacgataagggaaacctggcaggccggcgcaccggcggaaaaagcgataacatccactacaaaaaaacctacatcagccgctccaagctgccgggaacgccaaataaaaagctcctgggaacccacagctttggcaagatcgacaccctgataaagacccagaccaaggtttcagctccagccctcactgccaaccagaatcagaccaaatactttaaggtgactgtgaggaacaagaagacaaacaagaccttgcggggcgtgaaaattagccttaaggtgtacaccggcagcaagttcaagagctacgctgtgacgaccaacaaaagtggagttgctaacttcaacaccaaggctctgagtgcaggaacgcacaatgtgaccataagccaggccaatcacaagtacatcgtttctggaagttctaagattgtgattaagacggttaaaaagaacaatactgtgaacagcactaactcttccgtggtgaacggttctggcgtaaacgggagttccagttctaacgcgagtgtgaacaacgcttctgagcctattaataattccaccacagacaacagctccgagaataacggttcggcaggcaacagttctagttcggacagttccgtgggtaacgggacggcctccgatgggtatgtcgggaatgggtctagttcggatagctctgtcggtaatgggactgccagcgacggttcgatgggtaatagtagcacctcagatggttctgccgggaatgggtctaacttcgcttcggtgctggatgtttctgcagctatcaactctgactccaacgttggcaatgactcccagagcaattccaaaacggagacaaaactgagttcaatgaaaaccgacattctgacaagttttataaaactgattaactga

SEQ ID NO: 3187 - DNA, 294 bp, synthetic construct
  source 1..294: mol_type = other DNA
atgaacatgagctttgaggaatatgccgtgatggctatcaaccaccatattgaagagaggaataagtacctgaaaaaggagatcaaggccaaggaggaggagatccaggcaatagacgaaaaaatccaggcgaaggaggaagagatccaggccattgatgaaaagattcaaacaaaggaggaggagatccaggctaaagaggaaaagatcaacaaaatacggaaactcttcaaggacttctgcgaaaacgaagacgaggaagcaatgaataccattaaaagcatcctactgtga

SEQ ID NO: 3188 - DNA, 1107 bp, synthetic construct
  source 1..1107: mol_type = other DNA
atggtgaatctgaaaaagctgaatcagatctcaaccgaaaataacaatacagtatcctactacgagacagaggaaggcaaggtgtataaagtattagtggatgaaaacggagagctgaagaagattgcctgtgaagagtttccttttgagccggccaagcaattcaaaaaggagaaaattaataaggtgcatgaccgcatcttcaagttcattgcggagaacaacattcaggcctttctgaatgtcttcggcctgaagcatatcatattcaagcaattcctgaatgtggaaatcttagatcagacgctgaaccaaagctattgcgacttggtgattgaagctgaagacggaaagatctacattatcgagtttcagagctcgggccccgccaagaaggacaagatacgtttcggggactaccagacgaccctgcacaggaaaaagaaggggcagaaggtcatcgttatcatgattaccatcaatgatgatcccgataacgacgaaccatacggctatgacaaggagtatcgctacaggatcaacaagcggagcactacttgctttaacacagagaaggtgattaaggagctcgagtttaaggctgagaacgattgcttcgacgatgaggcatatgtcaaactgcagctactctactatatggaatccaatggtgatgagcgaaaaaagctattgaaaaagggtgtggaaataaaaaacaagataaagaacctctccactgaccggaaggttggattgacactgatctacatggctctggcggtccacaactttgaagaagaagaacttgagcggttcaaggaggagcttaagatgaacatgagtatagaggagtacgcagtgatgggcatcaaccaccacattgaggagagaaataaacatctcaagaaagaactcgaagaaaaagacaaagagcacaaaaaagaactcgaagagaaggacgaggagatccaggcaaaggacaaggagcacaagaaagagatccaggccaaagatgaggaaatcaacaaaattagaaaactgttcaaagacttctctgagagtggggacaagaaagccatgaacacccttaaaaccatcctcctgtga

SEQ ID NO: 3189 - DNA, 492 bp, synthetic construct
  source 1..492: mol_type = other DNA
atgctgagtgaagaagagctccgacgcctgattgaaagcctgacaataagggagatcatagagccagccttggacaactggaccaggtacgaatcgactgggaagaccgtgatcgaccttaaaagcggccgggtctatggaatctcactaaaatcaaatgagctgttggagctggaccacgacaacaatcacattgagctctataagattgaatcccatgaggacctgttcgatgaggaggacctcctgagcgaggacgaatacaatcgctttcaagagttcaaagatagaaaggagctggaagatgaggactttgatgactacgatcccgagcttttaagcgaattttgcatgatggaaagtatcgatgagaaggaacggatcatttccatcctgattgaagactaccaggagtaccacttcaacaactatcaggacttcgagcattccatcatcctcaactactatgatgaggatgactatacgtactga

SEQ ID NO: 3190 - DNA, 993 bp, synthetic construct
  source 1..993: mol_type = other DNA
atgtatgggccgtcaagccttgcagaacgacgcatctattaccgggaggaatggtcggataaggaccttcctgacttcatcgcccaaggcatcaccaaacgggaatttggtttcgaccacctgggcaatgggcccaacgatagatataaagtcttcaaagggacagacaccctacgcagattcttaagatacaagacgccctttgctgcctacatttcagtggccttctaccagaaccctcgaaaaaggggcggctgggaaaaggcagaatacatctttgacatcgacgccaaggacctgccaatccgatcctgcaattgcgacggagtgtgcgagatatgtcttggagaggccttggaaagggtcaacattatgctggacacactgaagggcgacctgggcctaaagaacatacatctcatctatagtggccgcgggtttcatatccgtatcttggaccccgatatgatggaggccgacagcgatctgcgcgctgaggtactgaaatacgtggctggagctgaggtgccacgggcgcagtatcctaacattgtccccggagccaagccactgaacttcgagcacttctccatccctatcgcataccctgcggtcttcacaaataaagttaaatataatattttccacctgaggggggatgagaccattgatggaataaacaataggctcctgaaggatattataaaaaaccgggaatttctgattgacgacaagtggggtctctttaaggaacggatcggtccacgtagatacaaagatatggtgaatgcgatggccagggtgaacctcgccactatcgatgccaaggtgactatcgacctcaaacggattttgcgcctgccgagttccctccacagcaaggtcagcatgaagtgtgtggaggtgaaaaatcccgagaccttcgatccattcaagcacgcagttcccaagtttgtatacgagagaaaggatgaggagattgctcagaactga

SEQ ID NO: 3191 - DNA, 399 bp, synthetic construct
  source 1..399: mol_type = other DNA
atggacaacaaagcgataatcggcattgtgattgcactgatcgtcatcgtcctggcctgcttcgcttatgtgacatttaacgggaatgcacccatttccctgaacgtgactgaaaatattacaaacaatacggacacaagcgttgacacgacagacaacgccaccctcgtatcgcaagacccaaacaatgattctgaggtgaaggacatcgctaagaatgtcagcgaaagtatatcagagcagaataaggccgtggccgattccggagacaccctacacaaacagactttcaccgttagcgaaaacgaaaccggccagaacgagggcatggagcctggaacctacgtgatgtactacactgagaacgatgggccgatcaaagtgcagaagatcgattga

SEQ ID NO: 3192 - DNA, 303 bp, synthetic construct
  source 1..303: mol_type = other DNA
atgtccaaacgggtgctagtcagttttgcacttatcttcatttgccttttctctatcagcgcggcctgggctctggatatggactcgagcgacctcaataagaatatcggcacgaatctggagaataactttaacacagattcaaacaacaacctcgacagtaatctgaacagtaacttcaacagcaacctgaacagcaatatagataattccacccaggaattagacctgagcaccaaaaacttcaaggccctctcctctaattcctcaattggcgggggacagatcgccctgttgatatga

SEQ ID NO: 3193 - DNA, 4473 bp, synthetic construct
  source 1..4473: mol_type = other DNA
atggacggctcttattccaacctaaccaatctcaacttctatacaaatgcaaccagtgagaacagtaactacctgacacccatctacatcaacgaggccagcgacttggtcattgaaaacaacccaatttacatcgactacagcgacggatgcaactacaacctagcggggatctacgccttcggtgcctccaacaacaacataatcgggaataaccggatatccatctatagccgcagcctcagcaacacctcaaaacactacatttacgggatcgacttctcgagctattcctccaacgcctactcgaaagacaacgcgaagggaaatgacatctcatcaaacaccatagatatcatttctgactattatgctaatgccattacattgtcctgtgctgtggacaccactctggagtcaaacagcctccacttaaaatccgattcctttgtgtacgggatggttgccgagtattttgactttgggaatggactgaatccatcaaacaactttaacttcacaaaaaacacaattgaggctagctcaaacatggtatatgccatccaattcttcaacgtctttgatgtgaacattaaggagaacacaatcaaaaccaactccaacggtagttacgggatcagtgcctatgagtcttataatcacgatataggatacaacaatctgttcgtgaatggcaacgacgtgtcaatgattgggactaactttgatgccataggaacgggccacagtggaatctactacatgcgcgactcccacgatttaagcatccatgacaataatgttctctccaattactctctcgggggagattacgccatccgcttcgatgccagctccagcgagaatataaatgtgttcaagaataacctgtcctctaacaacggaaagtacctaggaaacgatgcagtgaacggtaacgtgacggttagcgaaaacaatcattattatggggataatgatcttggcactaatgacctgcggatttttgacatctatgtggacctgaatggaaacgacaataagggggacggctctatcggaaagccattcaaatccatcagcaaagccctgtcctacctgaagaatctcactaacatttacggtagcagtgctagctcgagttccaccacgaaagtgaaaggcatcattcatctaggggaaggtaagtataatggctacggaactaatcttagaatatacattacaggtttggatgtggaaatctttggatcgggctacaataagaccatcattgatggcgtgtcgtcacactggttctttgacatctcagaagactctagcgtttctataaaaaacctttccctggccaacggcgtgtaccgttataatgatggagggttgatccacaacaaagggaatctatacctggagaattgtatttttgacaacgcaaagatgtcgcccagttcggcaatcatctataatgacggcattctgaatttaaagaacaatctgatgaatatgaccgctaatggctaccatatatataacaatggcttcattgacggtctgtacctgaacttcattggggacagcctgagtgaagatgagagactcctgaataccgactccctaagcttcatattaaccgcatacgttcatgatgacaatgggaaccctataacgggaggctatatacggttctttatcgagggcaaggagatattagtcaacagcagcctcattgagggtttggctaaactgtacaccttctcttccttaaacggcatcatcaagatctcaggatactactcaaacgcatacaccaacctctttgtcaatattgggaaggtcaacagtagcatcatcagcgatacaatcaaagtgtatgtgaactacagtgctaatgagtcaaaatcagacggttcctttgagaagccgttcaagagtataaatgacgcattggacgctctcaacacctgcatcgagccggtgaccatcacggtgcttgatgatgaaacgaccgagcagattgacgactccagactcaacaggaataacgtcattacaatagaatccattaacaagaccaacatctcaacgaattggacctttaaatcagacgccaacatccgactgaaaggtctgattttcgatggctatggcctggtgaaggacaacacctatctcacaatagacaactgtctgttcaataatacccccgctagtgcgatagtgtctacaaacggtagtttgacccttcttaattctaatttcacaaacaacaatgtaaaggacaaccacaccttctacaccggctttagcacccccgtaatcactactagcctgtgggacattcagtacgattatgataagggaggggccgtggacaattccttctccaacctcactattctcaactgcaatttcgcttttaatgaggcgtacaatggcggagccatcttcaacaaccagagcgatctgcacatttccaactccagcttcacatctaatcttgcattcagcgggttttatgaaaatccccgagccattgactttagcaatgccatggataaggatcaggaccggaacgtcgctagcaagggtggggccatcttccagtatctgggcgaggaagtggtagtcaccgacactggctttctgaacaatactgcggggggctatgggggggcattctactcctcgggcatctacccttataggaatgacagttccagcatcattgagggcatcccattcatcgtgtatgagacagaggatggcctgatggataactttggaaactacgcggataatctgctgtctccccaggacatctactttattaactgcaattttgattcgaatgtggccccaatcaggggaggggccgtgtactgcatcaacaactcccaaacccagtatatctcctgtaacttcggcaacaaccttgtgtacacttacaatatgtcccagctgtttggaggcctgaataagaacagccacaggaaatggatttttgaggatgaattggaccaggtctacagcatcttcttcaccgccgtaaacaacggtggagcgatccacgatgagaatctcaagatcattgacagcacattcacggcaaacaccctgcaaagcggaggttccatcctgctcccttccgtcatccgctattccgccgatgtctacacgttgccgaaaaacactgctggcgccatcatcactaactccggcaaggggggcgaatcagtctatgtggccgacagctccctgctcacatcggaggacagcaaatatattggaatcaacggctggacaggcaccagcaccggcggttcaatccggagaatcatccatgaaaacggccaagaaactggcactggcggcaacggtagcggaacaggaggttcgggcaacgggtcagggacaggaaagggggcctacggcaattcactctcttggagcgatatactgagcgcattgggcggtgacgctcgaggcatcgctattaacggcgagggaagcagctttagcgatttcattagtggtctgatcaacgggaagtcctcttcaaactcaagttctgacagtcaggataatggttctggctcttccaacagctcgagccagaaccccgttaacgggaccatcccctctaatagcagtagcgacagtcaggacaacgggtctggcagctccaactcgtcttctcagaatcctgtgaacggaacaatccctagcaattcaagtagcgacagccaggataatgtttccagctcttctaattccagttccaccaaacctatggacgattccaacaagacgaactccaccagcgatgtgccggctaatgacacagtgaacgccactgacgggagttcggactcttccatttccgaaaaccctgtaaacgggacggcctcgaacgacaataactcctctgacgtcaacggcggcgcttctgatatggacgacgataacatttctaatctgacaaacagctcctctgagattccagttgacactaacatcaacgatactaacaattcatctagcgaaaattccaattctaccacggacttggacgattctgaggacaaaagcgacgtggataaggatgataagagcgaaagcgacgatgtcggactgagcgataatcccctcaatggagatgtttcagagagttctgacagcccagatagtcccgatagtcctgacagttcagaaagttcggacagtccctcaagtccagacagcagttccagcgactaccagtccagttccagcgcggcatctcccggagacagttcaaatagtccttcctcctcatcttcttcaagtgcatataagatttacgaagaggagattgatgacaacattcttgaaaagaatgttgaccttgaaaatcttctgataatcattgtcctgttcctgggcctcatcatcctggggtactacaagaagtcaaaagaggatgaggataactga

SEQ ID NO: 3194 - DNA, 6606 bp, synthetic construct
  source 1..6606: mol_type = other DNA
atgagttactttaataagggacatatatggaatattctgctgatctgtcttctcatcggaacgctggctatgatgggttcagcaagtgccagttctgctaaccttgacgattttagcaaccttgcttgtgactccaattcatataacgatctgagtgtgggcttcgaatccgacgctaatagctacaacgacctgagtgtgggctttgaatctgatgccaatagctacaatgatctgagtgttggcttcgagagcgatgccaactcatacaacgacttcagcacctacttcgagtcggattctaactcatacgacattagcgatagcttggtgaactctaactctgatcgtttggtcaactccaatggccttattgagttcaacatctctgctcctaatgacattcaacttaacgacaaagctcctataaaaaactctcttaaggaatacgacgaacgggtattttatgtgagccttgacggtaatgatttcaataatggcctcagtcaggaaaacagctttaaatccctgaacaaggctctggaaaatcttcatgatgcgaataagacaaccatatacgtgttcgagggcacgtttctcagtgaaaatagctacgatctattctttgagggggttgggaacagtcagatgatctccattatcggtagcggggtgaataagacaatcctggacggggaaggtttgcacaggctattcaacgtggataatagcatcaacctgacattacgcgacctgacctttgtcaatgggtttgactttagttctggcggagccatttacaataagggcaatctgactcttgtcaacacttgcttctacaacaataatgtctattcggaagacgcctaccagcacgtgagcctgcttagcggcggagctatagaaaatgagggattcctgacaattgagaactcttcattcatcaaaaatagcgtgggtagcgttttcaaccagtacgcctatggcggagccatttgcaatcatggcaacctgaccataaacaattccattttcaacaacaacagcctcgagacctacattgatttgaatgagaatagctatttccggaagtggaacgctctccagacagggggcgcgatagcaagtttttcagatggtgcgctgatctcaaacacagagtttagcaatcacagcatttccatactgaacaagtacccgttcgttcagaagaccttcatgaccttctcagctgggggagctgtttatattgagggcaacaaccacaatttcatcaactgcagcttccttagcaacgacgcagacaatggtggggctgtgtacttcaagggtaacaatacctgctttgactactgcgacttcgacaataactccgcttttatgggtggcgccattatgacaatcgactacaatctcaatgaggcgtggatgccgactctcaagaacctgacctccaacaaatattctaacctgaacatttccaactccaacttcagtaacaatcactttatctgcaccgactttggtataggctaccgtattagccccggtggcgcggctggatactttaaaattgataacatcactatcgacaattcgagtttcacaaacaacggggtgctggaaaactgcaccatcttcgtttcctcgcgctgtgggggagcagtgttcctttatggtcaggactccaaggtaaacaattctagtttcgtccacaacaatgttgaggtgggcggagccataatgaattacggatttgatacaaatgtgtcaaactctaaatttatcaataactcggcttgttatagcgatggcggggccatcttccatagcattggtgatctgttgattgataactgtgatttcgactacaatagggccgtgaagaatgggggcagcattcaagcaagctacgactacaccaacaactatctctttgagcagaaatcactctataacaattccagatttaaaaattcggctgccgaatacggcggggcaatattcgacatgggcaacgcggttttatacaacgatctcgagtttatcaacaatagcgcctcctatgggggagccatctataaccaaggattctccaataccttccgaaactccaccttcgtcaacaactcggcctttagcgaggattactccaacggaggagccatctacaactacgggagcaacgccctgtatgagtcctcaatcttcataaacaacagcgcagacatggaagggggagccatttccaacttcggggagagctgcgtggttcagaacaataccttcaatctgaataaggcatttaagggcggatctgtttacttgagtgggcaagggggcagattccaagacaataatgtcttttcctcattcgccatttacggcgggggcctgtataactcaaacatcaatctcatctgcctcagcaactcgttcaacaactgcagtgccaatgtgtccgggggcgctatctataacctcgtctccacactggagttatatagcaactcaatgaatgactgtaaagctaaactgtctggactgggcagtggaaactacgtattcacctgtgccaatatctcgtatctcgtcatttcatttgcaaataacggaagcttcaatattgtggacaacaagggtgtgttgctagttgctaacatcagcgacaatatgggcaaccctattaccggagggaactttacctttatcttgttcaatcaaaccaaccaggatattgatctcataggtagttccggtagctccagttctaattctagcaacccaagcaatctagagagcagcatcataggggtatgtgatgtggtagagggacaggccttcctcagatacgatacttacctggaacttggctcccgatataccatctcaggaacctattcatatgcagccgaacccgtcctgacccaggtggccaacctgaactcagttctctccacaaggatgtacttctcctcaaacatcaccgatgacatggtgaattttggagagggcttcaactatgagatcatcctgctggactctaatgacaactacattcctaacgccgaaatcctgctgtatgtggatgcggtctattccaagtcggtgtttaccaatgaatttggctatttgaagggtagtgtcaacaacttaacctcaagcgggaagcatttctatagcttcatctatagcggcgacattttccacaaccgggccagctacgacctgaactttactgtgttctacaataactcctactattacgacgacgtttccatcagctttcgcgatctgatctattcatttgtctacacaagtcctaacagtgagattccttttgagtttttgatcagccacaacgacggcgttccactgggcaatgtgtccacgccccgttattttgtcgcttacgaaaacggcatcccactcgccagtttctcgtgcaccgactatctgggggtgtgtaaagggcaggaagtcctctattcaatcatagagctgaacgggaagctcgcgaaaatcttccggacgagccctgaggggattttccagatgctgatcaagcactcagagaggggcctctatgagtataggatcgcctttcttggcgacctggtgaagcactacgactctagcacccataacggcatcagcaatgaagacactttctacaatccctgcaatatttcattcctgatgctcgtggatgatgagcagtccactatcccaactagcctgaactacaacggtcccaacaagattacagaagtggattttgcgtactacaactttagcctgagtgagaacagtaagaatcccctggccaacaaggagatccgcgtctacgatgatggaaattacctcgggtcaagctacacaaacagcaagggcttcgccgaatttaacttcccgcagatgctggacaagggcaagcacatcatcagtttcgtctacgtcgcagatggggactataaaagtgcctactccatcttcgagttgaacgtcctcgaaaacccctcgaaagacaacgtgagctttttcaacaaaagttctttaaacatcacgggagccaacaacaattttacagcccagattaaggactcacacaacaacaacctatctgaaatggtgataaggctatcgattctgttcaatggtagcgacaataagccctacatcaagaactacactgcagtaagcgataaaaatggtgtgttttcgatccccctggagctcggggctggtagctacctgattaaatgttcttttgctggaaacaagcattattggaagtccagcaagaccttcaaccttactctgaataaggtgcccaccttattatttggccagtccagtgtggaagtattgaagaacgacacttacctcacggtgatcctgtctaccaatgacttgaagagtttatccgactccaaaatcaagtacctcgtatttgattcaaatatcactggcctgaacctgtcctacaatgattccagtgaattaataagggacatctccaactatgcatacacattctatgccttcacaaatgagagcggcatctccaagcttaagatcaatcttccagtgggcagttattacctggtgagtctcttcgaaggggacaaatggtacgacgagtctagcctgatcaccaatcttacaatctacggaagttcatcacggttgattgcaaacgagaacgtcattgtgaaaaaaagcggatactacacggtgaagctcgtcgacggcaatggcaaccctatccaggggcagacaatagagattacagtttgcaacaagacctacacgagattctctgattccaatggggaggcgcgactggccattaatctaaactatggcaactactccatccaatctaagtttaacggaactctcaattattccagctccatcgtggcctcacgactgtatgtggtggacgaggattataagtatccttccatattgactgtcaacagctcggacatctatcgagcctttggctactacgatgtggtactgtcggatgtcaatggcaatcctctgccagagaagagcattattgtggaagtgaacggcacaggctttaacattaagacagataataatggattggctcacttggattacaatttcacggtaggcagatacaatatagtgtcccacttcgtgggagacggggactatcagtatagcaacgtcgggtccatcctgaacgtcgttaacgagaatgcggccaacactctgctaaattcaagcatctactgggtattgaaaggaaaaggcaataattatacggtcactttgactgataagattcagaacccgatcgaaggccagataatcgtcttttccatcaatggccgcgagtactcacggactacagacaagtacggaaacgccaatctggccataaacctcaatcccggaagctacgacatttatgcattctaccgcggcacggatgtctactacagcagcgagacctatagtaagctggttgtgctggcgctggagaatgagaacgaagggtctaacagcagctccgccattggctcttccaattccagttccaataatgactctgatgtagattctaccaacacgtctaattcaggtaattccgagactaacctgacgaacggttctagttctggggacagcggcattgataatattaacgggagcagttctggggactccggaatcgacaacattaacggtagcaacgccagcacaaacatcagcaactctaccggcgcaggtaacgattcctccagttcggggctggacaacattaacggctccagctccaacattagcaattccactggatctgacaataactcatcgagctcggggatcgggggcaacttgaccaacgccactgtgaacgatggaacctctatctcaggtaattcctctgtcactaatggttcctctaacctgtcaaataatgacactataaacaaaagcgacaagccggtgatcattcccaaacgcacggtgacaaagattatttgccataacatgaccaccaccgcagtttcgaaggctgacgggcgcgtgggcaaatacttcgaggtgagtctgatagatgccaacggcaagccacttgccaacaaaagaatcctaatcggattcaatggcagaaaatataaccggaccacaaacgctacaggaggggcaaggctccagatcaacctagcctacgaaggaaaatacaccttcgcaatcgcgttccttggagacgattactatagcggttcgttcgaggtggctctcattacagtgaacaagcacagtccaaagctcgacgcaagctcaagagcctacaagtacagtgataagacgaaaagcttaactgctaaactgctctctgccaacggaaatccaatcagtggcaaaaatataatctttaccgtcaatggcaagaattatgcggcaaaaaccgactccaaaggactcgcaagggtgaatgtttccctgaacaaaaaaggcacgtatacagtgaagatcaaatttatgggggacagttcatataaatccgcttccaagaagatcagcctgcggatcatctcccccagcgaacggtga

SEQ ID NO: 3195 - DNA, 8754 bp, synthetic construct
  source 1..8754: mol_type = other DNA
atgaaaaacaaggcaatgtttctgatatctgccttgctgatagcagttattctatcgctcagtgccgtgagtgcggcagatgacgctattgcggctgatattgatgacatcgacgactcaatcgaggtatcctctgttgatctctccgccgacacagaggatataagctatacggacgtctcctttaatacaagcaaggataagaacacactttcctcaaatattgtagaggagggagatgggtcatggtacgtggacagtaaggtggaaaccactggtgatggtagtcagtccagcccatataagaccataaaagaagcctttgatgcgtcgggtgggaatggtacgatctatctcgccagcggtgtgtacaacaccaccaacgataggagtttttcactggctttggattcagggaataacctgtccattatcggtgctggcagcgatgagacactgattgatctcctctctctgtccaacaattttatcaacgttcgcaatgggaacaacttctacctgtcgaatgtgaagctcatccgatcgggaacgactgccattagtggcgccaacataactatagaggactccgtgtttgccaattcctattattacggcggcgccccgattctgtctctgggtggcggggacaacaccatacgaaactgcgtgtttgttaacaattccgctggaagctggtatgggtcaggtgttgccattctgaatggaaatgccaatgtactgttcgacaactgtctctttaagaataataccaacaccaacggagggtcagtgttctataccacgtcatcgaacatcaagctgactctgaacaattgtaatgttacagaatgtcccgtggcgttctacgcgtcctatttcggaaatgtggtatttaacaacagttatttctacaataatgatgtgacacggctgaacaacaggtattgcgccgtgttctacagcaccgatcccgggaatctaactattgattactgcaagtttgagaacaataccggcgtcgacagtgcgtctatcatcagcgcctacagcagtaaccgacccctgaatttaaccgtcaccaattcggagttcattgacaataagatgggtaagaatagttacggctactacacggtcttcaataacatctacatggggtcttggggcggtaatctttatctgaaaaacaacactggttcattcggaaatctcagctttgtgtcaattagctctgccaacattaattccgagattaacctcatcgtgctagacaacacaacatacgacatcaacgcaatcgagatcaatgtgatcggcacgcttaccgatgatatgggaaaccctattaacatgagcggtttcgatttatacttcaacgacacgctggttgggtcgcagctgacttttgactcgggggtgaacaattacacattcaaggaagcattaagcgggtcctatcttgtgaaatatgtctataactccacagctaatttcactaacttcaaccaaaagacgtcagtgatgaacatctctccattggagaacattgatgtttacgttgctactgacgggtcggatgagacaggggatggaacagaggcaaacccctatgcgacagttgagaaggccttggatgtggcgtccacggccttgaatgccaatgtctacatcaaagctggcacctacaaatactacagatacagggccatcgacaccgcaaatgggattcttaacattatcggctatgacggggacgtgactatcgatatgaataatgaaaccgcattttgcaatgtttccaacaggtctaatgtatttatttccaacgtggactttgtaaatggatattcccaatatcttgttgataactatggaatcatcaactcctttgggaacttaattctgagtgaatgcaagtttagtgataacaacgggtactattacataatttctgggcagagcacaatcgatagctgcacatttgagaataataagttccagcaacaaaattctgctaggattctgttcaacccagcctatgtgaacaatgtcacgttctacaacatcactgccatcggcttcagtgccaacagcctgaatcaaaagtacgacttgactatagagaattgtaagttctacgataatgccaggatactgatttcaaacgggaatgtgactatccgctcttctgagtttgccaatctgtcgaatcagcgggccctcgagacgcagggcgtagttgtcctgtccattgatgattgtacctttaaggattccgatcagtcagtgatttacctgtatgattacgcctccacgactattgcaaacataagcaactccaaatttatcaatatcactcacgagaatcccgtgtacgtgggcaacggtcaggaaatatatctggagaataacgaggtgtccgatttggctgctccttatgtgtatatacgcagcgggtatgtggccagcccgataaccattttggtgctcaataatgagaccattgagcaggaaagctacggtgcgacattaaaggccaaagtgctggatgatagcgagaatgctatcagccttaatagtttcgtgtttgatttcaatgacgaacagatcaacggaaaactcgtctatgacgagatggtcgccaagtccatgggcatctatgacggcacgtacttggtgagtgccagttccacaaaccttttgaacccaattctgaaaacaggggttctgatcatcacgcctttgatgaataaagagctgtatgtgtccacgggcggatcagatgaaaccggtgacggaaccgaggtgaacccctatgctacacttaaaaaggccatggatgaagcggtcgcattcaataacactatccacgttgcagagggcgtatatgctattgacacggcattggagatcgacaccaacacggcaatcgtcaatattgtgggaagtggggaaaatacagtttttgacatgaataatgaaattaactttatcaataccatttctgccaattccatcatcgagctcaaagatcttacactggccaacgctaagtcccccgccaatgcaaaaggaggctttataaccaacctcggtaatttaactgtgaacaacgtgaacttcatcaattccactgcgaataacggggctgccattcgaagcagcgggaatctgtctgtgactgattcctacttcgagaatacggtggcttccagtaatgggggggccatctggagtaatggcggcaataactatgtgttgaacagtatttttaataagaccagcgcttccaattacggcggtgccctgtatagcagaaattatctttacattaaagataacactttcatagatacaagtgcaagtgctgcgaaaaatatctatgtgcagtctaaagtggagggaggcgttgtgctgacagtgatggataattcgacttggactataagtaccagtagcgtgactttcaacgccactcttaccgatgagaacaatgaccccatctatgcatcaaacattccagtatccttctatctggatggaatcaaagtcgcttcctccagtattaatggcgagaaggttacggccaacgccaatctcaagatgaacggggagcacatcgcatctgctagcctcggaacggctgaggacatcactgtaaaaacagccacagtgagctttgtgaatgatgctgtcgcacatgacgtgtatgtctccgccaacggggatgatgaaaccgggaacggtactcaggagaacccctatgcccatatctccaaagctttaaccgtggtggagtccctgaacggggtaattcatattatgaccaacctcactaatgtgccggtcaattccattgacggtttctacaacctgaccatcatgggggaaaataatgagatattcatcaagaacagtacatcagggttcgttatgcttaacagcgggtccctgaacttgcttaacctgcgcttcactgaagcaaattatcctacttacttcattttcacccgggctggctcaagcctgtctcttgagaactgtagctacgagaacgtgtattaccccaaggacggctattatccagttttcattgacagctcaagcgatttcttaagcctgaaaaattgtaaggtgattaataatgtgtttaatctgagcgatctctcaagtggtgtcatccggtcaaaatccaacaccacctttgaagactgcgtgttcgcaaataactcttacaccaataggaatggggctctcggcggcaacttcctcttattctctaataatcagaaggtcttcctgaaaaactgcatttttgataacaacactgccagactgttgaacttccaaagtacatctgtggtggataattgtagcttcacggaaaacaatggaaccttgattacggcaagttacccaattaatataactaacaataactttacttcaaatgatctggtgagtagtttgattggtgtgtcaggcaatgctgagatcaccaacaacatagtgaaagaaaacacggccagtgcatttgtattcgcatctggaagtgctatagtcaacatccacgacaatactctcaatctcggcgacatgccctacgtgaacctgactgggaacactaagatcacagggtccacatttacattgactgtgaacgataatgacacttacgagattgaagggcttaacctggcgttcaatgctagcctggtggacgctgacggcaatatcatttacggaccactggtatacttcaccctgaacggcagtgacattatctcggccaatttagtccccattgccattgcaaacactaaatttgggggagaaggcgagtttattgcctcggcacggactgatgccatgtacgactcaagtgaatggacgatcaagacgtcggtattcaacatcaagcaaatcgctgagaagatcatttacgtggacatcctggggagcgatgaaaccggtgacggttctgaagaaaacccatacgctagcttggagagagcagtgcaggatgccggggggctgaataatatcatatacatccaacctggcgaatatgataacatgactctgggcagccagtatgtgcttatcgacgatcagacactgtccatcatcggtctatccaacgaagtggataaggtcattattaaaaaccttgataatacatttgccgacatcgcttacgagtacgggaagtactcgaacgaccaattcacactggccaacatcgagtttgtggacagcagcctgagcaccgatctgatccgcaccaattacgtcaacgcggttttggttgaaaacgtggtctttgacaatataacggtctccaatttaattagaggggattcaactaaccttgtactgatcaactcaaccattaatgccatttccagcagttgcgtgctcaatacagaaaacatcactgtgctggactcagtaattagcaatgcctacggataccggatcttcacgatcggggctcggcatgccgccgatctgaccatttataactctgctctgatcaataactcttacataggtgccctgatctatgagcagtggacttccaccaaaacgctcgagaacaactggtggggctataacaccacggaagacgatctgatggccttcaccaatgtggagatcactaactggatcgtagccgaagtcacccccagcagtgacagcatcaacatcggcgacaatgtccagttcgacatcctcctgaagctcaacgatggctctgaattaacagatgttctcccaacccgtattgtgaccgctattgcagaaaataccgagtttgatgaggatgaagtggaaataatcgacaaccaggctactatcactggcaccgtaaccggaacgggtgacattacaatcaccatagacgagcaggactttgtgttccctgtcaacggctatgttgcctacctgactgtggacaatcttgcagtgaacgtgggcgatcctatcaacgtgtgcgtcctattgcaggacgagttcggaccgctggccggtgagctggttacaatctgggtcaatgaggttgagtataacgataccaccaacgacgacgggatggctatcttcgaaatcgatggacttgaaaagggaaactacattgtgaccgcttcctttgccggagatgagctctatgacggaacaagcgcggtcggcctcatcatggtttcagatgccatcctatccatcgacattcccgctgtggactacggcagccccatcacgatctacgccactgtggaagacagcgaaggaaaccccctgtccggtttggtcatcgccaccctggacggtgtcgactgcaacatctatgtggatgcgggagaaggatcaatcacaatccctaacgagctctttgctggcgaatacttggtgaccgcgaagctcttaggggaaaacaacgccatggacactgcactgctggttgtgaacccaattgaggctgagctgatcgtgagtatcgacaacattacctacaataaccctgttgaagtcgagctgtcctcggagtacgcacttgacggaattgtcatcctcaccatcgatggcgtggactacgctatcgagatcgaggatggcgaagccatcgccctactgcctatcctgctggactcaaaggattacgaggtgactgcaaaattcattggcgaaaactttgacgtggaggacgcgaccacaagctttacagttgaagcgatcgagactgctctgacgctggaacttgagaacagcacaatcacctacggcgactttgccatcgtcaaggtcagcctggtggatgagctgggaaatcccatggacggtattgtcaccctcactgtgggagaccagaccggctcccttgcggttgttaatggagagggcactgtgtctgtgccatacctggccgcaggcaactacactgtgacagccaaattcgagggctctgcaaacttcatttacgatgaggacagcgcaagcctggaagtcactgccgacgacaatgtccagtttgatatggacgtaatcggcaacagccttgttataagcctcgttgatggcaacgacaaccccatggatgccaccgtaaccgtcacaatcgacggcgagagccaggacgtcactgtggaaaacggaatcggctttgtctacgacctcgaggctggcgaccacacagttagcctagactatgacggcgatgccgaccacgcctctgcaagcatggaggacgaggtgacaatactgcccgacccggtcgtgcccgtgtctgccaacgcaaccatcgagttggctgttgtgggcgactacgtggaggtcaccctgaaggacctggacggcaatccaattgctggcgctgacctggaggcggacttgaataacttcctgctctccaccgtcaccacagacgatgacgggaaggcgctggtagacctctacggagagcctaacttcaacttcacagtgacggtagtctacaccgacgacctgggctccagcgtgagcgccagcctcaacaacatctatgtggagaacgaaaccacagtcatcatctacgagaacgtcacagtgcctgtgaccgctaacggatcaatgtcggtagaggcaagcgaagacgccatcaccgccacactcacggactccgacggcaagcctctggcaaacgcgacagtcaccgccgtcatcgacggagtcgagaccaacttcacaaccgatgagagcggcaagctgactgtcccgattgatgaaaactccacggtggagctaagctacaccgacgacaacggcgcatcagtgacctatacaaccaaggtggtcaccaacgaggtgccagtccccgtccctgttcctgtcccggtgaccgtgaacggaaccatcgccctcgccaccgaagatggcaagtcaatcgtggcaacactcacagacagcgacgggaaagcaattgccgacgcagaactaaccatcagcgtcaacgggcaggaatccacagtgaaaaccgacgccaacggtaaggccacagtggacgtggaaggcaacacaacagtggtggccacctacaaggacgccaacaacctcaccgcaaccggctacatgaacctagtggtcatagtcaacgagaccataatcaacgaaaccataattgtcatcccgaaccgtacagaaaccgttatcgattaccagaacatgaccaccaccgtagtcgccagcgcggacggacgcataggcgagtacttcacagtggtcctgagagacgacaagggaaacgctttggctgacaagccaatcaagataggattcaacggacgcgtgtacgaccgggttacagacgagaacgggagcgccaaactccagatcaacctcggatacaaaggcacatacacctttgccataggcttcctcggcgacgacaactacaccggggctttcgaagtggcaaagatcaccgtcaatctacagactcctaaactaagcacgtcatcgaaaacctataaggccagcgcgaagaccaaagccctcacggccacccttaagacagtgaacggcaacggaataagcaacaagaagataagcttcaccgtgaacggcaaaacctacagcggaacaaccaacgacaagggagtcgctacggtaaaggttagcctgtccacaaaagggacctacagcttcacagccaaattcgctggcgacgaccagttcgcgaaagtgactgccaacggcaagctgaccattaagtga

SEQ ID NO: 3196 - DNA, 843 bp, synthetic construct
  source 1..843: mol_type = other DNA
atgagtaagggatatcccaacttttacgaccgcatgatgaagaacattgcctcctatgatctgaagtcattctttctgttctttggactggactgcatcccatatttcagcatagccaatgaggtagtggacggcgggctgaatctcagcttattggatctgcctgtttgtacctccaaaggcatcgtcaacttcgaatttcagttcgatagggacgaggcggatgacaggcggttcatacgctatggcgttcagctgtacgagaaatacgggtttcccgtgatgtctgtcgtgatcgactttaaggcccaagaggatgagccatttccaattgaaatcagcaagggatgcgtgttcacgatatacgtcaaatcgctgaacgaaagaaacccggacattgtgctgaataatatcaatgacaagctcgccatcaacgagaaacccttaggaaaagacctcacaggtctcaagctgcttccttttttggacttggacagaaagatcgaactgctggacaaggctaccgaagtccttttctccctggataagaacctggttggcctacgtgagattaagcatcttatgagggtcattatgttctactcccaccagtggaactacgaggagaacttggaccggcttgggcgctggtcaatcatggtggatgatctgagtcaggacgctgtggtgcacttcgggaaggtgaatcggaagaaaggtcgagaggaacgaagctacgaagtggcaagatacatgatcgatgatggcttcagcgcagaggacgtgtctaaatatagtcggctcgatctcagcattgtaaaccagctaatgctcatgaaatga

SEQ ID NO: 3197 - DNA, 3375 bp, synthetic construct
  source 1..3375: mol_type = other DNA
atgtcacgaaaaagcaaagagaaatacgagtgggactacagcacctactccaaggtggaccctaaggtacgaagctacttcccctttgccaaggctcggccccagcagctggagacaatctccgaaatccatgaggccatcgagaaaggctacaagtacatcgtgctggaggctggaacaggtaccggtaagtctgcaattgcagccacccttgccatgtgttacggcgacgcctacatactcaccatgaccaagcagttgcagcgacagtacacaaaggactttgaggactacgacttcgccttggtgaagggcagaagcaacttcgattgcctgaagtatatggaggaggcaatcgaggaaagctgtgacatgggccgctgcgtcctggaggggcacaagtgcagctataaggtgaaccagttcaacctctacaagaaagacccgggggaatgttgcccatacttccatcaaagggcgattgccctgaatagtgacatcgtgatcacgaactattcctatctcttcgccgagctgaacttcaacaacgacttcaaggccaagaggctgctcatatgcgacgaggcacataacctggagagcaaaatcatggatctgatttcccttgagttcacacggcgccagctaaaggatgaggtgggaatcaatctctctaaagagacgctgaaggaccttgatgagaagggctacacatcctggctgcagttcatcaagcgagtctgtgaaaggtacggggacaagagcaaggaaacaaagaaggccctcggcaagcgaaaaagcctcaccctgcaccggcgatccgaaaacctcaaaagaagactggaggactttaagcggtttagtaattacattgccatcgacccggacaattggattatggattatgacccccacagccagaagttgtccttcaagccgatacgcattgacaagtacgccagcgaggtcctcctgaagcacgcagacgtgtgcatcttcatgagcggaaccatcctgaaccaccaccagttcgcgaaatggctgggtatcgaggaggatgaaatctatcccatccgtcgtaaatcgccatttgatattcggcgcaacccaatccggacgtactcaggctttgacatgacctatcgaaacctggggagttctgccaaaaggagcgttcctgtgataagggagatcttggaaaggcacaatggggagaaagggatcatccacaccgtgagctaccagtgcaaggagtttctaaaaaaggaactcaacaatccccggcttctggaccacgagactaaagaccgcgaaaaggtgttggaaaagtttaaaaagtcagatgagcccttggtattaataagcccatccatgaacgagggagtggacctgccgggcgacctgtgcaggttccagataatctataagatcccatatcctaacattagcgacaagcagactaatatcagaagaaagaaagaaaagatttggtatgactaccagactgccatcaatctcgtgcagacctacggccgcggaatgcggtcagaggacgactattgtactacgtacttcattgacagcaggataaagagttacttgaagcgcgacagcattcgcaataatctgattcccgacttctttaaggaggctgttgatgtggaggccgctgagattgagaaaaaccccattagaaaggcttcggatgcctctgctattgctaaatatgaggggtcagaattttcggatggttctgataatgataaaaacttaaaaatagacgactccacctctaaatctcaaaaggacagtaaaaacactttcaaaaagtcggatgtgcggacaaaatatgctttaatgaaaaagggcaaagacctggcacgtacaaacaagaaggaagcgatcgccttttacaaatccctactcatgcataaatgctttaagaatgattattacccataccggaagcttgtcgtcctttatgacaagacaaaggactataaaaacgagctcggactcatcaaattcttcttcaataggggaatccactgtcctagactctactacttctggtttttaaacaagcttctgaagctctctgaacgtggcctgattactaaagaggaaattaaagagctggaaaaagagtatatgtcaaagggttttaaaaacaaatccgtccaaagcagcagcatgataattgcagatcgtatcgaacactactatggggatacatacgtgctcagtgagcacaagttcaacaataagttaaagtccaaggagattattgaagagggaaaatactttgagcggaccggcaactaccagaaggcgattgacctgtactcagaggcgatcttcgaccgccatttcaataattactcattctatcaaaggatatgtttctccttggaagagctggaggattatgaaagggaactggaatacattaattcttattttgacaatgacagtatcaaaaagtcggaaaccagtgaaaagtggttcaataagagattggataaagtcaatgggctgctggaactcaagaacaacgagaaaaacatatcttctgaggttaaatcttccgatgaggatagtattctgaacccctccaatattgatctgatggaatacgatgattccctgagtctggaagacaacatccaaagaaagatggaactgaaagagcacgccatggaacttcgcagaaataagaattattcagaactcatctcttttttaaatgcactgactaaaaactcctactttgagaacgactactatcctttcaggcatctctgttcaatctatgagcaaatcaaacattactctagtatgaaggattcaattaaggacatgctgtacgcagatgtttatctgactgactatcagctagtatggctaaagagcaaaagggaaatagtggatgctcagatcggccttgatgatgtcctattcaaccagtggatcgaccactacaagagccatggggcaagaaacaagtccaaggccaacagccccgtgcctcttgccgaccggctcatcaaaaaagatgaaaactacaacgttagtacttcggaggaatttgacttcacccagaagaaatacgaactgacggaaaagggaagatcactggagcggaagggcagatatgaggaggctgctgagttctacatggatatcattaaagagaagaagtatcaccattatgacttttacaaacgcctttgcttctccctggatgagatccctgattacgaacgcgaattgaaggcgatcaagctgtattacacctgccctccaatctttacggatgataccagtgaccggtggtttgagaagcgcttggagaaggtcaattccaaaatctga

SEQ ID NO: 3198 - DNA, 498 bp, synthetic construct
  source 1..498: mol_type = other DNA
atggggaagatcacaaacaggaaagaggccctgagcaagcgcgaccagatcgaaaagcttcaaggggaatcctttgaaggtgacgataacattgactggttcggcagaatcgaggagatagtgattgatgacgattactgcatctaccagatcggcaaatattcaaaactaagtaattattactacgatgacttcgaggaatactctaaggagtacggccaggagaacccgctgaatctgtgctttgaggagataatttcctatctcagtaagatcgtgctcggcgactttggagacaacgtcaaagccgaatgtattggcaagggagggatagttgaggtgaacggtctgaacttccaccccgtctcccggatcgacattgctgatttgaatggagaatcgttcgtgtatctgtatgatgacaatgatctcattgcacgaatcccattctttgacatcaccagctacaagatcacggcgcctgaagagagcgtatga

SEQ ID NO: 3199 - DNA, 165 bp, synthetic construct
  source 1..165: mol_type = other DNA
ctcggggtgaactgcattcgcgtagtcatcgacaacgcagaagagagcatcacaaaggtggccaaggcccacggaaatggcgctctcgtgctagttcccaaacggtggatcggcaggaaggtccagataaccctgctggaggaagaggataaactgatgttctga

SEQ ID NO: 3200 - DNA, 603 bp, synthetic construct
  source 1..603: mol_type = other DNA
atgaacagttgcgccgtggatgtgaaggagaatagtattgagtccgccatgggcatcaatacaagcgaaagcgatagctttcagctgaacactatcagttcggttgacataggagacaaattcaagtcaagcggagcaaccaactatctggaaagcattaaagcttggaaaaacattgagaagattatcgactgcctggtccccagcgatttggaggaggtgtttagcatctcttcaaacaataacttcaagatcaattgggatgagaaggcgctctatgacgtgttatacacgaacgaaagctccatatttgtcccactaggctgtatggagcaggttggcaatgggtattacatcatgaaccataaggatatggtctatagcaacccggatgacttcatccacgaaaatggtgtgtacggtctcattatccggttcgacaacaatatgatccaatccgagtacgcctactgcgagtacaattccgggctgtccctcgacggagagaattgtgacttcgtgaaaatggacttcatatcaggggaagacaccgtagaaaactacattttcgattcgctgaacggctttaacctttttaactga

SEQ ID NO: 3201 - DNA, 417 bp, synthetic construct
  source 1..417: mol_type = other DNA
atgtattactataagctggagtccttcgactacgatgagcattggaccgcattctatgtgtccaacaaaaagtattccgacgatgaatttaaaaagatcgtgaaggatgcctacattgagacatgcaagcacattagcgaaaaccaaaagccagtaagcaaattcaactatatgatcgattcggtcatttttgatatcctccaggaaagcgacaaagacaagagccagccctgccactacttcaataggatactgaaagaccggcacgacctaatcaacctggacgattgtttggacagtaaactcgaatttgtcgagcagaatggcggcaacgacaatctgcgcgagttctacgacaagagaagtgagtacatacttgtggggatctcagatgacgataacaagggatacatctga

SEQ ID NO: 3202 - DNA, 1257 bp, synthetic construct
  source 1..1257: mol_type = other DNA
atgaacaaatacattaaaaagtggaccgagtcgagtctgatcctgaagatcatcgggggactgatcatcggctcggtgctcggcatcctggtccctcaatacaagctgatcggacttccaggagagctcttcgtgacggcgctgaaggctattgcccccattctggtgtttattctggtggcgtcagctctatctagggctagcgagggcataggcagccggtttaagaccgtaatcgtgctgtatttattttcgactttcctatctgctatggtcgccgtcactggaagctatctcttcccagtgggcatgcatttgactgacgcgagtgatgtggccgcacctggcggcctgggggaagtcataagttccatgctcctgaagatctttgcaaatcccttgcagtccctgtctcagggggattacttgggcatcttattctgggcgatcgtaataggactctgcctgaagaaaatcgctagcgacagcacactggatgtgttctccgacctcgcagatgctaccagcctggccgtaagggggatcattcagtttgccccaataggtataatggggcttgtctttagtgctgtgtccgagagtggcctgagcattttcatccagtacgggcagttggtcttattgcttgtgggctgtattgccacggtggcctttgtgacagacccgatcattgcagcatttgcccttcgccgcaatccttacccgctcgttctcacctgtcttaaggaaagcggcataactgccttcttcacccgaagctccgcagcaaacattcccgtaaatatgcgtctgtgtgaaagactgggcctggacaaggacttctattcaatcagtattcccctcgggtccacaatcaacatggagggtgccgccgtgacaatcaccgttatgaccctggccgtgtgccacaccctgggcatcagcgttgacctgcccaccacaattgttctatgcatcatctccacgttggcggcttgcggttcctctggtgtcgccggaggttctctgctccttattccaatggcttgctccctctttggaataccttcagacattagcatgcaggccatcgccgtgggcttcatcattggagttgtgcaggactcatgtgaaactgccctcaactcaagcggagatgccctgttctctgctacagcagagtaccacgaccgggtcaaaagaggggaagatatgaacttcctaggggagttcgccaaagataaggcaaaacaatga

SEQ ID NO: 3203 - DNA, 1473 bp, synthetic construct
  source 1..1473: mol_type = other DNA
atgaactacgaatttatactaaatgatctcaggccctctcaggaggagattgatgcagtcaacaagacaacagagaaagtgatcagctttctgaacaagacctgcaaagaggagaatatccccgcgcaggcgtttgcagtaggttcggttgctaaaaacacttggctgagtggcaaatccgatatcgacatcttcatacgctttcctttgaaaacggatgaggccgtgctgaaggaaaagggcctttatctgggatataaaacgaacgacgccctgaaaggaaaggcatccgagcactacgcctcacatccttacctgacctgcctgatagacggaatcgaagtggatatcgtgccctgctactggattgaagatggtagccaactgaaatcggcagtggatcgcaccatcctccacacccggtatatacagaagcacttgaagaagtcccaagaggatgaagtcttgctgctgaagaaattcatggatgccgtgggcacatatggctctgagtttaagacaggggggttcgccggctatctatgcgaattgctcattctcaagtacagcaccttcgaggagaccctcagacaggcccaggattggaagttccataccaagatcgatctggagaactatgggacctcagacaataagctcttcaagaatgacccccttgttttcatcgacccaacagacaaaaaccgtaacgtagcggctgctttaagaattgagagaatgctggactttatcatagcctctcggaactacatcaatctaatcgacagtttagaggacgccgatgagaacataattaaggaaaaagtcctgaagtacttcagcccccttctgaaggagcgcttccaggacaagagtgtgaaagaaatctccgatgacatcctcgatgagttcaaagaccgagagactcaaactctagtcatcagtttcccaatcccagagatgaatgcagacgctctccacccgcagctgctcaagacagtggagtcaatctcccataagctggaatctgaagacttttcagtgtacagctatgactactggactgacgaaaaaaatctcgtcatcttcattattgagctgaacgtattcaagcaaagcaaatactacgtgcacgaagggcctaaggtgtggaataagctggcctttaataacttttccgccaaatggtcccaggagtctctttatcacaaaggggaatttattgtctttgaccgagagcggcagttcgtgacggctaaggaattggttaagcacttgctggaaaaggacaacattcacgagattaaggttggaaagaacctgcgcaaagctatcagcagcacccataccctttgtgagattgatgagttcctggaaaatatcgaccagttcatttgtgacgaagccgaccagagggagtttcttaacactctcgatgacctgttaaggccgggccagtacctgaaacggtga

SEQ ID NO: 3204 - DNA, 465 bp, synthetic construct
  source 1..465: mol_type = other DNA
atgaatactgaaaaggaatttaacacgaccgtgtacaattacgaccgcctgggagacctcctgttcatttttcaaaagaaccacaagacctatcttaacaatctcctggcagagtacgacctgaatctcatccaggtactgtgcattttgaaaatcgattcggaagagaatctgaaccagaaggacctgagcgacagtctgtatctaacaaaaggcgccatcaccaaagccataaagaaactggagagcaacggcatcgtcatcagggagaaatccccgatcgacaagagacataacgtgcttgctctctcaaagaagggggaggatctaattccaatcataaacgacattaaccaggattgggaaaagcggatgggtttggatgagcttagccccgagttcttgaagacattcaaggccctggcgttcaaatccgcagagctcaacaatgaaaaattagtgtga

SEQ ID NO: 3205 - DNA, 414 bp, synthetic construct
  source 1..414: mol_type = other DNA
atgaagtttaacaagagcctgatcgcaattttcgtgatcttgattgtggccttcagttccatatctgtcatagccgcggaggatgcggaagatgacaacccctatcataatggcgccgtcatgaacgagcaggaacccggcagcggcgaggacgatgacaacccttaccacaacggggctgtgatgaatccacaggagccagaatcggaggacgatgacaatccgtaccaccacggggctctcatgaacccacaggaacccgggagcaccgacgatagtcaggccgccggttcatctcaagcagacagctcaaataaggtggctcttagcaaataccctacaggaaaccccctggtagttctgctgatgtccctgtccatcatcggactaggcacgctccgggtgaggaaatga

SEQ ID NO: 3206 - DNA, 939 bp, synthetic construct
  source 1..939: mol_type = other DNA
atgagcataaaaaaggtggttgtcgctgggggcggcgtactgggcagtcagattgcttatcaatcggcattctgtggatttgatgtgacggtctggctgcgctccgaaggatcaatcgagagggcaaaaccaaagtttgagcggctcttgaacatctatctgtccacattagaagccatgaagactgataagagtgcatattgccggggcctcagcaaaacagccgacctaagtgatgaggaaattgacagcctgaaggagcaggctcaaaaggcttttgacagcctgacactaactaccagctacgaagaagccgccgatgatgcagaccttgtcattgaagcaatcgccgaggacccgaaccagaagatcgccttctatgaggaactgagaaaatacctcccagaaaagaccattctggtgacaaactcatctaccttgctcccctccatgttcgccgagcacaccggacgccctgaaaagtacctggctttccactttgctaataacatctgggcgcaaaacactgcggaagtgatgccccatcccggcaccaaacaggagtacttcgatgcaattgttgagtttgccgaggacatcaatatggtgccgatcaaggtgctgaaggagcagccaggctacgtactgaactctctcctggttccattcctcagcgccggtcaggccttatgggcgaatgaggtggccgatcctgaaacgatcgacctgacttggaggctggcgacaggggcccctaacgggcccttccagatattggacgtcgtggggcttgtcacggcctacaatatcgtgattatggacccccgatccaatgaccctgagaccacccagggaaagatcgctgccaagcttaaagagaaaatagacgctggtgagaccgggatcaacgcaggaaaaggtttctacgagtatggctga

SEQ ID NO: 3207 - DNA, 684 bp, synthetic construct
  source 1..684: mol_type = other DNA
atgatagtgagtgtgattggcggaaccggtccccaggggttaggaatcgctctcaggctggccattgagggggtcgaggtgattgtggggtcgcgcaaggaagaaaaagccctcgatgttgttgccgaagccaaagagaagtacgcggactatgacctgaacataaaaggtctggctaacgaggatgcagctaaagaaggggacatcctgatcctgacagtgcctctcgccgcgcagaagccgaccgtggaaggcatcaaggaattttgcactgacaagattgtacttgatgctaccgtcccacttgagaccgcaatcggagggaagccattcagattcatcgacctaatggagggttcagccgcggagcggacggcaagcatactggatggcaccggagccaaggtgatctgcgccttctgtaatataagcaactctcacctatccaatattcccgaagacattgactgcgactgtttgattgccggcgatgacaaggaagctaaggagattgccgcagagctcatcaacaagatcccaggcgtccgcacaatcgacacaggaatcctggagaaatcccgaatcattgagaagatcactcccctgctgatcggcctgaatataaaatacaagagccattacggcgggctccggatcacgggcatccctaaattggatgagtga

SEQ ID NO: 3208 - DNA, 1497 bp, synthetic construct
  source 1..1497: mol_type = other DNA
atggttaagcgaatccctgacgaagagcaaataaagttgggcatcagaactctggattttaacatccccgaggaccatatcagccggtttgtggtggacttcattgacgagtattatcccctccttggaatcaaagagaataagaagaagaaagggcgtgacagttttcccgtgaaggagatgcttaagctcctcatctacgctaagatcgagcatattgacagtatgcgcttccttgcggacatggtgaagtaccacgacgtatataaattcgtggggaatggtatttgcccttccgagcgaagcctgcagaggtacagggaaaagtacggcaagtattacaatgaactgctaaaagcaaccctgaagaaagctagcgacgtggattacactgatttcaacgaagtctccattgacggaaccatcaagaaagcatacaattcaaaaaataaggtgatcacagaaaaagagactgagatactcacccggtacttcgaagggggccgcgtgagtcaggaggagctagataaactccacaagccggccagggagatcctggagaacaaaaaaatcagcaaccaggaaaaactgtacctcctggatgacatcaaaacgcagttcacgctgtcgggtcagaaatcagtgccagtcaccgacatcgaagcacggtggatgaaaagcaagaagggcaacagccaaattagctacaatatccagtctgcagtcgactacgataccaaaatgatttgtgccattaacgtcgtacaggccccgacggaccactaccagttgccaaagatcgttgataaggcgattaacaacacaaacgtgatcccaagattcgtactggccgacacaatctacctgaatgaggagagcctctcatatctggcggataatcaaataaatggggttataccagatagaaagcagtccaaggagaagatcggacgcctgaacaagaacccctaccacaaggatcacttcaaatacttccccgaaattgacgcctttgagtgccccgaaggccagattatgtactttttcaacaaatacactgagaaaaatgatgatctggacaagcctgacaaaatcaagcggttgtattccaactatggtgcttgtaaggcttgcaattgccgggagaactgcctgtcctccacccagacccaccgcactatcaccgagtatggcgggagtttaaagaaagccatgtgggaaaagatggaaacagaggaatataaggaggaatatgccaaaaggtcatcggtcgaaggaccttttggcattttgaaggaacaattccatatcgagagcgaagtggtgataggaaagacaaagacagaggaaagaatactactggacgccgtggcttataacttaattcgactgtttaacctcgaacaggagatcaagaacgataaggaggatattgttgacttctgtgagaaaatttctgtccaggagaagcttgaggtccgcgccaccatattttga

SEQ ID NO: 3209 - DNA, 903 bp, synthetic construct
  source 1..903: mol_type = other DNA
atgaatattattaaaaatctgcctctggctataaccggtctgatcttggccatcctttcactcggaaagatattcgccgacttctcggccatattcttcataatcggctctattctgatatttatggtgctgctcaagctggttttccacttcaacgactttttcaacgagctgaacaacctgatccctctgagcacattcggtaccttctcaatggcgctcatgctttggagcacctacctcaaacccctgttcctgccgctcagtcaagatatcgccttcgtgatatggatcttgggcatcatcatccacctatccatcatcttgttctttactaacaactatgtgctgaacaacttcaatattgaagatgtctatgctacttggtggatcgtctacattgggatcaccatggccgcaattacggctcccgcccatggcctcagtaaatatgggttcattttctttggcatcggattcattctgatgatcccaacacttgtgctggtctcctaccggtacattaattttaaacagatcgacgaccagaataagccattcatctgcatctacgctgcaattttaagcatcctgatcgtgggatacgtgaatgcgatgacgattaacggcacttttctaagcattatctacatcggggccgttattttttatatctttgcaattatccaggcattcaagttcatcatcatcgaaaggttgaagttcatgcccagctttagcgcctttacatttccatttgtgatatccgcaatagccaccggggaggcctacaagttctttggacttgatattctcaactatctcttttatattcaggcgtttattgctctgattctcgtaatctttgtcctatacaattacctgaagttcttaatgaactga

SEQ ID NO: 3210 - DNA, 510 bp, synthetic construct
  source 1..510: mol_type = other DNA
atgaacgcgattttcaaaagaaaaagcatcaggaagttcctcgataagccaatcgaggatgaaaagatcgaaaggctgctgcgagccggaatgcaggctccatcggccatcaacagccaaccctgggaatttattgtggtccgggacaaggattccatcaagacaatcgagaatatgagcctctattcaaagccggccaaaaccagtacctgctgcataatcaccctgttcaacaagaaatacactgacaagttcgatgactactgttgggtggagcaggatatgggagcatgcaccgagaacatcctcttgcaggcagtggaggagggcctaggggctgtatggctgggcacataccctaatgaggaacgggtgaactatcttaaagagcactttgacattcccgacaatgtgtacccctactccgtcattgttctgggctaccctacggaggactaccatggggaaagtcgctttgacgaaagccgcatacactatgagacttattga

SEQ ID NO: 3211 - DNA, 522 bp, synthetic construct
  source 1..522: mol_type = other DNA
atggacttactcgatgtgatgcttaaaaggaggagtgtcagacgatatacagatgaggagattccggaagaaaagctcaacaaaattttgcaggccgggatgcttgctcccacgagccgcaaccggaagccatgtagttttctactgatcaatgataaggattccctggtggaactggcaaacagcaaagagcacggggcagagctcctgaagggtgcaaagcaagctatcgccgtaatcgccaatccaaacgtgtcagacacctggattgaggactcgtccatcgcgctggccttcatgcacctaatggccgccgagcaggacgtcggaagctgctgggttcagatgcatctgagaaagtccaaggatggccagtggtcagaggaactggcccgggagatcctggggcttgacgactacttccgcatagtgggcatattggcgctgggaatggctgacggccagcctaaaccccacagcctcgacgaaattgacctcaatgatgtgcatatcctgcactga

SEQ ID NO: 3212 - DNA, 576 bp, synthetic construct
  source 1..576: mol_type = other DNA
atgaaagcaaatgagaaagagaccatccgaagctttctcgccattgaacttgacgaaagcctagtgccgccaatcctggacgtccagggggatttcaaaaagactgacaccaagatcaaatatgtgcccgctgaaaacatgcacttcacactgaagttcttcggaaacatcgatgaggatatcgtcgaggacatcagtggtgccgtggaaaagataattaagaactactctagttttgaactcaagatcgagaactgcggctgctttcccaatcagaaggtaatcaaggttctctggttagggatagacaaggactccaagataaccgacctgcaaaaggagctggataaagagttcaaaaagcttgggttcaaaaaggagagaaactacatttcacatctgacaattggccgggttaaatcccctaaaaacaagaatgagatcagggatgtgattgaaaagaacaagaatatcaaaatcggctcgatgaccgtgaaccgggtctgtctgaaaaagagcacgttgactccacagggacccatttacgagaatattcgcgtgtttgacctggaatga

SEQ ID NO: 3213 - DNA, 801 bp, synthetic construct
  source 1..801: mol_type = other DNA
atgacaacaaatatcgggaaaagaattaggctggagaggatcttcaacagaaaaaccggacgcaccgtgatcgcgccaatggaccatggggtgtccagcgggccaatcaaaggtatcataaatatggataagaccattgaggaaatctcccagggtggcgccaatgctgtgttgatgcataaggggattgtggagcaaggacaccgggggtacggaaaggacataggcctgattgtccacttgtcagccagtacctccctcagccccgatccaaacaacaaggtaacggtaacaactgtggaaaaggccattcagcttggcgccgatgcagtgagcgtgcacgtgaacatcggctctgagaacgaaccggagatgctaatggagctgggagaaatcagcgagacatgcagctattggggaatccctctccttgcaatgatgtacccccgaggccagaaggttgagaacgaacacgatgttgagatggtcaagcatgccgcacgtgtcggcagtgagctcggcgtcgacattgtcaagaccaattacacgggggaccccgactcatttagggaggtggtggaaggcgctttagtgcctgtagtcattgccgggggtcctaagatagacactgatcgggaactgctggagatggtgcgcgactctctggaggtgggaggcgctggtgttgccttcggacggaacctgttccaggcgcaggaacccggcaagatcactaaagcaatctcggaggtcgttcacaatgacatggatgtggaggaagctctgaaaatcctcaaatga

SEQ ID NO: 3214 - DNA, 1107 bp, synthetic construct
  source 1..1107: mol_type = other DNA
atgtccccgaaaacatcatgggacgataagaaagagctgatcacaactgcactggaatccggcatcgaccatgtgctggaccttgaagacagtgagaacatccggaaagtgggcaacttcaacatcatttccacggaggaagacgctgatgtatacttagttggaatagacggggaaggagacggcaccctggagctgaaagacaacctaaatgagtcatccgacttggcaaaagcaaaggaggccaaaaacagtggaaagacagtgtgtgcctacatcatcatcacagacaagctccacgagcagttggccgtagtcctgggtaaggtggtggattacattatcctggttgggacggactggacagtgattcccctggaaaacatcattgcagatcttcagaaggaagacgtcaagctcctggctgccgtgagcaatgctgatgacgctcaggttgccatggaaacgctggaggtgggcactgatggtgtcatattcgaggcccgtgactttgcacagatcaaggacatcgctgggctgatagacgagctttcaactgaaagctacgaattaaaggacctgaccattaccaatgtggagccagtaggctcgggcgatagggtctgcatcgataccaccaccatgatgcgccctggagaggggatgcttatcggctcctacagtaaggccatgttcttcatccacagcgaaagcctggagagcgaatatgtggcctcgaggcctttccgcgtgaacgctggtcccgtgcaagcctatgtgatggttccaggtaacaagacacggtacctctctgagttggtgactggcgatgaagtcctcatcgtggataaagatggaaaaaccaagaccagcattgtcggcagatccaagatagaaaaacggcccttgctcctactcgaagcggagtatgatggcatgaagatcaagagtctggtgcagaatgcggagaccataagactggtcgatgagaatggagagccaatttctgtttctaacctcgagaaggggatgaaagtcaaagggtttattgacgacagcgcccgacactttgggatggcgattgatgagcagatcattgagcaatga

SEQ ID NO: 3215 - DNA, 1266 bp, synthetic construct
  source 1..1266: mol_type = other DNA
atgaatcccaaagaattatttgctgagtctaaaactattatcccaggcggggtgaacagccccgtgcgggcctttgagccttatccattctttgtgaaagaagccaaaggcagccacatcatcgatacagagggcaacgactacgtagaccactgcctggcctacgggccgattctactgggccatagcgacgatgacgtgatggccgacgtgtacaatcagatgaagatgggaaccgcttacggcgcgccaactgaaaatgaggtcaaattggctaaggaggttatcgaccgggtgccatgcgccgagatggtgcgcttcgtgaactcagggactgaagccacaatggcagccattcgcctggcaagaggctttacaggccgtaacaagattgtcaagttcgaagggtcctaccatggtgctcacgactatgtcctcgtgaagtctggtagcggcgctgcatgcctcccggattcggcaggaatccccgaggacaccacgaaaaacaccctgagcgtgcccttcaacgatgttgaggccttgacgaagctgattgatgaggaaggggaaaacatagcttgtatcattgtcgagcccgtcatgggaaatatcggctgtgtagagcctaatgttaaatatctgaagttcctaagggaaatcacagaggaaaacgacatcctgctgatctttgatgaggtcatcaccggattcagggtctcccgcggaggggctcaggagtattacggggtgaagccagacctcgttacctttgccaaggtgttaggcggaggattccccatcggcgcctatgcaggtaaaaaggaaatcatgagcctcattgcaccggccgggcctgtctaccaggccggcaccttcagtggaaaccctatatccatccaagccggtctttccaccttgaacaaactggactatgagttctacggaaaccttgcgcgaaagggcgattacctcagaacgaacatatcagatattgttgaagacctgaaccttgacctgcaggtggtggggcttgctagtatgttccagatctatttcaatcccgagcccgtggtcaactacgagatagcgaaaaagtcagatgcaaagcggtttctggtgtacttcagggaattgctgaagaatggcgtatttatcccacctagtcagtttgagtgcaatttcatatccggtgctcacacagaggaggatctcgacaagactgcccaggggattgaaaatgcgctgaaggtggcctggcaactctga

SEQ ID NO: 3216 - DNA, 714 bp, synthetic construct
  source 1..714: mol_type = other DNA
atgaaccgccggtcaaagctaataatcgcgattctgatagtgatcataatagggatcgccgttatccttttcggcagcatgtttggtggcgaaaaactgtcgtcaggtgataaagacatcctggtttgcgcgattgacgaaagcgagcctcgaccaggcatgggggcagtggatatggcctttctggtccacatgaatgatggaggaatcaccaattacactcccatttatcctcatggaatggtccacccgagtatcgccgagcccgaggagtatcaggctatgggcgcaggggaaaaactgctcttgcacgactgcttctactgggaggacaaacagcagtgcatgcaatacgcaaaggagattctggaatacaatacaaattattcctgtgatgccgtgattgccgtgaacagtcaggccatcgataacatcatcagcgctgccggtaccttaaagtacaacggcgaggaagtcaacgcatccggcatcgatttcatcagggaggagcagaacaccatgggaatgacaagaggagactctgtgatggtgatcgtgaacgccctcatgcaggcggctaaggacccagacaagcgggacaagatgattaatgctgctgtaagcgagtatacggccggcaacattgcaatgtaccccgaagggtccttcatggaattgctcgctagcaagggcctgcaagccatgtttgggtga

SEQ ID NO: 3217 - DNA, 639 bp, synthetic construct
  source 1..639: mol_type = other DNA
atgaaccaaaaggactactggaacagcatcgcagataaaaaggaatttacaacgccattccaccccgaaatcctggagaattacctgaacaaagatgattttattgtggacatcggctgcggctatggcaggaccctgcgagagctcaaggataacggatacagaaatctgagaggctatgacatttcagagaaaatgatagaaaggggaaagaacgaaaatcctgatttggacttgcggataaaagatcccgacaccatcgatcttgatgacgacagcgtagatggcatcattctctttgccgtgctcaccgcgattatcgacgacgaagagcagaaggccctcattgatgagatctaccgggtgctaaagccgggggggatactgtacctgaacgacttcctactcaacgacgacgaacgcaatctgaagcggtacgatgagtacaaagacgagcttggagtctatggtgccttcaagctgccagagggagctactttacgccatttcgacgagtcttacatcttcaagctgtttgacagtttcgagaaaagggaatatgagcgtcagatctatcccacaatgaatgggcacacttccaacggcttctattacattggggagaagaacatcggttga

SEQ ID NO: 3218 - DNA, 1239 bp, synthetic construct
  source 1..1239: mol_type = other DNA
atgctgatgaatgaacagacgaaactgtctaaggaccattatatgatttttggcttaagttgggccgggtgggtgtttgatttctacgaccttgtcctatttacctttttgattagccagctccaatccagcctgcacatcaacgccgaaatgctggcactgtgcctcggccttagcctatttgctacaggcttaggggggatcatttttggagcactgggggataagtatggtcgcaagaaggtgttggagtggacaattctggtctactcgatagggaccctgctctgtgccttctcctggtcgttctattctctggttctcttcagattcatcactggattgggcgtcgggggcgaatgggctaccggccagatctacatcagcgagacctttcctgacaacctcagggccaagtttggagctttcatgcagagtggcgctcccgtgggggtcatactagcttcaatcgtgggtggaatgatcagccccattattggctggcggatgacatttttggtgtccatcattccggccatcaccattatcctgattcgaagatatctgaaagagtccgatgtctggattaaaaataaggacgattttgtgaacaaaaacatttttcaggagttcaagcaacttgtgtcaaaagaataccggaaaatattcctgatcagcttggtactgtgcatattcgggatgtctgcctattggtttacctattcctggctgccaacctacctggccgaggagaggggcctcgcaatggttacgacctccctgggaatcatcctgattcagtgcggtgactttaccggctacacgacctttggttttgtggctgagcggatcggccgccgtccagccttcactatctacagtttcatcatggggatcagcattgccatgataacgatatgttggaatcagattgacaaggtcccagacctgatcatggtattcatgttccttacaggcttcggaacaggattctttggaggattcggttctctcttctcagagctcttccccacaaagatccgcaatactggagttggcactgtgtttaaccttgcaaggggggtgcagttcatcactcctatgataatcactttcgtgggggcctactacgacctgagttacggcatcgcgatcgcggcaatcttcgcgttcctcgtgggcatttggatttgggtattccccgaaaccaagggtacagccatcaacgatctcgattga

SEQ ID NO: 3219 - DNA, 543 bp, synthetic construct
  source 1..543: mol_type = other DNA
atgaagattatagccttattggccagtccacggaagggtgggaactgcgacgtcctgatggatgaaatgattaggggagctgaggagaatgggcatgaggtggttaagtacttcctggagaagtgtgacatcgccccatgcaaggcatgcatgttttgtgctgagaatcctgactgcgtgcgcgaggacgacggaaatgaaataatcaacgcactagtagatgccgatggcgtgatctttgcaacccctatctactatggtcagatgtcagctcaagggaaactcattatcgatagattctatgccatcggacagaaccccgacaagagccttggcggcaaggcagccctcatcttcacagaaaaccagcccgagggcacttacaaagactacattgaactgacgaaattctccccctttacctttatgggatatgatgtgatcgggcacgtggatgcgggcagcgcgggcccggccgggattgtcgccgaagagcagaaagacaaactggaagaggcttacgagctgggcaagctcttctga

SEQ ID NO: 3220 - DNA, 789 bp, synthetic construct
  source 1..789: mol_type = other DNA
atgattaatatagtagccggcctgggagaaaacgagaacatcatcttggcctcaaggcagctggaatcaatagatgacctgaatatccagcttgtggacaacgaggacgacctgttcgacgccttcaaagactccaacgtgggtgcggtggtcagaggctccctaaaggcgagtaaagtcatcaaattaataaagcaatataagtctgactgcgaagtgaaccgcgccacttacgtcaacacatccaatgacccgaacttcaacgactcctatgagtttctgctgtcgcctgttggaatcgatgaaggcaagaacattgacgagaagatcacgctggccatccagtcagccaattttattcaatctctcgggaagaccccaaagatcgccgtgttggctgaagggcgtaaggatgactatgggcggagcgagagaatcgataagagcctgaaggagagcgaagagctcactcgacttctggaggaacggttcaattccctggacaattttgacaacagcagcgaggatgtttctaagaactaccagatcaaaaactactacattctccttgagcaggcaatcaatgataagttcaacatcctcctcgcaggtgatgggatttttggaaatataatgttcagggctctggtgctgctagataaatggcccagctatggcgctgtcacattgggaatcgatgagattttcattgacaccagtcgggatcagaccgtggaaggctacaaacgcagtctcgagctcgcatacaatctggctaaattaaaatga

SEQ ID NO: 3221 - DNA, 765 bp, synthetic construct
  source 1..765: mol_type = other DNA
gtgcccccccaatttctgtataagatctatgaaaagcgcctaatgaatgagctggaccctgatcggatgccgaggcacgtggctatcattatggatgggaaccgaagatactccagaatgaaaggtgatatggaggttatcaaaggccacgaactgggagccgacacgctcgagaaggtgttggactggagcatagatctcgggatcgagatagtcaccgcatacgccttctcaactgagaactttaacaggccagagcatgaagtggaaggcctaatgaggctgtttgtggaaaacttcaaaaaaatcgtggaccacgagaaaattcacaagcataaggtccgcgtcaaggtcgtaggcagaattgagttgctcccagatgacgttcgagaagcgattaaggaggctgaagactccacaaagcagtataatgaaagactgttcaacctggccatcggctacgacggccgtctggagatagtggacgccatcaagaagatctacaagaaagtggaggatggagagatttccattgacgacattgacgagaatctggtcagtgaaaacctgtacaccgcaggtcttgaagaccccagtttaatcatccgcacaagcggagaggagcggctttcggggttcctcctgtggcagagctcttactcagagctttatttctgcgatagcctctggcctgagctgcggaaagtggattacttgcgagccatccgcgactatcaggaaagggatcggcggtttggggtatga

SEQ ID NO: 3222 - DNA, 762 bp, synthetic construct
  source 1..762: mol_type = other DNA
atgatagatacccactgtcacatagattttgaagaatttgacgaagaccgcgaggagctgatcaaaagggctcaggacaagcttaacgccgtaatcaactccggatacagtgtggaaagcaacaataaggtgctcgaactgtcaaaggagtataaggacttcatctacccaacctttggctttcatccggtgtcctctcaaaattctcccgaagaggagatctccgcggcccacaaccagatcgtcacccatctggatgacattcttgctgtgggtgaggtgggaatggacttctactactgcacagacaaggccttaagggctcgccagcaagagatcttcatggggttcgtggagatcgcaaacgaatacaacgttccattgctgatccacggccgggactgcgagagaaaaatcttcaatctcctcaatgactatgatgacattcctaaagtcatttttcactgctatgggggcagtctgaaggtagcaaagagaatattggataaggatgactactacatgagctgttcaaccatggtgtgctacagcaagcatcatcaggagctgttcaaaaacattcccctagagcgtattctgacggagacagacagcccttacctggcaatgacaaaggaggagcggaacgagcccgccaacgtggtctatgcggttgagaaactcgccgaactgcacgaaactgatgtctcggaggtcgatgaacagactgaaaaaaatgcccgatatgtgttcgatatttga

SEQ ID NO: 3223 - DNA, 681 bp, synthetic construct
  source 1..681: mol_type = other DNA
atgaagccctacgtgatcctaaacgcggctatgacgctcgatggaaagatcgccacaaagacaggcagctcggagatctccggcaaagaggaccttgagcgggtccacgagatccggaagaaagttgacgggatcatggtagggataggaactgtcctggcggacgacccaaggctcacagtccataagattaacgctcggaaggaagataatccgatccgcatcgtcgtggacaacaaggcaaggactccactgaacttccgaatcctgaatgatgatgcagagaccatcattgctgtgtcttccatttgtgatgagcgcaatgagaattgcgatgaagaggccgtgaaaagagccaaagagctggaaaaaagagtgaacgtgttttattccaccggggaaacggtggacctggtagaatttatggaatacctctacgattacggaatcaagagtatcatgctggagggaggctcaacccttaactttagcatgattcgtgacggtttgatagacgaagttaagatatgcattgcccctatgatcgtgggtggcaaggacagtaaaaccttcttcgacggggatggctttgattatatgaaagacgccgtccagttggagttaattaacagcttccccctcggcaaggacttcattatggagtataaggtgctgaaatga

SEQ ID NO: 3224 - DNA, 147 bp, synthetic construct
  source 1..147: mol_type = other DNA
atgggcaatatggccgaagcacggcgaaagatgcatgaacgcgacgagaggatcaaaaaggagaacaagagcgatgtgaagaagataagaaacttctttttcgggtgttgcgacaacaaagagaaaaagaaggtcaaagagcactga

SEQ ID NO: 3225 - DNA, 645 bp, synthetic construct
  source 1..645: mol_type = other DNA
atgcacagcctgttcagtgatggagagctattgccttccgagcttgctcggcgcgctctggtcctgggacatgaagccattgcaataactgatcatgtggactactcgaacattaacacaatccccgagatcagcgctgccatcgacgacatcaattcaaattgggatatcacggtggttctgggagccgagataacccacgccccgaccgaaagcatccctgccctggcggagaaggctcgcgagctgggggccaagatcgtggtggtccacggggagactttgaatgagcccgtcgttgaagggaccaacttcgccgccgtaaactgtaaggaaatcgatatccttggccaccccggtctcatcacgaaagaagaagcagagctggccaagaagaacgatgtggcgctcgagatatccgcacgaaaaggccactgcctcggcaacggtcacgtggctaacattgcaagggaagtgggaaacgacctggtcatcgatacagacacacattctccagacgacattattacctttgagcggagtatcgaaatcgggttaggcgcgggcatgaccaaggaggagattctcaaagccactattgacaatccaagaaaaatactgaagaggaatggcatcgaaatttga

SEQ ID NO: 3226 - DNA, 1059 bp, synthetic construct
  source 1..1059: mol_type = other DNA
atgatctccgtattcgtgccgagccatatcactggctttttcagtattcacgacaatccagaccctctcttgaagggtagcctgggtgcaggggtcctcctggataagggggtgattacagagattgatttcaaagagaactttgatctcggcggggtgaatgataacgacctcaatctggactcgttgaacagcgacgagctgctgattatcatcaacggcaagagagacgagtacaacgaggtgatcatcctcaaaaccatccatctaatgaaaaaagcattggacaaagaagacatttccctgagcggcgtggtcatcaaccagatcatccaggtgcccatcggatgcggattcggcacctcagcggcctcagcacttggtgtggctatttccatcaatgagctattcgatttggggctttcgctggaagagtgtggccagttcgcccacctggccgaagttgaacttggcactggcctgggggacgtcatcgccgagctgtcaaagggaatcgtcctgcgcacaacgcccggggctccaggatatggggaggccaaatccatagttcctcatgagaagaccggcttcggagtctttgagtccctgaatgccgatttttacataatcaccaagtctctgggtgaaatttccaccgccagtatcataagtgatcccaagcacaagaagctcataactcaagtgggtgagaaaacggctgaggagtttaacaaaaaggacgatggaattgtgataggcagcaagttcaaaaacaagttcaacgtagctgtggacagcgaatttaatgaggaggaaaccattaaaaagtttatgaagtcttctcttttctttgcccggaagacaggcctcatcagcgacgagctcctggaactggttcacaatctccacggaaaggtgataggaagttctatggctatgctagggaacacattattcgcaattgccacggaggagcagaaattaaagctggaagcggagtactatggggaatttgatttctacaagctggaaaccgaaggcattaggatcatcaaatga

SEQ ID NO: 3227 - DNA, 534 bp, synthetic construct
  source 1..534: mol_type = other DNA
atgatccgcctgagttatgacatgcaggtgtatcgaaaagacttaagagaagtgctaaaacggacggacaatgtagttgaactcggctgccacgtgggcaagacctccgagctgattctgtacaaactgaccactggctctctgattgggatagacaatagtccggaggccgttcagcccttggagaggctctcattccatcatgaaaactttactcacattatcggggatgtgcgccggcacgaggtgcttaaggaagtcaccgaactcataggccagtgcgatgtgctgtccattgacctgggtggtggataccacccagacacggtctttaaagtgtactacatctgggcgagcaccctgaagccaagggatgtcttgatcagaaaccagggacttatcgacttcgtcaactcggcaatcacaacagaggatatgatctccgagcacggctggctggagagctgtggggaccagggaatcccccctcaaattaaggagttcagcctctggacagataagctcgatgactga

SEQ ID NO: 3228 - DNA, 717 bp, synthetic construct
  source 1..717: mol_type = other DNA
atgaaaagatccaagaaactgatcatagccatcctggttgtcatcctgctgggccttcttctcgccatagccggatacttcgtggggggccccgacctgagtcaggaaaacaagacaattctcgtcctggctgcggataagtacgagcagcctaacgggggttgtgatatggcgtacctagtgcgactcgagaatgggagtttagctaattacactccggtgtatcccgggggcatgtaccacccatcacagtcggctcccggcaacctgcagggcaatatgctgctccacgactgcctgtggaacggagttgaagacggtatgcaatacgctaaggagatcgtggccttccataccggcgtggaagcagacgccgttgtagtcctctatgacgagggcgtggacaatgtcttggattccatccgccctattgagattgatggagagccaaccaacctaagcgcaactgacatcatccgggaaaacgataactatgcaggttataaggggaacgagggggtaaccggaaccatgagcagggcagacgctgtgatggtcttggtgaaagcggtgtccaaacaggccaaagatccagccaagaagagcgccatgctccacgcagctcttgacgagtacacgaagggaaatattgtgatgacgcccaaaggatcattcacacggttgctggccacaaagggcctggaaagctttgcctga

SEQ ID NO: 3229 - DNA, 1329 bp, synthetic construct
  source 1..1329: mol_type = other DNA
atgaaagagtacaaaatcgcgattatagggggtgggcccgccggcatgatagctgcaatcagagccgccgagatcctgggccccaatgccgtgtgcattctagagaagaatgaaagcctgggcaaaaagctgcttctgacaggcggaggccgctgtaacataaccaacaacactcctatccacgatcagctcaactattacaataaaaacaaaaacttcctcaagcactcactgtacactcttccacaggacaagctactggccatctttgaagagaaagacctggaatttcaccaagaggacaataaaagggtcttcccagacagcgaagatgcccacgacatcctggacattttagaggaataccttgaggagttaggggtagatgtgtataacaataccccaattaatgctcaagacatcgagcatgagctgaatgagaggatggagcccgtgttcgagatcgaaaatgaaaagatcagtctgaatgcgtcaaaaattatcgtatctaccggcggcatcacctatcccaacacaggttcggatggggatggatataaaatcgcctctcacatgaatcataccattaccgacatcaagccgggacttgtcagtttcaatattgatgactttctgctcaagaccctttccgggctcactttggagaatgttgaagtgtcgtttaaggacaagaagaaaaagatctctgttaaaggggatatcttgattagccactttggcctgacaggccctgccattattgatttgtccaaccggttgctcgaaaaatccgacctgacggtccttgacgacaagctcaacctcaagagccgcgatgaaatcgaggaattggagctcttcacaaaccggattacaatcgacttcactcccgacctcaccgaggaagatataaagaaccagatcacgaaggacagcccgaagaacggcaagatggcgatcaagaactacatgaagaaatacctgccaaataacttcattgattatttcctgatgaagatcgacatcaatcctaagaagacgatggcaaacattactaaaaaggataagaacaaattggctgaaaacctgaaacgacatgtgtttgagatagaatccctggagatggacctggcaaaggtgaccattggtggagtcaaatcaaaggagatagatgccaagacactagaatccaagtatgtggagggactgtacttcgcaggcgaggtgctggaggtggctggacctacgggagggtacaacctccagatcgccttcagtaccgggtacttagcaggtcaggaggctgctaacagcctgaaaaacgaatga

SEQ ID NO: 3230 - DNA, 1323 bp, synthetic construct
  source 1..1323: mol_type = other DNA
gtggattacctgctacgcgatcttcgccgaacccattacagtaaagacgtaaatccagacatcagcggggaggaagtgattataatgggctgggtccatgagatccgagacttgggcgggataatctttgtgatcatacgcgaccgggacggcctggtgcagattaccgcacccagcaagaaagtcgatgccgagatcctggaagagctaagggccctgcgtaaagagtctgtagtggccatcaaagggacggtgcaggaggcaggcaaagctccgaacggcgtggaaattattccaatcaagacaactatcctcaaccctgccaaacagcccctgcccatggaccccaccgaaaaggtcaaggctgagattgataccagacttaatagtcgcttccttgacttaagaaaagcgaacgtgagcagcattttcaagataaaggccaacatgtttaaggcagtgcgccagtacttcgacgagcagggcatgattgaaatcaatacgcctaagctggttgcttctgccaccgagggaggaacagagctgttcccaataacatactttgaaaaggaggctttcttgggccagtcgccgcaactctacaagcaaatgatgatgggagctggcttcgacaaggtatttgaaatcggccagatatttagggcagaagagcacgacacactgcgacacttgaatgaggccgtctcaatcgactgcgagatctcctttgccgatgatgtggatgtcatgaacgtcttggacggcatgattacccgggttctccagtccactaaggaaaattgtgcaaaagagctggaaacattagaatacgacctcagcgcgatccctgaaggaccattccccgaggtcaaatacgacgatgctgttgatattatcaactctaaagggatcgatatggagtggggagaagacctgtcccgggaggcggagaaagccctgggagacactcaggagggtttttacttcctgaccgattggccatccgccatcaagcccttctatgccatgccctatgaagacaggcctgaaatcagccatgctttcgatctgatgtacaagaacctagagatctcctcagggtcaatcagggtgcaccaatatgacctgctcgtgaagcagatgattgagagggacctcaaccccgatggattcggcagttatctcaaggcatttgaatatgggatggcccctcacgccggttggggggtcggtgccgaccggctggcgatggtgctgaccggtgtggagaacattcgggagactgttctcttcccaagagatagacacagacttacgccgtga

SEQ ID NO: 3231 - DNA, 1281 bp, synthetic construct
  source 1..1281: mol_type = other DNA
atggaaattctacggtatgagcgagaaactgccgatgagctcatcaagaggtcgcaggctgacatcaatgaaatcttgaacatcgttcaagacatcctctccgacgtaaaggagaacaaggatgaagcggtgaagcgctacactgccaagtttgacagatgcgagttagatgatctgcaggtgtccgacgaggaaatcaagaacgcttatgataatctggatactgatctcatagacgccctgaaaagggcttcccaaaacattgaaaagttccacaaggcccaaatcccagaggagtggtccatggaagtggccaagggtatcacagccgggcagataatccgtccgatcaacagcgtcggctgctacatcccaggaggccgggctgcctacccaagttccatcctgatggaagtgattccggctaagatcgcgggagtggagagaatcatatgttgtacccctccaggagccgacgggcgcatattggacgccattcttgtagcggcagacctggcgggagcagatgagatctacaagtgcggaggcgcccaggccatcgctgcaatggcctttggcacagagagcatccagaaggtggagaagattgtggggcccgggaatgtctttgttaccggtgctaaaaagcttgtctatggggatgtggacatcgagtttcccgcaggccctagtgaggttctgattctggcagacaagacggcgattccagaataccttgcccacgacttcctatcacaggccgagcacgaccctgaggcatcatgtttcctggtgaccgatgacgagaaaatagcagaggaaagcaacgacctgattgagcgcttcactaaggaagctgtccggaaagagattattcaggagtccctggaaaagcacggacatataatcctctgcaaagatatggaagaggccattgaatttacaaatacctacgctcccgagcacttgatcatttcaacggaagacgacaacgccatcctcgataaaatcaaaaatgccggaagcattttcctgggcaaatactctcccgtggcagccggtgactacggctctggcaccaaccatgtgctgcccacaagcgggggggctaagatgtacagtggcctgagcaccgaaagcttcatcaaaaagcctaccgtccagaccataacgaaagagggtattgaggagctctcgaagacagtcatccccattgcagaatatgagggcttctatgctcatgccaatagtgtgaaagtaaggttagataaaaacgagtga

SEQ ID NO: 3232 - DNA, 306 bp, synthetic construct
  source 1..306: mol_type = other DNA
atgtacaaagacgaaatgattcaactgcaccagtttctggtctatgtcctaaaatatctcgacaccgataacaacgcccacgagtacattgaggagtacctggctctgaacataagcccccatcatatccaccgcacaaaggcggagcacaaacaggcaatcttcgtgctctcaaacacgatatccgaggtgatcttgcacaaggaagaaggctccatcccaccgaatgtaagcaatgcactcagggaccttgtgagacggtctaaaaaggaactgaaggccgccgaggccgctcagagtaagtga

SEQ ID NO: 3233 - DNA, 1389 bp, synthetic construct
  source 1..1389: mol_type = other DNA
atgtctacccgtaaagtggtttgtctagtggatggggagcattacctccccgtgacccggtctgctgtaaactccatcaatagcattgaccatatcgaagtggtggccctcgttttcatcggcggaactgaaaagctcaaattaggtgatgaggaagagtatagcgaactgctcgacacgcccgtctactttggcaaggacaaaaaccagatcccatataaactgatcgaagatgtcatcaaaaagcacaacgccaatattgtgatggacctgagcgatgagcccgtgctggactatgacaaaaggtttaagatcgctagtgtggtactgtcctgtggggtaatttacaagggggctgattttgaatttgagccactgacccaatatgagataatgaaaaagccttccctaaagattctgggcactggaaagcggataggaaagaccgcagttagtggctatgctgctcgactcattgacaagaataactataacccatgcatcgttgctatgggtcgcggcggacctgaagagcctgaagtcgtgcacgggaatgagatcgaaattaacccggagtacttgcttgagcagtcgaacaagggcatccacgcagcaagtgaccactgggaggatgccctgatgagtcgggtcctcacaatcggctccagacgctgcggcggcggaatggccggcgatgtctttgtcacaaatatggacaaagccgcgaaaaaggccaataagcaggatgcgaaatttgtgatcttcgaaggaagcggtgcagccattccccccattaagaccgacaaatccattgttctggtcggtgccaaccagccaatcggaaatattctcggatacttcgggccctaccgcataatgctgggggacttggtgatcctgacaatgtgcgaggaacccatggcaagcaaggagaagatcaaggaaatcgaggacttcatccacaagatcaaaccagatgtggatgtgatatctacagtcttcagacctaagccattgtcagacattaacggcaaaaaagtgctgttcgtgaccacggcccctgaagcggttagggacgtgttatcaagctatcttgaagagacgtactcctgcgagatcgtggggctgagctctcatttgtcaaacaggcctctcctgcaggaggacattgagaaatacaaggatgacgtcgactgcatagtgaccgagcttaaggccgctgccgtcgatatcgtcactaaggaggccatcgaatccggcatagagctggtatactgtgataacatcccggtgcccataagcgatgactacccggacctttcagagtctattctaaaggtggtggacggggcaattgaggagttctcgttcaatatgctgctggactga

SEQ ID NO: 3234 - DNA, 1062 bp, synthetic construct
  source 1..1062: mol_type = other DNA
atgatgtctcaagattcaaacaagaatgatataaattcatacgatttcccaagcagggtggagaaggctttaaaactgattcacacagactccttcaaagcactcgattattttaatgagattctggatgactttttcaagttcacccctgatgagatcaaggaaaataacttaagttcccttataataaacagtctcaacggcaaggggtcgatcctgaatgcatttgataaaatcgatgaggccgaagaatgcttcgacatggtactgaacgactttgacagccaggacttcacgtccctaatcaacaaggccctgattctgagaaagaagggccacttggaagaatcgctcgactactacgacgagatcgccaaatactacccggacaagaaagagcttattctggcgatgaagagtgaagtctatggcgaactcaaaatcaagctctctgataccgatctggatgattatagcatcgaagctaaggacctgattgggcgtggtcttgcatcccacgagaacaagattgtgcttgaagccctggattactaccagaaagcgattaaagccgacagtagctgtaagtacttggtcctgagcctgatggatgatgttaaacgggagtttttcaagctctttctctacgaggacatcgacatcgaaaaggacgagatctcaaagaaaaagggcgctgtgttgcattacctattcattcagaacaatctcttctatgcctacatgctaaatgaggagatcctggaagaaaacaagaatgacttgtttgccctgaacgcaatgggaatgatattcttctatctcgacgactgcgacttgtctatccgctatttcgaccgctgcaacactatagacgagaagtatctttacccatacctgaataaggccatcgccctcgctagggctaaaagattcgatgaggcgaaagagtccttcgggaaaatcaagggactgcccaacctgatccgggaccccaacgaggaggagctggacatttttaaacgaacaatcattagcaacagcatctattccctgggattttga

SEQ ID NO: 3235 - DNA, 441 bp, synthetic construct
  source 1..441: mol_type = other DNA
atgtcgcacgtggaaaagtcattagagctttttgaggccaagtttaactgcgcccagtccgtgttctgctccttttcaaaagagttcggcctggacgagaagcaagccctcaaaatcgccgcttgtttcgggagcggtatgcggaagggcgaagtctgcggagcgtgtagtggagcattgatggtgcttggtctgaagtacgggcagagcgaactcggcgaccgcgatagcaagctgaaaagcgacaagaagtgcacagacttcctagaggaatttgagagagccaacggctcctacatttgcaacgaactgctggggtgtgatataaggacggaaaaaggagttaattatgctaaggagaataacctcttcatcgagttctgtcccaaattcgtcgagagtgcaaccctgatcgtagagaagattctgaaagaggaatga

SEQ ID NO: 3236 - DNA, 1080 bp, synthetic construct
  source 1..1080: mol_type = other DNA
atgggtgatagtttgaaagtgatcatcgatgcagcgaacgtggctcactaccagaaaggggaaaatagcaaggctaaactgaagaacatcaccttggccgtgaaggccctggaacaggggcaccatgatttcctgattatagccgacgcctcactgcgtcacaatattgacgataaggacactttcgtccgcctggttgaagatggaatcatcgacgaggtgccgatcggaaacgtggccgaccactacatcctcgacctcgcgtatgatgagaacgccaagatcctatccaacgataaatttcgggacttcatgagtgaatttccagacatcaacagcatgaggattcctttcagcataaaggacaatgagctgatactgggcaagacaaagaaaccaaaaaaggtgaaaaatctcctgcagaacatctgcgatgaaatcttaaatgagctcgagcgcaagcggtgggtggtttataagggcaaggagaccacgaagttcacccctctcaatgtggcaaaacaagccattctgatcctggaccagagcgaaagggacgatatgtcctctaaaatcgaaggcatattttcaaagcttccgatgtttgacaaggtcatggagatggtggacgacgtagagaccagcgtcccttacgtgattttcgtactcgtccatcccaaggactacaaggctgccgtcaaggacgcaggcaatattagcgtcactgtggcagataggttacgacttgttcacaagcccttgattgctgtgagaaatgacctctttattaagccagggtacttcggactaaacattgtccttacagatgaggtggaagatatccctccattcaacatcgagattcagacgaacacctacgatgaggtattcatcaagaagaatagtagaaacatagccagcacaatcgctggccggctggggtcctggaagttcccctttgttagcgtgaagcccaacatgattctggaaaaacccggtgagtttgagatctatctggagaagaactccaaaaagaaaaagaaagataaatcgaaagacaaagacaagaagaaaaaatga

SEQ ID NO: 3237 - DNA, 1203 bp, synthetic construct
  source 1..1203: mol_type = other DNA
atggctaataacagtgtcctcagacgtatcgtgtctctaattaccaagcacaacatcctttcgatagggactaagtactttcctacgacagagctggaaacagagtacgtcgatatgttcaattatacacaaacaatgctgatggagatcgacaaagcgaatatcacgacagaaagtatcttcactaacctagttagggatgtgggccgggaaaatatccccgaaaaccacagcttttacgaactgcttcccgctcagaacaagatagatgaatacgccctcgttagcaagatcatcatgggaagtgaccggtacatgtatgtggagctgagcgagccttcctacatcatagattacttcaccgacattatcctgagggagaacggggagatcattgagcgcagcgaaacagagatcgtgtcacgactgatgtctaaaaacgacgccatcagaatagccatcaagctggtcgggattggactggataacaacattcgggtcagggcagcggccggaatgactggcgctgcagccattgaaagatccatcaagttcaataaggaggtgggcgatgtgccgggtgtggccttcaccaaacttggaggggagtatgcccttgttctcgacaccccatttaaactgggtcagtctgaacatgcagagtatcagcattacctattcatcgacatagtggactccacgaatttcatctcaaagcacggcaaaaacaaactcgttgagctgatgaccagcgtcaaggagtttatggaaaactgtgaagggcacattgagggctaccgcgaaggtggagacgacctgatcgctcggttcccatccaaaggagtggccatccgcgcaggccttgactgcgcctggttcatcttgaataatggcgccaaggtcaagatagggattggacgaagccgcagagaggcgggcgagcgggcaaacattgcggagggtattaaagggtttggggccttgactctcatcgtctttgatctcgcaaacggcctgtatgcctattatgtgccctcagacttttccaggaccctgtgcgagctgttcaccaccaagaaaggcaagctggtaactgctttcctgctcgtattcattctgtgctatttattggctgtgctcggctttggcctctacggaattttggtgtttattatcgtagtggcttactacaccttaaagtga

SEQ ID NO: 3238 - DNA, 306 bp, synthetic construct
  source 1..306: mol_type = other DNA
atggccaatgagggtggcggacacctcaagactattctaatgattatcatcctcatagcttttatctgcggtcttgcactgggcgtcagtgtcatcatgggcggggatgacaactcccagaccgagagcgagggagtgcactacgtgaacgtgaccaaaaacattactgaatataatgagagcgggaacctgatcgaaaccgaggatggcacacatatagagttctcgtcttacagcgacaatgtaacggaaggagaaaacgttacagcctacaactcctcaaccgacgcggggaatctgttctga

SEQ ID NO: 3239 - DNA, 1194 bp, synthetic construct
  source 1..1194: mol_type = other DNA
atgtgcctggtgaatggagtgcgggctgcagggagccgccagggcaagtacggcctagcagttatcgaaagcaaagacagcaatgcctcggccgtattcacatcaaataaggtagtggcagctccggtgattcatacaaaggagatgattaaaggcggtaagataagtctggtcgtggccaacagtggaaacgcaaactgcttcactggtgaggacggaatcgtggactgtgacaagaccattgattttgcgtccgggatcacgggaatctcaagatctgagattgctacggctagcaccggtgtgatcgggcgaaagatgcctatggacattatattgccactggtggaagagtccatatcgaaactagagcacagcaatgaagcatctacagatgcggcaaaatccctcatgacgactgacacctaccacaagcagtttgccgttgagacaagtattgacgggaaaaaggtcacaattggtggggtcaccaagggagtgggcatgattgcccccaatatgggaaccatgctttgcttcctggctacagacgcgagcatctctgcggaatatatcaacaaggccttaaaaacagctgtcaataaaagcttcaacatgattgtagttgatggagatgagagtaccaacgacacggctatcctgatggcaaacggcaaatcaggggtggaggtggtcaacgatggcgagatcaacccagatttccaggaggccctggacttcatctgcattagcctggccaagatgatggctcgggacggcgaaggggccaccaagtttatcgagtgtaaggtgaacggggccaaggatgaaaatgatgccattctcgctagcaagtcagtcatcagttcctctctggttaagtccgctatctttggcggagaccccaactggggcaggatcgtggccgcagtgggctactccggctgcgagatggaccagaatatgataactgtgattatctccgatgacaatggaaaggaagccatcctggtcgataagggcaaaatcttggccttcgaaggtacccccaacctcgacctggccgaaaaaatcatgcaggagaaaaatataaacatccttgtcgatctctatcaaggggacgcctctgccaccgcgtggggctgtgacctcacctatgattacgttaaaataaacgccgagtacactacttga

SEQ ID NO: 3240 - DNA, 642 bp, synthetic construct
  source 1..642: mol_type = other DNA
gtgaacgattacctgaacaactccgatacgaatgacgcccttgtcaaactccctgcaaagcaaataggaaagaatgagatcggcaccgtgtcaatagagggcccctatgggaatacctcctctcccgttaaagtggcatacattctagggcagcacccacgcgaatttagcgctcacgacgccatctactacgcgttacaaaacaacagtaatgaacttaactactcatactacgtgtaccggatcaacgtcaccaacgaaacagccgactttgagcagagcaggatgaatgggcagctgttggcacaggagttcgtggtaaacgatagcattaacaagagctatgacctggttatcgacattcactcgtccaatggaggctatatccaggacccctatatcttcgctcctgtctctagcgacctgctggcatacgatgctgccaataacattacaaaggccttgccttatgtcacttactatgagccagcgagctataccagtccacagtactctactattcccctcgaagagggtggaatagcctccatcatcttcgaaatgagaggcaatccggacaacagtctcgagcatcaggctgatgacttcgtaaaggccgtggataaactggtgctgaactga

SEQ ID NO: 3241 - DNA, 1185 bp, synthetic construct
  source 1..1185: mol_type = other DNA
atgattatcaatggaaaacgttccctggcacacgttgagaaagtagcgtggataaagccaatcgaaggagccgacaatattgggctgatcggcgtccttggctggacatgcattgccaagataggggagtttaaggagggggaccactgcgtgtacatcgagatcgattcaaaggtgcctgagaaggaatggtccgagttcctgagagctaaaaaattcaaaatcaagacgatgcgcctgggaaagttcaaggtgatctctcagggtctcgccttgcctctggacaagtttgatgtggaaatccctaaaaaagtgggcaccgatgtgaccgagctgctggagattacctattccaatcccaaggacatcaagcggaaaagcgatgggcccaataaatacgaagagatggctaggcgcagaaaggcactgttcaggaagccctgggccaaatggctgatgaaaagggaatgggggaagcgcctcatgtttttcatcttcggtaatgagaaggacggttccaaaagcttcccgaagaagtttgagtacgtgcacaaaaccgaccaagagcggtgcgagaacatgcccgacgtcctcaaggacaagaccccattcatccggacacagaaatgtgagggcagttctggcacattcattctggagctgactaacagcagacttggaaaaagggaatacgagttttatgtatgctcacgcaacttgcgggtctttgaggatgaaaacacggacttttgggatgtggcagttaaatatgacatcgagaacaagctgaaggattatcttgaaaagcacaaggactgctcttatgtcgcctggcagggagaagtctgcggaccaagtattcagaacaacccccacaaactcagcgaaaatcatttgttctgtttccatatgattgacagcgaaaagggcatgtttgacatccgggaggcgaaagagctatgggacgagtacgaaatagaatcggttcctattgatgaggaagagtatatcctcccagatgactttgaggagtttaagctaactgccgatgggttctacgacccggaggtgtgtgaaggccagaagaaatgtcgaagagaaggcttcgtgtactacaagacaactgatcccaacttcagtttcaagaacgtgagccgaaagtacctcttaaagataggcgaatga

SEQ ID NO: 3242 - DNA, 612 bp, synthetic construct
  source 1..612: mol_type = other DNA
atggggaacaaaacgggacttctccccgctaacggccatcgcatccagggtaggtccagcgagagcttcctggacgctcgggaaattatcatggaactaggactggaggggaacgaagtgtttatggacgccggatgtggggacggacacgctgcaatagaggccgtcgacatattggatgatgacgcaacaatctatgccgtagacatctacgagccgtccattgaggaccttcagaaatttgcagttgaaaaggggtacgataatctcatccccatatgcgccgatatcccagattacattgacatcgatgatgatacagtggacatgatcctgctgattaacgtgtggcacggcttcaaggccacccggcgaatggacgaggccatcgaggagctgaagaggatcttaaagcctgggggcaagattgcgatcatggactacaagaagcaggaagcgaaacacggtccccccataactgtgagaagcagtccagaagatctggaagaggtcttcaaagagcatggcatgtgcctgttctcgctcaatccagacaccggcgaggacattcctcaaggcaagtcacactatttgattatctttcagaaatga

SEQ ID NO: 3243 - DNA, 390 bp, synthetic construct
  source 1..390: mol_type = other DNA
atggataacaaaatcaaagccggcattgccctggcgatcatcgtgctcgtggccgtcattggcttttcattcattaacgagagcaacaatgtcgtaaaccaactgtcacccctgaccgagagttttgactactccatggagccgatgacaacttgggatgattctaaaaaggaatactccttcaatcagaacatcagcagtgcaaacggtaaggactacaaggacatcaccatcgacattttgatgtataacgacggaaaatcccttgataagcacaccagcacaataaatagcactaaggacgggtcgttcaatctaaagttcacgcagcggctcgaaggggagccagacgaattttactataatgtgacaaaggctaccgagatatga

SEQ ID NO: 3244 - DNA, 1029 bp, synthetic construct
  source 1..1029: mol_type = other DNA
atgttcaaggtaagcaaaagcatactcatcgtgtgtctggtgtccctgttcctcctggttagccaggcgagcgccgccgactcgaatggcttgagcatccgcgatattaattcagtggatgaaaactacaatctggatgccagttacctggactccctccaggacagtaatggcatgcactccgactccagcctaaacagcaatggcctggacgataagtcaaactatgacaagacttcaatcagtcagaaccagacatcctcgaacctcaaggacaatgatctggataataatgatggagagagcgagattattgaggaggaagctaaagacacggaaggtgtggtgatggctggggacagctacagctgcggtcccgcttcccttgcaactgccctgaaccggctgggcttgaacctgagcctctctgaggtatcccagcataccaacaccagcaaggacggaaccaacatgcaatccttaatcgacgccgcagggtactacaatttcagcgcagtgggagtggagatccaatctaaagacctggcggaaaacagtatagtccacttggacattgatggagctgaacactggactgtcgtgagcaaggtcacggaggagagtgtctttctggccgactcaacaagggggaacatcaatatgagcattgatgagtttaactccctcttcagcggcaaggcaatcctcttaagtgaattgaacaagaccaacgtttcaaatgtgatatcgaacaaaaacattaaggttctggatcagtcccagtgccttaacgttaaggggaaaggctgggtgcgagtgcttgtgggttacaagaccgagtggcggtacggcctgatcaacacatattcatgggtgctaagaccaaaagtcatcaatgggcacgtatcctattctgcctgggaatatgtgaaggtcaaacatcttagttggggaaagtataaggtcaaagtcccgatctacaaatacaagtacatcaaaaaccagtatgaggtgaaaggcaagaagtga

SEQ ID NO: 3245 - DNA, 879 bp, synthetic construct
  source 1..879: mol_type = other DNA
atggaaagcattaacctcctggtagaagccctaccctacattaagaaattctacaacaaaaaggtgatgattaagtatgggggccatgcaatggtcgacgctgacgccatggcttcaacagctcgagatactgtgctccttaaatatgtaggcatgcagcctatcgtggttcatggaggcggtccagagattaccagatccatggaaaaactaggaaaagagccgaaattcatcaaaggccttcgggtcactgatgaagagacaatagacattgtgaagatggtgctcgtggggagcatcaatacagatatcgtctcgcagatatgccaccacgacggcaaaggagcaggcctgtccgggaaggacaacaagcttatccaggccagcaagaccatgcacgagattaaggatgacgacaccggtgagatcgagcagattgatctggggttggtcgggaaggtggacaagatcaacccggagatcctggagatgtataccgaaaatgactacatccccgtgatcgtccccatcggcattgccgaaaacagcaagacgctgaatctcaacgcggatactgtagccggtgccatcgctagtgaagttgatgcagagaaactgataattctgacagacgtgccaggggtcttgagggaccccaacgacccatcaacgctcattcaaaagatccacattgatgaggtgcctcagctgatagaagagggcataatcagtgggggaatgatccctaagatcgagacctgtgttgaagccctgaataatggtgtgaaatccgcgcatattttggatggacgcataaagcacacgttactgatcgagatctttaccaaggacggaatcggcaccatgatctacaagtga

SEQ ID NO: 3246 - DNA, 735 bp, synthetic construct
  source 1..735: mol_type = other DNA
atgagaaaagtgtttgaaagcatcatcgaagctcttaagtacccattccgggattggaaaaacattatcgtaattggctttcttctattaatcgcttctctcggaaggaagctgccttttcccgaggacccccagcagactgttgtgtttataggggccctcctgatacttttcctgcagaccggatacgggtcaaagatcgtgtacagcggcttgaagggggagaacattcctccgaaactacggcccatacccaaactgatttgggaaggttttaaaaagatcatcatcatcatcatctacgtccatattatggtcattttcattagtgtgggaaaaacccagctgagcgctaataatatcccaattgccataatactctttgtgctggggggcggaacttatctcttgatggtggggggtctcttgaaccgctatttccaccacggcaagtttattaaggcattctatctgaaggagatcattgccatcattaagaagatcggcttctgggacatgatatccatcgtcatatgtgccatgatctctcaaacactgacgatctccacattcatcaatctggttaagggcatgttcaccagcattgagctggtgctgtgcatcattgcgttcttcctcgcaccaattgccctcatgtccaccaagcgcctgatctcactgaaccttcgaaggatcttaagttcggacgaagatctggagaaatttgcgttctga

SEQ ID NO: 3247 - DNA, 744 bp, synthetic construct
  source 1..744: mol_type = other DNA
atgggaaaactggatggtaaggtggccatcatcaccggagcaacctccggtatgggtagggaaagtgccaagctcttcgctaaggaaggggctaaagtggttgtctgcggacgaaacgaagaacgggcggccgctgttgtggatgacatcaaggccgctggcggcgaagcgatatacgtgatcgtcgacatggcaaacctggacgaggtgcccaagatctatgaggcaaccatggatgaatacggcacgattgacatcctattcaacaatgcgggggtgctgagcatgtcgccattgatggacctgactcttgaggagtggaacaaggtgtttaatgttaacgtgacatctgccctcgtcctcacacagctgtgcgtacctgtgatgaaggagaagggcaaaggaacaatagtaaatacctgttcagtcgcatcctttggcgctcaccatggcttcgccgcatacgtggatagcaaacacgccatgatgggcctgacccgctccatggcatgggagttaggtcccgagatccggtgtaacggcatcgcccccgggcttatccacacggccatggtggatagcattggcggcccgggagccctgcagaatatgattgaccagtgcccagtcaagagatgcggggaagggcaagacattgccgagctggctctgtttttggccagtgacgagtgtactttcctcgatgggcagattattaaatgcgacgggggattcgagatatga

SEQ ID NO: 3248 - DNA, 1485 bp, synthetic construct
  source 1..1485: mol_type = other DNA
atgctgaacattaccacatttcttgatgctaatgcctgccgcctcgagaaggaggtcttttattatccaaaccgggagctcagatacaattcaaaagagctgctgaccatcgtatcgggcattggacagagcctgaaggataaaaatatagaaaaaggcgaccgagtgctcatctacttgaacaactctcccgaatacctgttcagtctgctggccatatggcggatcggtgcaattgcaatccccaccaacagaatcctaacctctgccgaactggactacatgattagtgattccgacgccaagctgattatcacagacgacgaagcacgagaaaccatcaaggacctcaaaatcaacagttacatcatcgaggactgtgagagctttaaagatagcgaggtcctgcctgccgaggaaaccgagtgggacgacctctgccagctccaatacacctccggcacaactggcaagcccaagggctccatgctcacccacgggaactggttcacggcaatccacaatgcctgtgacgtattgacgtataaggaagatgacactttcctctgcatctaccctatggctcatgttggtattctgtgggcgattgctgcgctgagagccggcgccttatgcattactatggacttctttgagatcaacgagtacttacggctgtgtgaagaggagaaggttagcgtgctctctgggatgccccccgttattcacaccttgacgaacctggaagaggaaaaacgcgagaacctatccacagtcagagagatcatcagcggagggggcccactgcacaggaagatctggaaaaagttcatgggacagtataatatccccatcattaacgcttatgggttgtccgaatcaatcgtcatcggcacaggcactgtaataaggcctgaggactacgctaccgcagaccggtacgaaagcgtcgggcaccctgtgtgcttttccgagctaaagatcgtggatgaggatgatcctaacaaaacactggataaatatgagcatggggagatcgcgctgcgcggaccggccatagccaagggctactggggcatggagaaggaaacaaaggaatcattccttgaagacgggtggttcctcacgggggatatcggttacatcgatgaggacaatcgtttgttcattactgaccggaagaaagacatgattgtgatgagcggatggaagatctatccgaccgaagtggaggaaacccttataaaatacccgaaggtcgatgagattgccattttcagcataaatgacattcataggggagagcttccagtggctgcagtggtgtggaaagaggacgaagatcccgagggactgctggaatactcgagggaatatctggcccgctataaggtgccacggaagatattcactatggatgagctgccacgagtgaatggttggaagcttttacgcagggagcttagagagatgtttagtcagtga

SEQ ID NO: 3249 - DNA, 999 bp, synthetic construct
  source 1..999: mol_type = other DNA
atgataaaaattgcccggattgatggggacggcatcggcaaggaggtgaccgaggcaggcgtggctgttctcgaatccctggacttgaacatcgacttcgtcgaagctgaggcaggtcgagagtgctttgataagaacgggacaaccatccccgaggagaccataaggatcgctcgtaacgccaaggccaccctatttggcgccatcacttccacacctggcgagaaaagcccgattatcaccttacgccaggaattggatacctatgccaacctgaggcccattaaaagcttcaagggggtggactgcctctttgatgatctggacttcctcatcgttagggagaatactgaaggactgtacagcggaaaggaaagactggaagaggataaggccatcgcccaccgggtgattacaagaaaggcgagcgaacggatcagccgcctggcgtttcaagaggccatcaagctgaataaggaatcggtcacttgcgtgcataagtccaatgtgctcaagaaaacggacggcgtattcaaagactcattctacaatgtggcaaaggactatccacagataaaaacaatcgactactacgtggatgcaactgcaatgtaccttttaacgaagccccaggagttcgatgtgatcgtaaccagcaatctctttggcgacatcctgtctgacgctagtgcgggtcttgtaggcggattgggccttgccccaagtggtaacattggagacaagcacgggctcttcgagcctgtgcacggatctgctccagacattgccgggaacaacatctccaaccctattgctatgatcctgtcagttagcatgatgctggaatacctgaatgaggattatctggcaagtaaagtcaaaacggcctgtgaaaatgtcctggagaaggggaaagtcctcacacccgacctaggtggaaacgctaagaccatggatgtggccaacgaagtcattaaagagatagagaaactggactga

SEQ ID NO: 3250 - DNA, 468 bp, synthetic construct
  source 1..468: mol_type = other DNA
atggagaaaagtatagacgagctgattctcgacctgaaggacgaggacgactttgttcgagaagaggccatcggctcacttgaattgaaaggggaggaggccgtctgtcccctcattgaggcgttaggccaaaggaacaaggatattaaaataggagccgcgcaggtgctcgcagctatcggggacaagcgcgccatcccagcacttgtggccacgctgggcgacagaaacaagttggtgcgcagagaagccagcaccgcactgacaaccatgggagatgaagctatcgaacccgtgattgccgagctggacaaccctaaatggcgggtaaggggcgcggcatgctgggtcctgggtgccctggatgctaaggaggctctgccgaagctggaagagctactcaatgatgaaagctccttcgtgcagtacggggccaaggatgctatcaatcggatcaacaatggatga

SEQ ID NO: 3251 - DNA, 363 bp, synthetic construct
  source 1..363: mol_type = other DNA
ttgggcctgtatgagcacgacttgaatgatctcctgaaaagcctggaggacaagggacttgtccactatgagggttcctacgtgcagctgagggatttcgaaggggtaataaacaccgtggacagtaaagaggacgttttaacggcggaactgaatcagaaagagaaaaagtcctttgaaataatcaagtcactcgccgatgagaacaacctcgtgagccgctacgagatcgagggcaatctactctacggcgatctgaagctgacagacttccggatgtaccatatcattctgtctctcgaaaacaagggacttatcgaagcagtctacaagcacaacggggactattacaagattctgtga

SEQ ID NO: 3252 - DNA, 792 bp, synthetic construct
  source 1..792: mol_type = other DNA
atggataaggccaaagtgaacaacatcattttaaactacaacctggagggcgaaggccgaaccatcgtgttcatccacggactctcagacagcctgaactactggcgccccctccaggagagcctcaagggggattaccagaccctgtcattcgacctcagggcgcacggggagtccggtgatgatcggaaagagataaccatcgacctctaccagaaggacctgtattatctgctgaattatttgaacatcgaaaaagcggtactgattggcctctctttgggaggcaatgtggccctggactttgcaatcaaccaccctaagatggttgacggcctgatcataatgtccagtttctcggagttcagcgaccatctcaacgagatatttgacagctttgaagaggccatcgagcagggcttcgaagagttctttgatgtcattctaccatacacgctgcccgaggatgtcctaaagaagcacgaggtggaattggaatacgtgaagaaggaaggggccaagactgccaacattgagggaatcaaagccgggatcaaggcaggatacagtttctccataactgacaaattaaatacaatcgacgctccgacaattgtgattgcaggtgctgacgatgagctgacagacctggagcttcaacggaaaatctatgataatattgacaattctgaaatgatcattcttgaggacaccaagcataatgtccttattgggaaaaatataagcagaatcctggatatcattaacgaatttatgctgaagatcgaatga

SEQ ID NO: 3253 - DNA, 495 bp, synthetic construct
  source 1..495: mol_type = other DNA
atgcgaataagtatgagcctgccaaaaaagctactggcggagttcgatgaagttctgaaggatcggggctaccagtcccgttcaaaagggatacgggacgctctgagcgattacattttaaggtatccctggatgaacgaaatggaagggaaccgcgtaggagtgatcacagtgatctatgaccatcattttacaggagtcatggaaaacctggccgacatccagcatgactgcatggaggagatcaacgccagcatgcacattcacatgacccacaagtactgtatggaggtcatcgtcgtgaacggcaatgtgacgcacatcagagagctcgccgagcgcatgatgaggcttaaaggggtggagcacgtgaagcttaccagtactgcaaatggcgagtcactcgacagagagccgggtttggaacactcccacagccactcgcattctcatctgattttcttcctcaagaatttcttttttctgttctcctga

SEQ ID NO: 3254 - DNA, 936 bp, synthetic construct
  source 1..936: mol_type = other DNA
ttgatcctgatcactctgagcttccttagagactacgagcggctggccgtgtttaaggaagcaattgacgagtttgctatttctaatctggataaggatttggattgttccaactcaaatggcgacattaactcggacgacgataagaagctagactgctctctggcgtacgatctgggctgtggtagcggagtgctcagctatctggcgagcgattacttcgacaagatcatatccattgagcaaaacaggtccattttcaaatgcgccaataagaacttaaagtcgtttgacaacattgaggctataaaccagaacgtgttggattttgacttcgaaaactaccccaaggccgacctcatcatctgcgagatgctggacacggccctaatcgatgaagaggaagtgcctatcctcaaccactcaaagaagtacctcaaggaaaacggaaaaataattccacaggggataataaactcagccgaacccgttttcatgaatatcgattatctccagtacgaggatgacgagtatcagccaatctacgagatccttggcaaaagtgtcatctacagtgagtttgaatttctggacgacattgacgaggacttctcttgtatcatcgagtttgaaatagacgataaatatagcgacaaaaaaacagatgcaagcttcgaagtcgacgatcggtgctccgataaaaccgactacttcaacaagagtaatgataagattaaggtcaatggaattaaactgacaagcttcaccaagctgaacgagaacatcatctgcgggcctactccgatgcttaatcccgctatgctggtgccattcgaagagatcgaggtaaataatggggacaaaatccgaatccgcctctcctatgtgatgggtggcggcgtcgagaccattaaaaccgaagtgttagacgtttga

SEQ ID NO: 3255 - DNA, 525 bp, synthetic construct
  source 1..525: mol_type = other DNA
atgctgaatctggatgagatcagtgagaacatcgacttgtttctcgaggactgcagcagcctgattgtactcgggatcggcaatgacatacggggcgacgacggtctgggcccctacatcatcaaccaactgactgatcttaaagagaatctaagcctaaaggagccacagagcttagaaaacgtccacttgctgaacgggggctcggtccccgagaacttcacagggcttatcaaaaggattgacccatctcatatcataataattgatgccactctcatgaatgaagagccgggatttattaaaatcgtgaacaaagaggacatctccaatgtgagcatttcaacccactccatgtccctgagctatctggtgaagtacctggaaatcgaaatcgacttcaagctcatttttataggaatccagcctaaggacatggacctgaccttcgaattgacggatacaatcaagaacagttcagataccctcgttgatctgctcttctccaagttccttaagatttga

SEQ ID NO: 3256 - DNA, 1140 bp, synthetic construct
  source 1..1140: mol_type = other DNA
atgaaagttctctttatcggttcgagactgtatgatgacctcgcttaccatgtggatgagctgggcatcgagagcataataacagagtcaaacgaggaggcccctcacctcgaccttgcaagcaaatactacattgtccccagaggaatggataagcccatggaggtggccattgaagagaaggtcgatgccattatccctctgatcggcatagaccccccattaaaggacctggccatcatgaaggagaaaatcgaaaaggaaaacaacattccagtgatctcatccaacttcaacgctgtggacatcgcgtccgacaagattaaaaccaaggagttctttaagagcatcgggttgaatgtgccagaggccaaggtcctcaataaggatgacttctccaacgagggggagttcctggagaaactcgggttccagttccccatcgtcctaaagcagggcgaaggacagggcggtaaagacatttgcataacaagtcagtttgaagatgttctccagtactttgaaagcttcaatcaggctctagtggaaaacttcatcgagggggcggaggtgtccattgaagtcatcggatggaatggggaatacttgcctctggtaccggtatacaagggggacactagtctggagggcatccacccgattaagcgactgcgctacggcccttgtgactttgaggcaatcgacaacgaggagttcaggcaattagccaaaaagatcgccgtgaacctgggctctgaaggaaccatcgatatggatcttatctactcaagggaagagaacaaggtctatgcaattgaaataaacacacggccaagcggcaccaggtatctgtcctacgccaccacgggacttagcccactggggctgctggtggacattgccgctggaaactttgatgtgaaagacttggaaaacaaaatcaagcattattacagtctggagatccccataggtgactatgaaggtcctgcacccaatgagcccgttaaggagtatgtaaatggcaatttcattgtgcacggcccgaaagggtatcaacggattactatccgcggaaatacgcgtgaagagacctacgaaattgctaaagagctcactggcaatgattaccggtcttga

SEQ ID NO: 3257 - DNA, 1074 bp, synthetic construct
  source 1..1074: mol_type = other DNA
atggacctgaattatatcatcgtactgtttgtgctcacatttcttgccaccgtggccttcacctactttgtcagacatactctgcgggatgccgacgtgtccgatagcccaattgtcagtgagcacaggcacaaagcagggactcccaccatggggggaatcgctttcctatttgccattctattcattgtgtctatctactaccggaacacaaacatcctcatagcctcctttatcatgctcacaggaggcgtgatgggtcttttggatgacctattaggtcttaagataaaggagtatcaaaaggtcgtgaagaatgtgtccgacagtgttgttcccataggcctgctggacctgggcccaggcgaggaggcacgagtgaccaccgacaaagctaaaaaacaggtgtatggctatgtggatgaaggaaaactggaaattgttgcggaaattccaatcaaatatgagccaagcgaaaagaccaagatcatcgtgcagctcctgcctggcctgttcctggcactgactggggtggtgacgaccctggggggcttcacgttaggcattctggcttacccgatctgcattatcgctattttgggttcaatcaacagtatcaatctcattgacggaatggatggattggcggccggcatcgtggcgattgcctcgttctcatgctgcatttacgcgtacatctgtggaaatatggatatgattcctgccttcgccatcttaactgggatatgccttggatttctggtcttcaaccgctaccccgcaagcatcttcatgggcgacacaggctcctttgtgctcggtacaggatacgccgtggctgtcatcctgggggacattccttacttcggggtgctggctctggccgttccgatcgtaagcgtaataataagcctgatgcacagggcacacattataaacctccccgttgagcccttgcatcacaccttgaactataaggggatctctgaggtcaagatcgtcctgagctattggctcctcacggtcctggtctgtgctatcggcatccttgcaaagctctacatcttcgcctga

SEQ ID NO: 3258 - DNA, 1620 bp, synthetic construct
  source 1..1620: mol_type = other DNA
atgagcaaaacatacttcctgaatgagttggcggatagcatctcctctcagaagaccttctcaatcgctcagctggccgatgccatcggaggcaagatctatggcgccgatgactacaagtctcccaatggttttacaggcatctttgagaccctgaacgaagctgtggagggagacattgtgattaggcattggattaacgggaaaggtgtggaaatcgctaatgacaaaaacgtggcatgcattattaccctaactccaaaggaggacgccctggaaatggcttcaaagctcgccttccccgtgattgtagtggataggatcgaatttgcaaacgcatttgcgctgaagtggactattgataacctttcccctaatactcaaagggtggtgataagtgggacaaacggcaaaagtaccagttcccatctgatttaccacattctgaaccactgcgggtacaacgtcttcacgaatactgatgccaaaagtgaatttaatacactcatcgaccctatggtggctaagctcatctccgagcaggtgatctcgaagcaggacttcgatgttcgcaagctggacagcgtcgccgacctaaagaacctggatagcgagggtaagccgataaataaaggcgcctttgactatatcgttgtggaggtcagtgaggtgcagggctggggaagcgaccttatgaaagatcacgcccaaattatgtcgtcagcaatcaatccggacgtaggggtggtcacaaatgtggccatggaccatatcggcttggtgaacaacatcgaagaggtgttccacgagacgtccgggcttgttaaggctataaacaagggaggagtggtcctgaactacgacgatgagaatgtcctggcgatgaaggatcttgccaacgacggggtcgacatattcttcacgtccatggaaaaggattcaatcctcaacaacgactatgacaatgacaagaaggtttatttcgacagaaaaagcaacgcgatagtgtacgataacaaaaatatcctccgctatgatgagctgccctttaccggagagcacttcatcagaaatattctcagcgcaatttccgcttgtattagcctggagattccaatcgaagacatctgcgaaggggtaaaaacctataatcctttaagccggcggttcacacgtttgtacgatgagccaattgttattgatgacttcgcccacaaccccgacggaatcaaaaacaccgtacgagccgcatatgacttggccgagcagtttgacaagggtgatctgtacatcgcatgtgccatcagaggctcgaggggtgaaaccttaaatggcctgaactcagaggccctggctctggtcatcaaggaactgcgccaccgaaacgacgatgatatcgaaaaggacgaaaatgtcaagaaacgggagatatacctaatcctttctagcagctgtgacctggtcgaccatctcaactacgtggaggactttgagcggggctatatctccttcagcaacttggataaggagcacataaaatacatccatttcaataagctctacggcgctctcgggtacattatgaaaaaatgcatatggaagatgatgctctattgctga

SEQ ID NO: 3259 - DNA, 1854 bp, synthetic construct
  source 1..1854: mol_type = other DNA
atgggggagttcgtgtttagttttttagaggatcaatttcgggacatctatctggactgcgcaaggatggataagaatctcattgagggagacggtgtggagtccattctgatcgcagggaggatcgcggagaagataacaaaagccatctttgtctttgaaggcataaaagataacgaagataatcagtatttgaggatagaaaagctttccaatgccaatatcctgccaaacaacattaaaaacgacctctcccagattcggatactccggaacaacgtctaccacaataccctgaacagtgacggaagcggcgggtttgcttcctacaacgcccccaaatatgttcagagcggagggttgcgcgactataagaccggcttcaatgaaatcaaggaatattctaaaatatctaaacagaactcgaacagcaactcgaactcgagttccaatagcagcccgaataacgagttcggcagtgaattgacggccgcgcgtgaagcccataagcttgtgtttaatgtctgtgtctggttctacgtaaactacagcggcgataaggacttcatccgacccaaatacaagctgagccggagaacccaagatgctgacttcctcatccgactcaagtcagcaatcaacgacggaaacgactttattaaactgcgccaaaacaatccaaacaacgagatcatccagatactcaatgagatttacgtcaagaaggcgcctcaggagcccaaagaggagcaggtctacggcataaacaacaaggatatcaaaatcagacagcctgatgttccttattcaaagtgcttaggcatcagctacgacgatgagctattcatgtggcatgcagagcacggggggaaggacctgggccttttcgagtcttccaaggaagcttatgaggcaagggagatctatatcaattccatcccaatgccccggaaggtgaatggagcctattcaaaggcaagaggcatttcattcagccgcatccagaagctatggagcgccagcgtgaaggggcagattatctcatatcacggaagcgaagctgaagccatcatggctcgaaagaaatacctgaagtctcataacctggtggacattaaggtgaaggacggatacaagacaatcaccctggaagagaaggccaaattggaggagaagattagacaaaagaaggaaagttcaaaatcggatatcaagacaatcccgagcaattccaacacaaaggacgagatggagaaggagaacattcagaagatcatggatggcgtaaagaagcttaaggacgatctgaatgagtctagcgcttctacttacattaagtccagttcactgagctcacagtccagcagctctgattcagtgtcaagttactccggaagcaaatccagttcgctgggttccacttcttctagttctaagtctggttctctgaactcgaaatccacgagcaacgaaaactcctctttttacgacattcacaacatcggttccggagataaaactaaaaagaaagtgaaaattgtgaatggcagcaaagtccaggccagccagaccaccaaaaaagtaaaggtgtcagctggcaaccgcgtttctaaaaaacacaaatccagtagcaagaacagtacggtttccaataatgccaatagttccaaaaagtctaaaagcgtggccattaataagaaaaaatccagtaagtatgagggtgtgttctacgaggacgggctgttcatgtggagtgccgaggtggacggcaagcacctcgggctcttctccagcgaaaaggaagcgtacgaaaaaagggaagagtacattaagaacaagtcaaataataactga

SEQ ID NO: 3260 - DNA, 594 bp, synthetic construct
  source 1..594: mol_type = other DNA
atgagcaagtttaagtactgtcctatgtgcgcagagccacgggccgataattcaaagtactgcagcaaatgcaatttcgaatttctcacgggaaagtatgtgaaagtccaagaggaagagataaaaatcaccgaaaaggtctcccaggaggagtttgtggaatctaaccagctcatccaggacacaagtctgaaaatcaacgtgttgatcagccggtacctcaactattcactaagcaataagttcaatgagaacctgccgctgagtataattcgcgaatacatctccagctgtctgaacagtaaagtgccatctgactttgatgacaactacctccaatccctcgacgcgctgctgaacgatgagggctataaaaattctattaaccttttcctgcagtggatcgacgagaacagatcccatctgcccgggctggtacttaaccagtacatgattccccaccagaacaacgttaataggattgaagagatcctggatttggagttagagaagaatgaggataacgacttgttcttcgaccttctaaataagttcctcatctcggaaaaggagttcatagaacgactgatttga

SEQ ID NO: 3261 - DNA, 189 bp, synthetic construct
  source 1..189: mol_type = other DNA
atgccggtggtccgcattagcggaaacccaaatataagtgtagagaccaagagggagatggtcaagaaagtgagcgaaatcgttgcggaatcctacaacctgcccattgagacaataacggtgctaatcgaggccttcgaacgggaggacatcggcgcagggggcaaactcctgatcgatagagactga

SEQ ID NO: 3262 - DNA, 837 bp, synthetic construct
  source 1..837: mol_type = other DNA
gtgatagagattagtgacaagttctatgacaagacattcaagctgttcagatacaaaaactttgagaacttatgcagcaattgcggcatcttcatagaatttgacgggttcaacgacaaggagctggtggatgatggcggcataacgtacatcatggatatttcaatcaatgataaacgcggatacagcgtaatcatcgaatttcagagttctgtcgtcgatgaggcggatattgaacgctttatgaagtatgccactctcacatacatccagtacaaaaaacccgtggagatctacgtcctctccaccgtggaagagaagaatcgagtgatccgccgacggtggaacttcttcaacgagttcaccatatgtgtcaaatcgctgaagagcatcgatggagacaaagttctgaacagtctcaaaaagaaaagccggttcgacgaggactttactggagatgacattgtcgatttgctgaccattatttttatgaaatccgtaaagaccacggttgagctattgaaggagatctgcctcctggtgaacgaaatcaacgcccttgacgaaaaggaactgtatgacatcaagaccttccttctgatgtatgtgaaaaagttcgtggaggacaagcaagaggcaagaatcctcgaagagttgataggtatgcggaacgacctgtttggcaggacatgggcatccgtgagaaatagggccttccttgaaggggaagctcgtgtggtgaggtgtatgtttaatgaaggtatcaagattgaggagatctctaaaattgttggcctggaggagtcccagatcctaaagatgattgggtcaagctga

SEQ ID NO: 3263 - DNA, 1131 bp, synthetic construct
  source 1..1131: mol_type = other DNA
atgtggtacgacatgaaacgaagacgcttttacttgatcctttttataatcctcttgatcctggccgctatagccatcattggcacattttcaagcttcagtgatgtttccggatacgacctgggaagtgatgacctatccattgccgtgaccggggatgtgatgttcggtcggaagatgcccggcgtcctagattccggcgctagcccattcaggaatgttgaaaacgttacaaagagtgcagacatcctgcttgtaaactttgaaaacccggcgacatattcaaccaacccagtgaaaggggacgtgcctctgaaggccgaccctaaatacgtgcacctgcttgctgaggccaacgagattgtcatcgcctctcaggacaataaccatgcattggattacggggatgaaggcctgaacgacagcatcaaaaacctcaaggatgctggtatctacgtgattggcgctggaaacaatctctctgaggcatctaaacccgtcgtcatcgaaaagggagatagaaaggtaactgttttaaactatatggatgcggataactttgcagaatacgccagcatcatgcccccggccacggctaactcatcaggattctgcgcctatgacagcgagctggcacgtaaacaggtggctgaggcccgcgagaacgaatccagcatagtcattgcctacatgcactatggaaacgagtattcgcggagccccaatgagtatcagatcaacatgtcgcacgaactgatcgacagcggtgcggacattgtgatcgggtcccatgcccacgtgacccagggcgtggagatgtaccacggcaagcctattttctataatttggggaatttcatcttcgaccagtccaatccagctacccaccggtcttacttcctcaacctggacctccatggtgacaattgtacagtgacgctctatccaactgtgatagtgggctacctgccccaattcatggatgccgacagtgccaaggcactgctggcagagctctaccctcagtgcgaccagcttaaggtcaacgatgacggcactgcgcagctgacctttaagttagggaatattaccgataattccacgcaaagtaatgacgtaaggctgtactga

SEQ ID NO: 3264 - DNA, 459 bp, synthetic construct
  source 1..459: mol_type = other DNA
atgctgggtgagatcgaacttaagaaactctttccagactttgaggatctggtgcaacccagcggcatcgatctagagctggatgagatattcatccagaaatcggagggctccctcatagacaatgagaagaacctgcctgatattgaagcgatggaagggcccatctacacgctcaagccccacacagcctatttggcaagcattagacggaaggtcaagattcctaaaggatacacaatgttatatctgccacgaagcaccctgcttaggtcattcatttccgttcagactgccgtgggggacccgggtttctatgggaccctgatgttcatgatctacaaccatggcgacttcgaatacaaaatcaagagtggagaccgcatcgctcaggccgtagtctttccagtggaaggctctggagagtacaacggcagttaccaggaggaggaaatctga

SEQ ID NO: 3265 - DNA, 1146 bp, synthetic construct
  source 1..1146: mol_type = other DNA
ttggtggagataagcattgtgattcccgtctacaacgtggagaagtacttaagggagtgcctggacagcgctgtcaaccagactttcaaagatattgaaataatatgcatcaatgatgggagcaccgacagttccttagatatcctgaaggaataccaggagtctgacgatcggattatcatattcaatcaggaaaatcagggtccaggcgctgcccgtaacctgggcatcaacaaatccaaaggcaaatacgtgtatttcctggattctgacgactatctggaactgaatgccttggaaaagctgtacaatatctgtgaggaaaagtcactggactttgtactcttcaagctgctcaacttcaatgacaaaactgggaaaaccttccaaacaaagtactataatatggccttcctcaacgaccggatcggagataacgtatttagttacaaggacctttacgattgcgtttttaatttggcagtgtccccacccgcgaagctctacaagcgcgagctgatcacagacatcgattacccggaaggcatcatctttgaggacaatgtgttttttctaaagaccctgctcaaggccaaaaggatctacttcctggacgagtttctctacaaccgccgcaggcgggatgactccctgaccagctcagggtcggacgattattacgatattattcctagcatgaattacctctttgacatttgtcgagacctggatgacttcgaactcctgaaggaaggattgtactataaaaagttcaaggagctttatattagattctccaaggtcaatgacgttcataaagaggagtttttcaacctaatcagagaggactgcctaaagcacaaggaagagatcgatgaggacatagccaacgataagctgaggaagcgaagcaagttcatctatgagtctgtgcttagctcagatgactataaggagtttcactatcggatcagactgtatgataagaacaaagagattaacgacctgaaaaaggaaaacaagtcgcttaaaaacgagaacaaaaagcttaaaagttccaacaaaaagctcaaaaaggaaaacaagcacttcaagagtacgaaggcatacaaggtctggaaaaaatattctaaaatcaaagactga

SEQ ID NO: 3266 - DNA, 987 bp, synthetic construct
  source 1..987: mol_type = other DNA
atggtcgagatcaccctgggtcttccaaaggggagcctcaacaatgtaaacagaggcaacacatatcaattattcgtggatgcaggttatgaggtgagaggatacgaacccggaaacgagtcctacgaaataaacattctgaacgacagtgagatcaaagccttcctgacacgcccacagtcgactccggtggagcttaacaggggcatggtggatatttccatcgttggcgaggactgggttaaagaggagtccgtcctgagcgataacgacatcgttaaaatcggggacctgaattacggcgaaacgcggctgatcgtggcgattccgaaagaatctccttacgacagtctgagcgaattttttcgggccaatgctgatcgagagcgccccattctggtgttcacagaataccccaacctcacccgaaagcacatcatggaaaacgaggcgtaccaggagatctatggggatgccgtgcccttcgtccaggtgaggggactgagggacggcgacaataagaaggtgcaagtgattaacagtgacggagccactgaagtctacatcgccaaaggggctgacctgatcgtggacaacacccagacaggaagcagcttgagaaaggccgggctcaaggagcttgagaccatattgcactccagcgctggcctctatgccggcgtctcatgtaccgaagagaagatggtaaaggctaaaatgatttatgaacagctgctaggtgcagtgacggcccgcaaatactttgacgtcaagttcaatatagcaaatgaggatattgagaaggtgtcgaattatctaatcgagaacaagttctgcagtcatgagccaactgtaaatcacggctcaagcttttcccagatcaatgttctcattcctaaaaacatcttccctgaaatgctcgatgggatcaaggaattgggagcatcctcaatcatacggagcgatgtcaagcagtacgtgatttga

SEQ ID NO: 3267 - DNA, 1224 bp, synthetic construct
  source 1..1224: mol_type = other DNA
atgaaaattacagtggcgggtgtaggttatgtagggctcagcctggccgtgctgctcgcccaaaaacacgatgtgactgccatcaccacgaccgagtcaaaggccgaaatgctaaaccagttcataagtcccatccaggacgatgagatagaacggttcttcaaggaggtgcgggaaggcgagagaaccctgaatctccacacgacaactgataaagctgccgcttatggggatgcggatctggttatcatcgccactcctacaaactatgacgacgtgggcaatttctttgacacctccgcggttgaggacgccatcgagtggaccctgaaagtgaatcctgatgtccttatggtcatcaagagcacgattcccgtcggctacacagaatcggtccgggagaagtacgggattagaaacatcatcttcagcccggaatttctgcgtgagtcaaaggctctctacgacaacctccatccaagcaggattgtggtcggctgcgacgacgaccagatggaagagggtcagatgtttgcagatctgttgctggagggcgctagagaagaggagaaacgcgcaaactccctggaacaggacatcccaatattgcttacacacctgaccgaaagcgaggccatcaagctgttcgcaaacacttaccttgccgtgagggttagctacttcaatgagctagacacgtacgcccagaccaaaggccttgacacccagatgattattgacggagtgtgcatggacccgcggatcggaggccattacaacaacccctccttcgggtatggcgggtactgcttgcccaaggatacaaaacagctcttggccaattataaggatgtgcctcaaaccatgatcgaagcagttgtgcacagtaactcagtccgcaaggagtttattgctaatcagattatttccaggaaccccaagactgttggggtctacagactgaccatgaagtcgaacagcgacaatttccgagcaagcgcaatacaagatgtgatgaaatccatcaaggctgagggaatcccaatcattatctatgagccaaccttagatgatggaagtgaatttagcaggtccgaagtggtaaatgacattgagcgattcaaacgagagagtgacataatcctggctaaccgcttagactgtgatgtcctgggagatgtggccgagaaggtgtacacacgcgacctctttcgccgggactga

SEQ ID NO: 3268 - DNA, 927 bp, synthetic construct
  source 1..927: mol_type = other DNA
atgctgacatccgttcagaaggagatactccaaactttaattaacctgtaccagaacagtgatggcaagtccatcaagggagaggacattgctgaggtgatgaatagaaaccccggaaccatccgtaaccagatgcagtcacttagaagcctgagtttggtgaaaggggtcccaggaccacgcggtggctacaagccaaccattgaagcgtatcataacctcaacatttctgtaagcgactccaacgccaaggttcccgtatataaagaaaacaaaaaaatggacgacgtttcggtggccaagattgaatttacaagcgtgccccaccccggggagtgcgaggccgtaattaaggtcctcgggagcattaaggatctccatctgggcgacgtgatccgcgtcggtccgacccctgtgaacaatctggggcttatcggcgagatcgtcggacgagacgatatggacaatatcctcctactggatatcagcacaattcggagcatccctaaaaacactgtgttcgacatcgcatccctggacctgatttacctaaagccaggagattcaatcaaggacgccgcatacctcttgtcccacaatcagatcgatggcgctcctgtgataaccgagggggtggccataggcatggtgtcattaattgatatcgtcaacgccttggcggaaggtaaggaaaatgaggacgtccgggacatcatgtctaaaaggctgttctttatcaataaggacacactgatagccaatgcagtctacaaaatgtacaaattcggcatcagtaggctgatagtggttgatgacgagcacgctcccatcggcgtggtgactcggacggatcttatcgaaaccattacgaactttaagaatttcccgctgctgtataacatggagatggatgaggaaatggagtga

SEQ ID NO: 3269 - DNA, 936 bp, synthetic construct
  source 1..936: mol_type = other DNA
atgaaagtgaatcagattagcatcaaaaaagatatgaaggtaagcgaactcatggaggagtttaagggttctggcgtacttggggctggccgcgtggcgcgggcgtccaatctgctggtcaacatgataaacgaccccgatatggacatcttcatgagcatggcagggcctttggtgccaggaggacttagatacatcgtcggcgacctcattcgaaacaaacggatcaaggtgctgatcaccagcggcgctaacattacccacgacctgctggagtcctttggaggtaggcattaccgggacttggggtttaatgatgaggaactgaacgacgccggaattggcagaatctctgatgtttacacccagagtgaggactttgaagtcttcgagagcgagataattaagattttcgagacaatctccaaaaagatcgataacgataaggataacggaatcatatcgattcagaggctgctgaaagaagtgggttccctgatagaggacgagaactccattctacgtctcgcttatgaaaatgacgtttccatatttgcgcccgggctgatcgacagcatgttcggcctccagttatggatgttcacccaagaccacaagctggtcgtggacgctgtgggagacatgcattacctctcggaccttgttttcgaatcagataagatcggggccattatgttgggaggcggcctgcccaagcactatacacttgcaagtaacctactcaagggcgggatcgattcaggcctccagatcactatggaccgcccggaaacgggtagcttaagtggcgcccctctggaggaggccaaatcatggagtaaggccaagcacgggtctaatctggtgacagtggtcggggatgcaactgccctgttcccactcatctatgcagccgccttggataaaatcgactga

SEQ ID NO: 3270 - DNA, 540 bp, synthetic construct
  source 1..540: mol_type = other DNA
ttgtttaacccgataatcgcactatcatacatctcttccggtttcttcatgaaaatcagcgacgatgagtatgatgagaagaacaacaaaatcctggccatcatcttcggaatcgtctgcggggcgttcacggctctggcatcgagtatgagcacagatgctgcctgcatattcattgcgatactcattggcaacatcctggcccagaaggtggacggcatccaccatgtcgttaccatgctctcctttttgattgtgctggtctttctcggcctccccgccttcagtcgcccatccattctggtcgtaatgatttgtgtggctggcgccctaatcgatgagaagggaaatgacaatgagatcctctatgaaaaaagcaagttcctgatgtacttctttgactacaggttcgcccttaaagtggttattcttgccctggctctgtttgggctggtggacatttggacctttgtgtacttcttatgctttgagatcgcatatgaaatagcacgggtgctttttgaaaagttcatcctgtga

SEQ ID NO: 3271 - DNA, 648 bp, synthetic construct
  source 1..648: mol_type = other DNA
atgaaagtcaaaaacaatattatcctggctatggacctgatggatctggcatcggccgaatcagtctgcgagagtatcaaccagtacatcgacacgataaagatagggtatcccctcacactggcagagggacttaagacaatcgggctctttaaggagaactttggctacaaagttatctgcgattataaagtggcggatattccagccaccaatgaaaagatcgcaaacctcaccttcgatgccggtgccgatgcaatcatctgccatggctttgtgggcccggacagcgtggaggcctgtaaggccagtgctgaagaccacggtaaggaggtattcctgctaaccgagatgagccaccctggagccatcaggttcttacagaaggatgccgacgatattgcccggatgggcgtggaaatgggaatctccaattacgtggctccctccacacgccccgacagactgagcgagattcgagacatagtggggaaggacagcttcatcatatctccaggggtcggcacccaagggggagaccctaaagagacgttgaaatatagcaacgctcttattattggccggtccatctacaacgcggaggacccagaaactgctactaaggacattattgattcaatccagtga

SEQ ID NO: 3272 - DNA, 771 bp, synthetic construct
  source 1..771: mol_type = other DNA
atgatttttgcagccatcctggccggcggggtgggaaacagaatgggcgaggtggataagccaaagcagtttctaaccctgggagacaagcctatccttatccagaccgttgagaagttttacctcaacagccgcatcgacgaagttattgttctgtgtcacaagtattggctgaaccatacaaaagacttgattgaagattacattccaaatgcagaaaacattgtggtggtcgaagggggtgagctgcgcaacgacactatcatgaatgctgtgaaatatatcgaggacaatcacgagctgtccgaagatgacatcatcataacgcacgactctgtacggccctttgtgacccataggatcattatggaaaacatcgagaagacccaggaagtgggggcatgcgatacggtgattcccgctacagatacaatcgtggtctgccacgacggcaatatcatcagcgacattcctaaccggaattacatgtaccaaggccagactccccagtcgttcaaaatattgaagctgaaagaatgcttcaacaagctctcagatgaggataaacgaagcttatccgacgccgccaagatcttcgtcctcaatggagaggaggtggcgatagtcaagggggaggtattcaacataaagatcacctatccgtacgacctgaaagtggcgaacacaataattgacgatgccaaactcaatatcagtgatgccgagactggcgagtacaaggtcaacctttatgacttcggtgaggaatga

SEQ ID NO: 3273 - DNA, 1023 bp, synthetic construct
  source 1..1023: mol_type = other DNA
gtgattaacatagtctatcgcctggtggcgcctaagctcctggaggaagtttatacagagctcaacctggacgttggagtaatcgtaaggcctaaatatctctcaatctgcaaagcggatcaacggtactactacggtaagagagtcccagagatcatcgaaagcaagctgcccatggcactgatccacgaggccgtgggcactgttgtcaaggacaacacaggcaaattcaatgtgggggacaacgtggtgatgattcccaacattccccgggcccgcgacaatataataagcgagaactacatcccgtccagcaagttcagatccagcggctacgacggcttcatggaagagtacgtgtctctcacagaagacaggctggtcaagcttcccgacgacctgaacatggaagtggcttcttttatcgagctgatttcggtggccacacactcaatcaagcgattcaagcagttctcccaccagaagaaagacgtgctaggagtctggggggacggcagttttggatacattacgtccctggttcttaaggtgatgtttccagagagcaaggtctatgtcttcgggatgcaccgtgaaaagctgcatatgtttacgttcgtggatgaaaccttcctggtggatgagatcccagataatgtgagtgtggatcatgcctttgagtgtgtggggaaagccagcgcaaacaacgcaatcaaccagatcatcgacataatcaatccggagggcaccatcgctctattgggcgttagtgagttcaatgtatccattgatacccggaccatcttggaaaagggaattagagtattcggtaccaaccggagcgcccgcgaagactttgtgtctgtggtcaatctcctcgaggaaaatcctaatatgatccactatcttgagtcgttgattactgagattgttgaagtgaacaccttaaatgatattaaaagggcttttgagtcagataaaaacctgcgattcgggaaaactgtcataaaatgggagatctga

SEQ ID NO: 3274 - DNA, 1011 bp, synthetic construct
  source 1..1011: mol_type = other DNA
atgcatgagtacgagatcagtattataatcccaacctataatagctcaaagaccatcgaacggaccattcacagtatattaacacaggattttaaaaactatgagatggtgtttgtggatgatgcaagcaatgacgatacagtaagctgtatccaagaaaccctggcggacaaaaaggtcaattatcagcttattgtcaataagaacaacaaggggcccgcctactgccggaacaggggcgtgttcgctagccgcgggaagtatatcgtcttcgtggacagcgacgacctcatccaattcaaccatatttcctcgctgcacaattacgtgaaatcagacaatttcgactccgccttcactaaaggaatcaagataaataaccaggacgagcttatagacttcaaagtggataagtacgacggcctgatccacttggctcgtaaaaacaaggggatcgtgcgggccaaggatctgatcaatctcgagctgcttatgaaaattccgttttccttcgtcctcctgatttacgacaaggagatcatcctcaacaattccctagaatttaacgaagactatagatatggtgaggacactgacttcgccctgaggtacctggcaaactgcggcaacgttcgggtgattgataaatacacgtacttttactaccaggaggaggattctatcagcagacaggtctcgctcgataggttcgaaagcgtaaagctgttcgagagtctggactcctatttcaaagaagatgacctgcgagagaagctcgtgcactcaagaatccctcgctttattttcggcaacatgaactacttcttctacaatggatacaacagcgaagatgtgtttaaaaagatggatgttcttgacttatttaacaagctccgccagtttaaggtgtttgagaaacgagactggaagttctacctgaaggttaggttgttcctgttgaaccacagactgtattataagctgtggttgcgctttaaaaacaatctatga

SEQ ID NO: 3275 - DNA, 213 bp, synthetic construct
  source 1..213: mol_type = other DNA
gtgaatgatctcaaaaagctgtatgtcttgcttgcaatcctgattgtgatatacgtaggaataaacttttcctacaacgggctggacaccatcaacacactaactcatgtgaacctggacctcggccccagcatggacaatgcgaacgatgccaatcacattaagatcggcagcagttcattcacgaagctgagcaaaatcttcacctggtga

SEQ ID NO: 3276 - DNA, 1008 bp, synthetic construct
  source 1..1008: mol_type = other DNA
atgaccaagattctggtgactggcggagcagggtttatcggtagtaactttataaagtatatgctggataagtaccctgattacgaaatagtgaatctcgatgctttgacttactgtggaaaccttgaaaatcttgaggatattgaagataatccgaattactccttcgtgaagggaaatatcatggatgaaggtctggttgatgttgtggtgagcagcgtagactacattgtcaatttcgccgctgagagccatgtggaccgcagcattgaagatccgcagatcttcatcaagtccaatatcatcgggacgcaggtattgctggatgccgcctataaataccagatcaaaaagttcctgcaggtctccaccgacgaggtgtacggctccctgggccccgaaggctatttcaccgagacaactcccctccaggcgaacagtccatatagtgcgtcaaaggccggcgccgacctcatggtgcgggcttatggggaaaccttcgacctgccaatcaacattacaagatgctcgaacaactatggcccctaccagttccctgagaagctcatccctctgatgatttctaacgcattggaggataaggagcttcccatatacggtgacgggaaaaacattagggactggttacatgtctacgaccactgctcagcaatcgacctagtcctccacaaagggaagattggagaggtctacaatatagggggccacaacgagaagcagaacatcgaaatagtgaaactgattctcaaggagctgaacaagccagagagcctgatcaaatttgtgaaagaccgactaggacacgaccggcgctatgccatcgactcaagcaagatcacggaagagttaggctggaaacccaagtacacctttgagacaggaatcgtggagacaatccactggtatctggacaaccaagactggatggaaaaggttaaatccggcgagtaccaagagtattacgaaaagatgtactctaaaaaatga

SEQ ID NO: 3277 - DNA, 564 bp, synthetic construct
  source 1..564: mol_type = other DNA
atgggcaagtttaagatcgtgaagagtgaaatcgagggggtctttaccgttgaacctaccgtgtttgaagacgagaggggctacttcatggagacctacaatgagaacgacttcaaggcagaggggattgacctgaccttcgttcaggacaaccagtcaaagagctccaaaggtgtccttcgcggtctccacttccaatatacgcagcctcagggaaagctggtgcgggtgatcaaaggggaggtcttcgacgtgggagtggatctaagaaaggacagccccacatatggcaagtgggtaggggagatcctctccgaggaaaacaaaaaacagctgttcatcccaaaaggctttgcccatggctttttagtcctgagcgatgaggcggaatttgtgtacaagtgcacagacttctacaaaggagacgatgaggggggcatccaatggaacgatcccgaaataggaattaagtggccattgggcaatctgaaggaggaagatataattctgtcggaaaaggacaaactctggaagccgatgaaagagactcccactgatttctga

SEQ ID NO: 3278 - DNA, 873 bp, synthetic construct
  source 1..873: mol_type = other DNA
atgaagggcattgtactggctggagggtctggaacaaggctgtacccaatcacaaaagcggtgtcgaagcagttgctgcctttgtacgataagccaatgatctattatcccatttcagtgcttatgcttgccggaattaaagagatactgataatctccacgccaagggatctgcctatgtacaaggaacttctcggggacggtgagaacctgggcataagcttctcatacgaagcacaggagaaccccaacggtctcgccgaggcttttataatcggcgagaagttcatcggggacgataacgtagctctgattttaggcgacaacgtcttccacggacatcgctttagtgaaattctgaagagagccatgaacctggaagaaggcgccgtgattttcggttattacactcagaatcccgaatcctttggcgtcgtggaatttgatgatgagtggaacgtgttatccgttgaggaaaaacccaagaacccgaaaagcaattacattatcccaggcctatacttctatgacaatgacgtgatcgagatcgcgaaaaatgtgaagcccagcttccgaggtgaaaaagagatcaccagtgtgaacgacgagtatctgaagcggggaaaactcaaggtcgagcttctggggcggggcatggcttggctggacaccggaacccacgacggcttgctcgaggccgcaaactttatcgagaccatccagaaacgccagagcgtttatgtcgcatgcctcgaagagatcgcattcatcaatgggtacattccgaaggagaagctgctcgaactagccgagcctttgaagaagactaattacgggcaatacctcatcaagctggccaaaatgaagaaatga

SEQ ID NO: 3279 - DNA, 1482 bp, synthetic construct
  source 1..1482: mol_type = other DNA
atgaaccgcttttggaacgacctcatcctgccacttttctacgagttcaagcccgaagtcattgtggagatcgggtgtttcaaaggcgaaaacacaaagaacatcctggaatactgctactacaccaacagcaagctgaaagtgatcgatcccaatcctgatagcagctttgaccccatctccctgaagaataagtatggcgacaagttcgaatttctcaaggaactgagtctgaacgggcttaacctgatcgaggattatgacgccgtccttattgatggcgaccacaactggtataccgtgtataacgagcttaaattaattgagaaacgattcgatcagaataatttcccgctaatcatcttccatgacgtgtcatggccatatgctcggagagacctttattataatccagaacttatccctgaggaatttcgccacccttacaagaatttggctatgtttccagacaaaaatgagttgggagatatcggtctgaatccgacttttaacaacgcagtgtttgagaacacgcctaagaacggagtcctgacagccatcgaggacttcctggatgaaactaatctgaatctgtccttcttctgcctgaacgcattctacggattcggggttttgttccccagtcagagctgtgatgaaaaaacaatattgcaaatcttttacgatagtgatgtgatagggcttttagagaagacttacctcaaactgcggtttacgcaggagcacattattaagaataagaatatcgaaatcaacaacctgaaagacatgaataacagcctgaacaaaaagaatattgacctgactggcatcaattctaatctggagaaagagctagacaaactcaacaacaccaagacagagatcgaaaaggagctcgacaaactaaacaacaccaacattgacctgaaagaaaagctcatcatctcaaccaataaccagaaggagctcgagaagctactggataacctcaaggatgacaagacctacctcgagaacgagctgaaggatttaaacaacaccaaaaccgagatagagaaggaactcaacaaggttacaaacgataagaccaacctgaagatcgagctgaacaacatcaacaacacgaacatagagctcgagaagatagtagatgacctgtgcaatgagaagtcctccctgaaaaataagattaatgatctcgaatacgcgaatcagaggaccctgaagactatcgagaatttgaacggcgacatttactcaaagacatatgaaaacgacagcctgaaagaagacaacttgctcctgacgaagacaaataaagactttctcgaggacattaagaatttaaacaatcttaactacgacttggagcaaaaaatattgaatctcgaggaagaaaagaactctattctgtcgtccaaaacctggaagttcggtgccccctttaggaaaattagcaatattttcaataaaaattga

SEQ ID NO: 3280 - DNA, 1521 bp, synthetic construct
  source 1..1521: mol_type = other DNA
atgacgtacaaggtgagtatcatcatcccagtatataatgccgcagagtttattattcgagacacgctcaaatccattgaaaatcaaacaatggatttcgaggatattgaagtgatcctggtgaatgactgctcaaccgataacacagcgaaagtgatcaatgaatacgctaaagagcacgagaacattgtgccaatcaacctgaaagagaacaacggtcagccgggcattccccggaacatcgggattacctatgccagcgccgactatcttatgtttcttgaccaggacgatacctttaagaagaacgcctgcgaaactttgtacaataaaatatcaacggagaatgttgacatggtctgtggtaaccacaacatcgtaagcaatggccggtcgaacatttgcttcaacttcgattgggccgaggaggatgagattaagatcaataagattgacgagaaccccaacttcctcactatgggagtggccgcgtggtctaagatccttagaagggagtttgtcttggacaataatctgaaattcaccgaaggcgttggggaagacatcttcttctccatcagggcattgttactggcagaaggaattattctgcttaagaatttcatcgtggtggattacctcgtgcgtggggagtccctgtcacaccaggtcaacgcagaatatctggatgagttttgcgagttttacctgaacttctttaattactgtgagaagaacattaagaacgacaatttataccaccctctgttcaacggcaggctgaaccatgtcctctccatgctgttcttcgctgatctgtactttgatgacctctcttgggtcctgatcaagattcatgaattgtttaagaaggtggctgagaagccattcgtgtttgaggacacctcttaccggatcttctttgacacactgataaaggacgagtatcctttcgaaaatagcatcaatatctacagcgccattaaaagtaatagggagcgcaagtttgacaagggagtaaaatatctagaacaggaggccaagctctacatcgacaacgggaacggattcaacgaaaaggatagtatcatcgccaactacaagatctatgagttcaatgaggttgagtttaacctagagaacttcaaaaacattaaacgaatccgcttcgaccccatcacttggaattttattaattgtgtcattcacgagataaaaacaaacaatggcgacctgctctacgaagctataaactccatcaaccgcagagaattgtatgggctaaataaggaagaacaatcaagcaacagaaatagcaaagagaatatacggtataaaagctccgatgattcttcggctgagggcatcgcggacatattcctgaccaccgatagtcagtaccttctgtacggcgacttcaacaacctcaagtccatcaaaataaactttgaagtcaacctcatcgataataacgaggtgagcaagatcgtggagaatctgatagaaaactatgaccattga

SEQ ID NO: 3281 - DNA, 1704 bp, synthetic construct
  source 1..1704: mol_type = other DNA
atgagtataaagaataaattcctctctctgttcaactcatcatcgaataactccgattttgagaatctgaataactactacaagaaagtgctagaggacattgagaacgaggatatatcgggctatgatcgaaacctgaagtattacaacgacctgaaggactgtgagcttttttcctcggaatactatataaccaaccagggtctggagctttcagaggaatacgctttggcccactacctcaacgaagggtataagcaaagccggaatccaagccctgagtttaacaatgacaaatacctcagattataccccgacgttcgcctagcgagccttaacccgctcgcccattacgtgctgtatggagaaaaggagggccggcggttgcctctgagcgaatatgaagaactggagaacgagatagtgtctgtaaagaatctgatttaccagaacagggtgaccgacaacctggtcttgcttcgggataaagtgtccaaaggcaagaaagtcaacgtggtgttcgtgttacctgcaatgatgtttgtatacaaagacctgtacaactattttgacaacgacgatatgttcaacgttcagatcgtgttggttccccaccgactggggaacagtcaaaagattaccgatgtggccaaagataagcactatcagattttcagctacctcaaggaaaaacagtacaatgtgattgatggctacgacttcgagaagaatgagggcatcgatctcgtctcaacttgcaatccagatatcatcttctacgtcttgccttacatgaggatcttcccgaagacgatgaagatcagcaatctcccatccaacatactctatgcttacatcccatacggggaatttgtggaagacaacctggacgatctgttctttaatttcggatggaacgagatcgcttggaaaattttctgttccaccgaagagtacctgattaactctacggaaaagtccattgtcgggtcaagtaatgtagtcctggcaggttctgcgaggatggacagcctgatcaattttgaggagtctgacgaggactacaagtggatctacagcaaagaggagaataagaagagaatcatctgggctccccaccatacactggcaagacccggtatggatgacagcctgtcctattccacattcgatgagaactttgaatttttctacaactacgccaaggaccaccccgacatcgagtgggttattaggccccaccccctgcttaaggaagtgctcagtaacatcaacacaaacatgcgcgtgcagggaatcgccgacgaaaactttgcggacgattatttcttcaagtgggagagtctgcctaacgcccgcttccatgaggaaattgactatttcgacctcttcgccactgccgatgcaatgatcaccgattgcatcagcttcaaagcagaatatctgtttgctaacaagccaggcttgatcttaaataaaacaggagtggaacttgacggctatcagggagagattactgatgcctggtataattgcgatgggagcgactttgagaagatagaggaatttatcgaggacgttgtagtggggggaaatgattacctaaaggagaaacgtgaggaaatcttcaacaaaaacttcaatgtcaatctcggcagtgcctccaaagtcatttttgactatattaagaatgagctgacctga

SEQ ID NO: 3282 - DNA, 3039 bp, synthetic construct
  source 1..3039: mol_type = other DNA
atgaaaaagaacaactttaataaaaagatcactttcgtcgctaattacttttggactagcatcaaggaaggtagcaagtccaactcttactttaattacgataactacctaaaaaaataccctgatgtcaaggaatctggcatgaaccccttcaaacactatctgctgcacggcatcgatgaagagcgctccacgaactttgacgagaatatcaattcatactccctggtggaaaattccgatctgtttgactacgagtattactgtgaaaaaaacaacctgaaatttgactcctatagtaaagcattgatgcattaccttgagaagggatataagaagggctacaacccaagtataaagttcaatgccgaagaatactacgaggtgcgtcctgatgtgaaacgagctgatgtaaaccccctcgttcactacttgaagtatggaaaaattgaagtaacctcaatgaccgagaacctgaaccttaaagagtaccagctcgtgaaaaattcgaacctgttcgactataactattacatggagaagaatcacctggacctccggaacgaaaccgaggcaatctatcattatttggagattggatacaaaaagggatataacccgagcaacaagttcaatggggaaatttacttcaagaaaaatccggatattgaggagagcggctggaacccccttgttcattacctgaaatacggccagaaggaagagcgcaccgataagtgcgacaagaacctgaaggaatacagcctggtgaaggaatcgggcctgttcgactatcaattttataaagacaaatacgatctggatttaaactcctacaagcgcgggttaatccactatctggagttcggttacaaaagaggatacaaaccaagccgaaatttcgacggggaggagtaccttaagcgctaccctgaggtgaagaaagccggattcaatccattggtccactatttgaagtacggggtgaatgaggaaagaataggcctgagaagaataagctttaaaaatttcaacaagaactacgatgttgaggccatcctggagaatatagataatgacgttacaatcctcctgaacgttgaggactccaacaacctgaaggagtgtattgagaacattaagagcaccacgaaagactacaagattatcctcatccacgagaaccttgacgacgaggacctggagtatataaagtccaacaacgacatagagcttttgcggaggagcccccacgagtcattcatcaatgccctcaacaatatactggacaacgccaagaatgacatcatctttcttaagaataacatcagaacctttgagaagtggattttcaaactgaccgtggccgcatacagtgatgaccgcatcggattcgtgagccctatttcaaattatagcactgtgagcctaataaacatcgaagaagacgagaagtcgagcgagtttataagtaacatctcaaagcgggattatgaagagtctccgctgccaaatgactcttgtgtctttataaaaaaggatgtctttaaggagctgaagttcgatgaaagctccaacgaggagaattggttcgctacattcatagacagaggcttggagaagggatggaagtccatcttggacgatagcacctacgtgtactaccagttcaatgaggtagagccccagcaagcagacgagtatgactattccacgccctacgtcctcgaaaataggccctcagtgaagttcatcaactctgatgcatttaacaacagcttccagaatatccatgagtatgctgatgataatcttgaagagaatatccaagagaagaccaggaagaacatcctatttgctatgcattatgggggaggcgtggaatttacagtgaaggatatcgttaatgcgatcaaaaatgactacgagtgttacgtgctgcgagccttcaagaacaagatgaagttgtataaagtgttcaacgactattttattagcatcaaggaatttaacatcaaatatccttggactcccaagatgatccacagtgacgagtacaaacagatttacttctatatcctcattaactacaacattgacattctggaaatcgatcatctgctgctgcacacatttgacctccaggagcttgcaaaaaaactggatatcccaatcatcctaaccttgcacgatttttattacatttgcccctcatacttcctcctcgatgaaaacaacaaatattgcggtggttactgtggggatcagcctcggaactgcagtaccagggtcacttggatcgatctccctgccaacatcgtcgaatggaagaatcaatggcaggaatatatgaaagaactcttcggcatgtgcgactacatcctcactgccacagactttactaaggacatgttcctggagcactacgacagtttaaagagtgacgacatcaccattatagagcacgggcgtgacctgattcggtacgacaataactatacagtgccaaacatttaccagccgattaagatcctcatccctggcgtgattgggccccataagggcttagatttcatcaaagaactcaaaggcttcgatgacgacaatcgcctggaataccacttcatcggccaggtggatgatgaactcaaaagcatgggcatttatcatggtccatacgagcgggaagacttcgcgaagtgggtgtttaaaattaagccaagcttcatcggaatcttctcggtctgcgccgagacatactcccacacactgaccgaatccatatgctctggggtccccgtgttagcctcgaaccttggtgctctgaagacgaggatcgagagccaggggggagggtggctggtcaatattgacgacgcggaagagacatatgaacagattctggatatttccagtaagaaagaggagtataaatttgtaacggagaacctcaaggacatcaggatttccagttcagaagagatgggcagcaagtacaaggagatttatgacaagctaaccaagaaggaagataaatga

SEQ ID NO: 3283 - DNA, 801 bp, synthetic construct
  source 1..801: mol_type = other DNA
atggaatttataaaatacaaatcgcagttcgaaaaaatgattgacaataagatcatcggtatgccggagttgatcgactccaatataagctttaaaggtaaaaataacatcctctgttgcaacaacatcaagctggaaaatatagacatcgatttcaatggcaataacagcgtgatcttcctagggagcaatctaggcgtcaatagtcacttaacaatttttaataactccacactgttcctgggcaagaacaacacctgcggatcgagcatttccatttccgtggcagagaatcagaaccttatcattggagacaactgcatcgtggaaagtgatgtaaagatccgcacttcagacaattacccaatctacaactatgaaaacagtaggattaaccactcaaatagcgtttttataggggataacgtgctgctcggggagtctagcttcatttccagaggcgttaaaattggctccggcagcataatcagcccatgtagttttctgccccctctgtttaaggccttctctaactcatatgtcctcgggaatcccggacggatcttgaaggaagacgtgtactttgtgaatgatagcatcaacgattataccatcgaggagattaaaaactcctcaatcaatgagaacgagagtggactgtttgatttcgtcgaaaaagagacgctgagccttgacaagattgacaacatcctcaagaagttcaacagcgaggactctctcgacttcattcaaaagctgttcctgcagaacaagcataagaaccgattcttcatcgagtga

SEQ ID NO: 3284 - DNA, 1326 bp, synthetic construct
  source 1..1326: mol_type = other DNA
atgaagaagccaaaaaccaaggcgcagaaggaaagccgagagaagaagcccaataaccttaaaagtgattgtatgaagaaaattttgtacgtcctgcactctggcgtgacaggtggcactttcctgacaaacaaggacttgatgaaaaatgtggagaaggaatttgacgtgtatttgctgagtgctgaaaacaagttcctgaagctctttagcttctccaacaacaagttaaaactcattcggaaatatcacagaaattacggaatcaacgtagaaaccgaagagacggagacaaacaacatctcatggagcgcaaaggacttccacaattcctggctaagcaacatctatttcgaaatactggtgaattacaacattgacattgtccacattagacacttgatcaaccatagtttcgacctcccgcaggttgccgaaaagctgaacataccaattgttctttccctacacgacttctacttcctttgtccattttacaccctcttagatgagaactacaattactgcgcaggtgagtgttctcacaacaagaaaaactgctattgtcctatggacagcctgagcgacataaattccaaagagtttatctcagaatggcgggtgaacgtgctgaaaatgttcaattacataaacgtcttcgtcaccacgtccttttttgtcaaggatctgttcctgtccatctactcgaatgaggatatcatcaacaacaacaactttaaggttattgaacatggcagggatttcccaaagctgaagaaacagatgttcgagatccccagcagcaacaagccgataaaaatcctttgccccgccaatcatctcaacattatgaaggggtcgcagctgatcaagcgcatcaaggaggaggacaacaaaaacctgatagaatttcacttcctcggaaattgccacgatgggatcgaagagtacgggttcagccacggcacgtttgaacgtgatgaatttcataagaaggtggaggagatcaagccttcattcgtgggaatcttttcaatctggcctgagactttttgccataccattaccgaggcctggagttgcggcatccccgtaatagggaccaatatcggagtgatccaggaccgcatcctgaaaaataaagggggctggatcgtggacaggaataaccccaagaaagcctatgagtacatggctgagattttcgagaataaggaggaatacctcgagatcgccaataatatcaaaactatggacctcaaagatacaaagatgatgagcattgagtatattcaaatttataataacctgctggagattaaatga

SEQ ID NO: 3285 - DNA, 2007 bp, synthetic construct
  source 1..2007: mol_type = other DNA
atgaccaaggtgagcgtaattatcccaatatacaacggggaaaaataccttaaggaatgtttggactccgtctgctgccagtcactgaaagacattcagattatctgcgtcaacgatgggagcacggataagaccctttccatcctgaatgggttcgccagtaaggacaaacgcatcaaaataatcagcacggaaaaccggggacagggttcagcccgtaacaccgcactcaaagaagcccagggcgagtatattagttttgtcgatgccgacgattggatcagtgaaaatgctctcgaacttctatatttccacgcaaagtcaaaagacctggacatgctgtttttccaaatgatcaactacatggacaacagcaaaaactacgttgagactgaattatataatcacctgtgctttgagaggaatgcaatcgatgaagacaccatcttcaacttcaacgacataaaagaatttctgtttaaaataccagtgtgccctgtttctaaactctataaaaaagaatttctggactcaaacgacctctatttcccagagggcatgttctttgaagacaacgccttcttttacaactcgttgtttaaaagcaactgtctgggatttctgaagaagcatctctactatcggagacgccacgccgactccgtgactcagaccttcgataagaggaagtttgacattgttaaggccacaaacaaggtactcgacgtgtttctcgaaaatgaccaatacctcattttcaagaaggaactcattaatcacacgttctccatgctgctggaatggttcaacaagtcccccctagagctgaaggatgagttttataggctgatcaagagggacttccggggctttaataatctcaaagaggacttcaagaacaatttgaaagaggagtaccttctgatctttgatatctccgacaagaacaagtattacttggatttcctgagcgagtacaagctctccagcgctgattatgatattttcgataaggaacgatacttccacctgaacagtcaggaatacctcgaatataagtccaacaagagcaacaattacaaaataagtgtggtcatccccatctacaacaacgagacattcatccatagaactttaatgtcaatcgagaatcagtcctttggactggagaacattgaggtcataatggtgaatgataattcaaaggataataccgagcttgtgatcaatgagtattcttctaagtatgagaatttcaaagctatccacataaaggagggaaccgggagccctggaacccctagaaacatcggtctctacgagagcacttcagactacgtgatcttccttgaccatgacgattattttgagattgatgcgctagagaaactttacaacgccatcaatgaggaggactgtgactttgtctatggcacttacgcaagtgtagatgaggacctcccgacaaagattatctacccaaacgaactgcatggctactttaagaatatctacggcaatccccgatctatagctttcccgccccctagcatctggacgaagctgttcaagcgaagcttcctgattgagaaccggatcatttttccaacaatcttgggtgaagacgccatcttcatttctaaggcgttattcagcgctgacggcatcgattacctatgggatgatttgatttgttaccacaccctgaacaaaaagtcttttacaaaaaacgtgagctacgactatctggtgcagggcttcgtgtcggaagagtacttgtacaatatctacaacgactttgagtcccaatcctatgagctgaaggagaacagcaccattccctcggagaagtccagtgagaacattgagaaaatgaatttatataaaatccggtctgaagggatactggacttctacctgaatcagttctatcgcagcgatctgaacgacgaggatatctatagaattttccccattctgagtgacttcgtgtcgacacgcatttga

SEQ ID NO: 3286 - DNA, 771 bp, synthetic construct
  source 1..771: mol_type = other DNA
atggccctgatcgagaaaaacgaactcttcctgttggaggaaatcgtaaagaagaactttgcagcgaagtataaggactcgattctggggatattttggagtattctcaagcccctgctcatcatgatcctccttacaatcatattcagtaacctgttcggcggaagcattgagaactacccagtatactttttatccggcaagattatcttcgatttttttaactctgctacaagcgtcagcatgatgagccttaaaggcaatataaacattctgaaacgcactgctgcccctaagcatattttcacgctcgccggtgtcgtgtcagaatttctcaatttcctgatcaccctgataatcctgattggtgtcatgattgtgacccggtccccattttacatattggaatccatgatcgcaattatccccattatgtccctgatcatcatgatcaccggaatcagcctgattctagcggtgctgtgcgtttacttttcagacatccagcacttatggggcgtcattacactcatgctgatgtatgcctctgccatcttctatcccatgaacataatccctgagccgttccacgggatcatgatccttaatcccattttctgggtgatcggccagttcagaatcctggtgctatgggggaccattccaagtaggatgaatatgttgaatctcgttcttctgtctgtgatcatcctggtgttcggaatcatagtgttcaagaaatttgagaaaaagattactttgaaattctga

SEQ ID NO: 3287 - DNA, 1467 bp, synthetic construct
  source 1..1467: mol_type = other DNA
atgaatcagaaaagggacgaactcaactctaaacaaaacataaacctggacagcgaaaatgagatttcctcatcagaaattaacctgaagaaaagagacccccagaacaaaagcgacctgatcgcgcagcaacgcatgaaagccaaaagggaactcatcgagcgctacaatatgtctgagagtgaggctgagagtactctcaaaagcatagaaaataaggtcatgcagaagaaaaacaagaaaatcacgaatgagaaagagattgagatcaattccaataaggttcggatggatgacaagaactgttccttggagaacagcgccggtgtgagcgagaacaaggacaagaacgatgaggctataaaaatacaaagccaaaattctcagattgaaggcgagtccgaggaaatcatcccagagcacgttctggagcgccagaaccccaataagattgataacagtgattacgaaatcaattctgtctccgacacactgcctgtcatcgaggaaggggaaagcaagcctattcagaatgccgaggacgagatcgtaaagaaggagctggtggactcggtgagcgatgtggtgccggttgtgggcgagaaggaggaaaacaatgaaccgatcattaagaaggacgattccagcgatgtcgatgacgtcttgtcaagcataattccagagtatcaccagaaatcctccatcgaggtcaataatgtgtcattgagtttcaacattgaaaacgacaagatcgacaacctgaaggaatacatcatccgtaccctaaagaggaccaaagagaaaaagattaaatttcatgcgctgaacaatatcacttttaaaatctacaagggcgaaaaggtagggattattggatataacggggccggaaaaagcaccttgctcaatgtgatcacaggcatctatgaacccgacgagggaaacgtgaaaacatatggcaaaatctcgccactgctgagcctcggtgcaggtttcgattacaactactccggacgggagaatatctacctgaacggcgccgtgcttggttacgacaagaagtttttagaaagcaaattcgatgaaatcgtggaattttcagagctccaggacttcattgatctgcccattaaaaactattcgtcaggcatgcttgcaaagttagggttcagtatagcaacgattgtcgaacctgacatcctcatcatcgatgaggtgctgggcgtaggagatgtgaactttcagaagaagagtagtaataagatcaagagccttatggacgggggaaccaccgtcctgctggttagccactccattgtgcagattcgagagatatgcgacaaggctatatggatcgataagggggagctaagagagttcggcgaagtgaacgaggtttgcgaccattaccttaaggatgcccagaacgccactaagaaccaggtgaaggacatccggttcaactga

SEQ ID NO: 3288 - DNA, 2454 bp, synthetic construct
  source 1..2454: mol_type = other DNA
atgaactataaaattagcatcatcattccagtgtacaacgtggaaaattacattgaaaagtcactgaactccatcatctcacagtcaatcggtatcgagaacctcgaggtcatcctcgttgatgataactctacagataatagtgcaaacatcatcaagaaatatgtgagcaaatacgataactttaaaggaatatactgcgacatcggctccgggttctgcggcaggcctcgcaatattggtctgagctacgctacttccgagtatataatgtacctggatagcgacgattggctggaggagaccgcctgtgaggtactgtacaataccatcattaacgagaatgccgacatcgtgtgcgggagtcagaccaggctcgacaatgagggcaacagaaagttttactatcacctgtgggtgaccactttgactgatccgaatgaggactacaacactcgaatgaagacaacacaggagattatcgacgaccccaacttcaagctggtcgttaccgatctggataaaaaccccaatattctgggacatgccaatgtctgggggaagatcttcaagaaggacctcataaccgaaaatgaactcagctttccagaggacatagtggcacaagattccgtgtttctgctgaactccttcttcgtggctgagaagattgtgttcattaacgacataattgttcactacaacaaccttcgttgcgacgacgacgacaaatccgcgtcctacgtcaagactactaagaatctctttggcagaatcaaggcatacgacttgatggacaacatcagcaaaaagttttcaaaggaagaatttttctacagatatctgctagtcggcaaactgaactactggttcaacagctttctcatggacagcaacattagcacctatgagattaagcttctttttaaaaagtattctcacctgtttagtaattgttataaatttaacacaaacctccggaaggatatcaaaaatattttcaaagagatcgacgagggaaattacgatattgccgcatcaactgtgtccaagctgcagtccaaatccttctccgccagcgagaacaagattaaggtgtcagtaattattcctatctataacaatgaaaagttcctaagcaagtgtttggatagtgttatcaaccaaaccttgaatgaaatcgaaataatttgtattgatgacgggtcttctgacaattcgattgaaatactgaaccagtacgtccttaaggatagccgtttaaagattatatctcaagagaatctaggggccgcgacagcaaggaacaatggtctgaaaattgcaaagggcgaatatatcgcctttctggactcagatgattggttggagctcaatgccttcgaaaagttatatgagaacataaccacgaacaacagcgatctcgtcctgttcaactctattgaacataaggagaacgctaacctcaaagagcgcatccatatcaagaatgattcaatccccgactacaactactacaccttcaactataattataagaaggacctggtgatgaacggatatctggacatctggtcgaaaatgtacaggaccagcttcctgaaggagaacaacatccagttctcaaaccaccagatcttcaacgacatccagttccacataaaaacgatgctgaatgccaaaaaaatctcgtactgcccagagttcttgtacaattatttaagaattaatcacccttcgcttcaaaataaccttagcttgggcaacgagagcttcatccttctggacataatcgatgaaatcgaggactacctgatcgacaatgaattttacaatgaattaaagtcgaatttcatccgctttaaactgacggagttggagagtacgctcgagaagctggaaaatccgtatcgaaacgaatttttcaaactgattaagaataacttcaagaaaatgcaattgacagaataccagcggaaagaactgcccccagagaactaccagttttttaatgacgtgctgacctacgattcattcttcgagtatgccttaaaaaacagcgagaaggaacgacagaagctgagcaatgccctggcggatagcgagaaggaccggcagaagcttagcaatgacttggaaaactccggaaaggaacggcagaaactgagtgatgccctggtggactccgaaaaggagcgcgagaagctcagtgacgctctcgagagtagcgagaaggagcgcgagaagctgagcgatgctctagagtccagcgagatcgagcggcagaaactctccaatgctctcgagagtagtgaaaaggagaggcagaagctaagtaacgacctcaaaaacagcgaaaaggagcaggaacttatcaaaaaagagtttacaagctccaactcctggaaagtaaccgaaccccttcggaagatccgcagaacaatcaagaaatga

SEQ ID NO: 3289 - DNA, 1599 bp, synthetic construct
  source 1..1599: mol_type = other DNA
atggataagaacgagatattcactctgtggattcctgacaatgacgacaacaacctaagccagttggcccacctcagcttaaagagctttctgttgtgcgattatgatgtgatcctttatacttacgaccacattggcaatgttcccaatggcgtgtgcattcgagatgcaaacgaaatcctggacaaaagcaagattttccggtacaagggagggtttaagacgtatagcggcttcgccaacctctttagatacaagcgtctctacgaatacggtggcacatggctggatttggacctgctcctgatcaagaggctgagcgatgaagacatcatcatcgggtcccagacacaggaggacatctactccaatccgaacaacgccctgtttagattccccccaaaagatcctctgataaagaccatcctcgattattccgaaaagaggggttcagacatcaatcatgccgagacagggacgttactgcttaagaaactcttggcgagtgaatttccagaatacaaccagtatctcaagcacttcaattattcaaatatcgtgaactggaacgatgtgggggactatcttgaatcgccggaaatattcttaaagtgcctgaataccaacgagatctacggattccacctattcaataccttcttcaagaagtttgtagagtttccaaaggactcgttcttcaccacgctgaaagacatcattctgaactcatccacaagtgaagagtatgcatttaacctcatgaaatacaacatcactacccaaaaacaatacattggcataaacgagtgggatctctcttacctcaacatcttcaaggatgcgttttccaaaaatgaatttaagtacacaattctaattgactcacagaatcttaaaaagatggagatctacaacatcatccgcgccatcttcagtagctatggactggagagcgagaaggacattcagatcatcatatgtggaaagagcgacatcggccatgataagattaaattcaaagacaacgtcatcttcttggcttcggacttccaagacatgaaatactatctgaatgactatatttttggggagcatatcttccccattaataaacccgtcatttttaaagaggagtttttcaagaacaacaatttcacttccgacgtcgagcaccacgtgctgaacaacagcaactccatcctgaatgtactgaaccgggaaagctataagttgtgtctgctggctaacatagatgtgttcaacctggacatggacgtgcttaaaaccctgaacatgcggataaaggaggttgacaatagcttaatctacgattacagctttagggacgatgatgtcctcaagctcatgaagcttgtggatcagtgcgattccaagtctttcctgaacgtgaagagcgagctgtcaaacctgaatattaaatttctgtcccagaaaaccagttaccactacttcagtgcctataagaatattcttaattctaacagttacgatgagtttattttgaaagagcataatgacaaactccagtgtctgaatgcattttacctaaaccgcatcaaccctcgctacgactattga

SEQ ID NO: 3290 - DNA, 999 bp, synthetic construct
  source 1..999: mol_type = other DNA
ttgctggacgccgacgagttcatcattagcgacaacggtcagaacccccgcgagatcattaagaagatcaatgagaattactactatctcatcaagtggattacctacgtgcccacaaataatgacgactacaacataaagtttattccaaagaggatcactcacgtccgggacgaaagtttggagcagtattacaaggtgattgtcccgaaaaaggtggtcaacgatttcaatgttcgggtggaaatggggaatcacaacctgaaattcgacaacttcaatagaaatgagctcgtgaagaaagatctgaacctgaagattgctcatttcccactgagatccatagagcagtgcatctctaaagttagcatcggctggcccaacataatcgccatcaacctatataacctcagctggggcttccattggaaaatgctgtttgacaaaatcaaagaagagaatgatatttcgcttgatgaccttgaattttttgcaaagaactacgccttggtaagcacatcagatgatattctaatcaagaaccaacccatcaacctcgacttctgcgataagatagagataaggtatgacttcgaatataactacctgagaaatattcttgagaactacgcttacttcgccgaagagatcgtgtctttcaagcgaaagctgaaatccgtcccaattctcgatgaccgattcatcctgaagctggccagcgattacgacgtcattgagaagtctggattatttgacgtaaactggtactgtaaacggtatagtccgcctcgcaacatccatcccataatccactacctgctcacctacagggaaaatatgaatgaccctgcgggctttttttcaaccgaatattattttaaaacgcacgtggatgtggcaaacagcggaatgaatcctttcgttcactacatcaaatatgggaagaaggagaaccgcaagatcgcgtcctccaaaagtgagaactttggggtgcagtga

SEQ ID NO: 3291 - DNA, 1224 bp, synthetic construct
  source 1..1224: mol_type = other DNA
atgaaaatcacagttgcgggcgtgggatacgtggggctgtctattgctatcctgcttgcccagaagcacgatgtcaccgctattaccacgactgaatcaaaggccgagaaactgaaccagttcattagtcccatccgcgatgacgagattgagaggttttttaaggagactcgagacgggaagaggaagctcaacctgcacacaacgactgataaggagtcggcgtataaaaatgcggatctggtcattatagcagcaccgacgaactacgatgacgtcaaccatttttttgacacatcagctgtggaggacgccatcgaatggactctcaaggtcaatccagatgttttgatggtcattaagagcacaatacctgtgggatatagcgagtctgttcgggaaaagtacggtgtcaaaaacatcatattcagtcccgaatttctccgggagtccaaggccctgtatgatatgctccatcccagcagaattattgtgggctgcgatgacgaccagaaagaggatgcccagatgtttgtagacctgctgttggagggggtgagactggaagaaaagcgttcggactccccaaagcaggatatccctatcctaatcgcccccttcacagaggtggaggctagcaagctgttccaaaacacctacttggcattacgcgtaagctacttcaatgaacttgacaccttcgcccagaccaaaggtcttaacaccaacataatcattgactgtgtgtgcatggacccaaggatcggcggacactataacaatccctcattcggctacggagggtactgtctgcctaaggacacaaaacaacttttagcaaactgcaaggacgtgccgcaggccctcatcgaggcaatagtcaattccaatgctgtgcgaaaggagtttatcgccgaccagatcatttccaataatccaaaaaccgtgggcatctacaggctgatcatgaaaagcaacagcgataacttccgcgcatccgccatacaggatgttataaagatgattaaagccgaaggcattaaaatcatcatctacgaacctattctagacgacgggagtgagttcctgaaatccgaggtggtgaatgatctcgacatcttcaagagagaaagtgacatcatcctggctaaccggtttgaccaagatattctcggagacgtggccgataaggtatatacccgcgacatcttcggccgggattga

SEQ ID NO: 3292 - DNA, 2682 bp, synthetic construct
  source 1..2682: mol_type = other DNA
atggagatccgctataaaaacctcttaaaagtgtttaccattttccttgtgttgctcatcagttgcggatttgcctccgcagtcagtgatctggatgagggcaatagtgcaaacattgtggataatggggacctatcattatctgacaacatgatgagtgaaagcgccgacaactgcaagaacctggaaaccatcgaggagtctcataccttcagtgagaagaacacggtgaaagacgtgtcatatggacttagcacacccatcgatggcaacacgttcgaggatatccaaactgcgattgataacgccgcggacggagacattattgaactcaacggtacttactttggcaacgggagcgatataaagatcacaaaggatctgacaatcagcggcaatctcgaaacaatcctggacgcgaagaacaaaagcgggatcttctatgtgaactcaaacaacgtcacgctccagaacttgaagttttacaactccatagtgcccgagtatggatcggcggtgcacttcctgagcaacggttcggtgattaactgtaccttcatcaataacacggctggtggagtgtatggtaccattgactacttttggtctactggcggtgtcgtatacctggccaagggcaacggctctgtgattaactgcacgtttatcaataataccgccaacgcagacggcggtgccatttactgtggggttgacggcgggtccgtgattaattgtacatttattaacaacactgccaaagagctcgggggggccatctacattggcggcgggcacgacgggggcgctcattactcaaatgtgtatgattgctacgtcgacaattgcgtattcatcaacaacaccgctggggaaggtgctgggatctactatggcggaggcggtctgatcttcaactgtacctttatcaataacaccgctcgattcggcgattcaatcctagtcaataacatgtattaccctaacaccgtgagcgatatgaaaaccctgaccattaaggaatgcgactttaagtccaacaaagagggttggggatacgtagtagtgaactacaaagcatacaagaacaccatctgcggactgtgtgaaatcattgattcaaatttcagcaatgagcaggccgaagactacattaacatttataaccagggaaacatttacttgtcgggaaacaagatctccagcaattacgctacaataagcaacgatctgatagcttacggtaataatgcaaacatcacctcacagacaagcctggtaattctcgacaatactactaaaagtgtcgaaaaatactctccatttgatgtttacgctgttctggtcgacgatcaggggaattatatccgggacgagaacatcagtctgttcattgggtctaagaatgtaacgggcgtgttcgataacgtcaacctcttcaagtaccacctgaatgatttaagttcccttaactatcggactctcgtgtccggcaattatgatggggcaaaggacctggtggttaaaaccggcgttttgcagctggacgtcgaggtcgatatcgacttggattatgaggacgacaatgtgatcataaagctgaaggattccgagggaaatcctatctccggagagagcgtgagcctgctcatcgacaataataccagctctgtgaagaccgactcaaatggtgaggcgaaggtcccagtgaatgagatctcgatggtcaaggcaattttcactgatgggtttggcgtgaatgtcagttcctatctggtggtcaaggccgtggagaaggttaagcttgtgccaacttttgccaatgctaaaatctcattggacgtggaagacaactgctccgctgttatcgtcacgctcaaggatctgtccggcaaccccatcagttctgccaaactggacgccctggtgaatggtgccggcaaaacccttatcaccaacgcctctgggcaggccaaaattgacattgaagggaacgcgacagtggaagtgacttacatcgatgcagagaacgctaacgcaacagtttccagcagcctgactgttataaagaatgtggactccgttccggttattcccaataggacagccacgaatatcatttgtaaggatatgaataccaccgccgtggccaagccggacggaagaatcggaaaatacttcgaggtcactctcgtggacgtcaacggcaaggctctcgctaacaagtccgtgaatatagggttcaatggagccgtgtacaatttgacaacaaatgaaaccgggggcgccaaacttcaaatcaacctaggatacgagggcaaatacacctttgcaatagcattcctaggtgacgacaactatacggggtcctttaaggtggccctgatctcagtcagcaagcacagccccaagcttagcgcgcctgccaaaacatataaggccaacgcaaaaacgaaaacaattaccgctacattcaagacatcgaatggaaacgctatcagcggcaagaaaataagcttcaacatcaatggcaaaacttatagcggcaccacaaactccaagggagtcgcctccgtgaagataagtctgaacaagaaaggcacttatagttgcaccgccaaatacgcgggcgacggaatgtacaaggccaccagcactaagttcaacgtaaagatagtatga

SEQ ID NO: 3293 - DNA, 2274 bp, synthetic construct
  source 1..2274: mol_type = other DNA
atgaagattagatataaaaatctgctgaaagtgtttaccatttttctggtcctcctcatcagttgcggatttgcctcagccgtcagtgacctggacgagggcaactccgcaaacatcgtggataacggtgacctgtcactgtccgacaacatgatgagtgactctgccaataattgcaagaatttggaaacgattgaggagtcccacaccttcagtgagaaaagcactgttaaagacgtgagctacggcctttcaacaccgatagatggaaacacttttgaggacatccaaatcgccattgatgacgctcaggatggggacacaatccagctcaacggcacgtacctgggcaacggaagcccaataattttctccaagaacttaactattggcgggagcggcgagacaattttggacgctaatggactgtctggcattatcaattcgtctagcgaaaaaatcgtcctgaaagacttgacctttgttaacgggtcggggttcacagtggacttgcgcgagaacaacggtgataatttgaaatactgctcaatcatcaactgttcctttgaaaagtgttacggggacaaaaatagcgccgtgatctgcctgaatggatctggaattatcctggactgtgattttcactatactaactgcactataaacatcatggggagcgaggacgtgtccatcctgaactcttcgttcaactatacgggcggatatgctatccattccaacagcagcaccatcgttaaagcgtgcgatttttacttcaacagtttcttcgagacctactacgagaatactaataaggtgtacaatggcaatattgtggacctgtgtaagaacagttccatcagtgattgcatgttcaagggcacatactacgagaccattatcgattccctagtggactccaacacttaccagttcagcacactccatgtctgcgatgaggtggacgtcattaactgcactttcattagatctatcaccgaattttctggttccgccatctaccattttggcaacggcagcataatcaattgcacgttcatcaacaattcggctggcggcagccacggaacccctagctacctttatacccaggatggcgttgtatatatagggtctgacgattgtctggtgctgaactgtactttcatcaattgtcactccaatacattcggcggtgctctgtatatcaacgccaggaactgctatgtgataaactccaccttcatcaaaaacagtgcttacgaagggggggcgatctatctggctcaaggggattgttacgtcataaatcccgtgttttccaataataaggccaatcactcactctataacgatatcaacgatttaaatgctgtttcatacgagaatgacaccagcgacgacaatcagactgaaaagattattaacccctcaatcgaattagactatctcgatgacaacctcattataatcttcaaggatatcgaaggtaaggcaattagcggagagtcggtgtcacttatcatcaacaataagaccattagcgtgatcacggactcaaacggggaagctaaggtgccactcaatgagacctctatggttaaggccttctatgtcgatgccaacggtctcaacgtgagctcctccatgatgattaagatagtcgagaagaccaattatatccccatcaagcggaacagcagttttattgactgcaagaacatgactacctctgcaataacgaacagtaaaatcagggacggggaatacttcgttgtaagcctaaaggatgccaatggtaagccactgtccaataagcccatccagatcggattcaacggcaaagcctatgaccggaccacaaacgaaaacggctctgcacgcctgcagattaacctggcttacgtgggcacttacacatttgcggtctgttttcttggggatgactactacaacgggtcgtttgtagtggccaaaattgacgtaaacgcgcagaaagccagccttaatgcaccttccaaaacgtacaaggcatcaacaaagaccaaggcgcttacagccaccctgaaagatgcaaaaggacgattggtcagcggcaagtccataagcttcacaatcaacggaaaaagctatgtcgcaaagaccaataccaacggtgtggccacagtgaaggtgagtctaagcaaaaagggtacctacaatttcaccgccaagctcgacaatgataaaacattcaagacaacggcctcaagtggaaagctggtaattaagtga

SEQ ID NO: 3294 - DNA, 3858 bp, synthetic construct
  source 1..3858: mol_type = other DNA
atggcagcttacaacagcggagcatatatccaggagaccctcgacagtctaatcaatcaaagcctggactttaaggaaaacatccaagttattatcgtgaacgacgcgagcagtgacaataccgagtctgtatgccaagagtacatcaaaaactaccctaataacatcatcctaatcaacaaccgcatcaactgtggccctgcccacaccagaaacgtgggcctccactatgcagaaggggagattatcaactttctggacagtgatgactacatatcaaagaagacctttgaacgggtagattccttctttgaagactttgtgcacgtggacatggcatcaatcccaatcaagtttgtggggtccaagcggggagaccatccactgaactacaaatataagggcaccggggtcataaacctcctcaacaatcccgatgccattcagctctcctcggcatcagcgttcttcagaagcgacattcttaaagctagcctattcaaccactcccggtctcgctacgacggatctgtctctgttgtttacaatgacaacagtccggtttcagattcaattcctatgattttcaatgaaaacctaagtgtctctgaagatgctctgctcatcaaccagatgctcctgcgcaaccccctgcttggaatcctctcaaactgcacttatttctatcgaaagaaagcaacggacaacacgtccctaatctctgattccgccaatcaccggtcttacttcacatcccgtgtaaataactatatgatccggctgattaacgattccttagacttgtacggaaaggtgccagaatttattcagtacgtggtcatgtacgacctgcagtggatcatggagatcaggcaggtggatcacctcctggacctcgaagacctgacccacctgtacgacaagctaatctccattctcttctatatcggcgacaaggtgatattcaaccagaggtccatcccaagcatcctaaaatcacatatcctcctgctcaagtatttcggatggggatacctggatgataaaacatttaattttaaacagattgataaaaaatattacgatgagcacggtaacctcatcccgtatattgaaaaagaccaactctccttcattattcagaagctggagctgaacaaaatatatctggacatcgttgatattaaaaatattaagtctaaaattaatctgaataataacaataatggcactccagacgatgacaaaaaggatgatggaaaaaatagtcacgatttctacctttcttcgcaagatgatgaagacagacaggagctctatctctccgggatgatcacaagcttcttcaacagcgacttcgacatctatgctatcgtaagcgaaaaagacaagagcagctcccatattcttgaaaaagagatcaaggtcaaaaagataagctatccccagcgggacaacctttcccttaacttcaactatggttataaccagtgctttgaggtgaggatacccttgagcgagaagacaagtcgcatttccttccgcatgggctttaagagcctgaatgaggtctgtaactccctcggcatcgagacgctcagcgaggattcatttgactacattaaccatcacgacctggcgttctccggagacctgctgatcgactacaatcacaccagtcgcctctcgcaggtgtccaactacaagatatccaaggattacttaatcctggacaacggtaaccacatgattgttagaaaaagaagcctcctaaccactataaagtacgaactggtcacctttgcctctatccttggtgaacgagaggagggctggagaaccggcatcctgcttagggctctgtactttattttgtaccctttctatcgcaacaagcgcatctggatatttatggatcttccctacactgccgacgacaacggtttacagttgttcaagtctgttcggaatatggacaagcttaagctggaggactataataagctgttggacttggatgaaagccttttatcacgggagcgccatccatacaaatacgaactgttcgaaggcaaggacatagggctggtagggcttatcaaaaacgtatttagtagtattaagaacgtcttctcgagggatagcgacgacgatgaaaatggcaaggtcaagttcatcaaggggggctctttagggttggatgataagtacgatgagcttgaggataatggagattattcagactacttgaatgagcactttggttttgccgacgtgaacgaggactatctggacaaccaggacattcaagtggaaggctcgagctttgaggatgacattgagcacagctccaaattcagaaggaacgtctatggcaaggccgggtttgtgaaaagtttcgatgccaaagtggatgccaagtataacgactcgctgaatagcctggagaacaggttcgataagagagtcagcaatataaagacacggacaagaaatgcagacgtccgtgagaaagtgggcctgtctcgagatagggatgacaatttctccaaggggtttagcccgattgactttatctacggcttcgacctgtccaaattcctcagcgaaaacagcttcgtgtatttagtgaactacatcctgtaccgcatctccaagctgctgctgcgacctagaaagatcaaaaggattgacaacagaaaaatcaagaagtactttaccctggagcagagcacaagccactttaacaatgttcgccatatggaaaaccagtacatcgcaagttccaacagggacaagttgcggaaactgttagcccgggaaaagcagagcaatgagtacaacgctctgaaaaagataggtcccgtgcttgcctacaagagtttgaaacaccgaatctacgcgctctatgctgaggtgattgtctcatctcaccctgacaacaatctgatctatcccttctacggtaatttcccgcatgtggcgggcctggtgaaggctaaaacggtgttcctccagcacggagtgacaaaggatgatgtgtcattctggctgaatcgcttcgacaagaacctcgacatgatcgttactgtgtcggatctggaaagggattcattcttcccacgttttgacggggacggggagtatatcagtagttactatggctacgataaagagactgtccaggtgctgggattccccagattcgactatcttgagagtttagaggataaaaaagagatcgtgatcatgcccacgtggcgacgccagttgcacaacctgaaaaaagaagagttcgtaaacaccaatttcttcaggacattcaatgccttgataaatgataaggtgctgctggattacttggactcgcatggatacaagctggtctttaagccccatcctaacctcaacaagtacatcggtctgtttgataaggactcaagggtcgaatttgacctgaatgacttgaactttgctgaaaacagtaaggatgggactgccaaatatggctctcgacgttacgccgatatattcaatcattccagcctgattgtgaccgactttagctccgtgtcctttgacttcgcctacctcaagaagcccatcatttactatcactacgataatgactaccactttgacagcgagaatggctacttcaattacgagtctatgggctttgggccagtcataaaaagtcataaagagttggttatgagcattattggctctattgagagcggatgcaccatggatgagctgtataaggggcgggtggataagttctttaagtatcatgatcgtgacaattcacggcgggtgtacaaggccatcctggagatggacaagtattactga

SEQ ID NO: 3295 - DNA, 1017 bp, synthetic construct
  source 1..1017: mol_type = other DNA
ttgcggtatatcgcagatgagctgaaaggccgcaagacttccgacggaaagccctacgaatttgaatttattcctaaagatgagttctcactgagcaatatgaagaaactggccacctccaagtacatctttctcactgacaacttcttcgccctggccttcatgcgcttcaacaagaagaccaagctcattcagttatggcacggaaccggaatcttcaagaaattcggctatgacctgcttgaggatgaacagaagaagaccatgcttaaatttagtaacaagatcaccaatttaatggtcagctcacacaatgtgattgacatctacgcccgcaatttcgccatagataagtcgaaagtgcttcctctcgggataccccgaaatgactattactctccagagcacctggacgaggactatgtacggcaattgcggggcgagtttgaacagaggtaccctaacctgaggggtaaaaagatagtcctatacgcgcccacatttagggaagaccccaaatacaacgctgtgtttaattacttcgacattgaaaagttcatcgatgagctcggggatgattatatactgtgcatcaagctgcatccaaactacaataaatttgcggatagtgctaataggattgacctggatgagctcactgacacgtacaacatcgttaacttcacagaatataaggatgagcagaagctgttcctcatctccaacatcctgattacagactactccagcgtcatggtggagtatacacttctgaaccgaccaatcatcctctttgcatatgacctcgacaattatttggaaaacgagcgcgggttctacttcgactacagaaaggaagtgccgggcagaattgtgaaagatacggatgagttggtgcgggtcatcagagagaaagacttcaacctatctaacctgaaggagtttgccgagttccagtttgactattttgatgcatacagcagcaaacgtattctggactacgttctggaggaatga

SEQ ID NO: 3296 - DNA, 285 bp, synthetic construct
  source 1..285: mol_type = other DNA
atggctggcaccacaaacctggtggatgccatgcttgtcctcgcgttgggatttctcatcttcgcagtgatcggctggaacctgcaaagcgttatattctcagacatggacccccaggagcggcaggccaccatggagtccattaatcagatcactaatgtgacccaaggggaacagctaaacagtaccccagacacaagcaaccagtctggagaaggttatgtagagcaggggaaagtgtacaaggattccaagacgggcaatctgattatggtcgagacttga

SEQ ID NO: 3297 - DNA, 732 bp, synthetic construct
  source 1..732: mol_type = other DNA
atggaactgatcttcagtgtatttgccgtaatcagcctggctgccatcctgctgctcggcatcgagctaggattactgtccaaattctttaatctctcattaaagaagcatctcatccttgtccttgcttacagcatcataatatttgcagtcattgtgattctctcgccatcctacgaggccgtcttaaatagcaccttctacagcttctactattacataattatgggctttgtgtgccttgccctggggcttttgacccttttctattggagcaagatggagtggtatccgcctgcactgaaatgtctgctgtacttcgatttcgttcccatcagcctgagtctgatgctgatctcaacagctctcatggcgccaagcttcgcatttaaagtccagaacttctccctgaacctgacgatggtcaacagtggcctaatcctggtggtgctcatggctatcctgatggtgattttctacctcttttccgacttcgtggaggactatagggtgactcactatgccattattatcggtagcttgctcttgatttttgccctggcctactttgtgctggggttcatcattcccaatatggcgccagttttcgcaaacccttcaacagaactaaccctcatgcccatcgagtccatagtggttatggtggtgttgatcgcgctgctgcttggattgggggccctctttagaaagcggactaaccgcctggaatga

SEQ ID NO: 3298 - DNA, 642 bp, synthetic construct
  source 1..642: mol_type = other DNA
atgacaattcctggcggcgacttcttaaccaccggactgaatttaatttcacagagtttgctgataccggtagttatcatcctcctcgtttttgtggtcgtggtcgtgatttcacttggagggctgatctatgaatacacgtcgcgcacaaaggtctctgtagatgacgtgtccaatctgatcctggagatttccgacagtgggagcgtggatagcatgaagagcgccatcgctaactctccaatccccaaactgcagaaggacattctgcttaagatagcgagcaccggaaacatgagccccaacaccagagaggccttcgcccgaaaactcatcgagaacgaagaggggctaacggacaaatccctggaaataactgacatcatcacacggatcggccccaccctgggcttgatggggactcttatcccactgggcaccggtctagcagccctgggcagtggagacgtcaacactttgtccgagtcgctgattgtggcattcgatacaacggttgtggggatcggttccggcgccctcgcgtatgtgatttcaaagctgcggaataggtggtacgaggaatacctcagcaacctcgacgtgctgtctgatgctgtcctcgattttatggctaaacactga

SEQ ID NO: 3299 - DNA, 882 bp, synthetic construct
  source 1..882: mol_type = other DNA
atgaaccagaaactatcaaactacttcaatatgggtctgtcgctctacctcctgctggatttgatccttataacattcacgttagtgtttaagatagagaataacttatactacatcataatcgccatcgacaccatcctgtgcgttattctgatctatgagttttataatcgattcaagaccgccgagaacaagattcacttcagcatccggaactctacggaaatcctggcgggcatccctattgacctgattttccttccatttgctccgaatctgactgtcttcctgaccattttcaacctgctcaagtttctcaagatcatcggcctctttttggagttttttgagacgattgacgtgttcctgaagaagacccatcttgatgagattctggggctggccattctggtgatcctggtctccaccctaggaatctacctctttgatcccagcataaacagcatattcgacagtctctggtttgtcctctccacaatcactactgtaggctatggcgatgtgcttcccaatagttatattggaaaagtgatagggattctgatcttgatcttcggagtgctcatcttctcagctatcacaggggccatgacctcctacttcgcaaggaaggtcttcgccacaaaggactttaacattaccgagaacgacgacaatatccggctgctaaaggaagacttaagcttcaacaagaagaacctcaacaacgcaaacgaaaaaatcgataaaatcaataatgatgtggaaaagctgaaaagagagttgaatgagatgaaagaggaactgcgcgaatctaggcagctgaacaaggaacttaaagaagagattgttattctgaacgagaatttgaaaaataaatga

SEQ ID NO: 3300 - DNA, 840 bp, synthetic construct
  source 1..840: mol_type = other DNA
atgcagcggtcattatttgataaagtgaaaacatcgctgtggatgctaccatccttctttggattggtcaacggcctgggatttatctatctcggccgcaagaacagtaacatcaaatggaccattgagggcattgtctatgaaattccctggctgatagccatcctaaacattttcaacctttcagtggcaatcaccgcattcagcttggggagctttatggtgctcataagcattgtccgcagtgtcatggtgaattatgaataccagagattgcttgatgaggaatatgtggtgcggccgagcgtggagagcggtagccacgggctcgataagcagatcaagaatggtcagttcaacgaaaaggaagcttctcctaaggaggagaaagttaaatacaacccctacgacctgagcggcatcgacaagaattacgacgggcggatcaagttcgacaagtacaaggcggaaatcaaggaaatggaaaaggaatttaatgagaagaacgacaacgtaaaggagctggttgaaaaacgtttctcccaatctggaatcacttatgaccgattcatgtttatcataaaagactccgaggaccttttcaactcccaggccgccaatgccctggacatgattgacctcgctccagagtacacagagaccatcgatgccgagataagaaaaaaaatggaaaccctgaggacgatcattgagaaaaatgatgagctgagggatgagctgatcattaatatgacaacggagactgggtcagagatggagatcaagaacctcttcgaggatatgggccacctgaccagttccattaagcattacgaatga

SEQ ID NO: 3301 - DNA, 360 bp, synthetic construct
  source 1..360: mol_type = other DNA
atgacgatgaaaacagggagcgaactgaaattcaacgacgattatgaatacatgaccttcgatcttgaccaggagtttctactgggtgagctgggccaggacgaaatccgagacaagatcattaccgcccaggagatattggataaccacctcgccaacccctatgaggcaggccaagagatcgaaattgagaaccccttcgagaagccaatcctccgcaagtacatcaaggtaaatgaggtgacagaggacatgatagatatcatctactaccaggtcagaaatcattacgaagtgtataaatttgtgactctgaccgacccggctcacaggggacggattctgattcctaaggactga

SEQ ID NO: 3302 - DNA, 474 bp, synthetic construct
  source 1..474: mol_type = other DNA
atgcagttcgatgaactaatggaaaaaggggatcaagcgagaaaggataggaactatgaagaggccctggactggtaccagaaggccttgaaagaggataaacgccggagcgaggcttggaacatgaaagcaagtacactcggcctcctggggaggcctgacgaggccatcgaggcgtttgacaagtccttggagctggactttaataacgaacagacctggtttctgaagggtatgaccttattcgctgtcgaccgattcaatgaggccgactcttgcttcgataaggcagtaaattcagacccacacaatcccgtgtactggaagtacaagggaatggtcctcagccagctcggccacaaccacgacgccctggaatgtctggacaacgcactggagcttaacccggatgacgaggctatccttgttttccggcatacggtggtggaagccattgaaaaagaggataactga

SEQ ID NO: 3303 - DNA, 1956 bp, synthetic construct
  source 1..1956: mol_type = other DNA
ttgaaagagttcaaactgaaaagtccatacaagcctctgggggaccagccccaggctatcgagagcctgtcaaacggaatcaaagagggcttccacgaacagaccttgctaggtgtgaccggctccggcaaaacttataccatggcaaacattatacaaaacgtgcagaaacccacgctcatcatcagccataacaagaccctggctgcacagctctatgaagaatttaaggtctttttccccgataatgcggtggagtactttgtcagctactacgactactaccagcctgaggcgtacgtcccgagaacagacactttcatcgacaaagaagccagtatcaacgaggacattgacatcatgcgccattctgccacacagtctctcctatctcgtgacgatgtcatcgtagttagcagcgtgtcctgcatctacggaataggttccccggaagactatggggagttcgcattctcgataaatgtcggcgacatctacgaccgtggggatatcctgcggaagctgatctttatgcaatatgaacgtaatgacattgcatttgaaagaggtcagtttagggtccgcggcgatgttatcgaaattaaccctgtgcatggaacaccccccatacgcatcgagctcttcggagatgaaattgatgccatcagcctcatcaaccccgtgactgggatgcgggaggaaagcattaataggtatgttatctttccagccaagcacttcgttgtcggtgctgatagaatggatcaggccctcaaggacatagaagccgagctgcaatcacggctcaacgagctgaacctggagggcaagtatcttgaagctcagaggttggagcaacgaacacggttcgatctggagatgctgcgggagatgggttactgtccagggatcgagaactattccatgcaccttagtgggagaaactggggagacatgccttactccctactgaaatacttcccagatgactatctgacgataatagacgagtcgcacgtgaccgtgccccagattaggggcatgtacaatggggaccgggccagaaaggaaacacttgtcaactacggattccgccttcctagtgcaaaggagaacaggccattaagattcgatgagtttgaagccagccagaaccaggtactgtatgtgtccgcaacaccagggccttatgagctctcaagaagcaagaatgtggtggaacagatcatccgtcccacggggttagtggacccgaaaatcaccatcagaccagtgaagggccaggttgaggacctcctaggagaagtgaggcgaaaagtggagcacgaccaacggattctcgtgaccactttgacaaaacggatggccgaagacctgaccgactactacgcaaagattggaatcaaggtgcggtacctgcactcagagattgataccctggaaagggtggaaataatcgacgacctccgaaggggcgagttcgatgtcttagtaggagttaacctcctcagggaaggcctggacctgcccgaggtaggccttgtcgcgattctggatgctgataaggaagggtttctgcgctctgagacgtcccttattcagacgatcggcagggctgccagaaacgttgacggcgaggtgttgatgtatgtggatgagatgactgattccgtccgaaatgcggtggacattaccaacaagcgacgcaagctgcagatggcctacaatgagaagtataatatcactcctaagaccacacaacggaccctgaaggagaagaagcttgccgaccgcgcccccagtcgcgatgacttacgcggcatgccgaaagatgaactgaagctcttgattaaggacctggaggctgagatgcgcgaggctgctaataatctggagttcgagaaggccgccagcttgcgggatcagattgtggccctgaaaagcattaaaaaatga

SEQ ID NO: 3304 - DNA, 1917 bp, synthetic construct
  source 1..1917: mol_type = other DNA
atgaaatttaaaaatagtcatatcctcctcgtgtcactgatctccatttttctcttgctgtcgatatccgccgcttctgcagcggactctgacattgccgcggacgacagctccgtggatattgtggaaatagaggatatcaacataaaagaaagccactatctctgcgatgacgcctctacgggcagtgaggatctgagtggtgacgagaatacaagtgcttcaggcaccgatgacgcgacagggggaaatgacactgatgctacagggggagatgacactggaaatgctacaagtgtaaatggcactgaaaacgttactgatagcaatgggacaaatgccaccaatggaacaaacgccaccaataacaccaaatatgacggtcctgtcaccaatgcaaccatcattcctgtgagcacgtctgccgattaccagtacggcaacttcacattcaaggtggtggacaatgctaccggagagcccctagccaatcaaaagatctctgtgagcggagtgtacttctttacctttaacaacggatcatccatctccactacaaaggtcttcacgaccaactccaacggtttgctggtcattgcaaacaagaacctgaacaagaaccttgacacactgggtatggtttacaatttcaccgccctggatgtgggcaaatacgacctgaccttcagcggcaacgacagcctgaagattgttgtcaacaataccctcccaatcactgtaaataaagtcaacgccgaaattaaggcaagcaacttcaaagatgaggtgggaacaagtaaaaaatatacatttaagctggtaaacaagaatacagggacggtgatcaaactggcctccctcaaattccagatcaagttaaacagttcaggatacaccacctataactcaacaaccaacctgtcaggtcaggtggggtataacctgaaccttctcgccggcacctatccggttcgaatcgtcaacaatgattcaaatctaaaggcgtccacggtcagccgcaatgtgacacttacgaaaaaggtcggggtgctctctgcctcgaacagaactatcctgtacaactcagctcctacggccataatcaaactgacggacaagaaaaccggcaaggcagtggcaggggccgtcctcaaggtccgggtttacaccacaagcaaaaaatatagcgatctcgccttttacactgacaacaaaggacaggtcagcttcaaggcagcactgagcctgggcaagcacaagatgattatcagcaccttggacaataactacactgctagcagcattacccggtatgtgaccttaaagaaaaccacggggaagatatccgctcccaaaatctcggctacctacaagtctggcaaattgtatacaattacccttaagaacgccaaaaacggcaatgccatgtatggctccacactgaacatcaggatctttgtgacaagcaaaagctactacaaatacactggcatgactgacggaaacgggaaggtcaacatcaacaccagttccctaaagcccggcacttacaaggtgtctgtttcttccggggactcgggcttcacggccaaggcagcgacaggtcaaatcaaaatcaccaagataccacttaagctgtcccccacagcctataaggagaaatacaattccggcaaaaccttcaagatcaaggttaccaataagaataccaataagatcatttcgggcattaaggtaacggtgaaggtgtacacttccgccaagaaatacaagacctacactgtgaagaccactaacaaggggattgcttatttgaaggtgactcagaagccagggacgtacaagaccgtagtgagtctgtctaacgcttattactcagcaagtgcggtgacttccaagatcactgttacaaaatga

SEQ ID NO: 3305 - DNA, 693 bp, synthetic construct
  source 1..693: mol_type = other DNA
gtgtacagcgaaaccaagatcgcaattccaatattccaaaagaaaaaggaagatgtgataagcgttgctcaggactgcatcatcaaaggtgcagatatcctggagctccgaatagacggcatggaaaaccctaatcccaagctagtacgcgagataatcgaggagatcaactttcccatcattgccaccaaccgcacaaccagggaaggagggttcttcaagggcaccgataaggatcggatcgccatattaagagagtgtgcagatgtggccgactttgttgacgtggaactccagacaaacagaaagcttattgaatccattacagagacgggggtaaaaacgatcatttcctatcataactttaagcagacccctgatctggactttctgattgacattgtcaatcaggagaaagagcttggggacattgccaagatcgccgtcatgccaaataacctggaagacactctgacggtgctggcgatcttgtctcacttcgatgacactgtcgcgatttcaatgggcgagctgggaagctacaccagggtgatcgcttcgaaattcaatgcccccttcaccttcgctgtggctaacgacactacagccccgggccagatcgacatcgatacaatgcgggtcttgctcaatagtgacctcatcaacactgatgagtttgagaacaatgagtga

SEQ ID NO: 3306 - DNA, 726 bp, synthetic construct
  source 1..726: mol_type = other DNA
atgaaagttgtagctatcggggcggatatttcaaacaatgatgtgagcgtttccaagtccctcgtcgaaaacatagagaaggacattcccaaactcattgatctgggagctaaaagggcagcattgacaaacgtcacaggagacgacgtggtcatcagcgccttttgtgaagatgatctgttagaaactgtcaatcgcggaattgcagacatactccgagcgaatgcagagagcctgggtgaccttgctggagttagcgatgacccgagcaaggccggggagggcctctcatacgccgaggcaagcctgaacgatgacggctaccaggatgccattatcatggccttcgacacctacggtggggagggctttgttaaggacgtggccaactccgccatcgaggctgccagtggcatgaagtctgtaatcgacgtgtcagacagaatcggctccaggaccgacatcccaggtgtcggctatgtgtccgaaaatgacacggatgatcctgtggtggtggtgagtgtaaaagacctagaacagatagctgtggtggctggggccatgatcggcgcggcccttgggtgcaagaacacctatctggtcaagcggcacaccccctgcaatgtgctgcccgggagtgtgctggtgtcggtcactgccttcatgaacggaaacatgattgacctgtctatcccattcgagaacaaaacacggatcttgggctga

SEQ ID NO: 3307 - DNA, 870 bp, synthetic construct
  source 1..870: mol_type = other DNA
atgataatcttagatgagaacgtgaaatgtctcgtacagggaatcactggcaaacaaggttccttccacactgaacagatgctgaaatataatacaaaaatcgtagcaggcgtgaccccagggaagggcggacaggagattctaggcgtgcctgtgttcgattccatcgaggaagctaaggaaaatacagacgtgaatgcgtcaattatcttcgtgccagcgccatttgctaaggacgccgcctttgagtccatcgaccacctcgatcttgtaattataattacccgggccacattccccatccatgacaccatggaaatcatggcttatgcaaaggccaagggggtgactgtcataggacctaacacgccaggtgtcatcagccccaaagtgggcaagctgggaatcatgcccacccatatattctcagaaggcacggttggggtcatcagcagaagcgggaccctcacctatgagattgccagtcaactgagccgggcagaaatcggccagagcacatgcgtgggcattggcggcgaccccgttatcgggaccccgtacattgaggtcctgcagatgtttgaggacgaccctgagaccacggagatagtcttgatcggggagatcggcggatcggccgaagaggatgctgccgcctacattaaggagaacataacaaagccggtcgtggcatacattgccgggatctctgcacctcccggaaagaggatggggcacgccggagcgatcattgcaggtaactccggcactgctaaaagtaaaatggaagccctggagagtgccggtgtgaaggttgctcgcaagccctctgaaatcgtggagtacattaaggaaatccgaggagagtga

SEQ ID NO: 3308 - DNA, 1203 bp, synthetic construct
  source 1..1203: mol_type = other DNA
atggacaaagaggaaatcatcaacaaactcatggctggtgagatgaagctgtatcagattgataaattcacagaaaacgctacagaggcgctggatattagacgcgaatttatagagcgtcattccaattgtgagctgaaccagatagccaattacactttggacatggagaaggcattttccaaaaacattgaaaaccccataggtaccgttcaagtccccattggcgttgtcggcccactcaaaatcaatggggaacacgccgacgacgagttttttgttcccctggccacctccgagggcgctctgctggcctcagtcaaccggggctgctcggcgatcacagcttctgggggagtcaatgcccgggtgatcggcgataagatgacgagggctccagttataaagaccgatagtgtggtagaggccgtgaaggtaaaaagttggtttgagactaaattcgatgagctaaaatccatcgccgagtccaccacaagccacggaaagctggtgaagatcgaccctatcatcatcgtgggaaactatgtctatcctagattcgtctactctacgggcgacagcatgggcatgaatatggtaaccatagctaccgaaaaggtgctcagtaagctgtacgatgatctgggggtgcatgcgattgcactgagcgggaatctctgcgtggataagaagcccgctgccatcaacctcgtggagggccgcggaaagactgtggtggccgacatcttgatcccagaggagatcgtcaaatccaagcttaagaccactgcaaaggccatggaagaggtaaacatcgcaaaaaacctgatcggatctgctgccgccggcagcatggcgttcaatgcccacttcgcgaacatgattggtgcaatattcctagcaacggggcaggacgaggcccacgtggtggaagggtcgcttggaatcacaaccgcagaggacagggatggagacctctacttcgccgtgagcatgccggacttacctattgccacaattggcgggggcacccggcttgaaaccgcaagcgaaggtctgagcattatcgactgcctggggtcaggcaaggtcaataagttcgccgagattgtgatttcaactgtgctggctggtgaattaagtcttgttggggctttggccgccggacacttggctaaagcacatcaggaactcggccgatga

SEQ ID NO: 3309 - DNA, 405 bp, synthetic construct
  source 1..405: mol_type = other DNA
atgagcgacaaggagtacattgatttcaaaaaggagtttaaagactttgcccaggacctggaaaacagcaagccaattttcgacgacgaagatctctccttcgatgacttcgataatctcataggcaacattggagaaaataatctgtccgatgattcaatcgacaggtacggcagtataaacgatgatctggacaaactagacagtcttttcgggagcgattgccccgaaatcacgctggaaacagagaacatgctcatgaacctgagcatcaaaaaggactactccaagatcaaagacttcaacttacggaagaaagagttctttaaggacctgaaggatttcatcgacgagtttgagtcaaccgaggagtcggacgagttgatgaagttttatgatgactga

SEQ ID NO: 3310 - DNA, 156 bp, synthetic construct
  source 1..156: mol_type = other DNA
atgtgtagttcaggaggcccaatggccgacctgtccatgaaaaaactaaaaaccaagaagtacaagtgtctcgattgcgggaatgagttcaagggtctgggcaggaaggtgatctgccccagctgccagagcgacaacgtcgagctgcgggaatga

SEQ ID NO: 3311 - DNA, 405 bp, synthetic construct
  source 1..405: mol_type = other DNA
atggtaggcatcgcgaaggctggggaggacaagatgctatttatcggaacaccagacaatgatgagattgtgcagtacctggaaaaggacgatttgattgcagtgagcagtttcaacctgggcaagaaatacgaaaaggggatacgctcgctcatttatctgacgcgggacatcgaatctccgatcatcgtgcttcccaaaaaccaccccgcctcaaagagactgaagatggtcctgagcgtcggtgaaaacgttaggctcgattgcggcatcatccccgggacccatccagagcaggacattttatgctcctgtgacagtctctccggactgaatatcgtgaaaagcgccgatggcgtgataatagagggaaacgtccctgactacaaaattgagcctttctga

SEQ ID NO: 3312 - DNA, 714 bp, synthetic construct
  source 1..714: mol_type = other DNA
atgctgttgcacgagcaggccttccagcttataggtgaatctattgtggtactggtggttctcataatcatcatcctaattatagccctgatcctgggcatcatcctcctgagacggaacaaactggtctttcctagtctcattatctttgttgtgaacgtcttctactcccctctaaagagtctcgctaatttcttacgattggatgacgctttggtggaccatattggcatagaggtgaggaataaagtcaacaagccaaaatttgaccagattccgcccgaggagaagattatcgtgctgccacactgtctgcgcagccgggactgcgaggcaagcctgaaggaaagcggaatcaaatgcacattctgtggaaagtgtgcaatcgggacgatcaagtcaaaggccgagccaatgggctacaaggtgttcattgtacccggatcgagctttgtaaagaagatcatcgagcaaaacaagttcaaaagcgtggtcggggtggcctgccacgtggatctgaaccagaccatgatggcgctttcagacttctatccccagggcgttcttctctccacttccggctgctttgagacccgcgtggatgtctctaaggtcctgagcacaattgggtactatgagtacaaagaaaaaaataaatccattgatgatgaaaaggacgacagcgaagacatcggtaggatcaaacccagttga

SEQ ID NO: 3313 - DNA, 390 bp, synthetic construct
  source 1..390: mol_type = other DNA
atggaggagaacgagatttctcccttcttcacgatcaaaaagatacgggaaggagacagcattcagctggatcagaaatacattaaggtccggtcaaacacagacaaggtgatcgccatccactacaaggcccccatcgaacgaaccatcgaactcgaaatgttctttgaggattataatccgatcgagaggctgaattacaacattggcgacaccggttgggtcggggcaaatttcagagggctcatcgatggcaaggacaagtccctgccagtggactatgattataagatcttgctactggaggaatacaaatgcctgagcaaggtggagcttaagcatgtaaaaaggagttccaaatttcgccctaactacactatagctaaatga

SEQ ID NO: 3314 - DNA, 672 bp, synthetic construct
  source 1..672: mol_type = other DNA
atgaacagtaaaaagatagcaatcgttctgggaattatacttctgagctttgccatcgtgggctctgcaagcgccttcaacctgttcggcggcccgactactgacttcgacaacaaattcatgagtggtacctttaccggggatgttagccggaacaatatcagcaccaatgactccctatccgactgggtggactcctatgaggataaggaacgcaatatcacctataacatgtcttgcattaaggggggctcattcctgacagacctctacgagctgcaggggatggccgcccctgaggtgaggaatttcaacggtgaagactggaaggtctactactctcaagcagtgccaacaacagatgaaaacaagaccgccaatgagtcctcggtaatcaatgtctacatctgcgaggctgatgtggataatgtgacctacatgattaacatcatcgcctatgacaacgaatcaattgactgtgacggcagtctctactgcggattctttaaggacgacatccagccacttttagagagcattactctgaaggatgcgaagaaggcgccccagatatacgatctcttgaacatgacgaaagatgactttaaacaactgcaggattatatcgagcaggtcaaaacaggaaacattcccgagacggctgaagggtga

SEQ ID NO: 3315 - DNA, 519 bp, synthetic construct
  source 1..519: mol_type = other DNA
atgaaagtcaccgtgtttcacgcaaacgagtgcgataagaagaaatgcactgcctttaagatggaaaagcaaggaaagtgtcgcattgtctacaagattcaccagatcccgagaggtgccgtggtgctcaacccatttagcgaaaaagcagtaagctttgaagatcgggggctcgtcgaggacaagggggtggttgggcttgactgctcctggaacaaagtgagcaagtctgctagtttcttctccctctcaaagtatcacaggtccctgcctttcctgatcgccgcaaatcccgttaacttcggcaagccctgtatattgtcaaccaatgaggcgatcgccgccacattctacataacgggcttcaaggaagaggccaaccatatcatggacggattcaaatggggccattcgtttattgagctaaactacgacctgctggaggcgtatagctctgtcaaaacaagtgctgaagtggtggagatccagaatgagttcctggccgctcacgagaaatga

SEQ ID NO: 3316 - DNA, 162 bp, synthetic construct
  source 1..162: mol_type = other DNA
atggaggacgtcgagatggccaggtttgaagaggcggagaaccgaatgttcaatgtgaagatctgtctcaagtgcaacgcacggaacccagctggcgccacaacctgccgcaagtgcggctacaaaggactgagattcaaagccaaggaaccccgggggtga

SEQ ID NO: 3317 - DNA, 189 bp, synthetic construct
  source 1..189: mol_type = other DNA
atgctcttcttattgtttaactacgtctttctgtacgccatcctcataattgcaaatctcagtttttcaattgacctgtccacaaacagcttcagcatctacaatcactatcttatcttcttcaacatccccctgttcctacttaaaaagatcaccctgctgaaggtgtttctgaacattctgaaatga

SEQ ID NO: 3318 - DNA, 750 bp, synthetic construct
  source 1..750: mol_type = other DNA
atggaaaacgtcgagcagcacctgaaagagattctgaagactcggaaaatccatttaactctaatcgaccccgatgagcagagccctgatgaggccgtcaatatcgctaaagaggcgattgccgggggcagtgacggcattatggtagggggctccactgtagacaccgctgctctggacggaacctgcaaagccttgtccgagaatatagacaacccgattatactctttcccggcaacatcaatggagccagcaagtacgccgatgccatcttcttcatgagctatctcaattccaacaacccgtactggattattggggcgcaagcccttgctgcccccgccgtgaataagacagggatcgaaaagatcccaatgggatatgtggttgccgagcccggcggaacggtgggctgggtgggggatgcaaagctgattccaagaaacaagccaaagatcccagcgatctacgctatggcagctgagaacctcggcatgcgatttttctatatcgaggccggaagcggtgcagatcagcctataccccctgaaatggtggcatacacaaagagggcgacctcggacatcgttctggtggtgggagggggtatccgggacggcatagccgcttacacagcagctaaggccggtgcagacattgtggtgaccgggacggtggtcgaagagacctcagatgtcaagggtaaaatccaggaaatcgtcgccggcgttcgcaaagcaagtgaatga

SEQ ID NO: 3319 - DNA, 1086 bp, synthetic construct
  source 1..1086: mol_type = other DNA
atgctgaacagtctgtatactgaagccatcaataagaaaggccagctgaaagagcctcttgaggagctcaatgaaagcaaaatcgatctggagagtaaatggaacgatacgcctatcatccccagcaaatccaaccacataatcgctgcgggtgacggaagctataacaagaagaaatacctgaacttcaatttctacgcagttgccgcggaatcactgatctataatcccactaaggaggagaataagctttcctcgattgagagcgtggaactggacattatgccccaccaatccttcttggaagaccgcctcagaaacatgatgagcatattcgagatcaagacagccatcaagaccttcagggagtacgaaatcgattactacttagatgacgggtcaatcctgggagacctcatccggcccattcctctggagaccatctcctttgaaaaaaaacaggaaattattgattctgcctatctaaaaatcaaaaaaggctacgaaaacatggactcggacataagctccctgaattataaggaagagtttaaggaattttttgatgacgaggagattgacgagcatgacctcattcggctcctggagaacttggagaacctgatagctctgaaatatctcttggagaacagaaagaagattattgccatctcaaagaccagttccagcaacgagctgttctacgctaacatcccagacatggccattctcgaccgattcacacggaaggaaggcttttctaaagcctattacaggaaggtaagctacaaagtcaagcatgacttcccaatagagaatgagttcttccgcaaccttgggttcaccaccgtctttgcacgtctaaaagactacaagaacatcatcaagatcgagtttccatactatattgatgatgatgaggaaataaagaacatcctctcaattttaaaggataattccacagaaggctacccgtacctgctaaagaaggcacacaaggatgtggtgatcagtaatcagaacatgacgagtctgagcaatgtgattgggtttcttgacaagtctggaagggagatgttggactga

SEQ ID NO: 3320 - DNA, 1509 bp, synthetic construct
  source 1..1509: mol_type = other DNA
atgattggaagatgcattggggaaacatccctaattgaactgagctttatctcgaaagagatgccccaggtcggcgagtatgtcagcatagagtacgatggcaaggtcatcctggggatgatcgaaagcatggtgcgcggcagcgtgagcttgaacgatgacatttacgaccctgacaccatcgaaaagatacgtgagatcgagggtgatgacttctacatcaagggcaaggtgacaatccttggagacataaatgacaatcttaggcttccccggacgcccgcaccgcccggaactcctatctatagggcttcatcagagattctaaaggacatcttccagatggacaactccctgaagctcgggcacctgatcagtaacgaggaggtggaaattggagtgaacataaatagtatggtgtcccgacacctggccattctggccatgaccggggccggtaagtccaataccgttagcgtaatcattgacggcctcctggagtataatggctgcatgctcatctttgacatgcactcagagtacgtggacgcagagtttacaaatggcgaggttaatgtgattgacccaatcatcaatccgcagcatatggaatttaacgagataaagaaactggccaacatcccgagtaacgcgcccctccaggagcggtacttcagaagggcctttaatgaagctcgcaagaaagttcaggaaggggtggccaaaccaacagatttcattgaaattctagaggatgtcctggtgagcatgcatgaaagcgagcagtatgaatctgccgacaagaaaaagatcttggatgtgatgaacaaaatcgaagacctcaaggtcaagtacgataaactcctgaacaccaacgtgggagatatcctcaagcagctcaagcctggaatggccaacgtcttggatctgggccaggtcgatgagaacactgctgaagtactggtagcacatgtcctccggcgatcccttcgcagcagaaaggcttacgtaaaaaacaaggataagtctgccttatcctacccaatcttcttcattgtggaggaggcccacatcctggctcctcagaacaggaatccaaattccaaatattggatcaccagaattgcgagagaggggcggaaattcggtctgggtctgtgtctggtcagccaatctcccaaatctgtggatgcagagacgctgtcacaagcaaacaatatgataatcctccgattggtggagcccaaggaccagcgccacgtgcagacagcgagtgaaaacctcagtgaggaccttgtgcagcagctgccttccttaaacattggggaagctttggttttaggtctgatgacgaaggttccaaccctggtgaagattaacgagtttaaaggcaggcagcgcggcggcgacctggatatcatcgagcaatgggcctcgcaaaagaaagagaaaaaggaaactttgcagatagaacttacccggttcaacgacctgagcggagggtactga

SEQ ID NO: 3321 - DNA, 1392 bp, synthetic construct
  source 1..1392: mol_type = other DNA
atgcggtttgcacatatctcagacagtcatctgggctgtagacaattcggcctattggaacgagaaaaggacttttacgaggtcttcaaccgcaccatagataagataatcgaagaggacgtggatttcgtgattcacagcggagacctgtttgacagcaaccggcccagcacagaggcactgctcacttttcagcaggcgttgctcagactgaacgaagcaaagatacctgtgtacgccatcgctggaaatcatgattccatactaagaaaaggatcgttgcctccccaggtcctattcaaggacattggcctgaatataatcagtccggagcatccagtgcaccagctcggggctgtgctgatctgcggagtgccattcgccaccagttcacagaagaacgcattggtggagaattataatatcctctccaaagttgcggacaccgccgttaaatccatcctggtttcccaccagggcattagcaaatggatgcctgaggacagctacgagattgatctcgacgatctgccaaagaactttgactactatgccatgggccaccttcacaatttctatgtcgaggactacggaaaaggcaagctggtgtacccgggctctatggagatcaaccggaccagcgaactgaacgacaactttaaggaatttggaaaggggttctgcatcgtggatctcagtgaggacattcccacggtggagagggtcaccatcgacctcgccaggaaattctacaatgaaattatcgagtatgacaaactggacgaacgcctgagcgtaattgaggaggagctgaaaacacttgaggtgaaacccatcgttgatattacagtgcgtggcggtgactttgagagcgctgatgtctacgaaaagatcaatgaaaaaattggtaatgacgtgctcagtttccgccctacgttcaagccagacaacgttttaatcggggagaaccaactcgatggggataaaacattggaccccaagacccttctgaagcagacagtagataagaaattcgcccgagaggaagtcactaagctgagcgtggacctcctggacacgttatctgagaagaggatgggggaagccaaatatatctctgacgaattttacgatgagtattactatcacaaggatgaaaacgaggtcagctccgagtcagagtacggcgggtctgaacttaatgtgaatgagcacaacgatgatggtacttctcacctggagtcgagcgcttatgattcagtgtcagacaactcctccagtctggatgactaccttaacaagaacctggactcgaaggaagaagtatccgataaggaaaagagcaaggagaatcaggtcaagaccaaagaggtatccctggataacttctga

SEQ ID NO: 3322 - DNA, 2799 bp, synthetic construct
  source 1..2799: mol_type = other DNA
atgatatttaaacacctgcaactgaagaacttcaaaagtcacgccgacacggagctggatctggatcttggcatcagtctaatcgttggtgaaaacggggccgggaagtcaagcatctttgaagccatctcctttgcactgttcaagaactacacaaccaacaacatcaccgacttggtgcgcactaacaagaatctggacgaaaagatagaaatgtcagtgaagctaaccttcctgtgtgagggaaacgaatatatggtggagaggggaggcatcttatctccatcaaagaccaaatccaagcctaatttcaagtcaatctccaacctgtttaaaataagcaacggacgagaggatatcattgcatctggcaacaaggaggtggacaggcaaatagaagagctcctgaacatgaactcctccacctttctaaacgccatctatatccgtcagggagagatatctgccctgatagacgacactcccgcaaaccggaagaaactgattaccaagctcttgagaattgaggaattggaaacagcatacaataacattccaagcattattgaagagtataaaacaagaaaggccgttctggagagcaacattcggccggagtccgagctgaatttcgagctgaagaaggctaaggaagaccatttcaacttagacgaccagataaaaaaatcaaaagaggagtttgaaggcctcaaggtcgagctggaaaacatcaaagaggagaaggaaaaactggacaaggagaaatcggatttcgaatcgctgaaactcaagcacgcccatgaggaggagaacctgagtgctctaaacaagggcaaggaagagctcttcacgaaactcaatgagatcacaagaaatgaaacagagatgggcattctgaagcccttctgcgagaaacttcctatttacaaggaatttaaagagtcctttctcgctctgaataagctgaaagaagatgaagagaatcacaagaagaccctgagtcagatcgaagaatacaagacggtcattaaggatgagcaggagaaccatgagaaatacattgcgttagaaggcgaaatcaaggtcctcaacaacaagaagatcgagatgtcctctgagattaaaaacctgaatgaactggaatctcgcaaggacaccctgacccaggaggtgagtctcaacaatcagaagctggagacattctttaacagcagcaaatcggttctctcccagtttgatttggaagaggaaatcagccctatcaaaaccaatgatgacttcaacaaactggaaagtatcgtggaagaccttcgaaccaatctccggacttccattgacaacacaagcactgagatagataatctgaagaaggaatccatcagtctaaagcaggaaatcaaatcactcgatgagccactggctgacattaaaaaggtggagaacaaatgccccgtctgccagtctgaaattagtgaggataagaagaatgaacttatcaacgggtatgaggccacaatctcgggcaataccaagaggataaatgaaatcaatgggtttctccttaaactgaacgaggataagtccctcaatgagagcaaattaaagagccttgattcaatcaagaacgatatttacgccaataagcatattgtagacgaccttgacaagtccaataagactcttgaaacattggacgctaaaatcaaagagctccaggggaaaaaggaggagctggaaagtttggataaaatgatagagtccaaaaacggagagtttatcgagcttgaagcccacaacaagaaatacctggaggcaagcacgctcttgaagtctttccctgacgaaaccaaggtcaaggacgacttatacgcgatatatggcaagatcaagactgaggacgaaaagctgaaaacatacatcagttcagattctgagctcagcctgaatattaccctggaagagcttgacgagtcaatcgaaaaactatccgagaaggacaagcgatacaatatcctgttgggtagcgtgaaagataagaaagagtacgaagataaatacgagaataaaaagaaagagatcgagtccaagactcaagagattgaggagattaaaaagcagatcgaatcttccagctacgacgaggagtattataaccacgtgaatatcttgcttgaacggttaaacaacaaattcacctattactctcaggacattgctgtgaaggagacgaatctcgccaacttcgaaacggtaatcaagaacatcgaagagatcatccaacagaacagagagtacaaggaggagtacatcgcagttaccgagtattataatctcttggaggactttagaaaactctacagcaaggacggcatccagagggacctgaaaagccagtcccgcccgctgattcagaagaacaccaaggatttcttcgacaagttcagcttcaagtactcagatctgatcttggacgatgactataacatctcgatttttggccccgagggtgaggcgaatatcgatatggtcagtgggggtgaaaagatcgcgatagctctggctctgcgcttgggaatcactcaggccatgagcaagggaaacattgagacaattctcctggatgagcccacaattcacctcgatagcttccgccggcaggagctgatcaatgtactgaggagcatgagcataattccacaaatgatcatagtgacgcacgataccgagcttgagactgccgccgacactctgattagcgtggaaaaagaagaggggatcagcaaaattgaaaatagttga

SEQ ID NO: 3323 - DNA, 426 bp, synthetic construct
  source 1..426: mol_type = other DNA
atgtttgaggaggacgaaaaggtaaacaagatatttaatctgattatcacgcagggcatcgactcggaaaatgaatacaaaatctttacagaacggctgtacagcaagcctgacttcctgtggaccgagtccttcgcaagggactatgcgccatttggcgaacagttcttcagtaaggtcgacatcatcgtgctgctctccggtctttacaacgacaacaaggagctcttcgataccctaatcaagaaatcagaggagtttgatattcccctcctgttggtgcgcccgtatgggatggagattgtccccgaggagttagaggaaaaggttaaaagcgtggtgggatggaatgccaactgcatcatagatgacataaaaagcatcattatgggggattacgacttcgacgatgatttcgacatttga

SEQ ID NO: 3324 - DNA, 1074 bp, synthetic construct
  source 1..1074: mol_type = other DNA
atgacatctcgaagagcagaacatgagagataccttaaaagcatcctatcaaactccctatctagcggacacccctctaaggaggccatagaacgctatcggaaatcatcgccaacttactataataagctcaagctcggcctgatgaacaaatacaaggactgggacctcttggacattgaagggagtagtgtgatcgagaacatctacggagagaccctgcggatcagacgacgggaaaagctcgacttccacctagaggataagaaagacgagatcaagaacgagctcagcagtaatttgaagttaattcccggtatcggctaccagaccgagtcccgcctgaaggaaaacaactaccatacaatctatgacctccttcaacacgacaaatacagccacaaggcccaaaaggccttgaatcggatcgaaaggaactgtttcgtttctgatttcaagctgctgaaggagtcatccaaataccctatggatcactcccagcccattgacaagaaccgcacgctgaaggccctgagctcccttgatccgtttaacctcaaatttatggatattgaaactcttgggctgtcaaacgtccctatcatcctgatcgggatcgctgagataaagggcaaatggattgaatccaaccagtatctcctgagggacattgaggaggagcccgcagtgattgaggcttacctgtcccacctggatgaggcaagcgtgcatgtaacctataatggagccagcttcgatattccttacatcaagaatagggcgcattattacagaatggactataaccttgaccagatacactacgacctgatatacccggctcgcaatctgtggaaagatgtgctgcccaactgcaagctcaccacaattgaggaaaatctgttcggcatcaaaagggaggacgatgtccctggcgcgttcatcccagactattaccagagctacttaaaagaaaataacatcggtccattgatcccaattatcgagcacaatcgtatggatatagtgtctctggccagttttctgatgaaaatttatgaagaatcgttttga

SEQ ID NO: 3325 - DNA, 309 bp, synthetic construct
  source 1..309: mol_type = other DNA
atggagctcactgccgaaaagcgcaaagaactgcaggagaaagtcaccacagacatcaatgcaatcctagaaaagcacgagctgccgtataggatggacgggatctccgtaatgaagacctcaaaaggcaccagttttctcggcaacattagagttcacgatccctacaaggtcaaggatgtgcgaaaagaggtggaggactacttcgaaagctacggaaacgtgaccatcactagccgggatgtggtgccttgctgtgagctgccatatacatatataacgttccatattgactacttcaacgagtga

SEQ ID NO: 3326 - DNA, 2757 bp, synthetic construct
  source 1..2757: mol_type = other DNA
atgagcaccgaaagcaaagataagcagatgggcaaaatcgatcagttcaaaaacgacatccggttcaggagaaagatcgaatatgtggaaaccatcccagggaaagatgccagctataagaaggtagatgtgctgaacaaaagaattttacagtatcttgaggataaaaagataaagctctacagacaccaggctctggctatcgaaaaaacacgggaagataaaaacatcataataaccaccccgacagccagcggcaagacgttggccttcaacctgcctgtcctggaggaactcattagcgataatgatgcttgtgcactgtacatttaccctgccaaggccttaagttacgaccagctgaaggtgctcaggaacttcgaggatgagatgggcctagatctcaacccaaacccgtacgatggggacactcccaaggctaaacgctacaaaatccgccaggagtctcgcatcatcctgaccaacccctaccagattcaccatatcttggcttggcaccaccaatgggagcgattctactcaaacctaaagtacatcatcatcgacgaggcccactattataagggcatcttcggttccaacgtggcgtttctcatccgacgccttaaaaggattgcaaagttctacggctcggaaccgaaattcatcctgtcctcagcaaccctggcaaacccactggagcttgcagagaagcttacgggagagagtttcgaactcatcgacgaggactcgtcccctagcggggagaaggattttgtattgtacaatccctataagtcaatcaaaaaggattccaaggaccagtttgacatggatgagtattcacgctctgtccacatggaaacagagcgcattttcctgtacctgattttaaaagacatacagacactctgctttacctcaagccgcaagattgccgagctcattgccctctggacaaaacgtgacatggaaaaggtcaaaaagcgaaacgtggagaagatcgcagcctaccgggccggttacttggccgaggacagaaggcagatcgaggacggcttgaagtcccgggactatctgggggtcacctccacgaatgccttggaattggggataaacatcggaagcctcgatgccgttatcatttcgggctttccagggagtatgatttccacctggcagcagggagggcgttccggccggacaaaccagaagtccctggtcatcctggttgcattcgagaaccagctggaccagtacttcatgaaaaacccggaatttttcttcgacaagcctcacgagaatgtggttattgacctcaacaatgaaaagctactgaaaaaccatatcatctgcgctgctaacgagttgccccttaccttagaggaggcaaaagaggaatttaatgtgacggaggacttcctggacaatatagtgcggaacagggatttacggaaaagcagagggttctacatctatccatatgatgacagccctagcttcaacttttcgctggaccagatcagtaatgagatattcacggtgatgaacggccgaactgtgatcgagcatatggaaaagtccaatatgtacagggaagcccacgagggcgctgtgctgatcaaccaaggacagacctacattgtgaataaggtggatctagacagccatttcatctttgtgaaaaagaaggatgtggaagcccatacaattgccctgaaacgtacaaacatcaagatcaccaaaaagattaaaaagcacaggatcggagagttcacagtccatttcggtgaacttgaagtagaggaagactactttaagtataagctgatgcaatacagcaaggtcatcggagaatacataatcgacctgccccccctgaagttcaacactaaaggcatttggtttactatcccagatagcgtcaaggacaagctggaggagatctacaaggacgaaactgaggtcttcgccggcggcctgcatggaaccgagcacgctatgattggcctcttccccctgcacgtgatgtgcgacaggtttgatataggtggactgtcaaccaattaccacgaggacacacaggaggcgactatattcatctatgacgggtatgaggggggcataggaatctgtgagaaggcgattgacctcatcaccgaacttaccaaaagtactagaaacctgatcaaaaactgcgagtgtaaggacgggtgtccctcttgcatctatagccccaaatgcggcaatgataataagcctcttcacaagaaggccacggaatacattctggactacatgtgggacgagatgaataagctcagccccgaggaccttgctaaactggaggaagagagaattaatactgagaacagtgattatgacaatctcaacggtcattctgatgttgaagttgaatacgacaaaaaaccaaacaatgctgagattgaaattgacgacgaacgggaagcggataatgctgaaattgagatagaagatgatgaggcccaagaggaatatgagaaggcactggaagagtttaataaggagaactattcaattgccaaagacattctaactgatattatcataaactacgacaatcaatccgccgacgcgtactatctcatcggtaagatcctgtttattcaaggagatagtatgggagccctctcctttgtgaaaaaggcactgtctattgagcctgcgcacgaactggctaatgagttttactttgagttgaagaatagttattga

SEQ ID NO: 3327 - DNA, 2568 bp, synthetic construct
  source 1..2568: mol_type = other DNA
gtgatcagttacgaggaatttgaaaagctggtggtagagatactggaaagggatatctcttccaattcagaccagaaggccgctatctctgctgataagtcacagtccctgttcattgtcgccggtcccggctctggaaagactaccgtgatggtgctcaagattcttaaattcatcttcgtcgatgatgtccagccaaaggagatcctggccaccacctttacgaaaaaggcggcttcagaactcctctcccgtatcctgagctggggcgacaagctgaagaagaaaatccccgtgttcattatggataaggtcatgaatggggaaatggcagatggcagcgttgtagacaaggtgcgcaagatcgacttcaatcaaatcaacgtcggaacaatcgacagcatagccgatgagctcttacgggtccatcgcgacgccggtacaagccagcctatcctgattgaggactttgtggcaaatagtgtgatgattaatgaatgtcttctgaagaacgatatgtatctgcatgagtccttgcaggagtatctggctgagatcacaggaaaggaaagccagattgaccagaagcctaaggtgaaaaacctaacagccatggcagatatcctcctgagcatcaaggagcacatctattacaacatggtggacattaacgatatcctggcggatacaaaggataatgagaggggcaagaaaatagccctgaacctgatcatggaatatgagaaaaccctgagaagtcagaacatctttgactttgccatgttagagacggaatttttaaacagactgagttcaggcaaattggatagcttcctggatgacgttaaagtgattcttgtggacgagtaccaggacaccaatctcctgcaggagagcatttactttcggatcgccgagtcggccattaaaaatggcggtaacattactgttgtaggcgacgacgaccaatctttatacagattcagaggagcgagcgtggacttgtttaccaatttcatcgaacgcgtgtctcggattggcatagaagcgaaagagatcaacctcaagacaaattacagatccactgaaaacatcattgacctctgcaatgacttcgttgaactggacgatgagtatcaggacgctcgtgtaaaggaaaagcctaaaatcgtgtttccgaatctggacagctcggaggacacgtcagagaatgaatctcccgaggacctccctaatgaggacgagatagaaacccaaaagattcccgtgctgggcatgttccgtagctccgaagaaaagctcgcaatggacctgactaacttcttggatgaactaaacagaaagggcaaagtcaagcgaaaggttaagcgcgtcctgaacaaggacatcaacaaaaagctaaactcagacagtgaggatgccctcgaaagctacaagaagtctggctttgagcttgcccagagcgagggggaaatcataatagagcttgatgaggagaccgggtccatcgacgacgtggccttccttacatactcccccaaggaagtcactcacaactcgcgcaaattcccatttattctcaaaaaacgcctggagcacctgcggactcccattagagtcttcaacccaaggggacaggatctgcaggatatcgagtcggtggcagtgttctgcgggttgatgctggaatgcatcgatccaaactcctattaccagaacagtaataaaaagcttccgcgcctggctcggcgaaatatgtcggtctggcggagaaaagcccagagtttcatcaaggatgtcaacccagagccgcactctccaatttcccttgaggatttcatcattcattggcaggtaaggcagcccttcaacaccaacggttcaaaagacctgaaatggcctaaggaggcaggcctaatggagctcgcttataaattggtgacctggattgaagagttccaggacgacgacgagggactggtttacctcaaggcgatcacccaaaccatcaatcagacaagcttcttcaacaaatacagcagtaacatagttttcacttcccacgaggctgaggaggaatccatcaatgaggcattgatgaacatcttcgtccctatcgccgtggggggagttaagattgacgagaacctctttgaggtcataccgccaaaccgatttaacatcatgtccatacaccaaagcaaaggcctggagtttcctctggtgattgtggatgtggggtccaggttcaagaagaatacggtaagggagtccaacctacggtttcccaaaaaggcagacaagagttcaatcattcaggaccgcatccgaaaatacagcagccttggtgaaagcgaacgggatagtaaggatagggcctttgatgacctgacccgactctacttcgtggctttctcacgggccaaggatgttttgctcttggtggggctgaatcccaatattgatggatataaacaaaaagataaactgcagaaaatccccaacgtggctttagggtggaacagggacgaggaatttatagggtttgacgacatttatcttatttga

SEQ ID NO: 3328 - DNA, 1410 bp, synthetic construct
  source 1..1410: mol_type = other DNA
atgaaactaagcacacgttctaaagagtatatcattccagaatatagtctaacgggcgacctcttgtccttcctcacttgcaatttgcagtaccgctaccagaataaggggaatcttcctccctccatgcccatccaactgtggtttggagagtttattcacggagtcatggaagaggcttacttaaaatggaataaccttagtgatgaggagaagaaggacttcaagtgggattgggagagagacattaagcccatcgaggatatcatcacaaaacgccttaaggtcaagggccttaaccctccaatcaactacacggagaactacgggccgaaggagaacatgtacagtgcccgggtggaccgctcaattaagatttggggaccccatctctttccactgatcgaggatgcggaggtgctcataaagggcatccgagatatgccgaaggacaatgagggacatagccggtccgagtactatagcatcaacggggtgatcgatgtgctgagctccgtcaagctggacgagatatattcaatagagaacgactttaacggcgataatgaaaaatccaaaaacaccttcaaacagacaaccctggacagtttcttcgtgattgattcatgcgacattgacaatgtgagggacaaatcctcgaagaaatcaggcaataagatcctcgaatatttggctaataatgaggagttcaagaccattctggaaaacctggaagacgatgaatacgaaatcattatagactataagggtatgagaaggcctagcgccccaaacaaaaacgacatcgataagaataacatccacttgctgaacgaggatagcaacgacgagaactcactcgaagactacaaaacctggattcagcacgaatggcaaattctgacttatgcatggctcagatccatgcaggaggacgccaaaccagtcatctgtggcatcatcttctacctgaatgagctggtgccctcgaccgaggatttgctcctgataagggaggacctcgagaacaataaaacggacatccctcgacagtccattcccaaggactgggaaatactgaagaattgggatgagaacggtccgaaggcgatccacgatgacctgagcaaaaagttcaagatggaccggagcattaggatcatcaacataaaggaagatctaatcgatgacagcctgctggaatttgacgaagttgtaaaccagatcgaaagctctatgattcgcgagttaaatgggtctaagatcaaggaagcctggaacgcaaacgccgaacagcggacatgcaatgcttgcgatttcagtaccttttgtaataaaaaagatctggaagagaacactaacgagaatagcaacgaggaagacaacaagcccgttttcagcgtaccttga

SEQ ID NO: 3329 - DNA, 681 bp, synthetic construct
  source 1..681: mol_type = other DNA
atggactacgatatcaatgaaaacgccaactattcgaaaatatttatcgatgagctaaagctcagccgcctccccgtggccgtgaagttcatcaacgacgagagtgaagtgccagagggcattgagaagatcgacgagagtttacgccactgtgagatgattacaaaggcagctaaaggcgagtccttctactccaccgcggaagagcaaaggtgcgccggcggggcttctgccatgggactgatcgacctccctcccaagatcgctagcggtgaactttactacaacctgggcagatttgaatctattgagaccgctaagagtgttctggacaatatttacagaaaggatgaaaggtcctttggcattgtctatgcgcccctggagaaagccaacttcgctcctgacgtggtggtagtcatcgcaaatccaaagaacggaatgcggatcacgcaggccattgtctacaatagcggggagatgttcaacgcaaaattcgccggaatccagtcactgtgcgccgatgcagtgagcggaccgtatgttagcgggaagcccaacgcaactttggcctgctccgggtcacgagcatacgcgggcatagaagatgaggagattgcttatggtatgcatcgggacaacataaaaccaatcatcgaagcctttgccaatatgaaatga

SEQ ID NO: 3330 - DNA, 741 bp, synthetic construct
  source 1..741: mol_type = other DNA
atgagcaacctcaaaattatttcatggaatgtaaacggcatccgcacccgcatcaaaaataaggacatcaatccagtgctggagaaggagcctgacattatcctgttccaagagactaaagccagctacgagcagatggataagaagttcctaaataagaacccctacgactattatttcctgaaaggcgagagcgctaggacaggcgggctcgcaagctttaccaacatcgtcccaaaaatcatcaaacggttctttattaagagtcaggatgccttccacagggcgtgcgtcctcgatttcgaggactttacactcatccatatttacgcacccgccggaacggggaaaaaggcgaattttaaccagaaactggattatttcaacagtctacttaaatacgtcgaaaagaataaggacaagaatttgatcattgccggcgactttaacatcgctcacaatgatatagacatatccaacaaggacactaaagtgagcttcaccgacgaggagagatctgtgctggataagcttgaaagttttggatttgttgacgccttgcgactgttcaacgaggaagaatccttttcatactggaagaacaaggaagaaaacgacggtgctcggctggattacttcttcgtgagcgaatctctgaaggacaaggtgaagtcttcctcgatattagttgatgtggaagggtccaaacacctgccgattgagctcgagatcgagatctga

SEQ ID NO: 3331 - DNA, 657 bp, synthetic construct
  source 1..657: mol_type = other DNA
atgctaagtgtgtcagccgtcatcaccgcagcagggaaaaactctagaatgcgacaggatcaggagaaaaggaatcttccgttgcagaacaagcttacactccccttcaaatccaaaaccgttatagagacaacaattgacaatgtgctgaacaccaagggcattgaggagtgcgccatcgtattagggcattacagcagcgaaatactcccattgatcaaggatatcgatgacgaacggataaagatagtgatgaacaatcccatcgatgtgggcctgagcgtctcgctcctgaatggactcaacaacatcaacagtgacatcgccctttgcgtgacggccgaccaaccaacggtcagttcaactaccttcaataacattctggattctattctcaattcctccaatcctaataagaccatctctgtgttgaggcgcctggacattggtaagctcgacactgctaaaggcctggggatgcccttcgctgcgagccggtgtgagctgatcgattacatcaaggacaaggatgacaacctgaacccaatcctacgcgagatctttgccgacggcttcgaattttacggagttgaagagaaccaccctgacgagctgattaacattaactattactccgactatgaaagcctgctgtga

SEQ ID NO: 3332 - DNA, 1230 bp, synthetic construct
  source 1..1230: mol_type = other DNA
atgccacggctcttcaaaaaaacaagctttaagatttttattgcactgattgtcataataattttactaatccccatctccatggccatgacaagtcatcataatacccagaacatggctgagatctccaagtatgagaatggatcaaccgtctttaacggagacaacatcatcgacaagaacaagatcaacaagtacccgatagttagcgatataggcgctttgaccgatcagatcctgaggggcgacattgccgatgccttcttcagcatatccacaggggtggtgcctacccctgcatctgaactggtgaccggaaacatcacgaagtccggcgagattcaaggcatcaaagggcctgcttacatcgatatcgagaaagaccagatcaacattgtggagcccggcaactttctctatggattcaataccccatacacacaggcggtgattgttgagggggggattgacatcatcaacaacaagaccaatgagaccatcaagcacatcaatgccaatgacatcactaatgacacgctgccaggagacatggtctccgaggagacaataaaatactggtacaacacatcacaggtgggttccaaatacaatatcgaattttgcattgacgggctgaacgataaccgcagctacattactcccactgagctgaaggagaaattccccgaggcctataactactcaatcaagtaccccggaggctctccagttattctttataaggacaacgtcaatagcacggttgtaagcagcacctatacctacctggggtcacaccctcagtataacgacgcaaaccgagaatacaatgccagacagttcgtgacagcctggaacggcacggtaattcctgccaatacctctggctgcggcagggaaggtgtgtatttcagtgccgtgaaggaagccaatgcccagtcgggcatggctacacacggtgtgtgtccgcccgcacgcgcgctgcggaatgctgtgcttgcgctggggttcagtttgccggtagggatggattacggtgaggatgctgtcctctttggatacagtcccagcactggtatcagagtgaccaacactctcgactatcccatccaaatcaacatgtggactgaaggggccggcactggcatggcaatatacgcagatgtcgtggaatatatcccaaataatgtcaccactaccaactcgacagaaaccggaacaacgatttga

SEQ ID NO: 3333 - DNA, 1332 bp, synthetic construct
  source 1..1332: mol_type = other DNA
atgaaggctgctataattggtctgggcgtagaagggaaaaaagcattgaatagtctactcaaacacaactgggacgtgtatgcgagtgacctgaatgtcaacatcaagatggacaacctgccaattagcctggcccaggtgaacgtgagtccatccaaggacaaaatcactttccaaaaggacaacctcaccatcgatctgggctttaacaatcaggagatcatcaattccgctgacgccgttgtcctgagccctagcatctgggggagccggattgcagagcattacaaaaactctgggaagctcttgtgtgacgtgaagaccaagcacagggacatcttcacaatcggcgtaaccggaaccaacgggaagacgaccacggtgtccatgattaaggaaatcttggagaatgccggcaaaaacgtgctggtcggaggcaacggtggaggaggcttcgaaggctactacgacctgatcctcgaggccgatgaggaagaatacgatgtcctgctgattgaggtgtgtgacatgactgtcgggttctgccgctattgctttgacttcgacattatagcccttacaaatatgggaaacgatcacatggacgtacacggttcaatggaagggtataaggattccctcaaggagttcttcaaagataagacaatatttctgaataagaaccccgagtttccagagagcttcaaggaagaatttattggcatttctaaaaacaccatagaatacggcgaaacggattatgagattgatctgttcggccgtttcaacaggctgaacgccgggctcagccagtcactttccgagtacatcaatgaaaacgtgtttgagatagatgaggaaatcattaaaacaagcctcgagaacttcaagcccgtgaaagggcgattagagctgcttaagctaaatgactgcacaatctatatagggaagtccgacaactcagatgcgattaaggtcattcttgatgaggttgacttcactgccatcttcattggaactcccaggcataacgagaaccatagattggacatcctcaatgaggtggtgaatgcaaatcccgacgcgatcatcctcttcccgggacttgaggataccctagatcaggcaatctacagattaggcctgctgaactacgacggccggatcgaaatagccaataatctggacgagatcgtggcctttgttgccgaattttcgcacgaccctgctatctttattggtggaaacggtcaagagaccattatcaaaatccaggatcggctgcgcgagatcgctgattcgatcaatgaaagtgattacgagtgcgactga

SEQ ID NO: 3334 - DNA, 1104 bp, synthetic construct
  source 1..1104: mol_type = other DNA
atgaagggtgaaatgatgacatctgatgagaagattaaattggtcgaggaactctgcatgactccagggatctcggggtttgaggaaaagattgcagagattatcaaacgcgaattaaaagatgtcgccgacaaaatcgaggtagacaagatgggaaacctaatcgctacgaaaaaaggtagctcaaaaaaaggaccaaccgtcatgctggcctcccatatggacgaaatcgggctgatggtcagctacatcgacgacaatgggtaccttaagttcgcaaccattggcggaatcaacgaccagatgcttatgaaccagacagtggtgatccactccaagaatggggatgtgactggcgttatcggcagcaagccaccgcatgttaccaagcctgaggagaagaagaaggtggtgccctacgacgaaatgtttatcgacattggagcaaaggacaaggagcaagctgaggagatggtgtcaatcggcgacccaatcacattcaaaacctggttcgaagccttccccaataatctcgtgatgtgtaaggccctggataaccggctcggctgctatgtcatgatggaggtcctaaaacgggtggattccaaggccacggtatatggagtgggaacaacccaggaggaagttggcttgaaaggggcaaaggtgacgtcatataagctgaaccccgacatggcctttgcgctggacgtgaccctctccggcgatcaccccggcataaagcctgaggaggcgcctgtggtgataggaaagggccccgctgtcatcctgatcgacgccagcggcagaggcataataacccctaaatacatccgagagctgctgattaacactggcgagaaagaagagattccctaccagcttgaagtaagttctggtggtacaactgatgggaccgccatccacctcaccaaggaaggaatcccgaccggggtgctgtccgttccaaccaggtatatccacacaacggtgagcgtggctagtatggatgatgttgagaacacaattcagttgattgtcgctgccataaacagcctggaaataaatttcaagtacattttcagtattctgaacactttttga

SEQ ID NO: 3335 - DNA, 1161 bp, synthetic construct
  source 1..1161: mol_type = other DNA
atgttcggggtaaagaaaatgaagtacaaatctaaatttggttttggctgtatgcgcctgcccctaaaggatgaaaacaacccacagtcaatcgaccaagaatactttaacgagatggtggatacctatatggagaaggggttcaactatttcgacacgtcctacgcatatcacaatggcatgagcgagatcgcaatcaaaaaggccctggtggaaagatatcctcgcgagtccttcctgatctgcgataagatgcctacctgggcccttacaagtgaggaggacaatgagaagtttgtaaatactatgctcgaaaggctgggaatcgactattttgatgtcttttttgtgcacaatattaatattccatggctagagctggctgaggaacataatacattcgaatatgtgaagaacatgaaggagaagggcatagcaaagaagatcggaatcagcttccacgagaacagcgacctgttagaaaagttcctcaacaaatatgctaaagacattgacatcgtgcagctggagctgaactacttggattgggaagatcctgcgatcgaggcccacaaatgctacgacctgtgtgtcgagcatggccttgacgtctacgtgatggagccactcaagggaggcgtgattgtcaaccagcccgaggagattaacaacgacttcaaggagcttagtcaggacgcgtcaatagccagcttcgcaatgcggttctgtgcctcccttgagcatgtgaaaatagtcttaagtgggatgagcaagatggaagacctcatcgacaacatcaatacctttgaaaacttcaaacctctcagcgaagaggaatttgacttcctgctgaaagaagctgataaactgagggagaacctggccgtgccctgctcggaatgcggatactgtctgaaggcctgcccgctcgagattcccattccggagtacttccgactgtacaatcaccacaaggttcagaaggaatccaatatctaccggttgtacttcgataagttggccgatgagaaggttcccgctagcgactgcacacagtgtgaaacctgcatagattactgcactcagaaaatcaacattccaaaagaattggagaaactctgtgagcatttccaagagggtttttctccctatgggaattga

SEQ ID NO: 3336 - DNA, 7899 bp, synthetic construct
  source 1..7899: mol_type = other DNA
atgaagtttcggacaccatccaagaaggacaccaacaaggatattgagaaggagttcaagaacttgcgaaaagagctcctggacctcaccctgcgcaaccccctcctgaacttcaaggctcgaaaccgaaacctcagtattatcaatcaatcgcctatcaacatctacaggaccctggtgctggagaacaaaaagatgttcttccaggccaataagaaggaaactaaaaagtccaaggcccacgcattcatcgacgaggctaaggagttcctatcccaggaaagcgacaagaccttgaaggctgaccttagccctagtgagcttcagaaaagactcttctatatagaccagcagtctaagacaatggtacaggagcaggggtacaatatcctatacattgcaatcggctttatcgaatggatcgacaataagaagccccggcagaagaacctggcccccctcatcctcatccccgtggagatggagcgtaaaaaggtgggcaacagcttctcactgtcctggacaggggaagacctgcagaacaacatttcgattcaagcaaagctcagggagatcggcatagagttgcctaagtttgaacagacttcctatgtggagggggtgaaccactatctggaaaacgtcaggcaggcaatcaggccctttccaaagtgggatgtcaaatatgacatcgccctggggttcttcagcttcaccaagttcgtaatgtacaatgacttgaacccggaaagttgggatgagaacatcgacttgaccaagaatgagctgatccaggccatcttcaacccaagcaagaatgtatacgaagacacctttgaagaggacgatgtagatgagaagctccactacaagaccatgtaccaggttttggacgctgattcctcccagattgccgccattgaaaatgtcaaggccggccataaccttgtggtcgagggtccccctggaaccgggaagtcacaaaccattgtgaacttgatagctgagctgattgccgaggggaaaaccgtgctttttgtaagtgagaagatggctgccctggaagtggtcaaaagcagattggatagcgtcggcctcggcaagtttgtactggagctgcactcccataagacacgccgaaagaaattcctgaaaaacctccagaaagccactaacgtgcgctcaacaagggatctgaagctcgaccaaacactgagaaagctggagaacctccgtgaccagctggaccagtacgcagagataattcaccgtcctatggccaacgtcaagctcagcccatttgaactctacggtatgaaggagtcttccgaggactatttctcccgccagaacaggctgctgcctctcgtgaggttcgacaatccagaagatatcaccatgaaggatctggatgatataatcatatcactggagaacctatccgagctctatagcacaatctcaaaaaacaatccgtggagctattgcaacccgaaaagcctgctgccagccgacctgagggagatcgagcagctgataatggacaccctcgaggcactcaccgactttcggtatgagatggacataatcaatgaggtctacggaatcaaggtgccaaacaccctgcaggagtatgaagactccatcactgcattaagcctactgaatagcgagaccgttaacctgatcgacagctccatcctactgaatagggagtggtatagcaaccctgagcaggcacagattctaatcaagctattggcgagctatcagcagtcatcgaacctcttcgataagtttacagactatcttctcattgccgacctggacacactgatccaggacttgaataaggacttgaacaagaaatttcgcctcttcggcggaaattcccataaggatgagctaagccggctgtataagggccctgttcctagtgaaaaggaggcccttaacgacctgatcaaggtgcgtaaagagattaaggtgcgccaaagctataatgataacgagaagctggggatcagatactttggagatctgtggggcaagaacgccaatgttcaggagctgaaggaggttagcatctggatgcgcaagttcacccacctgctttccaacggcaccttcaacgaaaataccgttaagatgctgtccaatgaaatattccacccttcaatagacgatgggatcgatgagtacatcgaaaaaggcaaccggttctacgagagcctgaagaagctggagtccaagctcaatccgcgcagcaagattatattcaagaaggaaagcgaggatgttccatttgacaagtgggagatccaacttaacaaatggaagggacagctgtcaagcctccacctgtggtcccagtactccaataccaaaagggcctgcatgaacacgcacgcttcgatcttcatcaagaccgttgaaaagcggaacatcaaaaaggacgacgtcaagcccctggtgctgggtaacttcgccgacagtctcctgaatattgtctttagtgagaatgagatattggccggattcatcggggaattgcatgaaaaccgcatcgccgactttaaggacttggatcgaaagatcatcaatctaaaccgaaagcgaatcttcaataaactgaatagccagatccccaagattttcggtggggcaaacgaccctgaggcaaagatcctggcgggcgaatttactcggaagagcggacacttgccagtgcgcaccctgcttgaaaaggccggaggcacaatcaaaaagatcaagccagtcttcatgatgagtccattgtcaatcgcacagtacctcgaccccacaaatcctaaattgcaatttgatgttgtcatcttcgacgaggcaagtcaggtgaagcccgaggacgcattaggggccttcatgagaggaaagactgcggtggtgatgggagacacgcagcagctgcctcccacaagtttctttgaccagatgaccgacagcgaggggggagaggaggtggcaaccgcgttggatatggagagcatccttcacctttgcaagatgtcattccccgtcaagatgctcaaatggcactaccgcagccgccatgagtccttgatcaatatttccaacagggagttttacgacaacgagctcctggtctacccctccccgtgccataatgaccccgagctaggccttaaattccactataatcccaacacagcctaccacagaggcgaaggctctgctaaccccttggaagccaaggatgtggtaaaggaaatattccgtcactttgagaagtacggcgataagaagagcctgggtgtgggaacattctcggtggcccaaaagaacgccatactggaggagctcgagattgaacgcaagagccatcctgagtttgagccactcttctctgacaagcgggaggagaggttcttcgtgaagaacctcgagaccattcaaggggatgaaagggatgtcattctcatcagcgtgggctatggatacgacaccgaggggaagatgtccctgaacttcggtcctctaaaccaggacggtggagaaagacgtctcaatgtgcttatcaccagggcaagggagaaatgtgtggttttcaccaacttcagagcccacgacattcacctcacagccaaccccccatttggggtgaagagcctacagagcttcttggagtatgctgaaaacctttcccagaatcagttcatcgaccaggaagaggacgaggaggctccattcgaggacgcaatctacaacttcctcgccgacaacggctaccgggtcgacaagagaatcggttgtgccggattccgagtggatctcgcgataatcgacgaggagaatccgggcaaatacctcctgggaatccagtgtgacggccacaattatgcttccagcaaggtcgcccgggaccgcgaccgcctccgagagcaagtcttaaacggcctcggatggaaaatctaccacatctggtcaacagactggtatcggaaccgagacctagcccgggcgcgcctcctggagcatattgagaataccatcatcacgacaaaggttaatgacctgaagagcaagattcacgatgctgagtcaatgcagatcaacccagtcacaacggtggtgattgacaagaaaaataaggagaaagactctgacgatgattcagacagtgataaaactgataagaataaggaaagcctcattaacaattacttgaaggatctggaggacgaatttggcgacaacagtgacaaaaaggacaacaataacgaggacgatgattccaacaacgacgatggcggactggtcattgactccacggatgattctatcgacaacccagatgatggaggactggtcatcgattcaacggatgattcgattgacaatcccgatgacgaagggctggtgattgactccgataccaacttagggagtgaagagtttgatatcgggtcggattctgtgctggacgatgactccgacgatgaagagttcggggtggactctgattctgacctggatgaggaagagatcatcgaggactcagaaattaagctgagcgacacgcttaacacggatctgaaagatgaggacatttatgaacctgaaatcgagttagacgacaactcggactctgacttggatgaagaggaaatcatttacgagcgcgaaatacagttaaaggagggttctgacctggatacagaggacgaaattatcatcgaggagaacaacaacaatggctcagatattgatttagatagcgacgatgtcacggtcttcgaacttagtgacgaggattcgagtagcgattccgacgatgtgactgtcttcgaactgagtgacgacgattcgagttccgactcagatgatgaggaactcgacaacgactccaatatcgacctggaggacgaagagagcgatgataacttcactctcgacctggaggatcaatccaataacctgatgcccaaaagcactatcgacaaatctgagttcctgaaggatctgtacggggaggatgacgatctgagttccactattgacgaggaaccgaaaatacttaacgataataatgaagtgattaataaatctttcgactcaaaggacaaaaagagtagcaaaaatatcagcaaatccgagctgaaaaaccaggaaaaagctaaatcgaaaactaagtcgaaaacgaaatccaaagctaagcctaaaaaccggaatcaggagattaaaaatattgaaaacggcaaaattaaaaatgatgactctaaaaaagagcagaataagccaaaaagcaaaaataggtccatactcaacagactgaagaacattggtggcgggctgggtctgagccggtcagaagaaagcgaaggtaaagaatttatcaaggctgaggacaagaaaagcaaggaatttgtatccgacgccaaaaagtccataaaacggaaggacagaaaggcaaaggataaggattccaatgacaaaaaggagatcaacaaaaaacttaacaaggagcagaatatcaagaataataaagacaatatcgtggaatcagataaaaaacaagaggagattaaggaggagattcagaagcccgtgcccaaaagcaaaccaaataacaccaaggagttaatcaatcaaaacaacaaaaccattgaggagctggaggaatacatcaacaacagttcaaacaacagcgatttagaatttgacggggcttctgatattgatttagagaaggagattattagcgaggacaagacgaaactcgacgtagagtcagacatccaaatggacgatgaatacgtgatcgtggacgattctgagttggaagacgagtttgagtttatcgaggaattagacgatgattctgaactggaggacgagtttgagtttatagaagaacttgatgacgactctgaattggaagacgaagagtttgagtttatcgacgatctcgatgacgactttggttcagaagacgaatatgaactagttgatgacagcgaactggaggacgaatttgagctgatcgacgatctggaggaaaagtccaacaattatgataatgaagatattaatcttaaagaggacagtgaatacctggaaaaagaagagtctgaggatatcatgagacaaaaggagagtgtttccaaaagaaaggtggagcatgaaatcattgacgattcgctcgacgtgattgtgcctataagtgctgaaagacgagccgacgaatacaacaattattctgaagacgctaatgtgattattcccatccaggacgaggaggaatttgaagaggagtattataacaacgactcccaggtggattctgaggagggaattgatgagctcgaggagttaatctctgaaaacattaactactcagatgatgacgccagagaagaatttcttacaaataaggagtctaatcaagagagtgaagaggattcttactattacagcgcagtaggaattgaaaacagcctgaagaagaacgcggttcagtaccccaagtccagcaataggaacaaaaaaggcatcgtcggtgcggtatctagcctgaaagacgaaatgctgtacatcaatgcgtcaattaaagaaatagagaacccaactgagcgcgaaaaaatctatgtgatagacccctcagaggaggaatactacaatcagcccgatgactctatctactacaatgattccctgagtgagaataaggagagatatgcgaaatcaaaacagtacgaagacgaggttgaagtcatatctccggtgtcagattccgatgagggcgaaacaggccatattcagtctgattatattgagcggaaagctgaggacagttctaaaagcagtagcgagtccctgtttagtcctaaaaagcatgaatacttggacaaaatcaaggagtacgccgcggaatcggagtatgaggaggccgccgagaaccccacaatcagtccagttcacactgagattgaagagagtgtggagtcctctgtaattagcccggtgcatactgagtacgtggagactgttgaatcgtcggctatcagccctgtccagcaggaatacgacaaaaccgaggaaccttccaccatcagtgctgaagatcaggagacagagtttattgatgatattcttttagaagaagacgagctttcaaacattcaggacacggacgactctgctctggctgaggaagagccggagtctatagagatcgatgatgatgaatttgaaagcatcatcacggacgtggatcaagactaccaggaacttgaaaaagagcggataaaggaagctaacgtcctgagtgccgtcgataatacccggcttactcccaccggcaaactggaagactacatcgtggcatataaggaaattgacgatgtcatcatcaaaagtgccacagagatctacgatgatgagaagaaagtggccactgcagttatggacatcgtgagtgccgaaggccccattcacgtggatatggtgatccgccggattagggagagctgcaatctcagcagggcaggcactaaattcaaggaagctatattcaaggccattgaccgcaacgagtctcatatgaacctgataagagaagaggacttcctttttatagattatgaccagattgccgtgcgtaaacgggacaaaccgaatatagaccttatttctgatctggaaatcgagaacgctatagatttggtactgagcttcgagaaatcactgaaggttaaggaactggcccggatcgtgtccagaaccttagggttcaaatccacttccaagaaaacttccgcgaagattctggaagtcattgatgtgatgatcggcaaagagatcctggtgaatgtgaacgacaagatagaatttagatga

SEQ ID NO: 3337 - DNA, 288 bp, synthetic construct
  source 1..288: mol_type = other DNA
atgagcatcacgctgatccatacccgacggcggcttgcccacaagaagacatataaaagcccgaacgaacgtaaaaagaaaaccctcgccaggctatcccacaaagagagggctcagagaaaccgcgacaagaagcgcgcaagactcgaccggcaaaaaaataagaataagcctaagagtcgcaagcccaagaaaagcaaaatgccatacaggttcaaatattaccagttccaggactacaagtttaactccgagctggatcagctggaaaagattgactcagattga

SEQ ID NO: 3338 - DNA, 180 bp, synthetic construct
  source 1..180: mol_type = other DNA
atgttctacagcacaatcatgaaaattgatagcattgaccggctgcgcgatatcagagatgccctcctagtcgaacaggggatcaatcccacccgaaacggcgaacaggcaattcgggtggtggtagacaggatcgacgagatccaatccacgctggacaaaaagatagagaagctgtga

SEQ ID NO: 3339 - DNA, 2070 bp, synthetic construct
  source 1..2070: mol_type = other DNA
ctgtcaaacagtaacaccgatagctctgataatgcctcagacgacgccagcggctctgaaatcgtatcaggaatcaacgaagagctcgaatccaataacctgctgactgaagacctcagcgtggacgatgtaattctccaaactagcttctacacaagctacgctgtgaagtctgctaagtcccctacggtgctgacgttcaaaaactcgacagtggtgaagggcgataaattgtacatctacttaaaggacagttccaatcacggcatttccggcgagaaggtgatatttaaattctcaaactcatcctacacccggactaccgacagcaacggaatggccgcacttgacatcaaactgaatccaaacaagtacgctttttcggccatatatgatggcagcgataattacagcgcgtccaggaaagactttacgctgactgtggctaaagtcaacacaaagctgacgtccagcagcagcgttgtgagggggagaaacctctacacgtacctgaaggataaaaacaacaatgccctttccaataagaagattagcatcaccatctctggcaagacctacaccgttactaccgacaagaatggccgggcaagcctaaagttaagtcttaagaccggcacttacagcacaaagatcaattttgcgggagataaaacatacaactcccagtctctctccaagaagataaagatctataccctgaagacagtcatgaccatccccagtacttcagtggtcagagggcagtacatttatgcctacctaaaggacagtgacgggaacgcactcagcgggcaaaaggtggtaatgaaattcgacaagatctactttaacctaaaaacagacaaaaacggcagagtggccctgaagattaatactcggcttggcaaaatcccagtgaaggccagcttcgccgggagtacctcctactccgctagcagtaaatcagtcactatcacctcttatgtggagaaaaccaagatcacagtggaaaactccacagtgaagcgcggaaaatacttctacgcctatctcaaagacagcaaagataaagggatttcaaaccagaaggtgaagatcacgctcgctaacataaactacaccaagaccacagactccaatgggaaggtcgcactgaagatagaggaaaatccgggcaactacacaattaaactcaactttgccaagacaaacagttactatgcaagcagcaaatcactgaagattaatgtcttgaataatgcaaccgccaagatcattgcgaaagatcagaccgtgctgggcgaatactctgtccgcttaaccgacatgaacagtaatcccttggctaaccagacagtggagattactgctgcgaccgtgaaccgaagtgtcggatcgggactgcccatcaccaaaaagactgttgtgatcaactctgacaacatctataacaaggccacagactcgcagtttattaaatccattggcgaggtccttaagtccaagggttataaagtcattatcaattccaacatcggtccgaatgcgcattgtaccgacgcaatgggagcttactctgacgtttgcattttctgcatcttcggtggggtggacagtggtatgtttgttgacatggccgctagttggtatcagaatctgttgaagaaatacgataatgaggtggtactgggattcacgcacactcagcgaaacctcgccaccgatacctggctggagagggcccacgacgacgactacagccctaaaaacttcacgggactgtcataccctgggacatacttgaacgattatgatatggattatgtgtatggccgcaccgccacagagatggccaacaatttcattaaatatgcggtcaatgggctgagcatcgggctgaacaatactgttccctgcaacgtcatggagtataacgtaacgaccggcgataatggttatgcaaccattacagatcttctgccaggtgactatgctgtgatctcctcgtatataaataagacggcaggatatgttgccgatactgtgatcagcataatcgaggttaagtga

SEQ ID NO: 3340 - DNA, 852 bp, synthetic construct
  source 1..852: mol_type = other DNA
atgaattttaacttgaaagacatgatcttaatttttatcagaggattcctgatgggctctgcagacaccattcctggggtctctggcggcaccatcgcacttatcacaggtatatatgaacgcctcatccatgcgattagcagcatcaagttcggctttataaagccactgatcaaattggactttgccggatttaaggagaagctctttgaggagattgatttcgagctattcataccgcttgttctgggtataggtattgccgtgcttaccctgtccaaggtgatccggtacctgcttcaaaattacactgcctatacattctccttctttctgggcctgattctggcttctgcctacatcctgtacaccaaattggatgaaatcaacattaagctgatcatattaacgataatcggcatcatcctgagctatatcttcgtagggttaaacccaattgcagctaaccacagcctcattgtgcttttcttcagtgggatgattgccatttgcgctatgattctgcccggaatttccgggagcttcctcctgttgctgttggggcagtacgcatatatgctcgactcactcaattcactgaatttcactgaaatcattgtctttatcgcgggagccttcatcggaatcctcggcttttccaaaatcctgaactaccttctcgagaactacgaatcggctacaatggccttcctgattggaataatgatcgggaccctgaggctacccttcaaccagatcacgagcaatctgactggcagttggttgatctgtctcatcctagccatcattggcgtggtcctgatcgtggtgctcgagaaaaagctgagttga

SEQ ID NO: 3341 - DNA, 1896 bp, synthetic construct
  source 1..1896: mol_type = other DNA
atgggactgttcggtttcttaaaaaaggataagaaggaaaagagcaacaagaaatttgacgaagaatcgaataaggatctggacgaagctatcgaggaaagtactgatatgattaaaaaggattctgactcgagtaaagacaagtcagagagtgatgattccaaatccaaggagtctaaggatagcaaggaaaaagagtccaaaagtaaagagcccaatgactccaaatctaagaagtcaaagaataaggaatcaaaggatagcaaagagaaggagccgaagaagtccaaatcccgcctcttcaggcggtctaagaagtccgaggatagcatcgacttcgattccataaagcacctgagcaaagaggatatgcaggaggctaaggagaagcggctcaaaaaggatagcagaaccaaagaagagaagctcaaggacgaaacctttaggcagatcgcaatgaaccacagcaacagaaataaccggctcgcagcagtgatggaaatcaagtcccaggatatcctggaggacgtgtgcctggaccataaggacagattcgtgcggaccattgcggcttcacgaatcacagatcccaatatcctagaggagatcgcctacaacgccaaatacacagacgtgcgccagatcgcctttgatcagctgggccaagtggagaacgtcttcgcagagatcgctaagtacgacaagaaaggcaaaaaccgcttcgctgccatcaatgagattgacgacgaactcatccttatggacattgtcatcaatgccaaagacaaaaaggtaaggatcaaggctctggagaagatcaataacgctgaaatcttggcggaaattctcaaaaacaccaatgacaaaaagatcaccaacctcatcgtggagaaggaaagcttcgataatgaggaagtcctctcgagaatcgcagaggatgaaagctatgacaagttcattcgcagcgaggcaatcaagaaacttaatccagacaatgagataattagggagattgctatcaacgacagcaacgagcacgtccgcctgatagcgattgagaagctggaggacgaagatgacctgaatgaaatagccctgaactcagaatacagctcatcgcggctgcaagccgtgaaaaagatcaacaaccaggagatacttagtcagattgccctaaatgacgaggataagtttgttcgaatggagacgctgagcaagatcgacgatgaaaaaatcctatttgaagtgtataacaaggatagtgatgaatttgtgagaagcgaagccatcaaatacatcaattcccctctgaacctggccgacattgctatcaatgatgacaaccttatagtgagcaaaaatgccttaaacaaaatcttcagtctctatgaggagggggattttgaagaggacctggatgagctcctggggaaaatcgccattaaatcaaacaaggacgagatttctgaattgtcaatcaaatccattgaaaaagaggacgttctagagcatattgtgaacgaaagcaagaacactaacacgttactgcttgccgtcgacaagattaagagcgaggacatacttaagaatatcagtgagagcaacgagaactccaaaatccgagtcaagtccgtaagcaagattaaagacaaggacaatctggaagacattgccctgaacggcaactacaacgacgcacgtgtggaagccatagtcaatgtgcacaatcaggagatattgtctaacctggccttgaacgacgaggactccaaggtaagggaggcggcctgtaggaacctgaatggattgaacactctgaaagaggttctcgcaaaggacacagatgagtacgttcggaagattgcgaagaagcgttatgatttgattagtaaatga

SEQ ID NO: 3342 - DNA, 2907 bp, synthetic construct
  source 1..2907: mol_type = other DNA
atgatgagttcagaacgtaaaaacatcattctgaagggtggccgcgaacataaccttcagaacatcgacgtatccattccccgcgatcagttcatcgtcgttaccggactcagtggctccggcaaaagcaccctggcttttgataccatttacgccgaggggcagcggcggtatgttgaatccctgtcggcgtatgcccggcagttccttggacagatgaaaaagcccgaggtggattacatagaagggctcagcccagcaatctccatagaccaaaagacgacaaaagtgaatccaagaagcacggtggggactattacggagatatacgactacttacggctgttgtatgcccggataggaatcccccactgtccaaactgcggtaaggaagtcagccatcaaaccatagggcagataaccgagtccattatagaggaaggggagggactgaagatccatgtgctcgcgccagtcattaaagaccgtaagggggagcacaaggacatcctcgaggacttccggaaaaacggctttgtccgtgcccgaatcgacggtgaaatccgggggctggacgaggagatcgagcttgccaagaccttccgccatagcatcgatctagtggtggaccgcctggtgataagggagggcactgacttccaacgacggttgtcagattccgtagaaaccgcttgcaactttgcagaaggcattgtgactgtcatgtttaatggcagggatagtgaggggaatgagaccgagtacgaaaaaacatactcggaagactttgcatgtaccgactgcggcatcagttttcaggaactgacaccccgaatgtttagcttcaacgctccgcagggagcctgccctgaatgtaatggtatcggaaccaagatggagatgaatccagacctaatcgttcccaacaaaaatcttagcctgaatgaaggcgccattgtgccctggtcaaagagtaataagaaggaaaactactattaccaaatgctgcaggccgtggctgaacacttcaactttagcatggacacacctttcaaggacttgagcgaagagcatcagcatatactcctctacggcagcaatgagaaggtggcatttgcctttaaaagacgaaaccgctcatatagggtgaatcggaaatttgaaggcgtgatcacaagaatggagagactgtacctggagaccaaatccaattataaccgcaaatacatctctaaattcatgagtgacttgaaatgccccgtctgcggaggaaagaggcttcgccctgaggttctggcggtaactgtaggggacaaatcaatcatcgacgtgtgtgatctgtcaatcaaggaaagctacaggttcttccaggaactggagctgacagagaggcagatgtacattggaaaagagattctaaaggagatcaaggcccgattgaagtttctcgttgacgtggggctggattacattaccatgtcaagatcctctggcacactttccggcggggaggcccaacgcatccgcctcgccacacagataggcagcggtctggtgggggtcctctatatcctcgacgagcccagcataggcctgcaccagagggacaacgtcaagctgattgaaaccctgaagcacctacgggacatcgggaataccctgattgtggtggagcacgatgaagagaccatactgtctgcagactatgtcattgacatcggcccaggcgccggtgagcacggaggaaagatcatcgccgaaggcagtcctgaggagatcatggagagcgaggagtccatcacaggaaaatacctctctcgaagggaatttattccaatccgcgaggaccgccggagcggcaacggcaatttcctcaccatcaaaggtgcaagggaaaacaacctcaaggatatcgatgtggagattccactggggctcttcacttgcatcacaggcgtcagcggctctgggaagagcagcctgatcaatcaggtgttgtacaagggcctttcgacaaagataaataagaaatacatgcacccgggaaagcatgattccattgaaggcattgagaacattgataagatcattagaattgaccagacccctatcggcaggacgccacgttccaacccggctacttatgtaggggtgttcactcctatcagggagcttttcgcggagactcccgaagccaaggcacggggatacaagccgggcagattcagtttcaacgtaaagggggggagatgcgagtcctgtttcggggatggaatcatccagattgagatgcacttcctatcggacgtgtatgtgccttgcgaagtctgtaaaggaaagcgctataacgaggagaccttggatatccgatttaagggcaaaaacatctatgaggtcttagagatgactgttgaagaagctttagagttctttgagaacattcccagagtggctagaaagctgcagacgttgtacgatgttgggctgggatacattaagcttggacagcccgcaaccaccctctcaggtggtgaagcccagagggtcaaactggccaaggagctttccaagacaagcacaggccaaacattatacattttggatgagcccactaccgggctgcacttcgacgacatcaagaaactgttgaacgtgctggaccggctgacggatgcaggcaattctgtggttgttattgaacacaacctggacgtgattaaaactgcggattatatcattgatctgggtcctgaaggtggagatggcggcggtgaagtcatcgccacgggaacccctgaggagatcgctgagagcggaacatatactggggatttcttaaaagtcgtgctgaatgagaacagaacggctctcgccaagcagctcgtggaagagaacagtgctaaatga

SEQ ID NO: 3343 - DNA, 969 bp, synthetic construct
  source 1..969: mol_type = other DNA
atgaaagggacgtggaagctgaagttgcgactatggcttagcatggccgtcatgttcgggctggtgtatgtgctgatcatgctggctggcaatttcctcggataccggggcttctacgggttctacgccatcgcaggcctctttgtcctattcctccaatacatcttcggtcccaagatcgttgaaagctcgatgggggttcactacctgtccgaaagcgaagcccctgagctgcaccagatggtggcggagctcgctcaggcggcaaacattcccaaaccgaaggtgggcatttcaaacaccatggtgcccaatgcctttgcatacggccggtccaaacgcagcggacacgtgtgtgtaaccaagggaatactgggcctgctggaccatgatgagctgaaggcggtccttggccatgagattagtcacatcaaacacaatgatatggccattacaactgtggtgagtgccataccactgatctgctactatctgggattttctcttatcttctccgggggtggaggggacaacaacaacggcggtggagccctcatcggctttctggccttgattgcctacttcctaggccagttgattgtcctctttatctcacgggtaagggagtattatgccgacgctggtagcgtcgagctgggatgccagcctgaaaaacttgcctcagctctgtataagcttgtgtacggggctgcaaggataccagagcaagaaatcaaggatgtggagggcaccaaggcatttttcttaactgacatcagcaacgcaagaaacgaaatcaacgacctctcccagctggacttcaatcgcgatggtgttattagcaaagaggagttggatcagttaaaaaacaataatgtgaagattagtgggtccaacaagatcatggaaatgctcagcacacatccagacatgctgaagcgtataaaaagactcgctgacatgaattga

SEQ ID NO: 3344 - DNA, 1593 bp, synthetic construct
  source 1..1593: mol_type = other DNA
atgctttgggtggataagtaccggcccaagactttcaaggaggtggtcgggaacaacaagcaaaagaaggtgatagaggactggctgcaatcctggcaggatggcaatccgcaaaagcccctgctgctgatcgggcctgctgggaccggcaagaccacgatcgcccacatcatcgccaatgagttcagcgagtacatagagctgaacgccagtgacaagcgttctcaggatgtgctgatgagtaccatcggagaatcggccactaccaaatccctatttggtgagaacaagaaactgattataatggacgaggtggatggtatccacggaaccaatgacagaggcggaaccagcgctctcaacaagatcattaaaaacagcaaacagcccattgtcatgatggcaaacgatttctacagcaataagcttactacaatcaagaagaacgcgcaggtcatcaagatggacaagatcagggccccgacaatcaataagttcctgcgtgacgtggtccttaaaaatgaaggcatcgaagtggaccctgatgtgctgatgaagctgtcaaaacgctccagcggcgacttgcggtctgcgatcaacaccctccaggcattggttgagaacggaggggagctcaccgaggaaaccctcgatacaaccggccagaaggacaatacagctacagtgatagacactgttacaagagtcctcaaaagcacgaatgccatcaacgtaaaaaggtccctaagggagaacaacgaagatccaacgttggtgatggagtatattgcagaaaacattccccgagaatacgaggataacaaggagatcaaggacgcctacgagatgatcagcaaggcagacctattctttggaagggcccggagcagtagaaactatggctattggcgctatgctagtgacttcatgggtccaggggttgccctctccaagaagcagacctataagaagttcactcgagtaacaggccctatggcattcacgctcatgggccgcacccggggacagagggccctgcgcgaccgaattgccgctaaaatggaggagaaaatgcatgtgtcactgcaggtggcctacaccattttcccatactttgagatcatgtttgaagatgacgtaaccgcttggcagatatcagactttttagaacttgaggaggacgagattaaacggttccgcaagaaaaagatccctaaaaaggtcataactgctatggagaaggtcaaagcggagatgagagaagaggaaaaagaagagtggcggaacagcattaaaaaagggatcttcgccaatgtgccatctgaagcggacttagcagacaacaatctgaataagaacttgattgacgaggactacattgaggatatcacaattaaggaagatctgaataacatttcagatgatgaactcgatgaaatcgccaatgaattttccctgaagccctccaaatcgagactggataaaggtaagaatgacgctgataacgaggagaaaaaagacaaagacgaagacaagaaggaaaagacagaggaaaaactggagaaagggcagactacgctctttagtttttga

SEQ ID NO: 3345 - DNA, 945 bp, synthetic construct
  source 1..945: mol_type = other DNA
atgttaggcccttgggtggaaaaatatcggccgcagaccctggacgacatcgtaggacagaaacacatcgttgagagcctaaagaaatacgttgatcaaggcagcatgcccaacttgatgtttacaggtcccgccggtgtcgggaagaccacttcagcactggcccttgtgaaggcaatcctaggggactactggcggcaaaacttccttgagctgaacgcaagcgatgcaaggggcatcgagacggtacgcacaaacattaagaatttctgccgattgaaacctgtgggggctccctttagaatcatcttcctggacgaagtggacaatatgacgaaggacgctcagcatgcgctgagacgtgagatggagatgtacaccaagacctgctcattcattctctcctgtaactattctagtaaaatcattgacccaatccagagtaggtgtgccattttccgctttgcgccaataaaagctgaggagatcgcagaccggcttaaatacatcgccgaggctgagggatgcgaatacgaggagaaagccatagagaccatagtcctcttcggcgaaggggatatgcggaagtcggttaatatgctgcagtctgccgcctccactggcaacataaccgaggaccacgtgtacgaggtggtgacaaaggcccgcccccaggagattaaggaaatggtcgatgcggccctgagaggcaagttcatggaatccagaaatattctcagggatgtgatgattctgcagggcacaagcggagaggatatggtgaaccagatctatcaggatgtggcaggccgagtcatggatggaaagatgagcggtgaagtctatatggaactgattggggccatcgccgacactgactttcgcatcagggaaggagccaatccacgaatccaattggaagctctgctcgctaagtttctctga

SEQ ID NO: 3346 - DNA, 1482 bp, synthetic construct
  source 1..1482: mol_type = other DNA
atgatttgtccaaaatgtaacacagtgaacgatgataatgagaaattttgcaagaactgcggtctgcagctgaatacaactcggatatgccctaactgtaacacggccaacaagcccaattccaagttctgtcacaagtgcggaactacccttagcccggtggacacctttaagaaaggaattatcgaggaaaacacgagcaactcgttctttagtacctacaagatacccattatctgcgctcttgttatcctgctggctatcggcgcggtgaccggggtggccatcttcgggggtgacggcaataatgggatcaattcaatcatccctttggcaaacgacacatatgacgataccaacctaaacaactacggcgtaaaccatgacaatgtgagccaaactcaatccgacaactttaccgagaaccagactgacaacctaacagacaatcagaccgtcaaccagaccgtggagaataagacaaaaaccgcaactgtgcagaaccagaccgacaacaataaaaccagcaataacgacacaaataagaccaaagtctattcagaaaagacgaacaccaccaacagctcagcaaaagtcaacacggaaaagacaaatgccactaacagttcagctaagacatatacggagaagacgaacactactaacagtagcgacaaggtctactccgagaagacaaattccacaaacaatagtaaagtttacactgaaaagaccaataaaacctccgacgataataaaaagaacgatacgagcatcgatctcaaaactgatgacaacctcacctcgattgacagcaagataaacaatacagacgacgataataactccgtgattgtaatagataataagcagaacgattccgacttaaacgacagcgatgaccttaacaagaacggcctgaacgattcagatgatctgaacaagaatgacgacctgaatgattcggatgacctgaacaataactccgattcaggaaaagacaccgacaacacattgaatgacaccactgatgataataaaggagatgacacgatctctgacaccatagagatgacagatgtgccaaacctcgcccaggaggccgcaaataataattaccgcttcagctctatcagttataaagggaatgtgtttacacaagcccaatgcatcgacatcttcagtgagtatattttgaatgtcaacaacggcgtgttctctccgatcaagattaattcggtcagctccgcctctagtccatctggggaagaccagtcccagagcatttcccagagtgactacatcagcattgccaacagggtccactcatggattgacagcaacaatcaggtccctaattacgttggagtgagcgtaaagggtcaggcggatctctctcccaacaagatgctggaactcttcggccaggtggtgctgaactacgctgtgaccggcgacatgccccagtccgttgatatctga

SEQ ID NO: 3347 - DNA, 474 bp, synthetic construct
  source 1..474: mol_type = other DNA
atgaagtcgattgtgtttaacatagactgtctgttgaacttcctcaaggtacgccgaagcgatctgctcgaaaggaagtttaaaagaattataatcagtaacaaggtgtacaataacctgtccaatccaagcatcagtcagtacatccgggacgacctcaacaccctaatcgataagaaattcatcaaaatcgaggagatcaaccttaacacggccgtgttcgagctgtattatgaaattatcaataattacgataatgagatcttaggagaaagcgaggcttcctccatcgcactggcggtcaagaataaaaagacacttgccttcaacaaccccaaaagcattgagttctatctggagaagtacgacataaagtgcattggcactaaagacatcttgaacgacctgctggacaagaaaattatctcaaccgatgaattttacgggattctcaatgaactgaaccagtactga

SEQ ID NO: 3348 - DNA, 777 bp, synthetic construct
  source 1..777: mol_type = other DNA
atgcgggaccgcatcaagctcaacagctttgctgtcgaactccgtagagactgggagctgaacccatacagtccgatcgacctattctccattgtcctatccaaactccccgacctgaccatcattttttatcccatgtcagaaaacacaagcggcatgtgcatcaaaaacatcaatcttttcaatgagaaggagctggaagaggagtgtgattccgatgacatggtggtgtgcataaactccaacatgtctaaggggaggcaaagattcaccctcgcacacgaactgtaccatcttctgtttgaggaggataaggaggacatcatcatctgtgaagattcaaacaaggacgacagcgagatcgaagctaatatttttgcgagctatctgataatgccttacgaggggctggagcggtattacaagacaaacaatattggcaagtggaccttggaggataccattcgggcagagcagttcttccagatgagccaccacgccacgttatttcgcctcaaagagcaggaatttattactaaagaggaatgcataaactttaggaaagtgttcattggttacgaagccagaatcaatggattcagcgacgacttgtacgttcagtccgaggaatctaaaaagtactattcactggggaaatatatccgatcggtagaaaaggccttctcgaacaagcgaatctctagtggaaagcgcgatgagttgcttctggacgccttcaggagtgatctgactttcaatttcaatgatggcctgtga

SEQ ID NO: 3349 - DNA, 342 bp, synthetic construct
  source 1..342: mol_type = other DNA
atgaaaaagatagggcagcggctccagggcctgcgcgagtcaaaaggattgagccaaagcgacctcgccaactacttagggatttcgcagcccctcctaagccagatcgaagctggcaaccgaaacctgaacctgagcctgctggacaagctttgcgccctctacggttgcaccgattcctatattctttgtaaagacgacgagtacaatgcagtcaatttctcctttagaagtaagaatgcggccagggaagatctggattgcatctccagtgtgcacaagatcgtgctgaacatgcggttcttgaacgaaatcgacgaagatgacgagtcagaggagtga

SEQ ID NO: 3350 - DNA, 735 bp, synthetic construct
  source 1..735: mol_type = other DNA
atggcagtgccggaaataaacgagctcttcctgccattgcttaagacaatcaaagacaaggacgaatataaggtgaaggacattaccgatgaggtgattgagataatcgaaatctctgaagaggacaaaaacattaccctgcctaatggcgaaacactgatcgagagtagaatcagcacagctaatacttacctccgcaaggccgacctaatagagtcaaaccggttcctttactacaatattacggacgagggccttaaggtgctggaggagaatcccgacgaactgaaggaagaggatctgatggagaacagtgccttcaaggagctaaaggatgtttatactcatgatgatgtaaccgaagagattcccaacccacaggacgccctgaaggcttcgctccagaagcagatggaagatgtccgagcggagatctccaacgatgtcattaaagagaatgaggtgaaatacttcaggcccaagaaccaaaaggagaacgacgagatctacgaaatcagaagccgcagggccaacctcaaagatgacaaggataaatccaaacgtaagtgccatgacaagcaccacgggcacaaacaccatcacaaacacaagtacatcgtctataaggaatttagccctgcagacgagttgctgaagtatgccgaactctttgagcggggatacctgaccaaagaagagtttgacaagaaaaaagaggaactgttgaaattatga

SEQ ID NO: 3351 - DNA, 1200 bp, synthetic construct
  source 1..1200: mol_type = other DNA
atgagtagcaaagtagatcttgaaaaggctcgagagtacaataaagtgaagaagtacgaggagtccctgagttgctaccagtcatacctggaatctggtgaagagctccctgaaatcgacaaggagagatatgcatgggacatctactttgcaagggtcaagaatgctagcacaatagccgagctggaggaatacgtcaaggagctgaccaaatatgcaaagcagaagaactcttcccgtagggagaagccctgctcctacaccatttccatcctgaagctaatgaagttctactcagacaacatcacattcaacaacaatgcctataagctgatcgcatgggccgataagctcaaccccgattacctcagcaataatcaggctaaaagggacgacacgcacaaatacaattcaaacaaggaaaactggtacctccagattaccaaagggctctttgaaattaaaaaatacgacgatgtgatccggctctccaacgaggccctggagaagattccggaatttaacaatttcaacgactactggttcaaatacaaaatagccaagtcctacaaggaattaggagaatacgacaagagcttagaatatctggatgagatcgtcaaggttaagaacgattggttcatctaccatgagatagctaaaaactattatctcaaagaggaccttgattcgtcggccaaatgggctgcgagagcggcactgagtccagacggcaaggtagaaagcaaattgaaactgtatctactgattggagacattctgaaggccaaaggctatgaagatgaatatatcatgcacaagtacttggtgtatgtgatccgcaatgccaaggactggacccaagaggagggctgggatgaggagctggcgagttatgagttggaccttgacaatactgactacaaatcaatccacaaggagctgtctgccctttggctcagcctgaaattcataggccaggaacgccaatatggtaagatcactaaggtctttgaaaacaacaacggattcattaaaagcgggaacaagtcctacttcttcaacgcccgggaatttcaggatgataagagctttatctatgaggggacagaggtgtctttctttttggagaaggcttataatcggaagaaagacgaggtggttgataatgccgtgaatatttactgtgaggagttctga

SEQ ID NO: 3352 - DNA, 1197 bp, synthetic construct
  source 1..1197: mol_type = other DNA
ctgaaattctataacgacaccgacatctttgtcttcttaaatgaagaatacgctgattttgaaggaaatgagatcgaatcaatcgagtctaatatcgaggatgactttgattacctcttcaacttctacgaggagaaagaagaggactacaaccacctggtcgacttctatgacgaaaatctggagagcttcgaatttgattccctgatcaaggattatgaggattacatgaaccaaatcgattcattcatcgatgacaatcagtacagagaagataatatagagtcctttatagaggattatgaggacgaaggggaaatattcgatctcatcattgcaaagtacgaacaggaacggcaagaagaattggattactacgcagacgagtataaaaaccagatcagtcccgatgatgtggaggagaagtactacgaccacatcgaaagcttagacgagatgcattacaataactatgaggagtccatagagtcgaaatttgaggcctaccagtccagtccgatcaacaatcacatcgattacggcaacatgcatgaggtggacaactttagcgactatttggattacaaggacatggacacgatcgactttgcgctgagccaggccgactcctacaacgagattgaccgctctcctgaatgggatattatcaatagtgacgggcctgaatacgatgaacccttcttcatagaggacttcgatgattgcgacaacatagttgtggactaccttgagaacattctgccactggacgccgagctcgaaaccctgattgaagatgacccatacgactccctcgagaacctgattagctttgatgaggagatcaacagcaacattgaaggcgagattgacttcctcatttcaaataagctagaggaaatggagaggtatgagtatgaggtagactcgtatctggaaagcctcctggaggacaagaaggccattaacaacagtatcgaagcctatcttgaccgggaggagtaccgagagtacgatgaatattaccagttcaacgacctggaacttgaggagatcgaaaaccagggcatcgactttgacgacttgaataatctagatggaacagctaatatctatttcaacagggacgaggaagatgaggagcccttcgacctgaatgaggatatttattacggtgactatcagtacgacgagtga

SEQ ID NO: 3353 - DNA, 4641 bp, synthetic construct
  source 1..4641: mol_type = other DNA
atggagactatcgcagagaaccagaataccgaatttgagctcaacgagtaccaggaggaagctgtcacatactacggcgaaaagccgctcttgatcgaagcagggccaggtagcgggaaaacccgggtgattaccgaacgcgtgaggtacctggtagaagagaaggaaatggacccagaatcattcctgataatcactttctctaataaggccgcgcgtgagcttaaagagcgactgatggactactttgatgtggatattatcaaccagatgcagatatccacggtgcactccttctgctataaactattaatcgagaacactaacattacctacaaaatccttgacgatgactacggaaccaaaaagaacatgttcatctacaagaaccgggaacgactggggttcaaacgagagtctacattgactcggggaaaggtgaaggatgtcgtggccgcttttgacaaatatagcacttttgatgtggatacagaaaaactggtagagtggataaaggagaacgagcccgtgtcccaggattacatcgacttcgtgaacgaagagtacagaaaaaccggcaagtttccacggaagaagatagatctggataaaaagaaaaagaacctgaaaactgcgactgattaccatgcctatgcagattcctggtacaatgccctgcaccttcaggtggcaaaggcttatccaatctataaaaagcttttagacgagcacaattaccttgattttaacatcctccaggtaaaggctctggagtaccttaaggagaaccccgaaacccagtatacaaacattctggtggatgagtttcaggatacagaccctgtacagattgagatctttgagatattgatgaaaaatgctctaaaccccattgagaaaagtaaagatgatgctgaagaagattgtccccctattagtgaactggaactagacgaggcggaaatctctgataagaaaataacatcctcattcactgctgtcggcgacatggaccagagtatctatggatttagaggggctttggaaaattacttcgaatattttgataataaatattgctgtaaaaaagttgggctgaacgtcaattaccgctctacgaacgagattatcgagttcagtgagcaatacataaagatgcaacggggtaaaaaatctcgcaagaatctgagagaggcccgtaaggagagccgcaacatctactatattgaaaacgaagaacgcgagatggaggcggccagcatcgccaaaatcatcaaaggacttaaggacgaggagaagatcaagaactacaatgatgtggccgtcctgctccggtctgtcctcacttcctctaaagacatcatcaacgtattcaacgatgagaacattccatttcaggtgaagggattgcaggacctggaaaacaaggacgagataaaatccatcttaactctcttgcatttcattattgaagacgataacccgcaggaaactccaattatcaccttctgggaggctgactggcttaacctcagggcttttacaaacgccgactttaagcagacctttattaaactgtcctctgaaaccgaggagatcctgattgaaaagcaaaaggagtttgaagagaacgtctttaactatgccaaattgatttataatgacatcacagggaatagattcacaaaacgcagctacaagggcgtgttggagcttgaggatgaagtgctggacgctgtttttaaggaatatcctaagccggtgctgacaaataaaaccctccgggagtacggcatcacgaatgaggacgatttagaatttttcaatcaattgaatgagctgaaattcgaaatattcggtgatgacaaggactttgacgaacgacctaccatactgaatgtctactacaggatcttggagatctgcggtttcctgagtgaagactatatattcgaccctaaaaacaagcaggcgttggactatattgggctgtttacccagatcatctacgaatacgagaacatcatctccaaccgggacatccgcggcctgtactggttcctgaactctaatatcaagaattacagctacgacattgaaaatgaaaacggcgtgaacattatgaccattcacaagtccaagggattggagtttcccgtggtcatcctggcaggcctgaacgactcgagcttccccagggagtacgaggacctccgagaaaccaaatataagaatggaagcgccgtgttctacacgccaagggaatgcctacgctacaaaagcctcgataaggacgatgtcacactccactatgaggaggaggaaaggaatatctacgtggctatgacccgggcccaggacctccttattttatcgaagaacttcaaaaaccctaaaaagaccacttactccaagaccttggagaaggaaatcaaggccatcgagctcaaggaaaagatcagcagtattaaggatgagcttgacgagctgatgaaaaaagaggatgttaacgacctttccttcctgctgaagagcctcaatgatgagttaaaagacatcagggccgaacttaaggagctgaagccactgatcaaagatcataaaaagattaaggtgctaaacaagcaactcaaggaactgtccatcgaaatcaaatggaagataaaagacttgaaatacgaggataagattatggacgatctgatcgacctgttcaaccttgatgaggacagtggcctgacaagggatgacctcaagaatatgttcctgaatgacttcgacattggggagaataatgaggattcggatgagagcgagaacagctttgaggatataatcaacgactcaacgatcgataaagaactggacaacgataatacatccatcgattcattgagtagtaacaacaagcctatcgaggactactttgaagacaaagaagccctgtcagacattctggtccgtacggagaacgaaatcgcaggcctgggtgaggacattgaaaagtcactcaagcggaccaagaagctcctgtcgaagcttaaggagctccaagatgatgacttaaacgattcaatgagcgaaattcacttcaaatataagatggaaatccagtcaatcattgaaggggccatcgaaagcaatgaggatgattccctcagcaagaatcagattgccttaaacgcactgtactgcatgctccagtcaatcgagtctgagataatggagaacaaagagaccatggaatcaaacaaggagatcctgaagcgagaaaaagagctgaacaataaaaaatcctacctggactataaaatcaagctcattaaagacacggaagaatttgacaagaaatacgacatgggatatagtataagcagttacgaggaatacaagataaaggaggacctggatgaactcagcaaagtgcttatggacgactcagtcaactccattggcgacctggcactcctgcgggagaaggttctggaagctggaagtcccaagctgtgtgaggacttcataatcaactgggagttgattgagagcctattcaatgacgacaaattcgccaaactggagctgctctttaagatcatggagtctgaagagattgacaacatccgccacatgtcgatcctaaatgacagaacagagctcaaggagaagaccaagctcttcttcatgctcttctactataagaaccaagagattgaatataaggagaaactgtccttcatcaataagaaaaaggaccatctcggcaacctgatcaatgcctatgatggaattataaagattgagcccaccgaaatcgacaaggtaatagacgagcgcaagatccccaatgttattgtgatagaggatgacaagaagctcaccctgagctacagctccattcagacctacgaatcctgtcctttccagtaccatctggcctacaactataagttcaagattagcgatagggaggccattacggaaggcaacatcaaccacaattccctggaggaaatcaataagacaatcattgagagaaaggatgaaaaagagggggagttggtgggagaaatagacaatgagctgctcattagcagagatgagatcatcaagatcgtcaagcggatctacatggagagccccaatatcgaccgtgacgagactccgatagactatgttctaagcaacatctttgaatattgggacaactacggcagacggtttgatatcatcggcagcgagtatcagttcgacatcaatagagaggactattttgttttaatcggttccattgacctcctgtataagaccgataatggcattgtgatcctggactacaagacaactgaaaacatcagcaaaaaagcccaagagaaatacaagaagcagctgtacacgtatgcgctggccttgaaggatgatcccatgtacaatgacgcagtggttgataagctgcagatatatgcaatcaaaagccttgagatgcttgacttcgagctaaatgaagaggagagggacgagagagaagagaagattagggagattgcatcgaacattcgcaacgaggagtttcactcaaaggggtatgacgagttctcggaatgcagtttctgcagatatagtttcatttgtgagaacaattga

SEQ ID NO: 3354 - DNA, 1209 bp, synthetic construct
  source 1..1209: mol_type = other DNA
atgaaatatgtgattgttatcgaggacggtgctagtgattaccccatagaagagatagatgggaaaacgccccttaaggtcgccgagaagcccgccctggatcgcatcgcgcgagaaggacggaccggccttattcaaaatgtgcccgagagcctgcccccaggctctgacgtggctaacatgagcatattcggctatgaccccctgctctactacacaggcagaggaccactggaggctgcaagcatgggagtggaaaccaaagatggagacgtggtcttccgctgcaatacaatcaccgaacgggacggcctgatggcaagctcgaacgctgggcacatctcctctgaggaagccgcggaacttatggagtacttaaacgaatacttcaatgacaagtatcccggctttaaaggcaagttctaccctggagtatcctaccgtcacctgtttgtatacaacgataaggaaaatgcagagaagctagctaaactggacatggtgcctccacatgactttgttggagagacaatcgcggacaagatcgagtttgactccttcgccgatgaagtgaagtcaattatgctggaaagtaaggaagccctcgagaaccacccggtgaacctgaagagaatcgaggaggggaaagagccttccaacatggtctggttctggggtcaggggacaatgccggccatgccaagcatgaaagaagtgtatggcctcaagggggcggtgattacgggcgtggacttgatcaaaggactgggcgtctgttcagggtgcaccaacctcgatgtgccaggggcaaccgccttctttgatactgattataacgccaaaggggagtatgcaatcgatgccttaaaggacaatgacattgtgttcgttcatatcgaagccccggatgaggcaggccatgccaaaaacctcgaggagaaggtcaggggcattgagaatattgacaagcacatactggcccctctattggaggctcttcccgaatacggtgactttaagatcgctgtgttgccggaccaccctactccaatcgatgttggaacccacacgagggacatggtccctattgccatctatagcactgtagatgagcccgatgacgtccaggtctacgacgaggacagtgtgaaagagggttctctgggtgaactgaccgggtgcaatctcctgaagttgctcctggagtga

SEQ ID NO: 3355 - DNA, 1017 bp, synthetic construct
  source 1..1017: mol_type = other DNA
atggacgaatgtaaactcgtgctgatcggtttcggcgctgtgggccaaggggtggcacgagccatatccatgaaaaaggaaatgatcaacgagaagttcggcataagcctaaaagtcgtggctgctggtgatagctccagcagtgccatctgccaggacgggttggatgaggagctgctcctgaagacgaaagaggagacgggcaaactggcaaactaccctgaatacggcagcgacatctccggaattgacatcctcgatgcagtggactacgacgtgctcatcgaggctactccaaccaatattgtggatgcggagccggccaaatcccttacactgaaggcctttgcggacggaaaggatgtggttaccagcaataagggacacctggcccttttctacaaggagatcattgaagctaaggagaaggcgggagtcgactttaagttcgaagcctcagtcggcggagccatgccaataatcaacctatgccaggaaacactggcaagctgcggaatcagcagtataaaaggcatcctcaacgggacaaccaattatatcctttcgcggatgactacagaaggcatgacctacgagaataccttagcagagtcccagcagctgggtattgctgaaactgaccccacccaggacgtagagggtatcgacgccgcctgtaaggtcgtaatcttggctaactctgtgttaggaatcgatgccacctatgatgatgttgaggttaggggcatttcagacgtgagtctcgaggccatcaatctggccaaggaagagggctattacgtcaagttgattggggaagtgtcccgcaaacaactgaaagtctctcccagactggtgaagaaaaacagtccctttgcgattgacgggaccttgaacctcgcaaacattactacagaccttgcagatgacatcacggtaatgggcaaaggggccgggtcgctggagaccgcttcagccatgctgacagatctgattaacattataaagaataagtga

SEQ ID NO: 3356 - DNA, 486 bp, synthetic construct
  source 1..486: mol_type = other DNA
atgcgaatgaacctaattcttgagatcttggatgttccagggcagttggtgtccatactcggccccattggtgagctgggggctaatctggtcaccattgtacacaagagagagatccggactgaagaaggcaaagtgccggtgcagatcgcccttgaaggcgagagggagaatctccaggcagttgtggacaaattcaaggagatgggagtaaacctgatcgaagtggacgatacaatcaagaaggagaagctaagcactatcctctacgggcatatcatagacaccgacctgcgcgacaccgtcgacaagatcaacgcggtggaaggactggtcgtgagtgatctgcaattaaagcttgatggcgaactcaaaagcacggccctgctcacaatcgagctggatctgggaaaacgggagatagcctatgataaggtgatggaaattgcaaaagagaaggactttctggtgattgacgaggtctga

SEQ ID NO: 3357 - DNA, 216 bp, synthetic construct
  source 1..216: mol_type = other DNA
atggctatcgaaaaagacgcagaaaaaatactggaggagttctccaagaccctcgatcaggtacccgaactggaaggaacctactatatcacagacaacctgaatctaaatcgcgaggatgagagcgaggagaaggacgccagcaagatcgtcaggaacgccagaactgacaaagatgggaacgtgattgtgaagcgggcggactggacgggctga

SEQ ID NO: 3358 - DNA, 1812 bp, synthetic construct
  source 1..1812: mol_type = other DNA
atgtgcggctgtatcggtctggttggaaactttaacaaggaactgctcttctctatgatggagtcgactaaacaccgggggatggatagtagcggatattacctttacaacaaggggtcctccgagtcactctacgagaacaacttcattctggataatcggaagtctttcaacgagtcatctatggaagacaacgactccaatcaatgctctaccataggcctgggacacaacctattgtccatatttaatctcatcaacgagaaaagagaaatcacagacaatatcaacgaaaaccgccagcctatcatactcgataacctggtcttcatattcaatggcgagatctacaatttcaataagctggaaagctttctcaaggaaaacaacgagaattatgttaagtccaaaagtgacagtcaactcttggctaacttgattcagtattactataaagagacaaatagtggcaatcaggagaatcctcttctggagtctgtcaaagaggtcgtgggtcagctggatggcgactatgcgttcgccatctatgacaaggacaatgacgatctggccatctcccgggactccattggcgtcaagcctttgttctacgcggtcaccgataacctgaaaggatttgcatcggaaaggaaggcactttggaaggctggatttgaagatagtgacatcaaggatctgaagccaggcagcattctttacaactttgaggagattgatctggatgacgacttgatcaatgaaatcatcaataccgacttcaagctgctgaaatcctcatttgatgactacaaatcctatttggacactaaagacacctacgatgtgtacaaagagctcctggctgatgatatctatgaggcagtggaaaagcgtgtggaaaacatcgtagacataggcctgatcttctctgggggagtggacagtacgattttagcggtcattctaaagagcattgccgaaaagcggcaaaagcagattgattccgtgaataacaaatcgtcagacctggacaacgtgtttctgaacggtctgggggagacgagcaatcccagcaataatagtctagaaaatagcaaaagctcaaatgactttagcgaaaacgtgaagcccctgaacatccgactctacgccgtggggctggaaaactcacaggatatcgagtttagcaaaagggtggccaaagatttggatttagacctcaagacaatcattatcgatgaagatacaatccgcaagagcgttccagacgtgctgaccgccatcgaggacccaaacatcatgaagctcggcgtgggaatgaccatctacctcgccactaaggccatccatgaggacaacatcaaggtagctctctctgggcagggtgccgacgagctctttggtggctacaacagatacctgaaacatttcgataaccacacgcttttcgacgcttacttcgacctggacgaggagatatatcatgacattgccaacatatatcacgtcaaccttgagcgagacgacgcagtggccatggccaatggggtagagctaagggttccgtttttagataaggatgttattagcctggcactggatattcccgggaaattcaagataaaagatggggatgaccttctgagaaagcacatccttagggacttggctaaggacattggagtggctgagtatattgcagaccgccccaagaaggccgcgcagtacggctctggcatcaacaagattctcaaaaagaaagtgctgcgcagcttcaacattgaagagttcgtcgagtccttaaaacactga

SEQ ID NO: 3359 - DNA, 267 bp, synthetic construct
  source 1..267: mol_type = other DNA
atggccaagaaaaatatatacctggccatgattcttagcttcttcatcccagggctgggtttagcgtatgacggcgtggtgaaaaagttcctcggctattttattctgggactgatctttatcggcctatggttttacttcggcatgcccctcgatgctgagataagcaacaccgggttctgctgttacctcgcatatattatcgtctggatctttgggttgtacgacacgctgcggaccacaatcgacattaacaggggagaatga

SEQ ID NO: 3360 - DNA, 1137 bp, synthetic construct
  source 1..1137: mol_type = other DNA
atggccgaatttagtttagatgtagaggaaataaaagaagaagtggagaaaagtttccaagaagaggagaaaacaattccaaacgacaaaatcaagaagcaggctgagcaaaacgctatcgcgatctttgaggcagacttcgatgatgcagcccagagggaaggcatcatcaagcccctggatgacttcgggataaatgccattaacaggagctccgccaagaactcgcttctgagcacacgctttaaagagatgtccaaaggcggctcagaggccgacaatgtaggtgacaagctggctgacttgaaccggcaggtcaaggcgttagaccccagcaaagtggacttcaccaggacaggattcctcggcaacctcttccacccggtgagaaaatactttgaccggtacgaaaaggctgaggtcgtgataggaaacatcatcgagtccctcgataacagtagcaaggtcctgcagaatgataatacaaccctcctgtccgaggaaacttatcttagggagctgaccaagaagctcatgaccgacattgagcttgccaaggaaatggacgagtcgattgaggtgcaaatcagaaacgccgaaatccaaggggtcgaccagtacaagattgactttgtgcgcgaggaggtgctgttccccctccggcagcgaataatggacatgcaacagatgattgttgtgaaccagcaagggatcgtgagcttgaatgttgtcagacgaaacaacaaggagctgatccgcggtatctcccgtgccaaaaacgtaactgtgacggccctgcggaccggagtgatggttgccagcgcactgtataatcagaagattgccatggataagatcaaggtcctaaacgaaaccactgaggatgtgatcgaatccacttcaaagatcctgcgcgagcagggaagtcagatccagaagacagcttctgaaaccatgatctctcctgaagtgttgaagacgtcattcaatgaggcactggccgcaattgaagatgttagcaattacaaacagcaggcgctaccaaaaatgcaggagaccataattgcatttaatgagatggctcaggaagggcagaaggtcattgataaaattgagatcggcaacaatacgcagtga

SEQ ID NO: 3361 - DNA, 453 bp, synthetic construct
  source 1..453: mol_type = other DNA
atgaccgaagagatcaaaaagaagatcaaggacatgaacttcgagggcgactttcaaagtctggacctatacaaggaggccctgtttgacttgaaccagcagttcttctcaaaaaaggcaaaactaagcaatctcattgaagagaactatcagtatacaaactacaactatgacaggctcctgaacattgtcttccacctggaaaagatgttcaacgaggaatacaagtcaatcctcagcataattcagctcagctacaagaacaatgtggtgatcgaccagctgctgcagaagaagtttaaaagtctgatctccataattgataaaacggactccttatatgatgatttggtgctgaatctgtccctttcggatagcaatgagaatcaacggaacatctccgtcctcgagagcatggattctcttatcgacagcgtaaaatactacaaatga

SEQ ID NO: 3362 - DNA, 510 bp, synthetic construct
  source 1..510: mol_type = other DNA
atgaagcgctataatcactgtatttactgtggctacaaattgcacagcgacgatgtcttctgccccaattgcggcgtcaagatcggatatgtggacgaccagtccgtgtcccttcccttaagcaaatacaaagagcaggttcttgagctccgggatgaatatgagaagaaggaaaaggaggtgctgagtctggtagaaaaacggttcgcaccgcctcaactgacataccatagatttatcggggaaattgataactgccgagtcttgttcttcagggaggccgagtcaatcctggacattatcaatctggttaccgaactcagcccaaagatagagacggagatcaagaaaaagatagacctgctaaagaaaatcatcgatcagatgaacgacctgatcaacgaactcattataaacatgggtgacaaggaggagtcggagaacgaagtgaaaatcgtgctcgatgacatgaagaacctgattgattctgtgaaggactacgacttttga

SEQ ID NO: 3363 - DNA, 1287 bp, synthetic construct
  source 1..1287: mol_type = other DNA
atgactaaaaagtatggcgatagaaccctcgaggtgcatgccggtcaggaggaggccgatccctttaccggcgcccgggctgcgcctatctatcagacaagctcatacgtcttcgaaagtgctgaatatgccgcaaacatatttgccctgaaggagcctgggaacatctacacacgactcaacaacccgaccaatgaagtctttgaaaagagggttgccgcaatcgaagggggcgtgggagccctctcccaagcaagcgggatggcagccatcaccctcgccatactaaacatcgctcaatgtggcgatgagatagtgtccggaaacaacctgtacgggggcacattcaaccttttcaaaaataccctgagcaagttcggaatcaaggttaacttcgtcgattcccaggacaccaaggcctttgaggatgcgattaatgagaatacaaaagcactgtactgcgaaagtatcgggaaccccaagctggatgtgccggactttgaggtgctagcggacattgcacacagacatggcatccccttgatggtggacaataccagcgcgataggcatggtaaagccaatcgagcatggagcagacatcgtagtccatagtgctaccaaaatcattggaggccacggcacttccctcgggggaacaattgtggggttccgcgtcactttcgactgggaccagacggccagttccccagagtttacggagcccgacgacagctaccacggattgatttacactgaagcattcggcaatgccgcctacattactaaggcccgtgtgcagatgatgcgggacctgggtacatgcatcagcccattcaactcattcttgctgctgcagggactcgagaccatgtctcttagggtcaagcagcacaccgagaatgccctggaagttgccaagttcttagacaatcacgagctggtatcatgggtcaactatcctggcctggaagacaatcccaaccacgagattgctaaaaagtatcttggggacaaattcggctgcgtgctgggttttggaataaaaggcggtattgaggagggcaagaagtttatcgagagcgttgaactcctgtcccaccttgctaacatttgtgatgctaagacgttggtggtgcatcctgcttcgacaacccactcgacgctgagccccgaagagcaaattgccaacggggtgactccagactttatccgcatgtctgtggggatcgagaatgtggaagatatcatcgctgatattgatcaggcgttaaaaaaaagcggttga

SEQ ID NO: 3364 - DNA, 648 bp, synthetic construct
  source 1..648: mol_type = other DNA
atgaccgataacgaattgaaactggagaccaagtgctacgatgcctgtgagtacggctacctctacggccttaataagaagataccggacgaagactgggagaaggtcaagccctatatgcggaaatggaagcggatggacttcgtggaaggcaacatcaaggtaacgggaagacctgagggttacaggtgcctggaggaagatgtggccaaggtggaagagatactgggcatcacaaacactcttgcaaaacgaagggcgaatattgaagagaaaatgtcggaccctattaaaaaggttcagttcaaggaccaatgctataactggttgaacatgctctttaaaagcgggacacagcccaaacaggacctgtccagactggcgatccactcaacaaagatctacgaccccgcagacagcttcaaaaacggtgccgaggatggctacggagagctcttcatctataccccacatggcatgtggtacgtgatcaataatggaagcgacgctgccaacaagagtctgaacaacctagaatccaagtttgggggggccattggatatcgcctgatgtacgctgatacggtcgataccttaattcgcgtgtataccgaggagaatgagtatactgggccacagctctactga

SEQ ID NO: 3365 - DNA, 2235 bp, synthetic construct
  source 1..2235: mol_type = other DNA
atggaagatgataatttagaatttaacgagctcctgaacgacctagagccacatatcttcaactttatcttagacaacctctctgaggttccatccgatctcagtaaaaaggaacagatcgagtttatcacctccaactacagccaggacacaatagatgacctgatcgacgaatacaatacatttgaaatcgaggcaaccgaaactctggactccctggaggatgatatctttgggttggtagcaatgggcctggacgtgccagaggacgacaaggaggagcagatcagctatataatcacaaactactccaaggacaagatcgaatacgccatatacgaggctgaattgaaaagggagatcattgctgagctggaggaattggatgatgagtacttcaatctgattgtttgccacttcaacctatctgatgagattggggagagggaaaccctcatcaactgcatctttgacaactattcaataagccaaatgaaaactgcaattgagattgcagacaagaagatggtcttctacaatgatatgcttggatttgatgatgacgtgttctccttcatctgctttaactactcctccctcgactacaacaacctcaaggccttggaaaacaaagagagccggaaggataaggcttattacctgattagtaactactcgccaactgagctccaccagaaggccagtgaattttttgcgaagatcgacctcttcaacagcctggactccttggatgaggtcctgtttcgcatcctgattaagaacatgaatgcctacagcttcttcctggaccgccttgacatcatctataacctgatgatcaactattcagactatatcatttatattgaaatggacaaggcaagggagagcttcaagacctatgatgagcttcgcaacctggaggacatcaagctgctgttccttgcaaattatctcaatgcgcccgaggaaatgattgagaactggataaaggtctctgacttcgacaataatatcttcaaggactacgacgttaaccccaagaaccatataatcagcttttatattgatgacgaggaggaggagaaagaggaagagcctaaagtgaaacggaacaacctcttcggtatcaattactttgacatcaatcccctggaactgtctcccaaggaggagattgcctattatatctacaagaacaagagcgaggaagacatcatcgaagggctcaattcattccccaatgtgattgtggacagcgatggcaatcttgtggagggcatgaatgactccatctcaaactcgaacctgaataatcccgctgacagtgatatcaatgacattgacgattccgataataaagagagtgataatatcagttcaaatgacgatagcacggtaaaagtcaatattgagggagctgacgatggaaaatcagacgaagtggaggtgaaaattagcgatgatgaagattccgattcgaccgaaaatttagacgaatcagacaaagacagtaattcttcggaggacttggaggagacgcaagcgagccaggcccctgagaaagacagttcccgtccggaggtgtctaaagaagaatttacaaagatgctgaacgaattggatggggacgtgttcaagatcctcacgaaaaagctggccattgtcgaaaacaataaggtgtctatcatagaccatatcgtatctaactacaactactacgaaattgaagatagaatcaagcttatctcatttaaaaaggaccactacgtgcggcttgacgccctggatgacgccacattcaacatcttcctgaaagagttcagcaccgtgcctaatagtttcaatcgctttgaaaagattgactatatcataaacaactactcctacggctatattgaatcccgactggagatggtgctagacgacattcgggagataaagcggagcttagccgatgacgatgtcttctttgagatagccacctacttcaaactgccgctccacgccactaaggaggagcagatcgatcaccttctcatcaactacgacctgattagagtccgaaaaagaatcgctttctatgagggaaagctgcacgtcgagggcctgattaggggcatagttgataaaaacaagatagaatgtccttattgtggggctaagattagaaaagatgcgaaatactgtaccaactgcggtgaaaagctaagcattaacatcaacattgattga

SEQ ID NO: 3366 - DNA, 747 bp, synthetic construct
  source 1..747: mol_type = other DNA
gtggacttaaaggacgtgtattactcttcaaaaccctatacacaggaggaatttgaaagtatcataattaatgcctacaagtatgtctgtgaggagattgagaccaaaaacaagcggttccaggcctgtcatgatttcgaaccatgctttatttgctggaacatcgagttggaagggaacgaatttacaaagtggatcgaggagaactctgacctgagagtgataaataagttcaacgcttccatggatgtcggggtactcggcagcttcaccgaggatactattaagctggaaaacggcattgatctctcgaagatcccccgctgcaaggggaaatgcgacagggagtacttctttaacgaggaatgcttcttcgagcgacggaggctgagagagaaaataggctcaatcgaggacatggaactaatcaatccttccagcatcttcgagtttatcgattataaggaggaatttattgaccttatcatcgagagcgttaacctgatcaaaaatcacttcccgaaggcaaaaatttatctgaagtacaactgggatcacgagtactgggatctcacgagcatctgtggaaatatttatctgaaagacggaaataacgacgagaactacagtatctacaaatacaagctctttccagacttcgtgaagctgcgcaagtcctacggtgacttcaattattacatagaaatgatcgacagcgatgaattggacgaacttctgaaaaattga

SEQ ID NO: 3367 - DNA, 795 bp, synthetic construct
  source 1..795: mol_type = other DNA
gtggatataaagacgctccaaaaacgtgccatatattacagcgaatcgaaatacacaagggacgagttcgaaagcataattatcggcgcgttccggtatgtctgtgaggagattattcccaacctgtccaacttcactcgctgtggcttcgatctcaattttgaacggatttgcttcgccaagggagtcaatgggtatctgaataaatggatcgaggaaaactctgacctgcgaatcttaagaagcactgagatctcaatggatatagggaaccccttctccccgaaatacgacacctacaaactcctggacaacatcgattatgcaaagatgcctgactgtaagctggagtgcccaaacaacgaggactatgagaagatctggcgccgcaagcactgctactgggaacgggaaaaggtgaaggagaggctgaactccattgagggcctcatcctagtgaatccaaatgaaatctacaggttcgtgcttaagaaggacaatttcattgactatatcgagagcaccatggatctgattagaaagcattttccaatggctgtcgttatcctgcagtttagtcccgaccctgaatgcgagacctacgacattctgtcagctgtaatctatgacgcagatggagactacgactattcttttcttgtgcagaacgaggagtttaccgaggaaaactgggccttgattgattactacgatatccacgacctaatccttaaactcacaaaaagtgatgagtactacaaatccttgatcgagaagaatctggaaagcgaatga

SEQ ID NO: 3368 - DNA, 447 bp, synthetic construct
  source 1..447: mol_type = other DNA
atgtacaagctgaagaacttcctcaaagggcattttgcaaagagcaaagtcgaggacctgaattttcactgtaagatcaacgagaatttccttctgataaatccgaacgaaatctacgacttcattggtgagaacaatagtctcatcgaactgattaacattagcttcacgctgataaaaaagtacttcccagactcaaccatctacttggagtttaaccaggaccccgagtacgagggactgaacagcatctttgccaatatttatgacggcacaaactcctacgattgcaatatggatctgttcgaagacctctcccttgaatttcgcgaattaaaaaagcagtatgggaagatggattatttcctcgatatggtgtcggtggatgagccttttcggaacaggctaaacgacaaattcgacggcttcttgaagatcgtaagatga

SEQ ID NO: 3369 - DNA, 360 bp, synthetic construct
  source 1..360: mol_type = other DNA
atgagcttcgactgggaaaggtttatagatgtggccgagcacctgagaaactattccaacagggaggagtaccagaggaccgctgtggggcggtactattacacatgcttcctaatagcacgggacatctactacgatatggccaaagtgcccgagggaaccttcgtaagccatgaaagtgtcatcacattctttgaaaagtcaaaaaaggacatcgagaaagatctgggcacgaagctccgcaacctcagacgacgccggaataacgcggattatgataaggaatttcgtttcgccgacctgaatgacatcaagaaacgctacaaggacattattactctgcttgacaagttgaaatga

SEQ ID NO: 3370 - DNA, 432 bp, synthetic construct
  source 1..432: mol_type = other DNA
atgaacaacaaaactagaatggtggttggccggcactcaaaacggaccggtccggagatggaccagatcgttgagaaatactacttctttgaggaaggctttgccgggctaatgatgctctttgaagaggactggttcgtggataagttactggagttgaaggacctggtcctcgagcactatgatgatgtggtattctacttcttcaacctgaccctcaaaagtgacctggaaagctgttgcttcttggtgacagtcatcgtgaagaaggatgacggccatgagatgtcgaagtcccacatacgctctctgatttccgacaggatcaatgacggaagcaagcttcccttcatgatcaatctggtcgaagtgagcgatcctctggaatttaagcgatatacgcagggggagattggaccacataaagactga

SEQ ID NO: 3371 - DNA, 402 bp, synthetic construct
  source 1..402: mol_type = other DNA
atgcaggtggcaattgccaaaaaggaaaatggagaaattctggaactggatgacatcagctaccaattcgtcttatggctaaacgagaacaacctgacccagcttgaccccatatatgccaagtccgtgctcaagactacagttggggagttcagcaagctgaccagccagcatgagtttgaaggcgaggacgagatgctggtaccacagctcaactactttgtggagctctcaacatgggcttcttggaaagacggcaagttgatggacgaggatgaggaaatcaccatctcctttgagatctgcgatgtggtcttcaatcgggagactatgaaagaggaataccacccgattgaaatgacgtatatgaagagtttcatcgagtcgttcctggaaaaatga

SEQ ID NO: 3372 - DNA, 1836 bp, synthetic construct
  source 1..1836: mol_type = other DNA
atgacactaaccgccgagcagcagagaattgcagatgacatgtgcagagagctggccccaatcacattcatccaggggaaggcgggaagcggtaagacccacctcatcaacgagctcatcaatctactcgagatcgatgagatactctgccctaccaacctggcaaagcagttatacgggcgcaatgcacgcacaatacactccttcttctttcacgagtttgacaaaatcgaagagggctaccagaaccctaaggcttacgacggggtgcgaaatgactacttcctccgcaacatcgcctttacaaagataatagtcattgatgaagtgtcgatggtccgctccgacctcatggagatgattcacaagatcctaagtactgctcttaagaacgacagtcccttcggtggaatcaaaatgatacttgtgggtgacatgttccaactgcctccgatcgttgagtccgaggagacctatgaatacctgaaaaatgaatatggcgggctgtacttctttgacagccatgtaattcggaacaatctgtcccagatcaagttctacgagctgaacgagagtgtgcgacacaaggacgactccgactgggtgaacatgctggacatgctgcgtgaagtgcccaagtttgaacgcgtccttcccattcttgaaaagatcaacacccgtgtcgtttctcccgacgagattccagagaacatcactgccattactccgtccaacgccgaagcaaaccggatcaacagacgacagctggacaagatttccggagaggagttttcttcaagagcccatttcagaattaaggagctggactcaaaggattacctggaattttattacagcgaagaccccatgaaaatcgacatgcagaaatactatccaattgaagttccctcccgcttcgaagccttcttgcggtacaagataggggctcgcgtcatgctgaccggatctgtgatgggcgggggtaaaaatggagacttcggcacgatcgtggacagggagataatcagggattacgatgatagcataaccgagatcattaaagtgaaactggaaaagaataatcaggtggtcagcgtaactctggacgctttcagcgctgtggactataagtatgaaatggaatatgatcctacgtcccatagcttaagacgaaagaccccttacattcagcgggtgaaacagtacccattaaagctaggctatgcattcaccatccataagtcacagggccaaagctttcctgaaatggttttggacctcaaaagcaatatctttgcgtcaggacagctgtacgttgcccttagtcgggtgaagaaactcgagggcttgtacctgaccaagccgatcgcctttagtgatattatcatagatgaaaggatcattcaattcttggatagtttgaggaatcgggaatttgatgtgccagaggacggcagcagcattggctctcaggaagtactgatctctaaaaagactcccctgaatgatctgttcgaggactttttgcacgagacagaaagccaggcggagaacgaggtgaaccggacaatccacaggctggtggattatgcctacgccctctatcaggtagacgagtatgatatgatcctgctcgagattaaaaagattgctcaaattatttcgaaccaattcctcatcccacaggaggacatggagtttatcgagaaagttaagacgatgtcggatgacaaaatcgacgagtctatctgtacgtcagtcctgttcaatctttatgatgtctacaaaagggtgcatgatgatcccaaccccatcgtcgtggataagattcactga

SEQ ID NO: 3373 - DNA, 1701 bp, synthetic construct
  source 1..1701: mol_type = other DNA
atgctaatcaacattaaaattaaaaatttcagatccctcaaagactttgagatgaacttcaatccaggcctaaatgtgataattggtgagaacgatgccggcaagacttccttaattgactctctgaaaatcctatttgggctgaagaagattgacataaatgactataacgaggtgggctgtcccattaccatagctctggacgagtcaaacttccattactgccttgaaagtcggattgtggaggacactgtggtaaacacattctacctcaagcccaccgaggataaaatcaatgaaatgaaaacccgcctgaacgggatggatgaactgaaggaggccgaggcgagaaagatgttgaaggagtactgctccatcttcgacatcagctatcgctccaacagtattatggaaaacctcaagagtaagatcctggaatcaatggaatctgatgaatacaccaaggtgaaaagctttagttacccgatcagcttcttgggttcgcgcgaatttgaaaacatcgactccttctttgaaaacactttcttcaaggagctgaaggaggagatctggaacatccatattggggataagaccctcaaccagcacatcgatgactatatagaagagttcaaaaacgaacagctgtccaatcaggatgcagaggagctcaatgcccaactgaaggaatttatgcccgatttcaaagagatcaaccctatagtcaatccaagcgccaagcttagcctggacgtggatgtcgaaatcctcaacagctcagggcagcgcatcatgattgagaaaatgggcgacggaacgaaccgacgtacaaccatggccatcttcaagcataagaaagacaaaaaggacctggtgtacgtatttgatgaaattgagacacacttgcacatcaaggcccagttggacattctcaaactgctgaaggaccttactaaagagaataagcagatcatcattaccacacactccccattcctgatcaaccaagttaaccttaacgagatccacctcatgtccattgacaaggagacgggctctaaggtgtctaccctcaacagctcggaggaaagtcaagtcgccctgagcaatctgggaataaacaatatagatctcttctttactaacaaattgcttattgttgagggggaaagcgaacagaactttatccctatcatgtacgaaaagatctacggctatcctatcagccagaatttcatcaagatcgtcaaggcagatggcataagggacatcccgaatttcatacgggtcatcaagaagtccttctcgaagacagacatcttcgtcctcatggacaatgacgcagatgagctgaccgaggaacggatcgagaagatggttgagggtgacctgatacacagggacaatattttcgaaatcggagatgtggagtttgaagacaccttcagcgatgacattttaaggcaggccctgagccagtacatgagtgatacgcttggatatgctgtggaggcgagcatgcgagacattcagaatgctagacattcagataaattttcaaaagtgttaggagaggcctttaatcggaggacatacaaaaactttaaaaagcccctgtttgctcagtatctggctatgtttgcagagaaagaggacatcgatgagaagatcattaaactgttcgagttgattagcgattga

SEQ ID NO: 3374 - DNA, 726 bp, synthetic construct
  source 1..726: mol_type = other DNA
atgtatctggaaatgaatgagctggcttgtgcgtgccgtcgacagtggaaaattgatgtgaatgaatccatcgacatcttctcccttgccataaataaaataaagaacctgaccattgtgttcaaagtaatggataacgacatcagcggggcctgcctccggttggacaaggaaaacataattttcgtgaactcaaggcacagtaagggaagacaggcctttacaattgcccacgcactgtatcacctgaaatacgacgagaacaacttcaatatctgcggaatcgacagtgatgacgaaacagagcaaaaggcagacctttttgccagctgtcttctgatgccccatggggccctggagacctacaaactgaataacaacatccagaagtgggatttggattcaatcattgacgctgagcagtacttccagataagccatcaggcactgctctggcgcctacgccacttcctcaacgagattacctacgaacagtacagggcattcaaggaggatatcaatcggaacgcctccatcagaggctacgacagcagcttatacgctccatatttaaacaaggactatctgacgattggcaattacatccaactgactgagaaggcttttgaaaacgagttgatctcgctcggcaaaaaggaggaactgctgctagatgcgtttcgggaggacattgtctataacctcaatgaggaaatcatcctctga

SEQ ID NO: 3375 - DNA, 348 bp, synthetic construct
  source 1..348: mol_type = other DNA
atggggttcaagaacatggtcgaaaccgtgggcgatcgcctcaaaagaatccggctggaacacgacttcacccaaaaccagatagccgagtatctgggatttaagcagggccagatagctaaactggagagtaacaaacgcatcctcaggagcgatagcatcatcaaactctcgaacctttaccggtgctctcccgaatacattatcctgggtattggggagtactccaagacgaatatggccttcagaagcaacaataagaatctatccctggacgacattgcagagatgaacaggatcatcaataacttggaatttttatcacgaattacagacaagcaggagtga

SEQ ID NO: 3376 - DNA, 1122 bp, synthetic construct
  source 1..1122: mol_type = other DNA
atgatcattcaggaaatcttctacgattgtgagaaatttctcaccatcgtgcacaatggcatggataatgacatcaaaaaacgagtgatccaaaagagcatagacgtctccagacacgaaatcctcctgaaagagcgctacattgaaaaatatcagttggagaatgataattatgaatttttcatcaagggtttcctcgactgcgaaaacgagaagaacccatacacgaactacagcacatacttcaagcagtatgtgtatcccaataagaatgatgagattgacaatctgtcgtttaaggacttcaagaaggtctacgattttatttacgagtacacaaactttaagtttacaaagctgaacattaacaacattttcctgtttttccctacggacatcctggtgaaaagcattaaatcggaaaccacatcttacctcattatcaagagttctgagaatatcagtaacattagcgtcaaattcaaactaaacgacatcataaaggaatcaatcaatctgactgagattccgaatgataacaagatcaagtcaagggaaaattggaacaactacgaaatcgagatatttgataaggataaaatcatctacaaatcccatacctacgtcattatgtccataaatttcaacatgggcataaccactaagatcaagaagattaaactgaacaagtttgacaaaatggtaaattccagtaacctgaaaaccgagaagttcacgatctcagaggagaacggcctcattaatatcagcaactatctgcttgaggagagcaagaaccgcaacgagcttaatgacgtgacaaaaaccgagtgcatctttctgcggaagaacgagcgggaaaaagcatatgaaatcctggagaagctagtgaaaaacgacggggagttattcatcttcgacccctatttcctgaagcagagcgaaggaaaggacgtgctgaaggatttgctgaacactatcttgactcacaacgacttagttaacataatcttttccaaagacattggagagtctttcgagaacttcaagaatagtctcaccgttgatgaaaagcttttcttcaagaatataggggggtccgccaaaaagctctttttctga

SEQ ID NO: 3377 - DNA, 1497 bp, synthetic construct
  source 1..1497: mol_type = other DNA
atggtgaaaagaatccctgatgaagagcagatcaagttgggcattcgaactctcgactttaacatcccagaggatcacattagccgttttgtggtggatttcattgacgaatactatcctcttctggggatcaaggaaaataaaaagaagaaagggcgggacagttttccggtgaaggagatgctcaagctgctgatttatgctaagatcgagcacattgacagtatgagattcctggcggacatggtcaagtatcatgacgtatacaaattcgtggggaacggaatctgtccttccgaacgaagcctgcagaggtacagagagaagtacggcaaatattacaacgagctgctaaaggccaccctgaaaaaagctagcgacgtggactacactgatttcaacgaggtgtccatcgacggaaccatcaaaaaagcctacaattcaaagaataaggtgatcacggaaaaggagactgaaatattgacccgctacttcgaggggggccgggtcagtcaggaagagctagacaaactccataaaccggcccgagagattcttgagaacaagaaaatcagcaaccaagaaaaactttacctcctggacgacattaaaacccaattcacgctgtcgggtcagaagtcggtgccagtaaccgacatcgaggcacggtggatgaagagcaagaaaggaaactcacagataagctacaatatccaatctgcagtcgattacgacacaaagatgatttgcgcaattaacgtcgtacaggcccctacagaccactaccagctgcccaaaatcgtggataaggcgatcaacaacacaaacgttataccccgcttcgttctggccgatacaatctacctgaatgaggaaagcctcagctatctcgccgataatcagatcaacggcgtgataccagatcgcaagcagtccaaggagaagatcggacgcctcaacaagaacccataccacaaggaccacttcaaatacttccccgagatcgatgcctttgagtgccccgaaggccagattatgtattttttcaacaaatacactgaaaaaaatgacgatctggacaagcccgacaagattaagcggctgtattccaattatggtgcttgtaaggcttgcaattgccgggagaactgcttgtcctccacccagacccacaggacaatcaccgagtatggcgggagtttaaagaaggcgatgtgggagaagatggaaacggaggagtataaggaagagtatgccaaaaggtcatcagtcgaaggtccctttggcattctgaaggaacaattccatatcgagagcgaggttgtgataggaaagactaagacagaggaaagaatcctattggatgccgtggcttacaatctcataaggttatttaacctggaacaggaaatcaaaaatgataaagaagatatagttgacttctgtgagaaaatttctgtccaggagaagcttgaggtcagggcaaccattttttga

SEQ ID NO: 3378 - DNA, 1143 bp, synthetic construct
  source 1..1143: mol_type = other DNA
atgaacttctatgatcttaacaagattcggatcaagatcgcggaggatgagatcgatatcaaggaaaatgattttctctacgaactgtacgatctcgacaatttcgactcactgtttgacgagttggatatactcattaataaaattgagtaccaccaattcgagtttacactcatttggtatgtaggatttttcaatataattaagtacgaggacattggaaatctccccaatattagtaagctcaagtcgtataactacctgaaaggcggcctcatcaaatattttagggggcactttcacctgacgaattacactatggagataaaaccgtatcgcaactactattcattcatcgaacattacgtgctgcgcccatttcagtacagggccatcactaagttgctgaactggatctatatttacgacaagaaattcttctttgagctgcactattttgacaaaagcaactttcatttcctgaggttgttcaagctgcatgaaatcaagaactttgagctggaggagaaatacatcgatttcaactgcgaggacgaactgaaaaactacatccttttcaattacatcatcacggagtacatccacagcgtggacaaaaacttgcccaaggatataaagaccaagattgagtccgatttcaagctgattgaaaagatcgaggtgaacatccttatcaaaatcatactcgactacattagattcgacgagaccaagaagatcccctgttacttcctggagaccatcgaggagaatgaagaaaccttctttacaatattcgaatccttagaaatttacaacattaatgaactcaatagcctagtcaacccattgaaagaaatccacattaaccaggaccggctgtttcagcagatgatcacaaagctggagaagctgctgacagaggaaatcattaccatcgacaattatgagtgggagcatttcctgaacatcattcctgaaaaatatgtcctaatgattaacggccttcttcgaaagaccattggggatttaactttcatcagcgagctcgaccgtgaaatacggagtaagagatatttctccgagaagaacaaggaaaaaaaactaaaagagctgatagacatcgcaaagaacatcaactga

SEQ ID NO: 3379 - DNA, 1371 bp, synthetic construct
  source 1..1371: mol_type = other DNA
atgcaaacctgtagctattgcggaaataaaatcagaaacaaggccaaatattgcgataactgcaacagctacctgaagctcaataatctcgaaattcagttcgacccaaaaaaatacgaaaagattcggctgctagagaaggctatcaaagaagccagcaatctgatagaggaagataactatggcaacctgagtgccaaaacgcagattcagataatttatgacaccatctattcctatctggtggagactacaaattttctgaaagttttgaagaagtatgatctgaacgagaaatacttcgtgtatcacagcttggagttcatcaatcgtgtgagcaagtatcccaatggaatcatatcgaatgagtttctttttgagataaaccggatcttcagcgacctcaagaataagaacaacaacaatacgcggaaatacttgttctacacaaacatcaacaaccgcgagtacattgagaacactcttctcgagattctggaatacttcgactttaaggtgttctcctacgacgactttaagttccctcccgaatttccagaaaactttaagaccaaattcaaatcaaagtacctaatcctcgagtacaactcagcggagaaccatataagtaataaggaagagaaagccctgaaccagctgtacctcctcttcggctacctgacgttcatccaccgatttgggaggctaaacgaaaagtggcacgtgaaccggttcaccctgaaccaccagatcagcgatctgaacgcttcggcaatgatcgagttggataagaacaacaacttcctggacatacacgagtccctggacatcttacgcacagagattaagctagacaaaagcgatttgattaaattcaccaatattccgtttaagaccaacttgtatgaatccatcaagaatgatgtaaaaaacgaggtcgtcctgcataatatcgaagagtatctccgactctactacatcgcgtcaactaagtccgatctggagaatagctttatcaaattctggacccttgctgagaagattctgaaggccactttcgggcaaatgaacgacgagtccatggtgagatacatgaagaaaatcctgaagtacttcggtttcgcaaattatatccaggacagaataccctttttacgcattaagaggaataggcttgtccatgagatcaaggatgaaatcacaattaatgacaggaatatcatcaagctcgtggtcgactacctgatcctttttctgctcaactggagtggcgaactgaataacaatgaagagtacaagtttattctcgacaacttcaacaaaacagatcttaacagacgcgttgagttactgagtattctgaatgaatga

SEQ ID NO: 3380 - DNA, 2712 bp, synthetic construct
  source 1..2712: mol_type = other DNA
atggtcctaagccagtccgagatgcgccgcagggccgaaaagttcattgagacttataaggaagtgtctgatgaaagaagctacagccagatgttctggagagacttcttcgatattttcggaatcagcctcaatgacgtcgctgttttcgagcaagctgtcaaaaaatttgacggcacacaggggttcattgactgcttttggaagggaaagcttgtcatcgaacacaaatcagagggaaaaaatttgaacagcgcctttcagcaggcactgggttatctggacaccctgtcgtcactggaaaaaccccgatacatcatcgtgagcgactttaagagaatcaggctgatcgacttgttcgaagacaaaaagacagagatcagcttgtttgacttgaaggacaacattcagatgttcaacttcatctatctggatggcgtgaaacaccatgaaaagcaggaagagctgaacattgaggccgccgagctaatgggcaagctccatgactcgctcaaggagtcaggatacgttggccacgagctggaactccttttgattagactgcttttctgcgtgtacgcagaggatactgggatttttaacacctatcaattctttgattacatcggcgatgaagaagacccaattagtgtgggcccgaaaattcaacagctgttccgaatcctgaatcagcccgagtctcagcggcagactaacctgccggaggagctcgcaaatttcccatacgtgaacgggaaactcttcgaggaacctatcgtccctccatacttcgattacgagatgtacaatcagctgaaggagatctgtaagttcgactggagcaccatatctccagcgatctttggctctatattccagtccataatgaacgaggacgagcgccggcagttgggtgctcattacacaagcgaatcaaacattctcaaggtaatcaactccctctttatgaatgatctgtgggaggagttccggaaagcgaagaagaatagtaagaagctggaacagctgcgcgacaagatgggcaaactgaagttcttcgaccccgcctgtgggtgcgggaactttctcatcatagcctaccgggagttacgcctgctggaatacgagatcttgaacattctgcataacatcaaaagcgaacgagatacgcaggtcctattcgactccaaggagctgagcaacatcaagattgagaatttctatggcatcgagattgaggagtttccttccctgattgccaaagtggctatgtggttcattgagcaccagatggatctcaagtacgaacaactgaacatccacaaaagcaatctgcccctcatatcttccgccaatatcattcagggcaatgctttgaaaatagactggacccagttcctgcagcccaccaatgaggtattcgtgctgggtaatcccccttttgtggggtcacgcgagcagactaaggagcagaagaaggaaatgaaggaggtcttcaagggggtgaagaggaacggtctccttgactacgtgtcggcatggtatcttaaagccgcacaatacatccaaaatacaaatataaaggtgtgctttgtttctacgaacagtatctgccagggagaccaggtaggaatcctgtgggaagtcctcatgaagaagtatgatatccacattaactttgctcaccagtactttaaatggagtaacgaggcccgaaacgcggccaaagtctacgtcgtaatcatcggcttttcaactgttgacatctcccccaaacacatctatacctatgaaacacttgactctaaaccagacctcgaaatagctacccagattaaccaatatttaattgattcagagatagtttttattaaatcgaggaacaaccctatctccaacgtgtcaaatattatgaaaaaagggagtaaagcgtatgactatgggaacctcacgctcagtcttgaggagaagaacgagctgttagatgaatttccagagatggagaagtggatcaagacatttctcaacgctcgtgactttctcaaaagcaccgagagatactgcttatggttcgccgatatcaccccttgtgagcttcaacagttgccggcccccataaagctgagaatcaataacgtgaaggagaaaagggaaaatagtagtgattccggcatcaacaacattgttaatgtgccatggctgttcgaaaacaatcagcccaagaacgattttctggccattccggtggtgtccggtgaaaaacgggactacatccctatgaaatttctgagcaaggaaatcatcgtcacaaacgcaatatataccttcgagtccgccacgttactcgactttgcatttctgacttccaagatgcacatggcctggatgaagtacgtgtgtggacggctaaagggcgattatcggtattccaagaagatagtgtacaacaatttccctttccccaacgagctgtctgaaaaggataaaaataatatcattaaaaaggctcaaaagatcctggacattcgtgatgagtacaagaacgaatctttggaggtgctgtacggagagtacatgcccaactccctgcagaaagcacatatcgaactggacaaagccatcgacaaggcgtatagtagcaaaaagtttaaggatgataatgacaggatgaagttcctattcaatctttatcttgaatacaccagcgattga

SEQ ID NO: 3381 - DNA, 918 bp, synthetic construct
  source 1..918: mol_type = other DNA
atgagtaagttctatgaagccaaatcgatcctgaaaaatctcgaggtgcctgacaaacagcaaagcgacatatgcgtatacacattcttgtccctgctgtcggttagcgaagatacaaagtgggaagattcaactaacgagtggatcagaatccacgacgtcatccaattcattaagaacaattatggtgtggtctatgcagagaacagccgggagaccatccgcaagacagcaatgcacccctttagagacgccgcttttattgaagacaacggagtgccgactaactctccacgctacaagtacaggataaccgatgagcttctggaagttgtgattagttacaatacgagcaactggggctctgccttaagctcatttaaggaaaatcacgagaccctaattgagatctactcctccaagaaagagatgaggaaaatgccggtcaagatcaatggacaggacctcaccttctccccaggcaaacacaacatacttcagatcctcatcattaaagagtttgctccccggttcgctcccaacagcgagtgtctgtatgtgggggataccacgaagaaagacctcataaagaacaccgaaaaactccaggaactgggctttgagatcagtctgcacgataagatgcctgacgtcgtattgtacagcgaagagaatgactggatttacttcgtggaagccgtgacaagtgtcgggcccatgtcccagaagcgtgtgaacgagatcgaaaagatgacggaggaagtggagtcagggaaaattttcgtgactgccttcctggatatgaaggactttaagaagttctctgaggagatcgcgtgggagaccgagatctgggttgcgtcctttcctgatcatatgattcatatgaatggagacaaattcctgggcccacgatga

SEQ ID NO: 3382 - DNA, 1473 bp, synthetic construct
  source 1..1473: mol_type = other DNA
gtgttgaactacgtaagcaacgagaccaactcattcctcaactccatctctaaagaggagaggaagaaaataggccagttcttcaccgacgtggacgtcgcaaagtttatggcccaactttatgtgcctacgaagaagcacctcgacatcctcgatcccggagcaggaagcggcatactctccgctgccattatcagccagctggagaatactgacgttgattccataaacctgacgctttacgagaacgattcgcgcatcctgcccctgctgcagaacaaccttaaattcatctcagagaacacaagtatcaatctgaaatacgagatcattgaggaaaactatatcctgaacaacagcttcagcattgaaagccaagagttttgcaaaaaagagtatgactttgttatcgccaatccaccctatttcaagataagtcgcaaggcacccgaagctcaactgatggagtcaatatgctacggcgcgcccaacatctacttcctattcatggccatgtctctccatcacctctcaaaggacagcgaaatggtgttcattgtgcctagaagctggacttcaggcgcctacttcaaaaaatttcgggaatacctcttgagcgctgggaagattaatcaggtccacctgtttgtcagtcgcgacaatgttttcaataagcagaacgtgttgcaggaaaccataatcattcacgtaatcaagtctaagaagccgctggaaagtataaagatctcttcctcctccaataacgacttcagtgacattgatgagtttgaagtcccttacgaccttgccatctccaatgacgagaatcatttcgtttacctgcccaccaacaagggggaggtgaaggtgctaaatgatgtgcacaaatttgatagttcttttttgacagaagaaatcaagctgcgaaccgggctaacagtggatttccggaataagagctatttggaggagaaaccaaataaagataacgtgcctctgatctacccgttccactttaacaaaaatttcatcacttttcctgtcgagcatgataaaaagcagtacgtgaatatggcgaagaagggtttaattcaggagaacaaagactacctgtttcttaaacggttcacttcaaaggaagagaagcgaagactgcagccagccatctacctgaaggaggattttccaaactatgactacatctccaccgaaaataagatcaatttcatcgagtccaccaacgacgatgacctgtccaaggagcagatttatggcttatttgtaattttcaactccacaatgtacgacaaatattataggattctcaacggtagcacacaggtcaacgctaacgaaatcaatagcctcaacattccatcgaggacgagcctggagaacctgggaagaattttaattaataagaatgactatagcgtggaatcgtgtgatgaaatcctggagagtatcctctga

SEQ ID NO: 3383 - DNA, 2328 bp, synthetic construct
  source 1..2328: mol_type = other DNA
gtgatagaccgcatcgacatagggacagtgttagggaatgagtttattgtcatcgacaagtacggtggagaaggcaagtcaggcttcggcaccgtctttattgtctatgatgacgatttgaaaaaggccttagcactgaagaccctgcaggacaaatatcttaacgatgaagaaacgatcggagacttcaagaaggagagcttgatctggacagaactgaaacaccccaacatcgtggaggctttgggactggatattattgatggtagactctttatcataatggagccgatttttagttttatggggaagcaatccctcgatgactacttcttcgagggcctgagcgactacaaaatcctcgattgggctatccagttttgttatgctatggagtacatggaggagcagggtatcaaatatcacggggacataaagccccagaatatcctggtgtgggacaacgagattaagattactgactttggcctgactagtttcatcaatgagtctaagatcttcaaaaataagaatgtaggcaattattacatttcaaatggaaagctttgtggaacgaatgcgtatatggcgccagagagcttcgaggggatcaacaacatctccaccgatatctatagtttcggcatcgtgctttaccagatgataaacaaggggaatttgcctttcgaggcagaaaacaacttcgacaacgagtgggaagaactgcacaaaaaggccgaaatcccttactttgatcatatcctgtatgacgtagttctgaagtgcctgagcaagaatccaaaagacagatatgactcctttaaggacctgaagcgggagttaatctcaatctttaaagagaccttcgacgaggagccctacgtgccaaaagaaaaggacttcgaaaaggactcaaactactactacttcaagggaaactctcttgcaaacgttggcgatattgaaaattttatcagcaattacgacaaagccatcgagcttaaccctaattcctcggacattaggatcaactatgccataaacctcataaagtacgggtactatgacgaagccctaaatcatctgaacctagccaaaaagatctttgatgagaacaacaaaaatttcgtcagcctcgatcgtttgtacttcaactttggacatgcttaccaatccaaaggttacctcaacaaagcaatcgaaaattacgagaacgctatcgagatcaacgagaattacttggaatcatacgtgaatcttggaaacatctataaagaactggagctctatgaaaaggcactggagaagtaccagctggccctcgacattaaccccaatttcttcatggccttgatcaatatgggcgaggcgtatagtttcctgggcaactatgaagattccgagaactgcttctacaaagcaaaataccagaacatcaatgaggacctgtatagcctgtggggagagtccttgaggcgactaaacagggaaccctacgcactgaccaaattcttcgagattctgaaaatcaacgatgagtctatgtatgcctactacaatataacaattagctacctcatcctggataacctggaccaggctaaggaatacttcggcaaggctctcgacctgttcggagacaatattacctacaagcttgacctgagcaaacagtttttcaagtatggtttccaggaggagagcctggagatcctcgacgaaattatagaaaccagtgaggataataacaagtttttcgctttattccagaaattcaatatcttcaaggactctgatgtgaagtactccacgtcaattctagatgagattatttacagctctgccgatgatgaactgaagtcggaggcctattgcgataaggccctctttctgaaggattatgaggactttgacctcattctagaatactttaacgaaggtctcagtttaaacccatataatattcgcatctattacctgaagggctgcttctgtcacgagaacgaggagtacgaactcgccatgcagacatttgaagaaggcctgtttatagataaatacaacaaggaacttttgtacgagaagtcccggctgcacctcctttttggggagtgcgagaaatgcatcggctgctgtgagaaatatctggagatcgggtatccgtcggccgagatttaccttagcaaggccctgggcttcatggggctggaggactataacgagtccctcaacttcctggaactggcgcaatctctcgttattgatgaagagacaaaggagatgattttggtgactaaagtcactatagaaaactttctggaacggtga

SEQ ID NO: 3384 - DNA, 1377 bp, synthetic construct
  source 1..1377: mol_type = other DNA
atgtatcaggttagtgagaaggaaagctctgtgtacaaatacaaagctctcggtacttcaaacgatcgcgaaatcaaatcaaaggatgtcaatgaccattacaaagtcacagaatacaacatcgacttgatctacaatgaaatcaaggaatttattcactactatttattctcaggggagatcagcacggatttcactataaaagtccaagacctgttcgaaatggatgacgacgacctgcgcaccctgaagacagtgcacttcctcctgtctgatgaggtccgagacctgattcagattttaccctacctgctccggaacctgtcccactcgacacagaaggagaaagaggaatttaatggcattgttagagggcggatcgactggaacgcaactttgaagacaaggtacgccaaaggattcaacgaccctagcctttttgtgtgctctcccccatccaagttctatgacctggaagaaaatcagctactgaagttcgtactcaggaagatcatcagcctcaagaacaactatctcgatttcgtggattttataagaaacgatgaggagaatcctttcgatatagaaagcctctcggatgagcgggattggtacgagattgtgggcaacaactacaagatggcaaagaaaacactgaaaaaggtctactttgacgacatctcagacgtgcgcatcatcaaggccaagcacatcagaaaggccttcaagaacaggaatgtgctctatcatcgggtagcccgagcctatatcctctacgaagacctattcattaacgaagacatcgagcttctcaaggaattggtcgagcatcggttgattaaggccaccaatccaaataagctgtacgagatctacatattctactccctggtgagagcgctgccctctccggagctgcgcctgttgcacagcggaaatgactactccaccttcgatgtgctggaagacggaaccaaagtgaccgtgcactaccagtaccttcccaagcctctgcaggaggtctccgagtacgccgagatccttcgaaattataacatccaatgggcatatagggctccggatattattttagagttcgagaaagagggcaaaatcacctacaggatagtggaagtgaaaaacagtagtagcgctaattatgtacgggactccgtgtataaggtcatgggttattataaagactttgagcgcatcttgtataacgaggaggcgacgtttacggaaaactgtcccatcgtgctggttacctgggggggcattagaattaaggacaactacgatccatttaaggacagccttattgttctaaatcgtaacgagtttctggatagtctggagaaactgataaacctttga

SEQ ID NO: 3385 - DNA, 2859 bp, synthetic construct
  source 1..2859: mol_type = other DNA
atgcccaacatcgaaaaatatgcttatatcctggatgacttcaaggaaatcctcgatatttaccccatcgagtcgaaaaagccatacaagaacaacgaatttgccgctaagatgcgtaacgatatagccgacgacttcaacaagttcatcctggacatggtttccaataaggagaagtaccactcaaaaatctctccgggaatgatggattggtccaaaaagccatgggcggggttttaccataaggacgtgaccaacactttcaaatttgggttttacctcatttacctttttgagggagacggttccggtttcacactgtcccttggccagggggtcgacgatgctgagaagaaactcgtgaagcggtccgaatacctgaactacatgattacagaaaatgagctgaagatccctgacgggtttaagcatgaagccaacgtgggggaatcaatcatccgaaagttctataaaaaggaagagttggatctggaggagttttgcaatgacctggagaaaatgataaaaatctacgaatcgctcatcccccactacaatgaacttagagctggggaagagccttcccgaaaggatgtgcgtcccaagaatagtggaagcaaagtctggcggatctctccaggaggcagcgatatctacgatgaagcttgggaggagttcaagcaggaatcatatatcggcgtgggcttttatcacggcgaaattgattacagcacattcaagaacaaatggtccttggaccggtatttagataaggatggggtcaaggacccttcaaaggcgatgctgtggaaattcgtcaattgggtggaaaagggtgacattatcgtagcgaataaggggaagagcaaattagcaggcatcggagtagtcaccggcgacttcattcctttgaccaagaacaaaaaccgcaacaaattcggcttggacaatatttaccctgtgaagtggatttacacccctgacgaccttgagatctctaaaaacttctttgcccgccacaccctcgtggagtggcagggggacaaatggaaccagctgttgtgcgtgttggcccgaaacgatgaggtcctgaaggagcgcattttgaagaagatatatgatgagagttataagctcctgttcgagagagaggattatcaccacatggagggctacaaaacagagtccaaagagataaacgatgtgtggaatgatctgttgttaaaatacgaaaatgatgaggacatcgttgatgatgtttgggaccggctcgtcaaccgcaagatgaaggttcacggagacggaagtaagaatatcaaggcctccattaagggaaaattaaagattagcgatgaggacctcagcaagaccgccatcctgctctttgaaaccctgaaaggattgattggaaacagggacgaagccgaccagaagagaattatcaaggagttcaacgacagcggttatagcaagggcttcaagagtggcagattcagtagcatcctgtattacctggacgattattactatgtaatcaatcagaaaaccatcgacactgtgaaactcctgtctctaattctaggggatgagatcctcctgtcaaatgagctggaccgctatatcagcaacaatgcaaagtataaagagttcatacataacttaaggaacgcttactattatgataaatatgacgtctttgaatttagggcattcgatgccatctgtcattacctatgttcgactccccccatctactttgctacaaataaggctgaaaaaattccaatagaattttacgtggataccgacgagattcttgagggcatagatgagagcgagttcgatgagatggatctggacgacgaggagattgaggaaatcactgaggtctacattgaggagacaaaatacgaactgctgaacatcaatccgccactcctggagagcaagctgcaaagttttgccattgctgagacgacagtgaaccagctgtgcgcatcacttaatgccggcaaaaacatcatactggacggcactccaggcaccggtaaaacagaactcgcaatcaagtttgcaacggccgccagcgacaacaacttcattgacgggtacattcttactacggcgacgtccgactggtccactttcgatacgattggtgggctgatgcccaatgagaagggcgagctctttttctaccccggcaagttcctggatgccatcgctgaaaacaaatggctgataattgacgagatcaacagggccgacatcgacaaggcattcggtcaattgtttaccgtgctttcaaagcaggatgtggagctcccctacaaggaaaacggcaagccaatcaaaatcaagctatgggatgaaaactattccaagcacgataaagagaaaagcacctactacatcggaaacaactggagaataattggaacaatgaatgtggatgataaggacagtctctttgacctgtcttacgccttcatgcggcgcttcatgtttattgaagtggacctgcccgaggagacccaatataaacgactcattaagatgtggtccaatgacctcagcgaagaatatactaacaatctcctaagggtttacgacgtaataaaattccggaagctgggcccggcgatcttcaaggacatgaccgagtacatcaaattcagggacgaaataagcgacgacagcaccgacctgatcctggcagaagccatcagttcttatatagttcctcagttcgaggggcttaatagaaataaggtggaacagatccggaaactgatgggagacattggtctgtcgcagtacctggacgaggagcttaaggaactgatcccgaaattttga

SEQ ID NO: 3386 - DNA, 141 bp, synthetic construct
  source 1..141: mol_type = other DNA
atggaggatgagctgctgaagaaatactttaatgagctccggaaggaggccaacaacgaagacttcatcaacgaactagaaggcagcatagagaccattagcagggaagagatcgtggagctgatcaagaaacactattga

SEQ ID NO: 3387 - DNA, 354 bp, synthetic construct
  source 1..354: mol_type = other DNA
atgggtcagaaattcaacatcaaagagctcgagattaggagcttcagaggcatcaaggatctgaagtatgattttgagggaaagtccctggtgctatgtggcccaaacggatgcgggaaaagtagcattacccaggcattcgaatacctcttcacaggccaagtcgcctccttgaagggcatccagggagtaaagcacgacgagagcctgatccataaaggggattcaaaggaagacctcctggtgaaagccaagataggtggccagtacattgaacggagcttcaatgaagagtttaaccccgggcgactgaaggacatctatgaggactcgcgcatggctcttttttactga

SEQ ID NO: 3388 - DNA, 1890 bp, synthetic construct
  source 1..1890: mol_type = other DNA
ctgaatagaaaaaagctgttgtccttcattgagtcaaagcccagagagagatacaaccagatcacgggcctcatctcctatgagaagtatgatgagatcgagacaaagctccgacaggcatccaaggacattaacgacgagataaagattttgaacaaaaggaatgatgaaaagatcagtgaactgacccagttctatagctgcgagagcgacgacctgtacgagaagatcaacgctagcctaaagaagaacaacctgaagcagattgatgagaacactaacttaacccagtacatcgatgagaacaagcttagcaagccacacaaactactgaacaagaacattgaggagcttaaccatgattatctgagactcctggataattatgaaaacatcaccctcacagaactgaagacgaccaatagtctggtttcactgcttgaaaaatcccgggaataccttttactggaaaacccagataagtgtcccatctgtcaaaaatacattgacagcgaggaaatcataaacgatcttagtcccaaaatcgataaaatcaatgaaaacctgaagctgttcaaagactggaagaatgactgcaacatcataataaagcagctttcagatctggattacgaaataaaggacttcaatggtgaaaatcacaatagtttggactatgacttgaacgatctgatagagagtctcaacgacctgtcgaatttcgataaaggactctctgagatggacagggaaatactgggctctctaaataaagacatcatctccattaaaggtaaaatgcaagctaatacagatgagattaaccggaatttagaccacctacagattctgaagaatattagggagaatgagaaatatctcgagaagattcaaaagcaatacgatgtgtccaaaaaatcgcatgagctgtttaagaagatcaaagaggaagagctggccaacatcctcaagcagatagaggaatacaccattgaattttacaactacattcactacgatgaagacatcaacagccctaaaatgaagatcaaagggtccaacagcctgactctggccctcttcttcgaagatgacgagagcgagccacggagcttttcaagcgaggggcacatcgacaccctgggactatgtctctttttggcctttgtcaaggagtttaacaaatatgatttcatcattttggacgacatcatctctaccgttgacctcgaacataaggagcaggtaattaacctgctgtttgaatacttcggaaactacaaattcatcatcacgacccataacaagctttggtttgagcagctcgcacggctcgccgattactatcagcagggccgcttccagtttgtggaaattactgactgggaccgagagatcggcccgtcactgtcccgtaaaaaggacgagaaagagaggattgagcagtacatcaatgacaatgacaccttcgcggcaggcaatgccatccgccgccagctggagtatgaattggataagatctgcaaggtcaatgagatacctctgcctcttaaaaagcattacacggtgggggactactacactcccacaaagaaatttgctaaggagatgttcaaggacactgatgtggaagaatattacaaaaatgtgttcaaggaactggacctgagtctctacaaggcgaatctcacatcccacaacaacgaaatgaactatgacttgaacatcaacgagatcaaaaagttacgagatgccgtgtacgggctggagacagccttcaagtgcaagaatcactcgggaaactatgtcttgaagtttgacatggacaaatgtctcggcctttgcagccacaaacggtgcattgacttcttcacctttaatcgcatttga

SEQ ID NO: 3389 - DNA, 1005 bp, synthetic construct
  source 1..1005: mol_type = other DNA
atgaaactggtggtagacggattcggcaaaagtgtggccaaaagggacaaccagatcgtgattaaggagaacggaaaggagataaactactacttagccaaggacataagccaaatactcttaactggcaagggaagcatcaccttcgatgccttgaccctgctggccgaaaacgatgtggactgcgtctccatcaactggaaaggccatgtggactaccggctctcggcgcctgataggaagaacgcaattgtcaaaaaggagcagtacttcgcactgacagactcccggagcggctatctggccaaggcttttgtaagagcaaagatcgaaaaccaaaaggcagtgcttggaacccttgccaaaagccgagaagagaaggattacattatcgaacagagagagaaggtttctgagcacattggtaagatcgaaaaactgtctaatatcaatagcgataacatccgcaataacatcctggggatcgaggggcaggcgtcacatgaatactggtccgcgtttgcttccgttctggatgagaaatgggaattttttggccgcagtgggagaggggctaaagacccggtcaattccttgctgaactatggttatgccgtcatagaaagtgagatctggaagtcaatatatttggccgggcttgacccatattgtggtttcctacacagcgagcgctacggaagggcttccctggtttatgacctcattgaggagttccggcagcagatcgtggacaagacggtgctctcaatcgtgaatcgtaaccagatcactcccgatgacttcgaggaagatggcaattacattaagatccacgagagggctcggcgactcctaattgccaaaatcctggataaactcaatagcaagattatgtttcacagcaagaacattagttactcggacattatcctgtaccagggcaagctcatggccgactacctgacaaatggcgtcccctatgaggggttctctctgcgctggtga

SEQ ID NO: 3390 - DNA, 126 bp, synthetic construct
  source 1..126: mol_type = other DNA
atgatagagcggtacatcattagcggcgacgatgagatcagctactgctcccagtgcaggaactatgaaacctgtgatggggatgactgcgacccctacttcgacgacgacctctatgatctgtga

SEQ ID NO: 3391 - DNA, 279 bp, synthetic construct
  source 1..279: mol_type = other DNA
atgttagtgtttgtcatgtatgatattgtagataccccaacgcggacaagcctggtgaagaaactgaagcactacggactccatcgcatccagaaatccatcttctgcgggttcctgtctattgacgagagactcaatctggccagcgagtttgactttttcatgtcgtcagaaagggatagtatcatcctcatcccgacctgtgaatcctgcgtggacagtatactaattgagggcaacctggacctgcccaagaagagcctttacgagttcttgtga

SEQ ID NO: 3392 - DNA, 765 bp, synthetic construct
  source 1..765: mol_type = other DNA
atgtgggtgaaacgaatctactacgtgagtctcataagatttaaaattctgaaaaaacgtttgatcaagtcactgcttttccggtgcaccatgaagatcaacacatgtcacctggtgctgaagactaataagaaggtcaagcagaacccatcaaagttcagaggatatataggccgcgaatttgacaagtaccccattctccacaaccactacggcaacaacaaattcctatacagctatccgcttgtacagtatcaaatcatcgatgggcagccaagcatcctcgggatcgaagagggtgccgacatcttggtggacatatcctctaaaatcaaagcgcttaagatgggagacagctactacagggtggaggatcattacctgtactataaggagtatgatgtgcgggccacccgcaaatatcaccagtacaagttcttaagcccttggctggcactcaatactaagaattatcaatcctttaagaatatcaaggactggaaggaaaaaaagagttttctgaataacattatggtgggtaatatcctgtccatgtccaagggactggggatcattgttaacaaaaggctgcatgtcagctcgctcctagatgatgagattgccgagtacaaaaatgttcagatgaacgctttcacaggcgagttcaaggtgaacttcaacattcccgacttctttggattcggcaaaggcgtaagccagggctttgggacggtcattaaggtcaccgaccaggaagaggactga

SEQ ID NO: 3393 - DNA, 1368 bp, synthetic construct
  source 1..1368: mol_type = other DNA
atgtctaaaaaagagcagattctcattctcagtctgggaggttcgcccgagccactcatttattccattaaagaatttaagccagataaagtagtcttcctatgttcgccccagacactgaaggaatgcgatggaatcctcgaggagactgcattcaacgaggaaaatgtggaaatctacgagatacccgacgcggagagcctggacgactcattttccacttcaaagaaggtgctgtccaaattcgcagatgacgggtttgaggttcgtgtggacttcacgggaggaaccaagcctatggtgtcaggtcttgtcctcgcagtgatcgaggggaattactctaatttcaaattcagctacgtgggccagaaggacagccagagccgcaccaaaaatggtgtcggggtagtcaaggatggctctgaaatcacaaaaatgcagatcaatccatataagaaatatgccataaccgaatttaagcgcgggaaaaacttcttcaacacataccagttcgaggcggccttggaaaatttccagagcgccaaatcccggttcattaagggaactgagcaaagacggatctcggagatctacgagaggatcgtcatactttatcaaaaatgggacctcttcgaagataaggtgagcaaaaacacagatctcttcaaatatctgggctttatcatcaatgacattgaaaaggatgaatttatactgaacgaatttgagaatatagacttctttatccagatgaagcggaactacgagtttctgagtttcaaaatcaggggagttagttacgacagcgaggacccttccataaaggggcacttaaagttcagaatttcctattaccttagcgatctcttcaacaacgcctaccgacggatcgaagagggcaaatacgatgatgctgtggcccgcttgtacaggatcaacgagctgattgcccaggttcagctgacccaaaagggcctgattgacgatgaccagctgcagacccagaaggagtttaaggtgaatatctcaagcacgaaatccaaagcgcatgcacgagacaactacgacgaaatcctggacttcattgattacaactccagcctgaaggaaaagaacaaagggtattttggcatcgccaacgacaagagttacgagctgttagacttgttcggcatcaagcaaagccctaagttcgacaagctgaacagtaaactcaaggaaagaaatggctctattctagctcacggcctaaagccgatgaacaagaaaaaggccgaggagctgtatgacaagacccttgattacgctaaggactatttctcatttctggacgaggatatggatttggctaagtttcccaagttttga

SEQ ID NO: 3394 - DNA, 1203 bp, synthetic construct
  source 1..1203: mol_type = other DNA
atgatggtgcgcttgcagttggaaaccatcagccccgtgtatattggaaacacaggaaacgagtattcccggtctgaatttgcctttgccaagtttagcggcaagaagaagctggtcagactgaacctcgacctcgtggcgaaggagctgtaccaacgagacgagaagctcttcaaggaatttctaaaggttctttccgatacaaaatccttcaaaaacatcaaaaccaaaaaggataacagtcagttcaataaaaatgagcgaattgcaattaaggggatgcagaaattcctgtacgacaccattcgaccttacgacaaggatctgtttaagaaaatcctctccagttgctcatcttacaaagttagcctgcagtatgccccagagtccatcaaggagaaaaacggcaaaaaggtgagtgtgacaagaaaaggggagagcacggccgacataggtctaatcaaggagaaccttaaaaccaataacgagccctacatctccggctcgtcaatcaaaggggcagtcaggaatgccctgctgtacagcagattaaatctcagcagcaaaagcaaccgtgacgtagctcgggagattaataataagaataatagggacattaagaacattatgacctatgtgcaattctcagacactttcaacaccatcgaagagcccagcctttatggggtcgaaagcatcgggaccaaaaggaacactttttcattcttcgagacaattgataggggcaatgtgtttgaatttgaatatcgcaacactttcaattcgaaggtgcacaatcctcgcatgctgaataacttcgatctgagcgtggaatcaatatttaagcacatctacgaattttctaacgacatcttggatgaggaaatacggtttatcgaggatacagtcaacttcgattatgtgtactccgatgtcgactcgggaaagctttacaagtacttcgacgacctcaaggacaaaaatactgaggagtccccactcctgcggttaggccagggcagtggcgctctgggtgtcagtcagttgctggaggttaaaaactccaggagcccaacggaatttaccacgttccgcaagttcaaccggctgggacacaagaaccattacgacttccccaagacaagaaagctgatagtaaacagcttcgagccgctcggatgggtgaagctgagtaaaatctga

SEQ ID NO: 3395 - DNA, 996 bp, synthetic construct
  source 1..996: mol_type = other DNA
atgtacgtgtgtgataagatgaaaatcgtctacctcaaacctaagagcacatttccttttctttcgagcgacagcatcttcggcgcactgacctacgggatggccgagttgttccccgagaaactggattcattcatagagagcttcaagaataagaacgacattccattcctcattagcagtgcttttcctttcatcaagaacgagaacaactattttcgattctaccccaagccaattaccaaattccagagcaaagacatgaaattgtcgaaaaagttcaaaaaaatcaaatttatcgaggaggatattttcttggagctagtttcaggcaatattagtaacgatgggatctttgacaactttaaggatgatctgttccttgtgaatgaatttaacgaatctttccttgtgaagaaggagaatagcgagattatcgacggaagtttattttcaaaggaaatctctccccacaatgttatagatcgcgtaaagaataactccataaatatcttttacagcgaggattataggttcagagagaacaaaggcctgtttttcctggtggactttaaggactccagtttcgaagaaattttcatttccctgctccggttcctcagagacaagggtttcggccatgacatctcctctggaaagggacagtttgacttcgaaatagacgactttgacaagtttgacaacctgaacaagagccaatacttcctatcactgtcccgtttcatcccagacgagaaggatatcagctttattgaggagctctccgatgatgacgccctgtatgaaatcggagacaagcgctcccgggacagtttcgggctccggaagaaaacaaggttcttcaaggaagggtctgtcttcccggattacactgtcaaatatgatgtgaactgcggttgcctggtggaaacgagcgacaggtcaatcgagtacggctactcctttaatatcccctataacgtggaggaactgtga

SEQ ID NO: 3396 - DNA, 768 bp, synthetic construct
  source 1..768: mol_type = other DNA
atggagaacttggagtttcagggcaacgtgataatcaaaggaaaaatcgtttgtgataccggtctgcatattggcgagtccaatgagacactcgaaattggcgggatagacaatatggtcatgagggataagaagtcgaacctgccatacatcccaggtagctctctgaaggggaagctccggcaccagatggagctgttcaacaaggacagcgtccggtacattctggacaaccccaagggacgcaatagggagtatgctccttgcaactgcggaaaatgtagcgtgtgcaagatattcggttttaccaacgatgaggatggcacgtacgtgggccctactagaatcatcgttcgagatgccttccccgacgacgaaacaaaggaattttgggagagttcagagggcgtgtccagaggagcggaactaaagacagaaaacgtgatcgaccgggtcaaaagtaccgccatgcacccgcgaccaacggagcgcatccccaaggacagcaaatttgacttcgagatcgtgttcgggatctatcacgatgatgacaaggaaaactttaaggagattttcaccgcactgaaactcctggaaaataattatctcgggggcaatgggagcagaggatacgggaaaatccatttcgaggacctgtcctacctcattcgcaacaggtctttctacactgacaatgccgaggaaaaggtaattgaacttggcgtgttgtcaaacttagaggatgaaaatctgaaaatcgagctttga

SEQ ID NO: 3397 - DNA, 432 bp, synthetic construct
  source 1..432: mol_type = other DNA
atgccgaacgatctaaaggacgtggagaacaagataaaagggctcaaaagcctcaagtactatgagatcgaagagtttgtcaagttcgacggggacgcagacaagataaccaagcaattacgaaatgatgacattaagacgtcccagctgcggaagttttttgctgcagtgaaggaaatcgaaatgtacgtaaaagataaaagagtgtgggacgacaaggccaaagtggatttctacctcctgatgcccaaactggcgtatgctaaaggacggaaagtcatcagtgagcgcttttttaaccttatgaagattacaatggagaaggttggtagcggcaataaggaagataccttggacgatttcctgaggttcgtgcagttcctggaggccatcgtcgccttcttcaaagtgaacaatccaggctcactgtga

SEQ ID NO: 3398 - DNA, 2658 bp, synthetic construct
  source 1..2658: mol_type = other DNA
atggatcgcaagaaccttgagtttgcctccctccttcacgatattggaaaattttcgtaccgcgcggaaaacaacttctcaagcgagtacaagaacctcgataaagacgacttcggttatcacggagctcactccaagtggagcgctagctttatcaagcattactggaacagtgacatcaccaaccttgccctgtaccaccataaccctaaaagcggtatcaacgaggagatagggcttattattcagaaagccgaccatcactcttctggtgagcgcatcgattctatcaagaatgacccgttcaaaacgccattgctttcgatcttttcagacattctcatcaagcctgaaaagaacaagaagtgcgatgagctgtacgtgcccttggaagagtttgatttgaatcgaaagtggaaaaatagcatcccaacctccatcgataacgccaaaaagggccataattccctgaaaaagtgctattcggccctgtgggagaagtttgaaagtgaggtgaagcatctggaaaatacggatgacttcaacactatcctggccctcttgaagaaatacacctcttgtatgcccagcgcaacatgggggtctaaaccggacattagcttgtatgaccactcaaagacaaccgcggccatcgcagtgtgcaggtatctgttcaatgaggagacagagctcaagcacacctcctcaacgcaggaggtgtattcagttatcagcggagatatttccgggatacagaactttatctttaagatttccagcccccagaaggctcagagcgcaatgagtaaacggctcaggggccggtcactgtacctgacactgctgaccgacgcgattgcaaacaagatagtgcaggatctggacctgacccaagccaatatcctgttctgtggcggaggcagattcacaattctggccccaaacacggaaaaggctaagaagagcctcaacgagatacagaaggagataaatgccttcttcattgaaaagtttaacgcagaattgtacctggctatcgcaagtgaagaatgcagtggaaatggcctggagaacttcagtgatattacatccatcttaagctataagattgcacaggataaaaagcacaaatttatcgacaatctggacgatctgttcgacttcgaggaggacttggatggcaaaagcacctgtgccgtgtgcggaaacctcttcaagccaaaggatgaggaggacaagttctgcgacgactgtgaggaacacatcaaactggggtccaaggtgaccaatgccagttatatgatcaagtgtttctttaatgaagagttcaaaaacatttacgacaaaaataaatttaagaaagtctctttctatgagaagcccctgaacatagcgtatattttcactagcaacaccagtaagaagtctgttgacaagactttcaaagaaatcaaagatatcctctcggaatacgacgagtttgtcgatagatttgagatcatcaagcttaacgacactgacttcctcgagattgagaacaagttcagcctcgaggaactggataaaatctccttcagtttcagcttcctgggaaataccatcccaaagtaccacaaccgtaaccccctgtactttgaacacctggcccagatcagtaagggggcaaacaaacttggtgtcctaaagatggacgtagatgatctgggcatgatcttcggcgagggcttcaatcacgcctttaaagacagcgacgagagtataagcagcatctcccggatttccaccctaagctctcagctggacctcttcttctcagggtttattaataagattgcctcggaattttgtgtgtatgacgatggaatcaaggaatacttcaaaaatgacccttcgttcttcgagttaaactttaaggaggtagagttgaagctgcaaaatgacgacggctctaaaaacgaagatgagtccatcattgtatacaaagaaaagtacggcatggagctcgacgacgaaatcaaggaatccatcaaggagtatagtatcccaactattcatataaactacagcggcggggacgatctcctcgtgttggggccctacgacgatatcatcgagtttagccaagagctgcgcacaagattcaagcagtggacttgcaacaatgactccattaatttatccggtggaatcaacattgtctcctcaaaattccccataggcaaggctgtgatcatggctgaaaactaccttgaggcttccaaatcctgcggtaaagacaagcttacagtgttcaatgaggtcgtgccgtgggatgccaagggctctaagtttaaagacttcaaccagctgcacgaatttggcctaaaactagaggaatataactctcaaaataaactatcaaaaagcatcgtgtattccatgttatacctgtggaaggataactttgaagagcattcaggaatatttttcaacgaagagaaatgggaaaaggagaattttgcgaaatgcaataacaatagatttgtccccaagttcgcttataggctgcgagggatgaatcagaacagcaaagagtacgatgtggtcctcaaggaagggattaaatacatgccttggattaagatacctgtttcatgggttagtctgcggatgaggtga

SEQ ID NO: 3399 - DNA, 4698 bp, synthetic construct
  source 1..4698: mol_type = other DNA
atgtcaatcgacctgaacaagaaccagaaacgggctgcctattacaatggagacaagtacctggtcatagaggccggtccaggcgctgggaagacacgggttctgattgagagaatcaagtttctcataaacgaagagaaggtggagcccagtagcctgctggttatcacattcacacgcaaagccgcagaggagctgaaagaacgtttatacaaggacattgacgaatctgtggtgagcatgatgcagataagtaccatacatgcgttttgcagagtgatcctctccgagatcggggagtacaacactcgggtcctcggcgacagcgttaacgagaagcagaaaatgtttttaaacaaatataagaaggacctcggcttcgtgaatgagtgtcacatccgccagaatgagatatttaacctaatcgataaatacggcgaatacgccaccttcaaggtagacagtaaaaaattggttgactacatagaacgcaacactaaaattgaccccgagtatatcgatttcgtgaacgaatacatgaaggagaacgacggacgatacccttttgacgaggtaatggctaatgacgcctataagaaatcccggacaaacgcattgtacctgcaaattgcaaagagctaccctaagtacctggagcttctcgacgagaagggcttcagcgattttgatcagatgcagatcaagaccctgaactacttgaaaaccaatcccaacaccatctacaagaacgttttggttgacgagttccaggacaccgatcctgtccagatgaagatatttgaaatcctaatgaaaaacgcagactcctttactgtggtgggggatattgaccagagcatctatggattccggggcgccaacaagaactacttcgagtatctctacaacaattatgacgacagggtctacaaggtgaacctgaacgtaaactaccgttcagcaaatcagatcattgacatcagcgaggacttcatcaagtcgcaaagggcggagggcgcaaagcaggacaaggccctgggcgcacgggatctcgatcgcaacacctattttctcgtgaacgagaacagcgaaagcgaagccaaggccatcttcgaaatgattcgatacctccatgacagcgggaagattgagaattacaatgagatcgctatcctttcccggtccatcaggtttagcaacactgcccaggacctcatccagcttttcatcgataacaacatcccttatcatgtccgaggggtgccagacctcttcgaccggccggagattaggagtgtgatcacacttatccaccacctgatagaggacaccaacccccataaccacaaatttgacctgtgggagttggagtggctaaatctgaaggcctacactggcgagagcttcaaccaggtgctctttaacctatctgacgagactaaaaacatcctgaacagtatacaggaggaatttgaagagaacgtcttaaaggaggaaaaacgcgcttatctgaaagttacaggcaagaagtctcataagtatgtctttaagagagtctttgaacgagatgagaaggtgctgatcgagctgtttaaaaacattgagaggcctatcctaagcaacgagaatctgattcggtacggggtaaaaaataagcaggatcttgagttcttcagacgcttgaacgacttgaaggcttacttcaacagtgaagagtacatggactccgaggacactatcctcgatatctatatgaaattgctgacagacgtctgcaattatctgacggaagatttcattaacgaccccattaacagggatgagctgaaaaacctggcaatcctcagcaacacgttccacaattatgagctgattgtagacaataagaatctgaagggagcctactatttcctgagatacaacattgctggctacagcacagataacgatgaatccgagggggtgcagctgatgaccgtccataagtctaagggactggaatttcccgtggtcatcctcctgagtttgaaccacaagaagttcccaagccaatacaaggatgagtatgatcgattctacactccaaactcctgtcttgaatacaagaattacgattccaaggaggaggaaattcaagactatctagaggaagaggacagaatcgtctatgtggcgatgacaagggcccaggatattttggtgctctctaatctaatcaaggaaacgcctgaactggaagggctgaaagccgaactgaatgacaatctgtcccagattgaaaagatagaaatcatcaaggacattccgaaagggcacattaagattcacgacctgatcaataggaatctcagtagctgcaagttcctggaggacgactttagccagctgccaaagacggtgtgcgaaaagccccaagtgaaaaaggaggacttccttaacctgagcttctattccctggagaattacgtggcctgtcctttcaagtacaaactgatgcacgacatcaacttcagcgagtccaccatggagtttaacaagctccggggcttgtttgtccacaacctgctggagacgatcaacaatcgtatccgctccaacggaaaccggtacattggggacgacgaggtcttggctatctttgaacggtttcaggactccttccgcttcgaaaacctgagattgagtaagaaggaatatgatattataaaaaacgacgtgctttattactacaataccttcggaaaggatttcaatatacttaacacagagctttcattcagcattaaaaaggaatattatggactctcaggcattattgacctcatctacaagaccaaagatggaaagatgggcattctggattataagaacaccgaacgcatctcaaggcattatgtgcaaaattatattaagcaggtctacacctacatgattgccctgaaggatagtttcgaaatcgatgagctccggatatacgcaatcaaagcacggaagatgatctccgtggatataaatcagaagtccctggatatccttctggaagagctggataatgtgtcattgaatattaaaaaagaagtattcgaatgtaattttggagagggctgcctgaaatgcagtttcagcaagatctgcgttaaggcaaataacgatgacgtgtcggtttttgactttaacaacgaggacaccctgtcgtttagaaataagttctatcagaacttgcccgactacgaaataattgacctgaaagaccgctattggaaggacatcgactttgattcagatgatgagaccaagtttgatgtggacatcagtgccgatgatctggcctcaatctccgcgaaggagggtgtttcggtgtctgctaacgaaggtatccccatatctgccagagagggtgtgagtgtctccgcgaatgagggtattcccatatctgctaaagagggtgtttctgtgtctgataaggacaacgacctgagcgtatcggccaatcagatcaaaaatttaaataactcaagcgatgataagcatcttggtgcggacttcaaatcgaaaaaagactcatttaaatcagagatgaaatctcctagttctaaaaaggattcatctaaatccaaaaagaaaagctacaaaagcaaggaatccagcaagtctagcaaggaaccattcattagttcgtactcaaagtacctcgatctgaagtccatcccgaagaaatacaagaatttccttaaaaacgattactccaaggacatcgatctttttgagtatgatgatgacctctccctggaggagaacattctgcgaaaatacatcctcaagaaaaaaggcctgaaattgctcaaaaaagagctatatgatgagtccgaagactattataaaaaattaatacacaattcctacttcaaggaggactactacccatataagcaactgatgaaggtctatcacaagacgaagaaatacgacaaggaagcggacatcatacgcgatttcttcaagtcaagcgtgtatgccaataaataccagttcttatacttcaaatataagaataggaaattgccgaagagagctcgcatcaagcataatgaactcaaagacctgatcaagaattacgtgaatctcttaaaagattctgacctttcgaacaattctattcccaatgctgatagactgaaaaaagataagaaccgtctcaagatcctatcagatgaagaggagttttacaaccacaaaaggtcctattacaccaacattgccgatggcctgtatgaggaaaagctcaatcaggaggccttcgacctctatgctatggcaatctacaagtacaaggaaaagagtttcagatattaccaacgactggctagtatttataggcgcactaataattacaagcatgagttgctggtgattatggagtactttaataagagcaacaagatccacagaaccaagagcagcgacaagtggtttaagcaacgtctttattccactaaacagcttatcggggatgagaacgccattaggcagattgaaaacatcgtgtgcaaaaaaggatacaacctcaaagccgattacgccctcaattacttaaaccacgacctggacgaatattactgtctgaagaatttagacaaggaacttaactacatcatcagtagcaatgaggacattttcacactgcacaaaaagaaatga

SEQ ID NO: 3400 - DNA, 1197 bp, synthetic construct
  source 1..1197: mol_type = other DNA
atgaacgaaaccacgtcgaatgaactcatccacgcccgcagactttatatgaagaagaacatgaaggaagccgaaactaactttctgaaagtgttcaacacaaacagggagctctttaatgacctggacgagatctactttatccgtgcaattcaggaatcccatatcgacaactgccagtcaataggtgatttaaggcactatgctgactttgtagtggagaactttaaccaagaggactgctccaaccgaaatttcgaagatccctacgcggactttattctcaatcttagcactgttctaatcaaggaagaatactacctggatgcaattaaatacctgataagattggacgagtctttcctctctgacgtgtcacggcacaactccaacggctattatagattctcgcaccatgagaagtacctgagcaatatggttaaggccctgattggcattggcaaatacgatgccgctctacagtattccatccggctgatcaacgacctgccggacaccgccagtgaggccaagtattggattaagtggagcattgcgaaaatatataatctgacgggagattacgaactgtcaatcgaatacatcaacgagttgttgcttaagaggagtgaaaactatttctacaaacttctggccgacaactacctcaaactcgatgattatgataatgcactggtcagtggggtccactatattattttaaaaaaggacatcaaaagctgtgtcaattattacacagagctcggatatatcctgagccagttgggcctgactgaggagtccaataaacactactatctcagctacgctatcaaaaagagctatggcaacttcattcccgattacctggaagagaagatccgagacctgggcttcgatttggagaacaccaattacaataagatagctaacgagctgaaacctttctggcgggagtgcctttaccgcaataaaaagcagtttacaggaaccataagtgccatcaagcaagagaggggatttggtttcatcaagccagatgacggggggaaaaaccagttcttcctattcaaggactttaaggatgatcatgactacatttggaacaacatgcgggtgtcatactacctgggggacagcatcgactactctaagaataaggagtccacccgcgcagtgaatgtggagctcatctga

SEQ ID NO: 3401 - DNA, 1695 bp, synthetic construct
  source 1..1695: mol_type = other DNA
atgtctagtcaacttgaggaattaaaaaaagaatttcaaatagccgagtacaatctcgactttgatagactccacaccctatgtgacaagatcttggaacacgaccccaacctgatcgaatacaagcagtacattgctattagctacttcctgtctgaggactatgaaaactgcataaaggagtacagcatctacctggaccgccgggagaaggatgctgacgacgcgtacatactggccatgagccacctgcatctcaacaacgaatcagaggccatgtccattatcgaaggctttgacgagatcgactctcttgagctgaaactcaaggcgtatcatgacattaaacactactacaaggccatcaaggccggtaacgagcttctggatattgacagctccaatgatgaagccttgcagaccatgtcggagatctatgacgagttgaacaataccgagatgtcactgttctatgagtgggagctatgcaagctgaagcccgctttcaaaggcttccatctcatgaggctctatgagctgggaaggtatgaagaggtcatcgagatctttgaacggaatcccgacgactttaaatgcgaccttctgcactacccattcaacttcttgatcggatcttcatactgtgaaatcggcaagcacatggatgcattgaagtatctgtaccggtccaaccagctccacgagtgccgagatacaggacttcagatcgcccgtaactactatatactgaaggattacgagatggcatataagattctaaagggggtggctgttaaggagggtctattggactatgatgattctctctcggacgatgagctgttgaatgacaattcgcttctcctgttggatgaagatggactggaagacgatagtttactcctgtccgataacgagactttgaatgacgattccctgctgttatccgaggataagacgttaaataatgattccctgttcctgagagaagataagacactggaacagataatggacaagtactgtaaaggggcacctgaagagaaagctgatgagaagacttgcaatgaagaagaaaaagaaacagaagtcctcagcgatatacagattcttgaccagatgctgctggagcttgatattgacgaaagtcattatacccaggtggaggaggagccaagttatttcaaagaaactgatgaggactcaatcgacggcgacgaggacattgacatcgtggacgcaaacatcctgagaatgatgagcgaggtatgtctctacttaaaacgctacgatgagtgcatcatgatcgcgaaccggctcctgagcgtgtcagaccgatatgacgagattgtgaacgtgatcagtgcatactacctggagatggaagacgagtggaaggctgatgaatggtacctgctccttcctatcgagctggcattcaataaaccatttgtctatacgattgcccgcaacctgtccctcatcggcgagagcgaccgcgccctgaaaatctacagcaccatcgagaagctgattgacgaaagcccctatctcctgtatgaaagggccggcctctacaagaggattggggagaaggagcttgccatgaaggacttggataaatataacgagattgccctgaaatacctatacgagaacggggaaccggaagttaaatacgaggacctggagtga

SEQ ID NO: 3402 - DNA, 135 bp, synthetic construct
  source 1..135: mol_type = other DNA
atgaaggtagaaatcatgattatagggatcttgctgctgagcaacttcctctaccatcacgaggacggcaatcccattgtgcagtacgtggcatatatagccagcctactggtcatcatcctcggattcttttga

SEQ ID NO: 3403 - DNA, 1290 bp, synthetic construct
  source 1..1290: mol_type = other DNA
atgaaaagaaaagaagtcgtgctattcatgacggtgggcaccgggatcaatccagacagcaacgaggcggggtacaagaagctggccaagaagctctacagtactctgaacaagatttatcccaactatgtaatcttctttgcaagcaacgtttccaagcacactattaaatacatagacgcgctgttcgagctggacggcgacgagttcaatgaaggggaggattatgaaatcgttgaactgaacaacattgacgacttcaactactgctttgagtcctttgaagcaaagatctgggaatacgattacctcaatgagaaaaaataccagattatcatggactacaccagcgggacaaagaccatgtcagctgctatggcctgctgtggtatgctctacagccgtgatctgatctctgtcggaggggaccgcagcaagggagaggtgtcagctggaacagagatcatcaactaccagaatctctataagatctatgacaagcgcgccatcatgcgcatccggtacaacttcaacacgaacagattccagccgtgcctggacgtgttgaactatattgtggatatgaacatccacaaggactccctagtggacctctgtaaaggatacttcgcatgggataccatggatttcagccatgcatatgagcacctgaagagcattgaccttaattatatggagtttgcggagataaaaaacgagcttaagaagaacctgaatgccctgggcatcatcgtcaacagtaaatcccagaaccttaagaactgttatatcctggcctgcatcatcaacaatgctatacggagagctgaggaatataagtttgacgacgcaattgctaggctataccgaagctttgagctcattgcccagatccgactggaaaaatacaatctcatgagttctgatattgatatagatcttctcaaagaaaagggcttaaggcaagagtttatagatgagctggagaatatgcgggaagacggtaaaattaggattggcctgataaaggactaccatttgttgaatgagctggatgatgagctcggcaagtactttatggagaatgaatcgaagatcaaagacctgacattcaagaggaacaattcgattttggcccacggactggactcacaatccaaagaagacttcgataagttcttagagcttgtgatcggcctggccaaaaaactggataaagacatgaacaagttcctggaagaaacccggtttgccaagttcgacctcaagttggatattaataatgcctga

SEQ ID NO: 3404 - DNA, 339 bp, synthetic construct
  source 1..339: mol_type = other DNA
atgtataagataattaacgaggacggctccctagtcaggggatacccatctgatgcactctacgacctgttgaccgacaaagagaaggaacacatccaactcttcaagaatgagatcgaaaagatcacagagaaagaggggcttggtaaaataacggtgtcagtgagttatgatgaacccattatcgaaaaagccttccagatccaggacaagaatggctacagctttgacgagtttcaggagatcctggataagattcggctgcatatggccgatttctgtaagaacaacaaagagctgtgcgaatttaagaagttcagctacatcatttccgcttga

SEQ ID NO: 3405 - DNA, 270 bp, synthetic construct
  source 1..270: mol_type = other DNA
atgatggtaagtgacaaggatttggccaagaacaataacgtgaagggctcacggatcaacgtgacaccgctcatggccgcatacttcctgggatacatgctgtcggagaagggtgagaagatcagcgatgagaaaatagaagatctgtacaagggggcttgcttcagcatgggcatcgaccccgtcgaagacatttccgagctttttaacgaactcttcagcccaaaaaagaaaaccaaagaggacctagaaaattccttttattgttga

SEQ ID NO: 3406 - DNA, 1407 bp, synthetic construct
  source 1..1407: mol_type = other DNA
atgatccatctcggtgccatcatgagcaacatcgtggacagaataggtatggagaaatcagtcattctccttgctgcggtggtctcctttgtcactgccttccttgcaaacatcagcgtggctctgcccctgatagcgagggagctggccatgagcaatatcattcaaaactgggtagccacaatctaccttcttccaattgccatgctgtccatccctttaggtaagctgaccagcaaacacggcctaaacaagtccctgctggctggaatcatcttgacaataatcggggtgatcatagcctgctttagcatcaacagtgaactgttgctgctctcacgagtaatccaaggcatcggaaccgctctgatcaacgtcgcttcaatggccttaatcgttagcgcagttaacccagaaacccggggtcaggccctggggctgaacattgctggggtctacattggtctcagtagcgccccggtgatcggaggcctggtcatctaccaccttggctggcagagcatattctatatcatgctcatccccttgatattctccgcctacctgagttggtcactcaaagacgagtggacaatgtacgacggcccaatcgacataacgggatctatcattttcagtatcgggattctgctcgtaatctacgggttcaccatagtgaacacgtggcttggcattgttctcttgataattgggctgctcctgctgattgcctttgcttatttcgaattgcgcgtcaataatcctgtcttcgacgtgagactctttaagaatagtaggttctcctcttccaatattgcatccctcattagttatactgccacttttgtgatcacctacatcctgacctatcactttcagtatattatgggctttgactcgaaattttcaggcatgctgctgattgtaacacccgtcatgatggcaattctagcgcccctcagcggccggctaagcgatcggatcgatccgcagaagctggctgcaatcggcatggggttcgtgaccgtggcattgaccatcctatgcttcctgaacgagtccacccccttatacatgattctgctcgccatgtttctccaggggataggatacggcctgttctcttcacctaatacaaacgcgatcatgagctcggttcccaaggaagagacttcttccgctagtgcatccctggccgccgttagggtgattggacagacactcagccttggaatgctgacggtgatcttcgcctacatcatgggcaatgtggcgattgtgcctgagtattatccattgcttatggaaagctcgcgtctgtcttgcattatctctgcagtgttgtgtgtgattgctgtggtggccagcttagttggactgcgctccgatgatgagtacgagacttga

SEQ ID NO: 3407 - DNA, 1785 bp, synthetic construct
  source 1..1785: mol_type = other DNA
atgaatagtaaacaaaaaaccttaattatcttaagtctaagcctgatattgctggcctccatagccgccgtgtcggccgtggattacaccctgactaacgcagatatggactatgtggttaagtccaacggcctgttgcatgtccatgaggccatcacgtatgactttgacagcagccccaatggggtctaccgcgacatacccctgaaaagcggccagtccatagagaatctggaggtttacgtggacggggcctatgcagagtaccagatcattccaaaaggaagcggggagcggatcaaggtgtatctctatacagactccagcaaaagccataagctgtctagtgactcggtcatcaccgtccactacgtctacgacatgcccaaggtggtaaaaatctacaacgatattggagagctccagtataaggtatggggggatgagtgggacgaagaccttgaaaaccttcagtccacgatcactttcccagatgatgaggagcttcagttctggatcaacccatacttcagcaatgctaaggccaggtgggcggaggaccacctgaagatccactcagactttgttggcgacggcaaatatgtggaggcacgagccttgattccgctgagcgagtttgattccaatgcagaatatgcgcagcacatcaacaagaacggaaaggatgagatcatcaagatccaggacgatgacaagaaatctcaagagggcttcaaatccctgttctcaatactgaataaggttttggtggtgctctgctttattcccgggctcatctacctgaagttcggacgggagcccaaaacaacttatgatgccatctacgagcacgagcctcctacagatgaccctccagcctatgtgaatggtatgattggctcagggctgaaggatgtgggcagtctaaaccaggaagctttccaggctaccatcatggaccttatcaaccgaggcaagatgggtgtgtcctcagaggaagacactgaatttacaaagaccaccttcctgaccatcaaggacacgtcaggcctcaagcggtttgaagctgatgtcattaacatcttgaagagatatgagctcaacggaaacattagcctaagttacatgcaggactgtctgaggggagaatcggaagccagatacttccaaggccgctttgaaagttggaaagaaaactttgaaaatgaatacttcagtgaggacagcttcagccgcctctttgacaagaaaggaaacgactatctgaattacttcgctttccttctcataattctcggaattatcgctttcgtggcatcaatctttttcgactttgcagtcaccggctcgacgatattcgtgggggtcctgttagtgattgtaggggtcgtgtgcctgatgctgcctagcggaattgcgggaaaatacactgacgaaggaaagctctacgaggaaaaatggatgaagtttaaaaaatacctgcaggattactcattgatcaaggagcacccgcccgagtccattgtgatttggaacaagtaccttgtgtatgctaccgcgctgggtgtggcagatgaggtttacaaggccatgaagatggaagtctatagcgggagcgatgattactacagaacaaatgatctctacatgttctattacctggggggtcataggtttatcaatgatagtttcaacacagcctcctccaccatttctgctgccgacaacagctctgtaggcggcatcggcggcggctccggtggtggggggggcggtgccttctga

SEQ ID NO: 3408 - DNA, 750 bp, synthetic construct
  source 1..750: mol_type = other DNA
atgaactcaaaacaaaaagccctcatggtgctggccttgagcatcatcctgctcagtagtattgcagccgcctcggcagaggattatagcctaacgaatgccaaaatagatatggtaatccaggatgacggattagtctttgtggatgaggcaatcacctaccacttctacaagaccatgaatggcgtctatcggtacattcctatcaataacttcaacatggaagactttgcggtagacgtggatggcgcctattatgaactggagggtaacgacgacgactcacagatagaggctaaggtgtatctctacaaggataaggacaaaaccgaaaagatcgaccccgggacagatgtgacagtccattacaagtactacatgagcgacctccttgacgtgaaaggggacaacgccgtgctgaactattacctattgggagaggactgggaggttgacctggaggagattgaagccaacgtccacttccccgaaaagaaagagctcgattacgagcttgtgccaagcggctccgctgaaggcaagtggtctggagacacgctgaccattactggggagaatattaacgctggggatggtctggcactgatcgttgaaatcccgctggacgagttcgcttccggcttttccaacgcggtgcacaacgacactgatgatgacgacgacatagataatgatatcgacaatgacaaagatgatcttaaggacctgacaaaggcgaagcagatttga

SEQ ID NO: 3409 - DNA, 561 bp, synthetic construct
  source 1..561: mol_type = other DNA
atgtccacatttattcttgtcattataatcctcggtatcattttaattatcgccggcataatcgtggccctctataatggcctggtgactgccagaaacaaggtaaagaatgcttgggcccagatcgatgtccaactgaaccggcgcgccgatctgatccctaacctggtcgagaccgtgaaaggctacgccggacacgagaaaagcgtgttcgaagacgtgactgcggcaagggcagggctgatgaatgccaacggagttaaggagatcggggaggcgaacaaccagctaacaaacacccttaagaccctgtttgctgttgctgaaaactacccggagctcaaagccaatgagaacttcaaggagttgcaggcccaactggctgaaagcgaggacaagatcgcatactcacggcagttctataatgacacggtgttgatgtacaataacaaatgccagaccttcccaagcaatctgattgcaggcctcttcggattcaaggaagcggacttctttgaggccgcaggggaagctcgaagtgtgcccaaagtcgaattttga

SEQ ID NO: 3410 - DNA, 1791 bp, synthetic construct
  source 1..1791: mol_type = other DNA
atgaacaataagcagaaaacactggcaatcctcattctactcgctatcgtgctgacaagcatttcagcagctagtgctgtggattacaaaatcaccaatgccgatgtccacctggatgtggaagacaacgggatcttgcacgtctccgaaaacatcacctaccttttcaaaagcgacggacatggtgtctatcgcgtcatccccctaaaggcggatgagaagatgagctacctgaccgtggatgttgacggctcgtactttgaatataacatcattaaccgtagcggggaaaaggaagtaagggtgtacttgtataaggacaaggatttaactgattacggggtgtccgaaggctctacggtcactctaaagctggactattatatggaaaatgtggtgaaactgttcagggatacaggcctcttggagtacaagctctggggtgaggaatgggaccagggcgttgagcacctaaacgcgaaggtcaccttcccaaatgatgaggagattgagtactggattaatgacgattccggaaaaactgaatcgagcttctcaggggacacactttacgtaaaaggctccgacatccctaagggggactatgtggaggcccgcgtgctcattccattgggtgaatttgacttcgatgccgactatgctctgcattacaatcatgatgcctctgatgaggtcaaaaagcagcaggaggactttcaaaaaaagcagcaatactttaacaccatcggcaatctgttaaacgtgatttacggcattctgatcctcacgccactgggcatctacctcaaatacggccgagagcccaaggtgtcaagtgatgccatatacgagcatgagcctccaacggacgactctcccgcctttgtgaatgccatgatgagtggactgagtaaggacgttggaaaggtcgataagaaaggtttccaagccacgataatggatctcattaacagagacaagcttggaatggaaatagcatataccaacaagaaacggcctgtgtccctcctgactgtgaagtcaaccgatggcctgaaggactttgaaatggagctgatagacatccttcggcggtacgagcagaacggaaaaatcaatttcctttatatgcagcagcagctctccaatcggaacgaggcttatcacttcaacagggcattcaaccgctgggtcagtaacttcaaggtggactacctgccggacgacgttctgagcagatacttcaatacaaaaggcagcgacttgataggcaaattcaaatggatcgcattagttgccgggtttacaggaatcattgggcttctgttgaccggcagctggatacccctggtgctgggactgatcctgatttttgtaggggtgatctgcttctacctcccttcaagcattggtggccagtacactaaagagggcagggagtatcagcagaagtggaaaagatttgagaagtatcttaaggacttttccctgatcaaggagcaccccccggaatctgttgcaatatggaatgagtacctggtttatgctaccgccctgggggtagcggacaaggtctataaatccatgaagatggaagtctacgatggcttggccgacggcagcaatttcagttcaaacgatctctttgtgttctatcacattggtggtatccgaagtctggacaactccttcgtgaccgtgaacaacattatctcggctgacagctctagctccggtgggatcggaggaatcgggggcgggtctgggggagggggcggaggagccttttga

SEQ ID NO: 3411 - DNA, 1755 bp, synthetic construct
  source 1..1755: mol_type = other DNA
atgaatcttaaacaaaaagcaattatcatgctcatactcagtatcctgctaatgtctgccatttccgccagcgactataaagggagctacatggactatgtgcatatgaacgtgaacgagaacggtttggttcacgtcaacgaaagctttacgtatcagatggtgtcgcccgagtccgagatcagccttcccctctatcacggcaccaacgcgagcattgagaatatccacattcgagtcaacgacctcttggttgcctacgacctcaagaaaggggacactctggatgagctggtcatacaccctaagtccagtgattacgattacgactcggagagcacaggcacatatctgcttgatgtggaagtcgaatatgacattgaaaatgccgtaaaggtgtacaatgacgtgggggcattcacttaccagatcaataaaacggattttaatggggtttctctgggcatggcccatatccggatcaagttcccaggcactcaggagcacgaatacttcataattcctaaagagggcgaaagcagtgcccaatgggatgaggaccattttcatatgaccaatagccagcccgcgaaagccactgtgattattccactggatgagttggacgctgatgcaaaatacgctcagcacattgattctgacgggttggaggcgattaaaaacgactcattcgatctgaagtactccctcattcagatcgtcaacatcctgatcaaaatctttgtaatcatcgctttcatcctaccggttgctatatacctgaaatacggaagggagccaaaagtgaccctggacagcatctatgagcacgagcctccaacggatgatcccccattctttgtgaacgccatcatgggcgggacctttcgagacgtcgggctagtggacaccaaggccttccaggcaacaatcatggacctgatcaatcggggcaagctctccgtggaaactgaaatcaacgagaagaacaagcagaggacatatctggtggcaaagtcaacagatggcctggccgattacgagtcagacctaatctccatcctcagaaggtacgaagaggatggcagaatcgacctgaaacacatggaactcagtttatacagtaagtcagaggcacgctatttcagaggccggttcaacagctggggacacttactgtattccaattaccttacggatgacatcaaggccgaatactttgaggacaagggtagcaaactgtttaagtttttcgcctatggcggattgattctgagcgttattcttttcctgtattgcctgatgttcaatcaaatggaacccctcccctgggtaattgctctgtttatcctctcatcggtcctcatatgcatcccttcagcctttgccggtcattacaccaagaaggggaagatattcaaggaacgctggaacaacttcaagaaataccttaaggactttagtatgatggaggaataccctccggagtccgtggcagtgtggaacaagtatttagtctatgctacagctctgggggtggcggataaggtctccaacaccatgaagataaacttctacgacggactgaatgacgagacctaccgcgacaatgatgtatttgtgttctgtgatggcaacggactggacctgattggggactccttcagtgccgtgtccaccaccttggactctgatagcggaggctctgacggagtgggcggaggctctggaggtgggggtggaggtgctttctga

SEQ ID NO: 3412 - DNA, 489 bp, synthetic construct
  source 1..489: mol_type = other DNA
atgaaactcaaatattttgccgtgtgcctgttcgtcttgatcctggcggccggcatcagcgccgcctatgcaacagatgtggacttcgaaggcgggcacagcttcacaatgccagacggctacgagattgttgagggacaaaacacgaccgaggacatcatcatggagaagaacggggacaatcggattgtgttccagtactggatagatgagtacgaggacctgaagaacattgaggaaaactataattttggggacatcattaaggctgtgatggaggatgcagttataggaaacgaagaaaactacacctttgaggactatgatgtgactcagatcgactataaagtacagggcatccagtgttactcctacatccttgataatggtaaggaaggttacgtcattcaccatatcgctaaggaagacctaaaggacctcaatgaccccgataacgtcattggagatctggtgaagagtataaaatga

SEQ ID NO: 3413 - DNA, 507 bp, synthetic construct
  source 1..507: mol_type = other DNA
atggataataaaaaaatatttgttatcgtcgccttggccctactggccatcgtggcagtggggtctgtgtccgctctggatcttggtttcctcggcggcaatgacgatcaagacaccgctgcggaagatagcgatgccaagacaactaccattaagggcatcgagtttaacatcccagacggatatgtgaaagcggaaaattacaccctggatggggagacacggtcaagcggaagtatagactataaggtctaccaggaagggtacgaaaaaggcgccaccgatgcaatccttttcctgattggagattatccgacggacttaacggacgacatgctggagcagatgaacctcggagagcccaagaccatcaacgggcacgacggttacatcaccacttccaacgaaggcggcgacacattcactgtgtttttctacgctgaggatggggacctggtcacggtgacagtaacagacgacaccctgctcgaggagattattaagtga

SEQ ID NO: 3414 - DNA, 465 bp, synthetic construct
  source 1..465: mol_type = other DNA
atgaacaataagaagatatttgccatcgcagccctggccatcatagcgatcgtggcagtcggaagcgtcagtgcttttgacttgaacttcttcggcggagacgacaagcaaaccactactctcggaggcatcgaatttaacatccccgagggctacgagatcgtggacaactacacgattgtaaatgagacactacacgacggggatgatgagtacattgtgaacagccagtactatgaaaacgacgatggggactccctggagctctatacatcagactatcaggatgatatggaagactacattctgaagatcctgaccaagggggacgagaaaaccattaacggccggaaagggtacattaattctgaagacggcttcacaatgttctcgttcgtggatgatggtaatctgggttttgttaccgtgtccgatgaaagcatccttgaggaggtcgtgaaatga

SEQ ID NO: 3415 - DNA, 468 bp, synthetic construct
  source 1..468: mol_type = other DNA
atgaatgccaaaaagctgactattctggccgccttggctattctcgctatcgtggcagtgggctcagtcagtgcgtttgacttaaatttcctgggcggagacgacagcagcaccacaactgtgggcggtattgaatttaacatccccgagggatatgagataaatgatacatacactattgagaatcaaacgcggaccagcagcggaggcaacgaatacatcgtgaaccaggaaggctacgggaactccgacggtgaggagctcctattcctggttggacactatgacacggatatcaccaacgagatgctttccgcaatgaaagttggggatgaaaagaccatcaacggccaggaggggttcataacatccgacgacgtctacaccgtattcagctttgccaaggatggggagctcgtgacagtcaccgtgtcagatgagagtgccctggaatcgatcatcaagtga

SEQ ID NO: 3416 - DNA, 1257 bp, synthetic construct
  source 1..1257: mol_type = other DNA
atgaatatcaccgaaaaccagagcgataatgatgagaaaatactcacaaagagcttttgtctcatttttggagcgctgctctttacagccttggttatgtacgccctgatgtccaccgttacagagtatgccagcagtatgggttccaccgcaaccattgccgggctggtgagcgggatctatgtattcggggggctttgctcacgaatatatagcgcaaacgccctggaaaagaaggactggaagaccctcgccttgatcttccttagcattcactttctggcatgcatattgtacttctttgtcgacaatgtcgaactgctgattctggtcagattcatccatggccttggctttggagcgtccgcaaacgccatcgtgactattgccagttcgattcttcctaaaaaacgctttggagaggctttcggatactttatgctggggaccactatcgccgtaggcctgggtccatacatcagcggattcttctacgatatctggggcagcttcggcagctttctcctagcgacggtgttcagcttcatcgccctggtctgcgtgtttttcctggatatcgaaaggtatcacccggatgagaagataaacaacgaggacattctgtctgacgctgagtcagtgggcacagagtcgatcgatgccaacccaatcaaaaaacaaaaggagaaacggagcttcattgagaagatatttgaaatcgacgctatccccgtctccctatttaccgcattgactgcgcttggatacgtgtccatactctcattctacaggctgtacgcagtggaactggacctggtgggccccttctccattttctttttaatctattcagtcatcctagtggcctcacgtcccattgccggtaagattcaggacaagaatggggataagatcatctgtgtgataggcatcgtggcacagagcatcggcctcttcctcatcgcttacgctccatccgacataaccatttatatctgtgccgtatgtgcggctctggggtttggaaccctgaacagtgcctgcacaaccatcgttactcggaattgcagtatcgaccgccggccgtacgctatttccacgttcttcatcttctgtgacagcacgattggcttcggtcctgctctcctgggctgctttgtgagtgccacaagtgggtatgctcctatttactacatctcggccttcattactttgatggcactccccatctgcctgtattccttaagaaacaaatga

SEQ ID NO: 3417 - DNA, 1470 bp, synthetic construct
  source 1..1470: mol_type = other DNA
atgggcgagaaagcccaatgggatagttccctgagcttcatctttgctatgattggagccgctgtggggctggggaacatctggcgtttcagctacgtactctactctaacggcgggggatctttcttcattccttactttgtggccatcgccatcatgggaatcccttttctgatccttgagtatggtgtgggcttcagctttaaggactcgttcacgaatatcctgaagaaaatagatggcaggctcgaaatagtggcctggattctgattctcttcgtgtttattgttgtgatttactacatggtcatcctgagttgggatatggtctatctgctgaccagcttcacctttggctggggggtggacactgcagcttactttacaaatacagttggtggcagtgcagatttggcgaaggggggcatctttctgattcccaccaccatatgcgtcgtcctgatgtggattgtgctgtggttcatctcccacagggacgtggacaagggaataggcaaggtgtcaaaagtcttgatcccatccctttttgtcatcatgggcatcatcgtgttctactcaatcaccttgccagggcatatgattggaattgatgcattgcttagacccaactggcgaatgcttcttgatgtcaatatctggctggcagcgttcgcccagatcatcttctccctgagcatggggcaggcgatcgccctgacatatgcgagctatctgccagagtcctcacgcctcactgacaacgtgctgattgttgtcgcctcaaacagcctgtttgagattttcacagcattcggggtcttttccattctgggctacatgtcgctgaatagtggaatggccctaaacaaactcgttaccgaaggaaccgggcttgtatttattgttttccccatgatcttcaatgtcatgggtacggtaggaagagtcttggcacctctcctgtttctggctattctatttgctgggatcacctccgctctgggcttcttcgagcccatgctcagctcggccagttccaagttcaacctcagccggaagcggaccgccactatcctgtcaattataggttgtgcattcagcatactcttaacaacgggcatcagcagttacctggtgggagttatcgactcctttgtgaaccagttcggaatcctcctgcttatcggtgtgcagtgcattatctttgcttgggtgtatggcatcgaccacttcattcccgtgctgaatgaaaacggcatcttaaaggtagggaaaatttggaagtttataatcaaatacctcctcccggttgtgctattcgtgatctgggcctatggcatattcactctcttcaccactgccaagacattcgagataatggtggacatcattataatcgtggccgtgttaattctaagctttatcttgtctcacttgaacccgcgcggtagcaacgaagacaatgcttga

SEQ ID NO: 3418 - DNA, 213 bp, synthetic construct
  source 1..213: mol_type = other DNA
atgacttataactgctgcctgaaaaccagcagggaatacacggaagagggactactgaatctcattgcagagacattcgatacagacgtcagtgggctgaaggtggaaaacatcgactcctacgaggacgatcggggtgagaacttcataatcacctgtagcaaggaagagggcaatatgaagaccatcaaagtgtttcacgcctacggctga

SEQ ID NO: 3419 - DNA, 210 bp, synthetic construct
  source 1..210: mol_type = other DNA
atgaaggacatggaatatcccaacgaggaagccaaagaaaagttcgaggagataatgctgcggcgcctcaggctactgtacggcatagacgtgtcagagatggaaatcatcaatatcagcctgggggagagcagtgtggagccaaccattcgaatcgtactcattgactccacagaggaagattgcattagagtctttgagatcgcatga

SEQ ID NO: 3420 - DNA, 1473 bp, synthetic construct
  source 1..1473: mol_type = other DNA
atgaaacaacattctgttgggagagtggagacgaagacatttgccatcaatgacaaactgaaattgagttcagggaagaccctagaaaatgtggaactggcttatgagacctacggggagctgaacacggcaaagaccaacgccatccttgtatgtcacgcactcactggggacgcccatgctgcaggctggcacaagaacgcgacaaagcccggctggtgggagatagtgataggccctggaaaggcattggatactgacaagtatttcgtcatctgctccaatgtgttaggtggatgtaagggttctaccgggccagcatcaatcaacccaaaaaccaacgaggaatatgcgctcgactttccaatcattaccatagaggatatggtgcatgctcagaagaaactgatcgagcatttgggaatcgaaaagctccacgctgtcgtgggaggtagcatggggggaatgcaagccttgcaatggaccgtctcctatcccaatatgatgaaaaaggccagcatcatcgccacaaccgcccgctcgtcccctcagcagattgccttcaacgaggttggcaggcagtccatcatcagcgatccgttctggaacaacggccagtactatggcaaaaacagaacaccccgttctggtctggctgttgcccggatgatcggccacatcacatacctgagtgatgaatcgatgtacatcaagtttggcagggaattgcaggataaagatcagctcagctatgacttcaccctggatttccaggtggaaagctacctgcaccaccaaggggaaagttttgtaaaacggtttgacgctaacagctacttatacataacaaaagcggtggattactttgatctgtcggtggatggcagtctgcccgacggactcaaaaatgtcaaggccaagttccagattatagctgtcgactcagactggctctacccggtagaccagtccaaggacctcctgacagcccttcagaccctgggggttgaagtgagctataacgaggtgaaaagcgattacggccatgacgcattcctactggagaacggtcagatgaacttccttctgaacaatttcctctctgagaatgtggttgacgaccttatgaaaactgatgtgccaaccattgacatcaattccacaatcaaggatgccgcgaacatcatgttcgacaatcaggtcactcacctccctgtggtggatgagaacgataagctgctgggcatagtcacggcctgggacctgtccaagtccattgccaaggactgcaagctgctggaggatgtgatgacgaaggatgtccgctattgtaaaagcactgacagcattgagtacatttcacgacagatgaagaagtttgacatttcctgcctgcccgtggtcaatgacgacctatgccttgagggaattattaccactgaccagattagtcacctcatctcaagttactga

SEQ ID NO: 3421 - DNA, 768 bp, synthetic construct
  source 1..768: mol_type = other DNA
atgaaagaaaataaggaaatgaactggaagatcaagttcgccattatcatgtttgtgctggccgtgctcattttcctggcacgataccttatctgcggcgacggggaggagatcatcgcgtacctgtggaagcacatcggattcataccaatagatatcctcattgtggcactcgtgctggaagagatcatgggcaggaaagagcatgaagccattttagagaagatcgacatgctcatggggacattcttctcggagattggaaatgatctgattgccgagcttagcaaggccaacgtcaacaaggctaacacggatgacttgaaggctattaaaagttggaacgacaaggactatgataataagctaaaagagctgaaaaacaaccccgtcgactttaaggccaatatcgctccagaggaaagggaagatttcctgaaccgcatccagagcctgttggttgagaacagagaatttctggtaaatctaatcaataaccctaacctcctggagaaagatgagtttagctcacttctgctggccctcttgcacttggatgaggagctggcaagacggggcgaattaactgacataaaggacgctgatttcaatcacctcaacggtgacatgaaacgcgtttattccaaactggtgtacgaatgggtctattacctcaaatacctgaataagcactacccctatatgatcagccttgcgatacggaccaacccgtttgactccgaagcagacgtgcatgtgaccgagtga

SEQ ID NO: 3422 - DNA, 201 bp, synthetic construct
  source 1..201: mol_type = other DNA
atgacacacctcaccatcacggaataccgggaaatggtcaaggatatcatcgagttcaaaaacgagaatgggaagatgccagacttcgcaagcgtgaacaatcaggagatcagccatgagaactactccgccatgataaacgacgtaaataactatattctgcagcacggcaggagtcccgaatttgtgcaaattaaatga

SEQ ID NO: 3423 - DNA, 1494 bp, synthetic construct
  source 1..1494: mol_type = other DNA
ctaagttttagcgacaaaatctataacgctaaaccaggctatacgtatgatgattttctgttggtgcccaatgcttcttggattgaggcgaaggatgtggacactaaaataaaccttacaaaggatatcaaactgaacattcctataatgagcgccgcaatggataccgtaactgaagctgatctggcgatcgctctggcgcaagaggggggcatcggtgtgattcaccggaacatcaatcaggaggctcaggtcgctgaagtccggaaggtaaaaagcgccgaagacatcactgtgcgagatgttgtgaccatcagccctgactcctcgatcgaaacagtccaggacattatggagaacgaatcagtcagcgggctgcctgttatggaaggggacaggattgtcggaatcatctccaagagggatgtcaggccattcctcaaaaacgattcgaaaagattggtgaaggaaatcatgacatccgatgtggtcacaatcaaggaaaacatcagccaggaggaggcgttagatatcgcctacgaaaataaggtggaacgcctgcctgtcgtgaatgaggatggcgctctggtggggattctaaccatcaaagacatactgaaccaggatcagcatccgaacgctgcagtggacaagaacggaaaataccttgtggcagccgcctgcggcccatttgacctggaccgagcgatggccttggacgaggcaggagcagacatcatttcaatcgactgtgcccacgcccacaacatgaatgtggtcaagtttgctgagaccataaaggacaatatcgatgccgacctctgtatggggaacattgccacaaaagaggccgctgaggacctcattgcccacggggcagacggccttaaggtaggtatcggtcccggttcaatctgcaccacccgtattgttgccggcatcggcgtgccgcagctcacggcaatagcagacgtggccgatgtggccggcgaagccggcataccagtcattgccgacggcggtctccgctacagtggggacattgccaaggctatcggagcaggggccgatgtggtgatgctcgggaacctgctggcaggtacgcttgaggctcccggcgatgtggtaaccatgaatggccggaagttcaagcagtaccggggaatggggtccatgggcgcgatgactggaggatctggaggcggcgccgacagatacttccaagagctggagaaaggaagtcacatgaagcattccaagctcgtccctgagggggttgagggggtggttccatacaagggaactgtagccgaggttgtcttccagctggtgggaggcttaaagtcttccatgggctactgcggagccaaggacatacaaaccatgaaagaagtggctagattcgtgcgcattaccacaagcggtattaaggagtctcacccccatgacttcctgatcacgaatgagagtcccaattatcccaccttggactga

SEQ ID NO: 3424 - DNA, 720 bp, synthetic construct
  source 1..720: mol_type = other DNA
ttgctgctgctgattagtccgataaaccatgaagaggctgtggaaagcattgagggtggcgccgacatcgtggacgtgaaaaatcctaaagaaggttccctgggagcgaatttcccctgggtaatcaaggatatccgggagctcaccccaaaggacatgctggtcagcgccacgctgggcgacgtgccctacaagccaggaaccgtttcccttgcggcaatgggggctctcgtctctggggccgattatataaaagtcggtctctacgggccaagcaactacgaagaaggcgtagaagtcatgaaaggggtcgtgaaggcggtcaaggacaccaaccctgatgctacagtggtcgcctccggctatgcagacgcccaccgggtgggagctgtgagtccttgggacatccccaaggtggcaaaggactcaggcgcagacattgccatgctggatacagccgtcaaggacggccacactctctttgattatctagacatcgacgattgtcgcaaattcaccgaggaggctcatagctacggattgaaagtggccctcgcaggatcggttaaaaaggaccagttaaagcccctgtacgatgtgggctgcgatgtggttggggttagaggggccgcctgcgtgggcggagacaggaacacaggccacatcgatcgaactgctgtggccgagctgaaggagcttgtacagtcattcgaggagtga

SEQ ID NO: 3425 - DNA, 7251 bp, synthetic construct
  source 1..7251: mol_type = other DNA
gtgaaactcaaactgatatacctgatttgtatgatctgctgcgttttacttacctttagtactgtgagtgccattgacatggatggaaacctaacggcttccgtgaatcacctggatggctcccatagtgatcagtctgcatttatttcccagtctgaatcgtcgaaaaccaatctgaacgctaataataatctgagagtttctagtggagattatgattgtgtagagaccatgaacgagctgtctaatttagactctaaggattctaaagacaacaacctgtccaaggacaaaacatccctgaaatctgacctaaacagcatcgattcagatgagtactcccttaaatccagtctgagttccattaattcgagtaagaaaagttcttacgaagatggcgataatgaatatgagaacttggaggattctcttgactcaaagaacaaaaactctttaagttccaatgcgctcggagccggcacaagtacctttggcgacctgcaaaccatgatcaacaatgcccaggagggttcaaccatcaaccttgatggaaagaccttcatcggaaacggcagttttattaccatcaagaaggccatcaccatcaacgggggctcggctacaaacctggcacgattcgacgcacgaaacctctcctatatctttaagattagcgcctccaacgtccacattaagaactgttatttctcctacagtaccaactgttccgtctatttctttggaaacggcagctcaatcgacaactgccatttcgactacaattacaagcacctgtgggttgcggtcaacatcaagtacttctcactgaccaactgcaatttcactaatggaaagacagatatgggaagtaccgcctacgtggtggccgacaatgccactgtgaaaaactgcaatttcatcaacaacgaagcaagcggaaccgagcagtgctacggggcggccctccagatcggggcctcatcctcaggcatcaacgaaggatatgtggtgaactgcaccttcattaacaatagggtgatcaccacccacagctactcccatgccggagcgctctgcttccggccgggaatcaaggtctataattccactttcatcaacaactactgcaataggatgggaggtgccacaaccctccacagcgacggggagatcatgaactgcaccttcatcaacaacagcgccggggaatatggcggagcaatctccacagggctgatggctgataatatcagcgtaaacattaccgggtgcactttcattaataactacgccccgatgggcggcgcgatcctgataaaaggaaataacgtgaaggtaaccaattctacctttaaagaaaacaaggcaagagaaaatgacggtggcgccgtgtacattctcggtaacgacgcgttgattctcaatagtaccttccagagcaactatgcaaagaacgtgggcgccgggattctaatcaacggttcatatgtgacggtcctgaacagtagcttcgctcgcaacaatgcaagctacggggctggcatctacgttataggttccaatgctaaccttttcagctcaaacttcacgaaccacaatgtcaagaacggctctgtctatataaaggggatcggcgcctatgtttataactgtaattttgcaagcaacactggagagaacggagcggccctgtacatcgaaggctcaaacacaacactgattttaagcaatttcaccaacaacaatgtgacaaaggacggcggggccatctatgtggtgggctcaaacgccaagctcatggcttcaaatttcctatacaacaatgcgatcccaagcgaatcagacatcaaaagcggcctgggaggcgctgtgtacattaagggaaacagcaataccatcgattcctccagcttcaagtacaacacagcccggaacggctcggccatttataccgacggaaagaacatgaacctgtccaatgacaactttgaccgcaaccaggcatggagttacgtgttggattcggtgattaaacccagcagcagttacttcaacagaagcgacattctgattaaccttactctcattgggggcaataatattgcgaatgctatttataacacggccagtgtgaatgatatctacttttataatgtaagctacatatccagcaaggggaaaaaagtcacgacttcaaatgagatccacccggtgaatggtgcctcaaacagccagaacggggcactgctataccaggacgaccgggaggacaatcaattggtaaacgttatcgtgtacaaggaccctaatagcaaatccacgtccctttctgccatcaacaaaaacgacatcatcctaaacaagacattcacaacaggaattttaggcaacgtgtccctgaacctcagctcatctgtgggcaaggccatagctccaggaaactaccttctatatgcaaagcacactgaagatgactattacaaggaaatcgatgaggacaatcagtttgagatcctccctctggtggatgtggctgtggacatcgtctccagcaaggatatcgtggagtataaccgcacaaacaagttcacagtcaaggtgataaacaatggtccaaacaatgccacagacgttcaggtgagtgctgtgctgcctaaaggcctgatcctcgtgtcttcaagtccctctgtgggcacctacaacagcagcactggcatctggaccatcggcaacctgaacagcggagttaaccagaccttagccataaacacccgtgctaacacgacaggggcagtgaattacccggttagcgtatcctcctacgagaaggacaccaacgaagcgaacaataaggataaccagtcaatcaagatacccgaatgtgacttgctcattgacattgcctccagcaatcacagccctaaatatagcgatattgtcaactggacggtcaccgttaaaaacaacggtccggacgacgcaagcaaagttgtagtttccttaggcaacctctcgggaaacgagctgatataccaaaagtccaccaatgccaatttcaatataagcactcagacattggagctttccaagttggctagtggctcaaacgtaagctttgtgataacgaccaaggtgaacgcctccaacaagaagatcactgtgaactcctcagttagcagtgacacctttgagtataacctaaacaacaaccaggacaacgattatgtcaatgtggccccactctgtgacgtgggcatcaccgtaaaggtctctaacaggactgcaaacagaaatgacctcgtcaaatggacaataactgtgaaaaactacggtcccgataaggcaagcaacgtgaatgttgcactcagtgacctcgccagcctggggctcggcctggttaacaagtcagacgccaattacgcgtcaaacgaatggaatgtaggggaccttaacaaggacgcctctaaggagctggtgatcagcactaaggtgaacactgagaacaagaacattgtccttaagggaacggtgaatacaagcacgtatgagaccaacaaggctaataatctcgcaaacgacacactgtccgtcaatccctattgtgacgtcctgattgaggtgaccgcatcagataacagtgctaacaagaatgatgtcattacgtggactgtcaatgttaaaaacaacggcccaaaccaggctaaggatgtgaaggtctcactgaccaatatggaaaaattaggcctgatagtccaaaaccgaagcttcacctttaaggatatcgccgtactggagaatagtaccttcaacttcaacaagtcaagcaatatctggtccatcggcagcatggcctccggcgacatctccagcatgactgtgaagaccaaggtcaactgctcagacaaggtcttgtcagttgagggaaatgtgtcaacaagcacttacgagctgaacaaggccaataaccatgatgacgacctcctgactgtcgaggagctgtgtgatctggctgtggaggtgaacgcttcaaagaagacggccaacaagggcgacattgtaaactggaccataaaaataaaaaacaatggtccggacaccgcttcggacgtcttcctgaccgtttctgacctggaatcgcttggaatggtctttgtaaacagtagcagcaaagacttcgacagcgaatcattcgcctgggagatcggggagctcgccagcggaaagggcctgactctcatcctggccacgcaggtggacacctctgatgagaccatcatggtggaggcggacgtggacacaagcacatacgaactcaacaaggcaaacaatgcggacaatgatagtcttaatgtcaatccatgctgtgacattgtcattgacatctcagtcagcgactcccctgtaaacaaggaagatattgtcaactggaccatcgtggtaactaatgacggtcctgacgatgctaaggctgtggtggtcaatctaacggacttggagccgctggccctaatcatcatgaatgtttccgagagttcttacgataatggccaatggacaataggcgatttgcccgatggagaaagtcagagcctgatcattacaacaaaggcaaactgttccaatgacactatcaaacttgatggaattgtcgataccagcacctttgagctagacaagagcaataaccataatgatgatattctggagattgatcccctgtgtgacctctccattgaaatcagtgtgtctgacagccctgtaaacaatggggacattgtgaactggactatcgttgtggccaacgacggccccgatggtgccagcgacgtgatcgtcagtctgagcgacctcgagtcactgaacttggaaattctgaacgtgtccgaggataatttcaatcccgagacgtacgagtggatcataggggatctggataataacgaaaatgcgagcctgatcatttccgccaaagtgaatacttcagacgacatactggatgtggagagcaccgttgacagcaagacctttgaattgaataaggataataactatgacaatgagagcctcattgtgaatcccctgtgcgatctgatcatagatatctctgtgtccgattctccagttaataccgaggatcttgtcgattggaccatcaccgtgactaatgacggtccagatatggctgaaaacgtgaaagtctacctgaatgaccttgacgccttaaacctgatcctggttaatgcttccgaggacagctttgatggggacgcctatcagtggatcattggcaatctggacaacggcgatgctgtggaactcctcattacaacacgcgtgaacgcttccaataagacaatcgaagtggaatccgcggttttgagcgacacctttgagttgaataaggagaataactacgacaacgataccgtcacagtgaatcctttatgcgatctgattgtcgttgttgatgtgagcaactcaaccataaacaaggatgaggtggtcaactggacaatcactgtcacgaatgacggccccgacacggcagagaacgtaatcctggacctgagcgacctcgaggatctgggcttgatagtcctgaacgtgtcggatgattcctataatcccgaatccggtaaatggatcataggggatttggctccaggcgagaccgtggacctgatagtcacaacgcaagcaaatgtgtccaacgcatctctccccgtagaggccatcgtgcaaggcgatacttacgagctgaataaggacaacaaccatgacgacaagctcctcgacgtcaatcctctgtgcgacctcgtgattgagatcactgtgtccaacagctctgtaaacaagggaggcactgtggagtggaccattgtggtgtataatgacgggccagacgatgcatccgacgtgatcgtcactctcgacgacctgaagacccttggactcatcctgtccaatgtgacttatggcacaacaagcatggacatcagctatgacggttcgcggttgtttgttaaggacatctcctcagaggactcggaaaattctgactccattgatgagagtgacagttcatcccctaatatgctgaaagcaagctctaaactagatggtgttgggtctgatcttgataacggggaacttaaatcactcaaatctggctcttacctgagtgatgattcctccaatgactcagacaaagcctcaaacactttcgacgaagagacgaacttatggtacatcggggatctggccaaaggaaacagtatctctttgaaactgttgacagaggtgaacaggagtaatgacaacattacgctgccaagcaatgtggatacaagcacgtacgaggtcgtgaaatccaataactttgacagcgctattgttgaagtgctgcccctcgctgacaacggagacaacgaatctgtgaacagtagcgactctaatggtgacaatcccctggacggtgatggaaacagtacatctgacggttcgaaccctgacggggataactctagcgacggggatggaaacagtacctcggatggttctgatcctaatgggggcaatggggatgaacccctggacggggatggaaacaacagttccaatggctccgggaatcccgacggttcggattccaatggggataaccctctcgatggcgacgggaacagtacatcggacggttccgataattccgatggtgataacaagtctggggacaattccggcaatcctgatgggtcggacagcaatggggataatcctctggacggtgatggaaacagtacatctgacggttcggggaaccccgacgggtccggttcttcggatggggataacagcggcaattctgacgctggggaaaagtcggatgacgggtccagtgatacggatggctctggaaacaccgacggcaatggctcgttggatgaagatggcgacaacgacagcggcagcgggtctggcaattacggcagtgacctttacgacatgtacccctgggacgactacatggataataaaaccaacgacggaagtaacaaaaacaaccagggggacaacaattcccatgccggcaaaaaggtcaaaaatccaactaaaaagaaccttagcaatcacgtccaggccaaacagcagaaaggagtgccaatgaaaaacactggacacccattggccctgttggtgctgaccatttttgccctgtttacacttagctaccggaaattcaaattttga

SEQ ID NO: 3426 - DNA, 1230 bp, synthetic construct
  source 1..1230: mol_type = other DNA
atgaaagaggaagagatcgaaagcatgagaaaaatattctcccagctgaaagacaaaatcgaacctctctcccagtcccctgccatacaggctcttcagaagagggtcatggaaattagaaaggaagccattaaaaacaacagtcagctcctggaaacagttcaaaacagcttcaaggaaaacgacatcgactgcttcctcgccagcaatgatatcgaggcccagaaaatcattctggacctaatcaatgaagagatagagtctaaccccaacatagacagcaacgatgtgtacatctgcaagtccaaatccaacaccctgagggagattggattcctggagctcatggaggagaacaactacaatgtgatcgagaccgatttgggggaccgcatacttcagctgaaaaaggaagacaacgatcccgtccatcccacaggccccgcttcacacctgaccgtgtcagacattgcggacatcgtcaaccagagtatggacctgaatctaaaccccgtgccaaaggagattatggaagccgttaggtctgacgtgctgaatctcatgcacaagtcgtatatcggcatcagcggctcaaacagcatcgcggcagaggacggtgcaattctgatggtgcacaatgaggggaacatcagctttgtccaaagtaagaagctccacatcattgtggctgggattgataagctggtcccacatctggaggatagcgtatcaattgccaagctggagactgcatacgccacagggaagcctctgacctcctatatgaatatcgtgtcaggcccatcgaagacggccgacatcgaaaagaagctgctgaagaatatgtacggtgctgaacgggttgctgtgatccttcttgacaatggacgcagtaaggcaatcgatgagtgcttgtggtgtattggctgcggcaattgcattgtaagctgtccggtgtacaacataatcgggaacaaatttggctattccagttatttgggaggacgggggattgccttaagccgatacctgaaggataatgaggtaagcgtcgattccggattgtacatgtgcaccctatgtggaatgtgcactgagaactgtccggtgctcactccaacgtacgagatcattgagaacttacgttgtgatagccaaaaagaaggcctctttcgcaaccagcacaaatctatccgggacaatatcaaaaataagggttcgccttattga

SEQ ID NO: 3427 - DNA, 759 bp, synthetic construct
  source 1..759: mol_type = other DNA
atgctcctgtactttaggggatgcaccgcgcgagagaagctggattcaataagtgaggccacccagagccttctcaagctcttcaacattgagtatgaaatcttagacaacgaacagtgctgtgggtctgtcctcctgaggacaggcttcaaggaggacggaatcgagcagatgaacaaaacctacagcgacattaaagggaagaccattctcacctcctgtgccggctgctacaagacgctcaaggaagactacaagacatacctggatgctgatctagaggtaattcacatctcccagctccttaacgaattgatcaacgagaacagcatcaataagctggataaagacctgctgatcacttatcacgatccgtgccaccttgggagacatgcgggggagtatgaggctccccggtcggtcattaagactttctccaacctgacagagatgaagaatatcaaagagaagtcacgctgctgtggctcgggaggtggcgtgaagagcgcttacggcgacctgagcaattccatagccaagttacggatcgccgaggcaaatgaaacgggtgccgacctgttggtgtcagcatgtccattctgcaaattgaatctaagtcaaaacagcgatgacttggaagtgctggacctgtctgaatttgttcttaaaatgctgaaagagagtgacctggacctgtccaacctaaaaatgctggaagaagataatctcgagctgagcaaaaacaagaagatggagtga

SEQ ID NO: 3428 - DNA, 318 bp, synthetic construct
  source 1..318: mol_type = other DNA
atgatcattgccataatcttcatgtacaatagggtccgcaacaagcggtccacaccggccacctttgcactttgggtggttgtgtggatggtggtcctattctttgctttcgccccaaagataagcgatcccctggccggattcttcggtttcagcagaggcctggacctgttgatcatcgccgggtttgcggtaatcgcatacgctggctttcggttctatattaaaatcgacaatctcaaccagaatatgacggatctggtgagggagattgcgattcgaaacgaaatccagctcgacgaagagaacgacgagtga

SEQ ID NO: 3429 - DNA, 708 bp, synthetic construct
  source 1..708: mol_type = other DNA
atgtcaaacgaaattagccagaacacggaaggaatcttcttagtggtgcccgcttataatgaggagcgaaccgtctcccagatcatcgaatgcattgccgagaggggatacaatgtggtgctagtcaacgacggcagcgccgacagtaccctcgaactggcaacagagtccaaaagaaagtacccggataagatctttgttgtctcccatgtaatcaaccgcggcctgggggccgccctgaagactgggatgatggtggcacttaataaaggagccaaatacatcataaccttcgacgcagacggccagcacgaaatcagcgatattccaaatgtctgtaagcccctgcaggatggcgaggccgacgctgtaatcgggagccggcctttcgaggacatgcccctgagcaaaagctttgcgaacctcgttatgaacgcccttaccttcatattctatggacggaacgtgaaggattcccagtcagggctcagggccttcacagcggaagcggctgagaagatcgatgtggtgagcacgggctatggtgtcagttcggagtttattaaggagatcagtgacaagaatctccgcctggctgaagttaccatcaccacaatttacactccagagactcaacacaaagggacagatgcaattgtgggcttgaagatactgggtaaaatggtgattgacttgtttagaatctga

SEQ ID NO: 3430 - DNA, 459 bp, synthetic construct
  source 1..459: mol_type = other DNA
atgcggatcggcattgcggacactacgtttgcccgctacgatatgggagcggccgccatcgacgagctaaaaaaaaatgctagcgacctgaagatcatccgccggaccgttcccggggtgaaggacctgccagtggctagcaaaaagctgattgaggaggagggctgcgagatagtcatggcccttggaatgccagggcccatggaaaaagacaagatgtgtgcccacgaggcttccacaggactcatcagagcccagctcatgacaaacacccacatactggaagtcttcgtacatgaggacgaggaggaagatccgaaggaactcaagaaattggcagataacagggcccgagaacatgcacagaacctgattaagatgatgttccaccctagactgatggagaaggaagcaggcaagggcatgagggaagggaaagaggatgtgggtcccttatga

SEQ ID NO: 3431 - DNA, 1191 bp, synthetic construct
  source 1..1191: mol_type = other DNA
atgccaaaagaggagatcgataaaatcaaacggaatctgagcgggaatcccgatctggatcgcgattacctggtgtcccagctggaatattacaaaggccacgaatactcctatgagataatcaaagagatctcccacttgattctccagtccttggacttctacctgattgaagacatcggctctaaaaagacgatggccagccgcattcttgatgaagtgatgcagtacattgaaactcgtgacaagaggactgccaaggagaaacttgataaatacatggagtcgtttgtagacaaatacgagaacaaagaggaccataaggagagtgacttcaacagcaaccggtccatccgcgaaatccagtacataagatacagggagaacaaactggcagacagtcccaaaagcttcagggtcagtcctaaaaaggacaggcaggtgaattggcggaaggatgtcaagataaagaaaatggagagcaactcaattgaagagatccatgaaaaggaataccatagcttcctgaatccgctggaggagatactgttctatcactacattgggctaaagaaggaactggcatatatcccattcaacgagcctctatttgacctttactatctttacggaaccttgctgtttgaatctgacgagtatggaaagtcagaggaatatctcttgaaggccctgcgaatcaaccccgtatccagcaagaccatcctcgccctcgctgacatctataagtcaaagacccgaacatacaaccgatttttcctctataacgtggatgccctgaagtttgcgtacagaaacgaggatatcgcaagagcctatcggaactttggcttcttttacgtggaggagaatcagctcgatgttgcagctgctttctatgacttcagcttaaactacgactacaataagcacgtcgtgaaagagctggaatatctcaagagccgcggcgtggacacccagatcgaaacagaggaggcggttggtatcattgaatcaaagaacattcaagtgggagtcaatgactttgtgctggatgccttgaagtttatctgcttcgatctggacagtcggaagcacacgagccaggccttatacttctatcgcattctctacgacctaacaaaggacaaccaagtcctcgggagaataaatgctctgtcgaataagatttga

SEQ ID NO: 3432 - DNA, 762 bp, synthetic construct
  source 1..762: mol_type = other DNA
gtggaaaagggagagatggtctctcttctaggacgcaacggcgcagggaaaagtacgctgtttttgcatttcaacggcattcaccagccaaagagtggtgaaatctacatcgatggtgaaaaattatcctatggcaaggaagagcttatgctcgctcggcagaaggttgggatcgtattccagaaccccgacaatcaactgttcgcccctaccgtggaggaggatgtggccttcggccctatgaatctcggcttgccgattgaagaggtggaaaagcgagtgaaggactccctggaaaaggttggaatgggcggatttgagaagaaaagcccccaccatctcagcggaggacagaagaaaagaatcgccattgcagggattctggcgatggaacctgagatcatgattctggacgagcccactagcggtcttgacccaaagggcgcgtcccacatcctcaaactgctatactcactgaatgaggaggggatgaccattgtcatttccacccacgacgtcggtctggtaccggtgtactcgagcaagatatttctcatcagcgacggggagatcataaagtcaggcactcccaaagaggtgtttagcgacgtggaaacaatccggaaagctgatttacgcctgccaagggtcacccacctggccgagatactggaaaagaacaacgatatcgatttcggcggggagtatcccctgacaatcggcgaggccaggcagaaaatcctcgacctgttggggaaatga

SEQ ID NO: 3433 - DNA, 1104 bp, synthetic construct
  source 1..1104: mol_type = other DNA
atgacaaatgatgataagacccaagaatttaaactcatctccaaaacgatcgatggcgatgagatatttctcaatcatgactcaattgttgtgaaattcgccggcaaaagaaatgccatcgtgacttcttggctgaatggaggatacagcgaggatctctctgctgtgttcaaccaccagctgtcgcaggagaacattgacgaatatggtgacggtggcatcctcggctttctggagatgctatcctacgatttctacaacaaacttgacctgaagggcaacaagttaagcgggttggtcacctcggctcagattgacgagtatagtattgccgtggagcggtataaggacattgaggtgctcgccatcacaactgccggagtgcgcgttaacgcggtctccgcaggggacgtcgcctcctactacgagctgaacggggaatacgatttcgatttggaaaacgaggacccaaaccccaataagcccggaacaatcaataacatcatcctaatcaattgtaggcttgatgaaagctccctgctgctggcggaaatgatagctgtagaggctaaggcagtggccctccgggacctgatgactagtagtaattattctagcgagatagccaccgggaccggcaccgacggcatagcaatttgcagtaatctccagagcgacaacttcattgagaatgtgagcaagcacgcgaagatcggtgaactgattgcaaatgccgtgatccgctcaatcaaggaggctctggctaacctgcaatggctcacgccatcctatcagctgaacgcactagtaaggctcgacagatttaagatgaacctggacgagttctacgacaaaagcctgaacctggatgagatggagaaaaaggaatttataatgtcccttatcaaggtctcaaaaaaccctgagcttgtgggatacgtgtcactgatcattcacatcatcgaccagtatcgtatcgggttattggataaaaagccggccctgaaggttctcaactctattttgaacagcaatttcaaccgaaaggagtggaacagtatgaaactgcttttggaatacgtcattgaaaagcagatcgaatga

SEQ ID NO: 3434 - DNA, 702 bp, synthetic construct
  source 1..702: mol_type = other DNA
atgatagaggagctggtaaccaacatgtccataacggaaagcggcgcgagtgccagcagcccaatatttaccatcacaatcctagtctttacaatcctgctccttatcggcattatatattttgtctttaagatgtatgaacaatccaagcctaccgtggagtcaatcgtgctcatcgccgtgttaacagctatcgcaaccgtgggaagacttattctaatgtcgattccggccgtcaacctggccagctttgttatcattatggtgggggttgtgtttggcaaagaggagggattcctggtgggtgccctcacggcattcgtgtccggcattttcatgggaatgggctactgggtcattttccagatgctggcctgggggctgatgggcgccagtgcagggtacctcgcttcaaggtttgacagcttgccattccgcttcatcttcgggctcctctgggggttcctgtacggctggatcactgatatttccgcgatcttctattccggaaccgctctgcagatcactcccatcattgcattgtacatcaacggtttcacctacgacctgacgcacggagttaccaatgccgtgcttctggtcgtattgtatgactggtttaaaaagatgttcacacgggctaagattaaatacctgtctaaccccagctcaagtgatgaaagcatcgacctgactaattga

SEQ ID NO: 3435 - DNA, 1938 bp, synthetic construct
  source 1..1938: mol_type = other DNA
atggcgttaatcgaatttaagaacttcagcttttcatacctcaattccgacggaaccgaatccctcgaaaagtccttagacaatatcagcctcaacatcaactttggcgatttcgtgcttctatgcgggccctccgggtgcggcaagactacgctgctaaccaacctgaaaaaggagctgatgccaaacggcagacgtgaaggaagcataaaatacaacggcactgaaatcgcccagctggatgatttcaccagcgcttgcgatatcggctacctcttccagaacccagacagccagattgtgacagacactgtcattcaggagatcgccttccccttggaaaacatcgggctgcccacagaggagattcgaaacaggatcagcgagattgtggccttcttcggaattaacgacattctccataagaatgtgaacgagctctctggagggcagaagcagttgatcaacctctgttccctgctggtcctgaggcccaaggttctcctgcttgacgagcctatgtctcagcttgaccccatcgctagttatgagttcctttcaattattcgccggctcaatgaggagttttcgattaccgtcatcatgagtgagcacaaggccgacagcatctttccattcatagacaatgccgtcttcctcaaggatggcaagatagagttcaacgacaacgcccacgacatctgtgaggaagtaatcaatgacgacatatttgaaaactacctgcctgcagttacaaagatctataatggccttagccagaactacctggaaaatgaggagtacattagcgaatatgaagagttcactaaactgaacacgcctctgagtatccgggagggtagacggtaccttaatataattagtgacgagctcatcaaaataaacgaggatgtgcaaaaaaataacaattttgaaaacgattatgcctacgattcgttagaaaaagataactctaatcaaaattccacctcaagcaaaaaagaacatgattactaccagaagtccagtctgaccacaaaaaaatacaattccaacaagctgggcctgagggataggctcccattctctaacgataaaaacacactgatccgaatgaacgggatctactttgcatatgagaagaataatcttatcctaaagaacgtggactttaaactgaacaagggggatttcctgagccttgtgggtggaaatggagtcggaaaaagcaccttcctgcagatattggttggcatcctgaagccgataaagggcaaggtccggtacagtaagaacctgaagattgcttatgtgcaccagaatcccatgatccacttctccaaggacacagtgaaggaagagttcttggaatcaatactgagctcaaatgcgttctccgctagcgaatttaacatggaaacctatgatggtcttttaaaactgaacggcaatgagtttttggagtctgacctcctgaacaatctaaagtttaaaaatattgactatagatttaaagagctgatcggattctttgacattgaaaacctcttggacaaacacccttatgactgcagtgggggcgagcaggagaagatcgtaatcgtcaaggccctgattcaaaatacggacgttctggttctcgatgagccaacgaaaggtttggaccccatctcatcgaaaaacctggcatacatcctcaacagcctggtggacaatgggttgaccattgtgatgacctcccatgacttggatttcgtggccaacaactgcaagcgctgtctgatgctattcgataaggacatccaaatcgatgacgaccctaaagtgatctttgcagagaataacttctatactacctttgtaaatcgcatggtcaaggattacattccgcaggctgtgacactggatgacgtgaaggagatttgggatctgaagtga

SEQ ID NO: 3436 - DNA, 1005 bp, synthetic construct
  source 1..1005: mol_type = other DNA
atggttctcttggctttcatttttagcgacccttactttgtgttgagttttctcgctttgattctgatcctaatcgctcttcagggcgtctccagcgagctgaagaacatcatgaaatttttcattcccttaagcgtgctgatcattatcctgaaccccctcctgaatcggacgggggcccaccgtatttatctgttcaacggcttcttcatcacctatgaggcaattgcatacgggattttgatgtcattggcactactcatcgtgattctggtgttcagtagttataacaggagcgtttcctatcaggagatgctctatatcttttctaaaaagcttcccatcatctcgatgattattgtaatggctctccggttcattccactcatcaatagcagggccattgaggtgcagaagctgaataacctgaaagccaacggggtggagtcggatgaagaggatgatctgaatgatgattctctggaagacaatctgtctgaggaaaataacctgtcggacgaaaataattcaaaagaagactcagactctctcgatctggagcaattcgacagtaacatatcaagcctggacatcggttccgactccagagtcttcaaaaagatcaagtcctctaaacgcttccagtccatcgccaaggaggccaaggtccttggaaagatcatgggaataacagtcagctggtccctcgaagagtccatgtttacagccaagagtatgaaagcccggggatacaactccaacgagcgaactagctacctgagctacaagttcggtcttgcagacatcatattcctggcgatcatcatcgtgaccgtatcaataatagtgatcggcctcatccagggctacggcatgatcaacatttacccgagtatagacttcagcttcagcgatctgccatttaacatttactattttgcgtttatagtgtttcttttacctctgatctacctagaaatcaaggagagattcctgtggcgctga

SEQ ID NO: 3437 - DNA, 4056 bp, synthetic construct
  source 1..4056: mol_type = other DNA
atgaacaaggtgcagctgtcctccatccttgctctggtgctgatcctcttcctcagcttggctgtagttagtgcgaatgatgatattttaaatatcaacgtcactgacacccaggatagtgtaatcgataactcaaatggcatctcggattatttcagcagtgacaatggcatcattaatgacgacgggcttagctctgacgacgaaactgccggtagccagctcctgaacgactcagaggatctggattcaagcgatgatctggccaaggacagtgacctggaagattcgaaagagacctcgaaaacgcaggataacagccaaaagaatgaagactcgaaaactcggttatcagacagttccataataagaattacagattctagctattcaagctacttcgacctcagcaaagatggggccattagggaaggcaccatcaaggatggcgacacgcttctcattggaaatgtcagcggaaaaatattctcgatcaccaagaatattaacattctcccgatctccgatggggacaccatgtccaactgtctcatacgcctgatagagggcagctccggtacaagtctgtccaacctgaggattgtgaacagaaatgagaaagtcgggtccttctacctatgcgggattcatatcatcaattctgcaggtcacgacatagtcaatctgaccataaacaacagccagatgaagtgctacggtataataatgagcaacgcttcgaacaaccgcattatcaacagcacaatcatcacaggccaggccacagccatacccatgactggctcttccaacaatctcttctacggcaactacattgagacctacaataccaacatgatctactactgtatgtacggaaacggtgatttctacccaagggaggatctggaaaagtcccacgacaacatcatcgccaacaattacttcactagtcgaaacggtacctacgactcctactgctattcggtctgtctcatggctgaggcgggaggctctgggacggtgatcgccaacaacaccttcaacaataccttccgcccaattacggtctcaacccccgacacgctggtcataaacaacaccatcttgaacgtagggggagaggcaggcataattgtcgatggaaataacgttacaatcatgaataacaacatctccaccaaacggctggaggggttccaatggaacaaggaaggcgacgtggtggggatcttcacctacggttccaatacaaggatcattggcaacagcatcgacacagtcggcacaaatggaatccggtccagcggggatgcaaccttcatttccggaaacacaatcaacaccgagtcctctgcatgcatcaacctgaccaaatccaacgccgtggtggaagacaacgccttaaacggcattggctcgagtgcggttcggatctacacaagcaaactggttgagaacaccacaatccgcaacaataatataagttcagactctgaagggattgttctcaagggtaagattgattattccctggtgtgcggcaatattattgagatttccaatccagaggatgccatcattgtgggaaaatatacaaacagaaacccgctggtcccccagcattacgctatctttaataacacaatcaatggcatagttgtgaatctgacggacatttctgagatcgagcgtaatgataccgatagcggattgaataataccaacaccagtgattccggtaacaatgggactgggaatacgggtaatgggactaatattaccgatgttaacggtacagatattaatggaacggatgtaaacgggactaacatcaccgacatcaatgggactgatgtgaacggcacgaatgtgactgacgtgaacggaacagatgtgaacggaacggatgttaacggaacggacatcaacggcaccggaaatgctaccattccagttaacatcactaaattaagcacttccatcactgtctacaacaccaccgtcctacggggagactacctcgatgcctacctgaaggaccagtacggcaatcctatctccggcgtttctatcgacttccactttaaggataaggtctacgctaaaactaccgacagtgaaggaaaagcaagtctgcactttgatgcgattccggacaattacacgatgaacatcagctttacgggaaataactattacctcagctcgaatatcacaatcgacatttctgtaattcctgtgagttattaccttaatgaatccaacttctatgagtacttcggcgaagacggctatctgaagggggactatgaatatgcagacctcattttccaaggtgacttccgcaataagcggatcgtgctgaaccagcctctgcgcatcatctcagattctgcagtgctgtacgattcaatcatcaagatagagtctgataaggtcgtcgttgacggttttacaattgtcaaccgaaaccctggaaacaagcaggacaaccaccggtttgcgattctgttggactacgtgagggatgtgagcgtaatcaacaacaaaatcaagttggatagctatgacagcggatatggaatctacctatccgaaactcaagactccactgtgtcaaacaactccattgatgtgaaggccgataaacttacctttggaatcatcctgtatgactctaaggacaacctgatccaggacaatataatcaaggtcaacgggacagacgatccccaccagtatgagtctacaatccaggtggacacttccatcagcgtggatgactatgaggccgagggcatgatcattcccgaagtatacaagacatacggcatcatcctattctactcatctagtaacgacattggctacaatgtgataaacgccacctcaggcctgaaaaagtattacacggccgtgaaggagtctaccaacagcattgtaggggtcgacctctactatgatagcaactacaataaggtgcatcacaataacgtggtggtctctgccaaagacccctacctttacggactgggggttctgggggccgaaaccggtaagcgagaccaatttgccactaataacagttttaccgacaacatcgtatttgtgaatgggacttattatgcagccggtataattgcaggttataacagcatcaatactaccatccttagaaattacattatttgctttagtaacaacgtgagctatggggtgatactggagggggctctcaattcagtggtggattccaactacgtgattagccgctcgaggatcaattatgtcctagagggctacgacacggattataatctgattagcaataacacactgaacgcctttggccagtacgtgggggatgtgagcttgtataactccaaacacaattacattgccgggaataagctcagtcctatctttcgagagggcaggcttaaggacgctagtgagttgcccggcggcgtcgactttgacgccatcttcagtgaactgggcgtgtccaatccactgcatgactattcagataaagactggagcgaattgctcagaacagaccttacagaccacgcagacgtgattcctccccataccggtgctttctatgatgacggaggtgagggcaacatctttgtggacaatgaggttccagctcccccgtccggcggcaacggccagaccaatcgtaccggctccggcgaaaccaacagcaacgggaacggaaacagtagcaatggaagccagaatagtaactcaaactccactgtggtcaataataataatgggaactcaggaagccagagcgacatggacggctccgggaacaacccagagaccgacacactcaaggggaacactgttggcaccagcagctctgctgctgtgacagagagcgctcgggcctataatttggacgtggacgaggatgccgcatcaagtcgttcattatcatttggaggcatgaacatacctgtgctgtgcatcttgttcctgcttattttcgcgtgtgcgtctgaactcgtcaagaggtctaaaagaaacatcagatga

SEQ ID NO: 3438 - DNA, 1848 bp, synthetic construct
  source 1..1848: mol_type = other DNA
atgtcaactaaagtacactcacccgatgaactgcctcagaagcctggcatctacatcatgaaagacatcaatgaggagatcatctatgtgggcaagtccaaatctctcagaaaccgagtaaagtcttacttccaaaagaacctggacagcccgaagacaaaggtgctgatgagccatttcaacagcctcgaatacatagtcacaaacaccgaaaaggaagccctcattctagaggccaacttgatcaagaagcatcgcccgagatacaatattcgcctgaaggatgacaaaagatacccctacgtcaagataactgacgaggacttccctaagattgtcatcacccgcacaattagtaagaccgggacatattacggccccttcacggatgtgacagctgtgcgccaaaccgtcaagttcctaaagcagctttttagaatccggacctgcaaacgtatggacggcccatgcctgaacagtcagatagacctctgctatgcaccctgtgacggccagatctccaaagaggagtataaggagcacattaaaaagattgatctttttttccaaggcaaatataataagatcatcaaagacctggaaattgagatgaaacaggccgctgaaaggcaggaatacgaaaaggctgcggtgattcgggaccagattagctccatcgatgaggtgatgaaaaaacagttcgttgaatttgaaaacgacttggatcaggatatcatagcaatcgcatacaccatccataatgccgtggccgttgtcatgaacatccgaaacggaaagatcatgggcaaggacgactttacgatggacggtagtgagaataccacttccgatgaggttatctctgccttcatcaagcagtactacgggatcaaccggcacattccaaaggaagtgttgctggaagaggatatccctgataaagagcttattgaggagtggttaagcgacctccggggaaataaggtctccttaaaagtgccccaaaagggcaataaactgaggctggtgcgaatggccggaaagaacgccgagataatcaaaaaccagaggcagaagatggaaaattcgatgatggaactcaagcggtatctcaatctgaaaaagctgccacgtgtcatagagggctatgacatctcaaacatttcgggtaagcttgcagtaggttccaaggtgtcattcctcgacggcaaaccaaacaagaagcagtacaagaaattcaagatgaatactccaggacccaacgactttgccatgatgaaggaactcttggaacgccggcttaaacccctgaaggaacattacgagaaggtcagaatcaacgaggagcacaccaaacacaatgaagcggagacagagaagatagagcccttaaaactgggggaagagccaaacctaatcgtgattgacggaggaaaggggcagttgggaatggctgtggatgtgctcaaggaatataacctgacccacatcccgatcattgggcttgcgaaggagttcgaagagatttacattcctaacagcagctttccaatcatcattcctcaggataatgaggctctccatctgctgcagcaggtccgcgatgaatcccacaggtttgccgtgacgtaccaccggaaactgaggtctaagaaaatagaggagtctcccctggatgagatagagggtatcggtaaaaagagaaaactggagctgctgaggcacttcggggactttgacagcattaaaaaggcaagtgttgaggagctgaagggcgtggatgggatgaatgagaaagtggctttgaacgtttataattattttcacgagggggaaaaagagcaatga

SEQ ID NO: 3439 - DNA, 543 bp, synthetic construct
  source 1..543: mol_type = other DNA
atgaaagtgatcggggtgacagggctcccaggtagtgggaaaagcatcctgtttgatacagctgaggaaaaaggagctctagtagtgtgtatgggcgatcttgtgcgtgaaaaggctgccgaaaggggagaagactcgggcaccactgcccgcaagttaagggaagagttcggccaatacattgtggcggaactgacgatcgagcgaatcaaggagatcctcgagaaagataaagatgcaaagatcattctggttgacggtatcagaagcccctacgaaatagagctctttaaggagagctttgacaacttcatttcagtctccatttatgccagtcctcagacccggttcgagaggttggtccttagaaaccgcgaggacgatccggaggtctatgaggacttcctggtccgggacaatcgggagataggcttcggaattgccgaagtggtggcaaccgcggactacatgctgaacaatgaatgcagcctggaggagtttaagcagtccgttgccgacttcatcgaaaaggagatggattga

SEQ ID NO: 3440 - DNA, 747 bp, synthetic construct
  source 1..747: mol_type = other DNA
atgatcccaaaaacgcatccccgttacgagagtctgcttttgagagacaaagtcaaaaacgcatttaaggaaggctatctggccgattcgggaatgatcgcccacggaaggggggagaccttcgactatctgataggcgagagaaccaccgaacctgcccgcaaggcctgtgaagccgccgtggcatacattctgctggctgagaatccggtactctcagtgaatggaaacactactgctctggccatagacgaaatcatcgagctcgccaaggcaacagactcaaagatcgagatcaacctcttctaccgaacgccagaacgggtggaaatcattgaacggatgttcaaagagagggggtgggaagatattctgggcgggaacgatgagaagctggaatatatcgacaatctcaacagccccagggctacagcaagcaaggagggtagctacatcgctgatgtgatgctggtccccctggaggatggtgaccgcgcggaggttctcgttcagaatggcaaaaagatcatttgcatagacctaaaccctctaagtcgcacctctaagatgtccacagtctctattgtggataatattgtgcgggccgtgccattgatgaccagcatggcgcttgactttaaagagaaaggcaaggacaaggacaaggagtttttggaaaacattatcaagaacttctccaatgagcagaaccttaaggattccctggctgagatcaaattaaaatga

SEQ ID NO: 3441 - DNA, 579 bp, synthetic construct
  source 1..579: mol_type = other DNA
atgaaacgattcattgctatcgatgggcttgacggttcgggaaaggacactcaggctcgcaagatcaaggagaagtatgagcaggaaggaacggtggtcattcggagccatccaacatctgacaatttcttcggccgccacagcaaatccgcactggagaaaaaggggaagcttaacaagatcattgcaaccctctgctatggcgccgacgcgataaggtcagtgatcaaatactatggcaaatacgataccgttatctttgtccggtacacactcgctgtgtcctacctgagcaaagccatttctgtgcctgtttacaaattggtgtgtgtgttgctacccatctccgagtacttcttctatctggatgtcagcccgaaggagctggtgagacgggtcaagtcaaggaatgagaaggaagagatgtttgagaactatgatgcctttgtaaaggtgcgtaaaatggccgagcccgtactgtacaactggaacgtgattcccgcggacgacagtccagacgaaatctttagtagaatagaagccatcctggatgaactggacaagaagctcttagaatga

SEQ ID NO: 3442 - DNA, 528 bp, synthetic construct
  source 1..528: mol_type = other DNA
atggatgagaaaatcgaaaaccccgagcttaaggccatcatggccatcgaccctgaggagatggacgaagaccagctaaacaagttcgtcgaggcgttcatggaggccaccttgattgtgcccgcagagatggaaacagatatcgacatcgaaggcatgagcgatgaggagatcgccttgaatgaagagatcgagataaccataatcaagcttgaggacgacgaggggcatgaatttattccagcatacacggatgacgaggaggtggaaaagctggatttcgatgtctacggattaatttttaaaacagaagacctggctaacctgctctatgaaagcgaggacgagctggaagccgtggtactcaacccattcactgaatacagtgctgaaattcctctggattccctgtttgagctcttcgacctggaggaatgcgacgatccgaactgtgataatccccaccaccaccatcacgaccacgaacacaatcacgagcatcatcacgaccacgagcacgagcattga

SEQ ID NO: 3443 - DNA, 858 bp, synthetic construct
  source 1..858: mol_type = other DNA
atgcggaaagagatcatttctatcctggtaattgccatcatcgcaatctcagtgatcccaacggccttttcagcaacggacaatgggatcgtcatcacctacggcgaaacgacctacaataatcagaactacaagtctatcgtggataattacttcgctagcaaaggttatggaagttccaacgtgcagggcgaggtgattactgcagctgacgtcaacgcaatatcgtcgggcataagcggcaaaacatacaactccaaccagatagtgagttgcgccctagtggatatgacccaaaacaatgagatcacagttgaagtggacaactccattacaaccatcacgcctcagatgtacgcctctgcccttaagtcagcgggaattacaagcggacacgtctatgtaagcactccggttactgctactggggaatctgccctggccggcatcatgaactgttatgaggaagttactgacgtggagatccccgaaaacgtcaagcaagctgctaacgaccagatctataccgaggcggccatcgttgagaacaatgatgacgtcagctccgaggagctgtccaaattggtggatgatgtaaaggaagaggtgcaggagaagaatattaccgatcatgacaccatcgtgacaatcataaacgactacagcacaacctacaatatcaacatttccgacagcgacattgaaaacctggccgacaccattcagcagctccaagaggtccaggacgatgcaaacagctataaggaacagctggatgatgccgtgaacaataccacatcaggtttctccattgacgggatactcaatgcgatactcagtatttttaatttcagttga

SEQ ID NO: 3444 - DNA, 567 bp, synthetic construct
  source 1..567: mol_type = other DNA
atgaaaagttccataactaaagaggactacctaagaatttatgagatgacagacgacgtgttcacccttgactttgactgtggaaagctctgcaacaatatctgctgcaccatcgagaaggaagccaaggatgatgagtatctggagatggtcctgtacctcttgcccggcgaagaggaactgttttttgagaaccagtggttcgagatgtactatgaaacgacagatgaatatgaataccctgacagttggaaagggaaagtttactatgtaaagtgctccgatccaccttactgcgaccgcaaacgacggcccatccaatgtaggtcatttccggtgagcccacaccttgataaggacaacaagctccatttgatctacgatgaggatgacttctcttacgactgtcccattgtcagccagaaaatggagctgtccgacaatttcaaggaaaagattctgaagatgtggagcatcttaatagaggatgaactgatcttcgatctgattaagatggagtcggtgcagcgggagaataacgaaaaagagtacgacttcgtgttctga

SEQ ID NO: 3445 - DNA, 600 bp, synthetic construct
  source 1..600: mol_type = other DNA
atgaacaaaaaacggtttaaactgctgcttactatttttatagcatttgccctcatcaacacgtgtttcatcctgaatgataatctctcggcggcagacaacgctccaaagggatatagcaactactacattagaggggtctgcttcaatgtccctgacagctacaaactggtggacgagggatgggatgacgtgaatcgcctcagctacgctcatttcaaaaagggcaacaacttcctgaacatcagcctggataagcactccacaaagtttaacaagaaccttttggatggtttcagttcctttaccataaatggaatcaatctgaataagaaaaccatctctcacgtaactgggttctacgcgaagaagaacggcgtgaagcactttgtcttcgccacagaggacgatttcgtgtatattgccgccaaagggcccaagctaaaggacgtgttatcaagcaccaaccagagggattacaagccgtatcatgatagtgaatacgacttcgacgatgatgcctactatgaatcagacgtttatgatgactctttcgacgactcctttgacgacggcgcttactacggctatgactggtga

SEQ ID NO: 3446 - DNA, 684 bp, synthetic construct
  source 1..684: mol_type = other DNA
atgaaaagcgcagttttattttcagggggaaaagactccgccatggccctcaactacgccatcaacaatggagatgatgtgcgatatctacttagcatgaaatcccagaatgacgagtcatatatgtttcatgtgcccaacattcacatgactgacttgatctcgcaggctgttgaaattccccttatggaagtggagaccgacggcgtgaaggaagaggagctgaaagacctgcggaggggattcatccagctaaaggaagagggcattgaagcgatctacaccggagcgctgttctccacctaccagaagagcagaatcgaaaacctggctgatgaaactggtataaaggccattagtccttactggcacaaggacccaaaggaatatatggaacttgtactcgagacaggcttcaaggtcatcattagcggggtcttcgcagaaggcctggacgagaagtggctcggccggctgatagatgctcaggccctccaagagctggagaaaatcagtgaaaagacgtacctgaacctggcattcgaggggggcgaggctgagaccctcgtgatcgacgggccgatctttaaaaagaggatcgagatagtggatgccgagacagactggcacctggataacggtacatacaatgtcattgaggcccgcttggtggagaaagagtga

SEQ ID NO: 3447 - DNA, 786 bp, synthetic construct
  source 1..786: mol_type = other DNA
atgatggatctgatcagcggcatcatatatctaatcctgttcattataatcatggtcttcgccttctcaatgggtatcctctcaccctatgtggggcggcgcgaaatcatctccattatcgccattggatttgttctcggtgctattggcgggtacttcttcatctacccgatgtaccaggacagtccctatgtgttgggcaatctccagggactgtttacgatggagagtgagatcataaacctgaacattccaagcacatccaacatcagtgacgtcactgaaaaaattctaaatcaaaatggggtcaactcagttagcacgaatggatttgagctgacaacaagctcgataaacaacgagacgaaaacctatattgatagctaccttaagaacgactctcagatcgagcgctacagcatcggaaccaataatatttccgtggacctcaagaacgatgcaagctccaccgccacactcggaagtcttgtgacttggctgtccaatactgtgggcgtgagctcggaatttgcctttgtgcacattaaggtgaacgtgaatgcgaaccaggtgctggacatcaaggaatacttaagggacaaccactataccatcgtctccgtagagggccctgtgcaggataccatccactacttctatgaccatctggctccagattacgttgtaatgtgcattaccggcataatcggtgtcttggtggcgattgcaggcatctacgtagagcccctgaccaaattcgtccgagccttcagacggggggggtga

SEQ ID NO: 3448 - DNA, 582 bp, synthetic construct
  source 1..582: mol_type = other DNA
atgttcgacaaatcaatcgctaaaaaatcctcgctcccattcaagagcataaacaacaacagtttatttaagtttataagtattaataaatgtctgttcaagttcatctccatcaacaataaggggctgtttaagtttatcagcatcgacaacaaaggacaactctccctggaatacatactaagcgccatgatggtcattctgcttatcacactcctttcggtacccatcctcagcctgacaattgattactccaacgatgtgatcaactctatcagcaccaagaatgaactgtcaaaaatcactgattctattgacttctgctactatagcggcaaggggtccaaaaaggtggtcctgcttgatttcaatcaggactttagtgttaggtttaccaacaatggccagaaggggattgcctatgcagacctggaattgtcagacaacaaccacaaagagatctctagcgagtatgactacataggtctgaacacgaatattcagttcagtaagggcttcaataagattctggtggagtgggatgaggacaccggactaatccggctctccaagttgaattga

SEQ ID NO: 3449 - DNA, 909 bp, synthetic construct
  source 1..909: mol_type = other DNA
atgaatatctatatcttattctggaatatctttaacaacatcgacttttatctgatgagtggcttcatcatggtgttctttacactcctcttggcaaactactacgacctgaagtatgggatcattccaaacaagcttagtgttttccttatgacatttgggattctaatcaacgtgctgattctgattgtcctcaataaccggctgtacgccattttttacgtctcctatttgattatcattttcatcatctccttcgtcctatggaaaatctccttttggggtgggggtgacctgaagctcttctgttccatagggttttcacttccctttatagatattctgaatcacttctatacgggcagcatcttaaacagcttcagcttcaacagccagataattctgtatccaaagatcttttccatcctgataaattcaatcctcctgtcatttccggtgattctcctgctgctggtttacaagttgcttcgcgaaaacaagctgaacctcatattattcgcgttttccaatatgaaactcctcattaaggaactgtcgacaaagaccgtatttattaatgacctgaaggagggaatgattgtggaggattactacttcaacagcctggagctcttcaacctgatggaggagctgactggaaatgaagagtgctacaacctcaaagccagtcagtttaaagagaacagttacgtccttaagagctctagcatggccggcctgaccagggatgacatcaaactaatcaatttcgcatatatggaaaccttgatcaacttccccaatttcaaaatcaaaatgggcgtgcctttcgtgccctctctgactgtgggatacttggtattcttggctttcggcgatctggtgtttcttatctcgaccataatctga

SEQ ID NO: 3450 - DNA, 216 bp, synthetic construct
  source 1..216: mol_type = other DNA
atgatggcaagcattctacggaatcaggtcaacttcaccttttcatacaactttcatatgatggccagcatactgaggaatcaggtgaacttcactttctcgtacaacttccacaccatgaaatccatctactatctcgaagtgaatttcacgaagagcagtaagttttatgagatgacatccatcctgcgcgatgacatcaactttacattctga

SEQ ID NO: 3451 - DNA, 600 bp, synthetic construct
  source 1..600: mol_type = other DNA
atgaatgatctcgataacaatcttgcaaacgcaaaaggcattgggaaaaccatcgctacaaaggtgcccatgaatgtccacgatgaactcgtgcacctggtggactgtggcgcctatttaagcatctcagacttcctgcgagaggcgattcgggagcaactgaagaactacaaaattgccgacatgcggaaaattaactaccaggacgctaaaagagaggtaataagctacttcaagaagtataaggtgtgctttctggatgagatagccattaatctcgagctggagtttgaattggtcaacaccatcctcaacgaccttgttatggaagaaaggatcaagatgatctctaaagccgatcaggtcttcaaggactacttggaggagaacgacctggatgaaagtcagcacttctccaataagggcaacaactttatcaagttcaagggaaaacgcataattgtggaatcaagttccaaagacgtggacttcatcagcctcaggccgtcgccaaagaataagtctgtgctgaaaagccatggaatggttctgaacaatgggacggtcatcctatccgagtgctatatctttctgaagtga

SEQ ID NO: 3452 - DNA, 1677 bp, synthetic construct
  source 1..1677: mol_type = other DNA
atggatttttacaaggactcccgcttcttccagaatttcaaggagtggatctatctgacaaaatacattataataacggggggagtagttagttccattggaaaagggatcacttcggcctctattggccggattctccgatcgtacggcctgaaggtggccgcgattaagattgacccatacttgaattgggatagcgggaccttaaacccctatcagcacggggaggtgttcgtcacgtatgacggcatggagaccgacctggacttgggtcattatgaaaggttcctggatgtcgagctcccgggcataagcaacattaccacagggaaagtctaccagtccgtgattaccaaagagcggaacggcgatttcctgggcgcttgcgtgcagattatcccccacatcaccaacgagatcaaggaaatggtgcgggagataagcgccaaggacgattacgacgttgtgctagtcgagctgggcggcacggtcggggacatcgaaagccagccattcctggaggctctcagacagcttcgaaatgaggaaggcagcgagaatgttatgtttgtacacgtgactttcgtgccatacctaaacgcagccggcgagtttaagacaaagcccacccaacactcctcaaaagagctgcgcagcatggggatcaaccccaacatgattgtcttaagaagccaagaacctattgacgatgacttgaaaagaaagatcgctcacttctgtgacgttgacgtcaaagctgtcgtgaacactcccgatgctcagtcaatctacgaggtgcctctcgtactggatagggaaaacgccggacagtacatttcagatcgcataaatcttggaatcgacttcgaaaatgataaaaatactctgaacgaatgggaggagatcgttaactcccttaaaatacaagatccggtggtcaccatcggcatcgtgggcaagtacgtggaactggaagacgcttatatcagtataagggaaagcctccaccatgcagcagccaaaatcggcgcgaagatgaacattgagtatctgagtagcgatgtggacgtggaagacgtggatgaactgaaggccttcaaggaggagctgtcaaagctggacggtatccttatcccggggggatttggagaccgtggggtggaaggaaagttccaggccgttgactacgccattgagaacgatgttcctatcttcggtatctgcctagggatgcaatgtatggtgatccagttcgcacgccgcatcggaatggaaggtgccaacagcagtgaatttaacacagagacaccatatcctgtgatcgacatgatggaggagcagaagaaaatcaagaagatgggcggaaccatgcggctcggtgcgtacgactgcaagttgatcgacggcaccagaacgatggaggcttatggggaggagaacattcaggaaagacataggcataggtttgagtacaataatgaatatcgagatgtgctcaccgagaacggtctcgtcatcgcaggaacaactccagataatttcctggtcgagatcgtggagctccctgatcatccctggtttattggctgccagttccacccagaatttaagtcccggcccaacaatgcacaccccctgtttgccagctttgtacaggccgcgtttgacaataaatga

SEQ ID NO: 3453 - DNA, 381 bp, synthetic construct
  source 1..381: mol_type = other DNA
atggacacaaaaacgatcactgcagaactgaatgaggagcagtacaagaaataccagataatgcaggagaataatctgagcgtcggcgaagccattgatctgattttcaacctaagggaggagtttgaattgcaggccaacgattacctggaagagagactcgccgagctcaacgacaagaaagagtccctgtccaaggaaatgagctcaatcgacgatgaactcaacgtacttaagaaaatcgtggattcgcccatggacttcaagcaaaagcgcgacatcattgaaaaggagtatgctagctttgacgagacctatgacatcaaggtcatacgggcgaagcaccaggtgagttgggtgaccgatttctttaaattctga

SEQ ID NO: 3454 - DNA, 453 bp, synthetic construct
  source 1..453: mol_type = other DNA
ctcaacaaggataacagcagtctgaacaagaataatttgaatctggaaaaggaaaactccagccttgagaagatacttaagcccgaatctaaactcaactccagtctagacctggtgagcaacatgatcagcgatctggactcggacatagagagccggctcaattccgatctggagtccagttcaagctcattctcggatttatataggaattacctcatcgaagacaatgaaatctacctggagatgtccattagcaaagatgagttcttcaagatgatgaaatttctgtacgtgctgattgactcatatcgcctggagctaaacaacatcgaggtccttgacaccggagacgggttgttgaatatctgctccagcatcctcatggaggatgagagtaacattaaaatcattgaagcctttctgatcaataacgacttcggcaacgactga

SEQ ID NO: 3455 - DNA, 744 bp, synthetic construct
  source 1..744: mol_type = other DNA
atgctgttgaaaattattgaaaacaaaaagataaaggcaaaccaaaaggagtttgatcgctttctcgaaaggttccacaacaacaaaaagactttcacagttgactgtgaccacatcaatctggactacttcaatagcgaatcatacgtgaccatcagacatcggaagcccaataaggagtccatctattataccagcttttttaaggagagggatgaggtcacgtacttatttggcctcgcccgggaaaatgtggtttgcacatcctcttacatggatatgggcgctcagatccggcccaccctcgtggcggtattgaatctggaggacagctctaaatcaactatcgtatttgcagaggacagcgaagagtataacaacgtcattctgctccgtatagactgcagtcagctcaacaatgacgagctgacggtgctaaagaacaagaataagataaccaagcttaaagacggaaaggggttcatcaatttcggagccattggggatttcaccacacttaaaaacatccgaaacttcatttccaacgtgactttcgaatacgacaacggcctgtatgccaaaatcatcaatgtgagcattccaatcaacaacagtttcagtaaacctgattcggatgtcctaaaggaccgcttctacaattttgacaagctggactctgatctggtggtcatcgatccgaacgaggacgatgactccaacaaaagaatcctgaagattaattga

SEQ ID NO: 3456 - DNA, 4689 bp, synthetic construct
  source 1..4689: mol_type = other DNA
atgaaaaaccatagtttcatgtttttagactcagactttcaggacatctccaatttttgtatgaggatggaaaagaatatcgttgaaggcgacggcgttgacgccgtgatctgggctggaaagatcgctgaacgtgtgacacactacatcacaaaattcgtgggtattgacctcaacgagctggaccaaaataaaaaactcaataccctgtacagcaaaggcatcatcccggaagataagtacaataaactggactccatacggcaataccggaacatcgccactcaccatgagcttcgagatgagatgaacatagctaagaaaacgcataaagacgtgttcaatatactgtcctggttctacgggacctacaagggtgacgaggcctattacaaactcaaatatcctggagtcacctaccgccacgatgagagctttctcaatcagctgaaggaaaacattaacaacaatgtgaaaaccattgacaacaacaaggccaccacagctatcaaatccgccaacgaccacatttatcagcacgacgttgactacaacgtacacagctacttcaaccaaaacaacgtggaatttaatccggaactgaacgcatacactgcattcttcatttttgatgacaagaaagtcaccataggccacttcaagacacgcgaggttgcagtgcgcaagggctatagattcgtgctaaacgaggacttcaggatgtttcagtactttaacggatgcctgcttcccgagcgcttggaagatgggagctattccgactccaagggcatcgacttcgatatggaagaaaagctatggaaagcaagcttcgacgataaggatctcggctacttcatatctgaaaactccgccatcatcgcccggaaggagtacatagacaccctgccactgcctgagagcaaaaacggctcctactccgactataaggaaatcagtttcgacctgaaccacaagctatggtacattaagaaggaaggaaagatactggactattatgatagcgaaagggaggcaatccacaacctttcaaatgtctaccggctcgatatagacctggaggacttgggcatcgtccaggacaagaacgattcaagatggaagatcttctataagaacaagtacgtgaccacctgcgacacgaaggaggaagccatcaaaaagcgattaagccacatttccagctttgctcccccaaagagaaacaaggacggggagtattcaatccataaggggatatactatgacgacaagaaccttatttgggtattgaccatcaagggggagacactggggttctttgacagtgaggaggacgccttcaactataagaaggaatttctcaaatccaaaggcttcgacgtaagcgaccttatattccaccaagaggagttgtttgacgacagctttgactttaaggtaaggcttaacagcgaagagaacgccgttgactacgataaggacaatgacgaatgggtcatttactttaggggaaacgagatcggaaggaaagcctcggaggatgaggcaagaaagttccggcgagcttacctgaaggaaatgccctatcccccccgcaagtccaatgggaattacagtttcattgacgggatcgactacgacatcaacagccatctgtggctggccaagaacggggaggagctgatcggacactttgactccgaggaggatgcattctacggcctgaaggaggcgcttgtgaaggaaggctttgacgtgcgggatatgcacttcatcaacagcgacattaaaagcaacgatgaaaacgacggtaacttgtctaacattgtcaatcccagcaaggattacctaatcaaggacaattccacgaaggattacctgagtgacgggtctgtgtctaacgaagattcttcagcagaagcttctaatcagaaagatggctctgacaagctgatcagcttttatgatgtatttagaacaaatacaggcaactatatcctgagcgatagcgaggaaagtctgagcgatagcgaggaaagtctgagtgattctgtagagagtctaagtgactctgtggagagcatcaacaaacctgtcgagagtgcggatgaggactttaaaaacaacagtgaaagcattgcgaatgacagcgcttttgagaccgacaatggaaggggagttatcgatcaggagttcctcgccgatggagacaagcaattcaatatgggtgcaataatccaagaggacaactcaaagaacataaacgagtacaagaaaagttccttttacggaatcgccaatcagaatcaggacgatcgcctctcagacgatctgtcaatcccatatctggaatccgaggataactacgagtatatggaggacctcaacctcgagcagcttaatctggacgagaacaatggattcctaaacatcagcgaaaaccttttcaaaagctctaaccgtaaggaactaaaggagataaaattgaactcatacgactccaataacttcagacgcgagatggtgctctcctacaacgattcctacctttgcgtgtcccttcagggcatggtcaataaggatgagttaaaggacatcatattcttggacattctggacaatatggtcaaactgaactactccaaggtggatgaggagtacttcagcatcttcatcaatgtgcagtataagctcagcacaatcgatctcgtcaccttgatcaatctgctgtctgatctcgggtgggagtttgacttactcgataaactggccatttccaatgatataaacctcaattcactcgtccagtccaagatcggaaaaatccgcgacaaacgaaaggcccacagtaacgagttgattaaaagttctcataacgaggactcattaatctccaagtctaagattaatgactctattgtgtccaatgaaagcgattccaacaagggcagctctaaattcaaggagaacctgtcgctttatgacaaattcagcctaagctctaacgacgccgaggatagtgacgcgcagaaggctaaggataaaagcttaaagagtaaagactatctggatgcaaatcccatttccaaacgcaaaagctacccaaagcaggaaagcatctccagcaagaataagaagtccaattccaaatccgagaaggccattatccgcggcggggtgcgagtcagtctagaggaagcccatgagatcgataacgctgaggagaacaaggtcattaaatccaagatcatcgacaagaagccagagatggttaaggacttcaaaacaacttctttagatagtcttctcgaggccaatcggatcaaggaggaagaacggctcaacagcacttcagacgatattggtgatgatctgtcgattgaggataattctgacaccttcaaagatgatctcaattctaacgggctggaaaccctggaaaacggactgaatctgattaaagaggggctcaatagcgctgagaatgatttggactacgctgaggatgtgctcaattcggaagaagacgatctggactccgctgaagacgtgctgaaccccgaagaggatgatctcggttctgtggaagatgttctgaatcctgaagaggacgacctgggttctgttgaggatgtgctgaatccggaagaagacaactatgtgtcggaatccagtctgaacgatgattttgatagtctcgattactcagactcccttgaggactcaactgactccagtttcgactatggtgatgtgctgggtgaggacaactcaaactccaattccattgaggacattttcaatgacgaggatgatctggactctgagggcctgttggatgaggattcggatgacgtggacttcctcgagaaggtgtcatctgacctgtcgtcaactaacttgtttgatgaaagcgccgacctgagcgctaacgacctgttcgacggctataacgactctagctcgagcgacttgtttgacgatgagtcggagactagttttgaagacgaattggacaatattgggtcgtcaaatcaggaggatctgagtaccgagagcaatgattcagactctaatttggaagaaatcggctcgctgaaagagaccgcagagcagactgaatcagaaagcgattccacggcctcaaaggtgtctaaacctaaagtaaagaaagcgaaaaagcctaaaaaggttcccgcagatgcctttgatgagaagtatgccaattccactgaaatcgagtatgacgaggagagcgataagtggctggccttcctgggcggggatcttatcaggagcttcaacacgccaaaggaagcctacattgagcggaagaagctcctgagacggaaagtcaaaaggccgaaacgtggtatgaacggcagatattccgagttcgagggaatcgacttcaacacacaggagggcctgtggacaagttcagtgaacgacattatcgtctgttacagcattactgaaaaagaggcgcataaaaaaagaaccatgttcgtggatttgattctggataagtttgatgtctcagaagaggaatttaccgaggatctcctggaagaaattaaaagcacgaatcttgaagacttatttgcggacctgagtgacgaggatctcaatgactcttcgaaccttagtctgaaggaggtgaaaaaggagctcaacaagttttga

SEQ ID NO: 3457 - DNA, 300 bp, synthetic construct
  source 1..300: mol_type = other DNA
atggaggagatacggaaggaactgatcaagtttcagatggaacgcgactggaaaaggtaccataccccagagaacttggccaaaagcatcagcattgaagctgccgaactcctggagcactttcagtggcaaaaggaatacgacaaggatgaggtggtagatgagctagcagatgtgttcaactactgcttcctcatggcggacgcactggacgttgacgtcaaagagatcgtcttcaataagatgaaaaagaacgccattaaatatccgcccaaggtgagttccgacgatcttaagtga

SEQ ID NO: 3458 - DNA, 774 bp, synthetic construct
  source 1..774: mol_type = other DNA
atggatgacttcctcagtaattttgttttaaaggaagaggaaacaagtctctcagactccaaaaaggatgtattgaagtttctcaagcagatcggtgtggacactcggtttgtgagcttctttgagaaagacaatgagaagcgcatctacatagagaatctgcgattctcaaggttctccagaaagcgcacgagcattttcaataacgaatatcccgatattgaagtggtccgtagctcccttttccagaagatttgccttcgggcgagcaagaccctgtcaaactccctggaccccaaggatagagtcatcatcccgaaaatggacaacgagtacaacgagctgttgtttattgttcttgagtcgtatagtcggaaatacggcataatcttcatcgaatacgacgaaaacgaaaacatcaacctcaaagactttaatgccattgtcagccccctgaacctaaatcaggaggtgaaccacatcctgaacgacatattcgatggaaagggaatcgagtgggacaggaaattcgatctgtcgagcctgtacgggttcaatgctagcgatatcaaagacaagaaaatcatatttccattcatcaatgtgcctcaagagtggatttatgacttcctgggcattgagaaggaatacgtgatcgattatgataacgatgacattggcgactcctttatggggttcctaagcgaaatcaacccacagtttaaggagaacgtgctggcagcctctagcttcctcgagacccatcagaaatga

SEQ ID NO: 3459 - DNA, 897 bp, synthetic construct
  source 1..897: mol_type = other DNA
atggtagatgggaaaacgaagatcctgggagttatcggagaccctatcgaacacactttctccccggctatgcagaacgccggacttgaggctcttaatttaaactacatttatctgccatttcacgtcaaaagcgataaccttaacagcgccattgagggggcaaagaccctgggaatcaggggactgaacgtaaccattccccataagcgagaagttatcacctgtctggacgaagtggacccaattgcgaacatgatcggtgctgtgaatacaatcaaattcgattacgatgagaatgagggcatctccaccaaaggctacaatacggacgcctatggctgcctgcgggccatcgaagagaaagcctcggtcaaagacaaaaaaataacaatagtgggtgctgggggcgcctcaagggccatcgcctttcagatggcaagctcagacatcggggagttgtccatcctgaaccgcaacttcaacaaggccgagtccctggcaaacgatattaagagtaacctgaagcaactcaacgataatttcaacttgaatatcaatgcgtacgatatggacagcctcaaaagagagatccaggaaagcgagattctcatagacacaactcctatcgggatgtatcccaacatcaacgacaagccaatagcaagtgcagatatgatgcacgacgacctgattgtgaatgacattgtctacactcccatggagaccagcctcattaaggaggctaagaaggccaacgctgaagtggtctacggctataagatgctactgtaccagggcattcgcagcttcgaaatatggctaggcgaagaagcccccgtgaaggagatggagaatgcgctcctcaaggtgtttcggcatttgaatggtttttga

SEQ ID NO: 3460 - DNA, 540 bp, synthetic construct
  source 1..540: mol_type = other DNA
atgaacctatgcatgacgaccctgcgcatgagtctggccgagaagagacagcacctcagcaagctctttttggaggtgctgaaggagcatagtggaaccatctcagtatatgacctcatgagcgtgactgccgagctcagggaagataccaaatatgtgcaggacaaataccgggaagagacaaacgctgtctatgtgaaatacttcctgggccggatcaagaacatacgagatgacaataaccagtacgatggcagcattgacaaggatgacttcatcgagtccgttgctaccttaaagtcctatcaggagggcgagtcaaaaacatcgaaaaccaagttcccccttatctacgcaattgtctccctgtacacaacttacattctggaagagcctatccacccagtgggaacgccgtttcccgggagcctgaaggtgactcagaaaaatggggtgttctactgtcccgttaaggaagcaaaccttgaatctccaaatgccgtctgcaagatgtgcatagcggaacaattggagttttga

SEQ ID NO: 3461 - DNA, 4620 bp, synthetic construct
  source 1..4620: mol_type = other DNA
gtgagtaaaacgaataaaaagaaactttttttatcgattctcatcattctcagcgtattgatatcgctgtcaagtgtgagtgctatcaacacaaacgacagctctatccaggacaatggggatttatccatccaagactcaattgacgagatttcccagtttgatgaatcagaacagctcaataaaatcaacaaggattccccagaatccaattttaatcaagaactgtctaacgactcgaaagacatatctgcagattccaaccaagacctcatggggtttgagaactatgacttcaaatacaataccaagagctcttactcaaatgccctaaaggactcaaatgtcataaacgtgacaggaagcacatttcaggatatccaggacgctattgaccgggcaaatgatggggacatcctctatctcaagtcctacaaattccacgggaatgggaccgccatcagcatcaataagcccctgaccatcatcggtagctacgaagccaacaacaagagccattatttagacgcatacctgaagtccagaatactctacatcgacagtgacgatgtcacactgatcaacattcactttgactacgggggcaatattgacaataacggcaatggcggggccatctacctggacgggacaaactgcgccattgtgaactgctccttcaaggggaatcatgcttggctggggggcgccattttccagtcaaacaattccaatgacctgtatgtgggtggctgcaagttcgtggagaacaacgcccaaatcggggcgggaattaccacatgcggcttcaactgcctggtgagcaattgcagctttgagaacaacagcgccgttaccgccggtgcaataatgacagacacgcagaagaacggggacatgactttcttccgcctcgaaaattccactttcatcaataacaacgccaccgggggcggcggggccatcaattttgacggctactaccagagcgtctataattgcaagttcattgataactatgccaaaaattctgggggcgccatctacggcagtttgaagccatttgacgtttccctctgccaattctataataactacgctaacaccggaggtgccatcagaggcactgcaaactataatgtgtcggactgccgattcatcaacaacagtgctcatcacgctggcgctgtgttccttcactcctacagtaatgtcattgatagttactttgaaaacaactatgccgaagcgaatggaggagccatctgtaccgactccaacacagtgggagttatcatcaagggctccacgctcataggcaataatgcaacgaccggcagtgccattatgatggttagtagtcggagcatcatcgagaactgtaatttcagcggcaatatcggcaaaagcgaaggcgccatttactcaatccacgactgtaacatctcccactgtatcttcgacagcaatcaggcagagaagggaggggccttctatatttatcggggcaacaacagcaatattgacaactgtcgcttcatcaacaactctgccaattcttccggaggggccatatactggtatgtcaacaagggtaagatttcaaactcttatttcgaggagaatcaggctcgatacgggtctgccatttattgcagcaatgtagaggcggattcgggatttataatcacagattgtgatttcattaataaccaccctaaagaggacggctctaacactaaggggggagcgatatacctgtacgatcagctgaagtgtatcatcgtggcaaactccacgtttgagtataactacgcctcgcgcggaggggccatctacgttgagggagacgtgaacctgatcgcaaactcaaccttcaagtataacaaggcagatattttctccctgtcggcttacaatgataacgccaaccttattgtcacattgaggggctatgagaactatatgaacgccatctatgccgagaaaactgtcgattttcacaatgtcacctattgggatggggaatttgtcaccggcgactatccgatcaaaagaaacctggaagctgggattaacatcatcctcgactgccgtggtaacggacatagcttaaacgtcactaagatgaccaatagcatgggcgaggttatttttgacgagatgcgcaccttgcccagcgggacttacgcatatcaggtctccgtgccagataacagctactacactgccaaaaagctgaagcctgacatattcaacgtcccctatctgtgtgaaaacatcctgggcattgatgtggcggacatctcttatgaccagtatccggtggtaaatatcaccgccaactataccggtaactacacagtgtacatcgccaatagcagctacgacgtcaccttcacggaccaggatgtggaacggggcagggtactgggatacaacatcacaatcaccgatgaggatgtggtgaaaggtgagaagctaatcgtaattccacatctttttgacatcaaggacggctacggggcttatgtgcaactgagggcgatcgaccaggagaacgtggagctcgtctacattcaaaacaggacctccttcaatgtctataaggcagctagtgccctggaggctgagggggcagtggctgtcaatggaagcgatatagaattgaattatatggctcagaacggcactgtgactatcgaatccattaaaaaggacggctctctgctggaaaatggtacagactacaacttcacagtaaatgatgacaagattatcatcacaggcctggatgcaggccactacattgctaatctgaccttgattgtcgacgattaccacaacagctcctccatagacgtttcaatcgatgttctgatcaagaccagcatcgacgtggccgactctatttccatcgccgagaccgagagctctctcattaacgcgaccctatcgcccgaggaggcaggtttgttgaattaccagagtgataatgagactgtggcggtcatcgacaacgacggcagaatcacgggcattttgaaaggaaatgcaactatcttcgttagttacgctggaaatgaggactattcgccttccaacgccactgtaaagataaacgtttaccctctagtggatctgaaaataaacaaaacggctaacgtgtctaaggcttttgtagataacatgattaagtttacagtctcggtggtcaacgacggtccttccaacgctagcggagtttacgtggatgagacactgagctccatccttgaccttatctccaactccagcacaaaggggagctatgatggaaacaaatggctggtgggcaacttgaataacggtgaaagtgccagcctcacgatagttgccaaaatcaaccgtgctggcataatcagcaatgatgtgactgtcaaggccaatgaggccgactccaatcagtccaataataactgttcaatctccatcgaaggtctgatgattgaaacggtactgacagttcccaatgtgacttcaagctataatatggacaagaatttcaccatcagcctcaaagatataaacggaaacccaattggcgatgcaaatataacggtggacttaaatggcaaaaagagttacataacagacagcaacggacagatcaagctttcaacgacaggcctcgctgtggatacccacgtgctgaacgtcacctttgcgggcaattacaagtacaacggttcaagctcttcaagcaagattgtgattatcaaggattcaagcaaactcaacgccaccgacattattagcacgtataacgatgacgattaccttattgtgagtctcactaactcccagaacaatcccatcgcaggggcgaatgtgtttgtggacctggctggtaaacgcaactacactaccgattccaacggccaaatcaaagtgtcgcttaagaatctcattccagacaactacaacgccagcatcgcatttggagggaacgaaaactacaccgaatccagcaccagtgcgatggtgaccgtgaaaagggccaagacctcattcaactacaccgatatgaatactgtcgcgttcgattcaaaactggagggccgggttggagaatactttaaattcaaactgctggataacaacggaaagcccattgccggacggcaggtgttcataggtttcaatggagtgaaatacaatagaacaaccaacgagaccggtgaggcccagctgcagataaaccttaagtacgccaaccattacacatttgcaatcgcattcctgggagatgactgctacagcgggtcattcaatgtggcgctgattagtgtgactgaacagactccggttctaactacaagtcctaagacctacaagagtagcgctaagacaaaggtgttgaccgctacactgaaatccagccgagagagtgcccttcccggcaaaaaggtcactttcaccatcaacgggaaggtgtattctgccaacacgaatgaggatggtattgctactgtaaaggtcagcctaagcaagaaaggaacctatagttttacagtgcagtttggcggagacagcacctacaagaagattaccaagagctcaaaactgacgatcaaatga

SEQ ID NO: 3462 - DNA, 5061 bp, synthetic construct
  source 1..5061: mol_type = other DNA
atggataaaaaggtgagtaaaacgaataaaaagaaactgctcctgtctattctcatccttttcagcatcctggtaagcctgagcagcgtttcagctgcaagtgatctgatccaagactatgaggatttgacgatccaaaatagctacgacgatctcatcattcaggactcgttcaacgaagacttgatccaagattcttctaacacagagctgaagacccaggactcatcgatcgacaatctcaaagagactatcaaccagacagagagcattgatgacacattgactaaccaagatctgtcaagcctccaggactcttcaaaggagaatataaaggattccaacctgaagagctcaagactggggaaatccataaccgtgaagggaaatacatttcagtccatccaaagcgcgatcgacggtgctgaagctggagacaccattattctaagcgagaacatgtttaagggggataactattacggccttggcgagcagatctatatcaataagtccctgaccataatgggcagttctcagttcggcagccagtatataattttaaacgcactccatagttcccgtatcttcaatatcaccgcagataacgtgacaattagcaacattcagttcaccaacggctacgtcgtaggtgaacccggaggagctatctactggtttggaaacaatgggaagattatcaattcttacttctcattgaactgcgccaattcctctatggaatgggacattgaaggaggggcgatttacttcgggctgaagttcaaaaatcagtacattgaaaattgtctgttcaaatacaattctgcctatgatggcggagcactgtacacctgctcgcagaataccaccatctcaaaatgtacgtttgactccaacttcgggatctcgaataatgctggtggcatggccaacggtgcggctctcagtttttccgctaaagacgtgtacgtgattgattccacgttcctgaataacgatgctccagaaggatgggggggggccgtgtatatctataaacacgggtatgaaccctatttctttaattgctcctttaagaacaactctgcagctttcgggggggccatatgttggcttactgatggcgggacattcctgaattgcacttttgagaacaaccacgcaaccggcggtgacgctattccccatggtggtgctatctataaaatcgggcgcaatggaggcaacattataaattccaccttcacacgaaattatgcaacgaccggcagtgccatctacctcaacgcttacctgaacatcgacaactgcactttcacggataaccaggctgatagtgaaggtgccatctacataattactgacaatgttacgatacgcaactgtctgtttgacaagaactacgcatataactacggcgcggccattttttcttgggaccatgacaatatcaaagtggaaaattccagattcatcgaaaaccacgctcgcaatgaaggtggcgccatctacttcctcggaaagaattgtcagatttacggctgcctattcgagggcaacagggtgagcaatttttactcgttcgggggtgccgtcttcatggaaatcagtggtgaggatacttccatcctcgattgcagcttcaagaataactctgctctgtataagggcggagccctatacatttcttatggcagctcggagaagattgccattataaattccagttttgaggacaacagcgccagtaatgggggtgccatccaggcggactggaatctgagcctgatcgccaactcaagttttgaggataattctgccagttacggaggggccatccaggtgtttgggagtgtggaccttatcgccaactccagctttgaggataattcagcaagttatggaggtgcgatacatgtgtttcggagcattggcctgattgccaattccacctttaagaacaattacgccaacagtttagagattaaccaatccaaagagtcctacgggcgggtgtttacctttaagggcaaggaaaactatattaacgctatctacacggaagactacagtctgaacttcgagaatgtgacctattgggacgggtcatttgtcaccagcggcagccccatcaagagtgactgtgaggcaggcattaagatccgaatagtcctgcgccaaggcgtgtcggcgggtcctgtggttttaaacatcacaaaaataaccaacatcaagggggaagtggtgtttaacgagtacaacgggctttctcccggaatctattattacgaggcctatcaccctaaagacagctattactcagagtcagagaagctcagcggcatgatcactgtccctaaaaaagccactgacaacacccttgctatctcgctcgacgactcaatctacggggaagaccttaaggtgaatgtcaatacggacgtctctggagagtacaggatctatattgccaattccaactatgatgcgatattcaccgatgacgacgtcgcaaagggcaacgtcctggcctacgatatcacagtaaacgagaatgagctcaagggaaataaatggacaatcctcaaaaactctctgaatgtgaagaacggatatggcgcatacatccagtttgcagacctggaggacggcgagaactacattaacatccacaacaggacctccttcaacgtctacaaggccgaatccagcatagatgcaaatgaaaccattgccattgagggggacggcgctgaggtaaactacaccattgaaaacgggacggctagcatagacaacatcagacggggctctgccatcctggaggaaggcacggactataactttaccgtcacgccagataagataatcatcactggcttggatatgggcaattatactgtgaaactgaaaaccatcgtggattccaactacaacccttcaaccaaagaagtcttcatttgcatcctcgggcgaacagccattgacgtgcaggagtccgtggccattgagaaggataagagctacctgttaagtccaaccctcattcctgaggacgcagggaccctacgttacatcagcaatgatgaaagcatagtgaaggtggactctaaaggcaatctcactgccatatctgagggcaacacaaccattatggtcctctttgatggcaacgatatctacgccccctccaatgctacagtgaaggtctctgtctattcaggaagcatgcccacatcaatcaaagtcaacaagtcatttgaactgtacatggatgaatccatcgatatgggtgcagtgcttgacccggcaaatgcaggaaacctgacttacaaaagcagcaacgaaaagatcgtgaaggttgacaattatggaaagataacgggacttggccaaggcaaagccaatataactgttagcttcagtggaaacgagaagtttctggccagcaacgctaccgctttggttacagtttacccgctggtggatttaaaaatcgctaaaagtgccaacgtatctggtgaggtctatatcggggacaagatcaaatttgtcatcactgtctccaacaacggcccctccaacgcaactggggtgtatgtaaatgaggcgcttaactcgaacttggtgttggcttccaattccacaacaaaaggcaattacgatggaagcaagtggactattggcaatctcaacaagggagaaacagttaacctaaccattatcgcgaacgtaaaatcggtgggtaacattgacaacaaggttattgccaactccacagaacgcgactccaattacacaaacaatatcgccagcatcagcacaatcaaggcactccccatcgtggatttgtccatcaatgtgacgtcgaacaaaaaatcactgaacgtgggagatacattcacttatacaattaatcttattaacctgggtccttcaaaggctacaaacattatcgtggatgagttactgagtcagttcattgagctggtcaatgtcaatctgagcattgggaactacgacaactccaccagcgtctggtctgttgaccagcttgatccgaatagtccagtgagcttaaatctgactgttaaggccatccgggccggcaagattgagaacagtgtcactgcctattccaatgagaaggactccaacgagtccaacaacaacttcacactgtctatcaactgcgtgaagattaatacgcagttgactgctaataacattacgaccagctataaccttaataaagacttgatcattggactgaacgacagcaagggcaatccactgagtggttttatcgtgagcgttgacctcaatggcaagaagaactacacaaccgattccaatgggcagataaagattcccaccaagtctctgattccagacacctataatgccacaatcagattcgaaggaaatgagaagtactactcctctcacgcgagtgcaatcatcgtggtcaaaagggcaagcacatcattgaactacacaaacatgaacaccgtggccttcgactcaaacatagaggggcgggttggcgaatacttccagttccagctgctggacaacgatggcaagccaatcgccggaaaacaggtattcatagggttcaatggagtgaagtacaatagaacaaccaaccagacaggtgaggctaggctccagatcaacctcaagtacgccaaccactacaccttcgcaatcgccttcctcggagacaacaactacagcggggatttccaggtagcgctgatcaatgtgacggagcagactcctgttctaactaccagtccgaagacctacaaatccacggccaagaccaaggccttgactgccactctgaaatcttcacggggccaagccctggcgggcaaaaaaatcaccttcaccctgaatgggaaggtgtacagcggaaacaccaactcggacggcatcgcgactgttaacgtgagccttagcaagaagggcacctatagctttaccgcccagtatggaggcgacagcacctataagaaggtgactaaatcctcaaagctaaccataaaatga

SEQ ID NO: 3463 - DNA, 1302 bp, synthetic construct
  source 1..1302: mol_type = other DNA
atggagtttgaaagaccacgcgggactagagacttcctctttgaggaaatgcgagagcgaaagatggctgaagatactctgcggaatgtctttgaaaattacggtttcggcgaagtgcagacacctctttttgaggacctgaaactgttcactacgaaatccggggaggagattgtcgatcaactgtacaacttcaaggacaagggcgatagggatctggcccttaggccggagatcaccgcccctattgcgcggctctacctgaacgagctccagaagaccagtaagcccatcaagatctactattatggaagctgcttccggtatgaaaggccccaaaagggcagattccgccagttctggcagttcgggtgcgagctgattggggcaaagacgcctgagggtgaggctgaagtcattgcgatgtgtaacaatgccatcgaagagctcggtataactaccgccgaatttaacgtgaaccacctcggaatcatccgcgggctctttgcccatttcgacattgacacagccacccaaagggagattatggtggtgatcgataagggggacaaggatctattgaaggactccctggttggcgagaacccaatcataaaggataagccagagctgaatgaggtgctgttcaaactgatggacatggtgggggattcatcgatcataaaagacatagaagagcttgtcgctccctacgaggagacccaggaggcactggaagagtttaaagagctcgtaaaaaccctggaaagcttccaggtgttcaactacaaattgaaccttggcgtcgccagaggcctcgactactatacaggtatcgtatttgaggtgtatgtggaaggactgggcgcacagaagcaggtctgcggcggaggtacctacaatctagtcaagctattcggcggggaggatgtggtttccaccggatttgcactgggatttgaccggctgatgaacgccattgaagagcttaatggcaaagttgaattggaaccgattgtgaacacttacgttgctgcaatctcagacagtacacgacacaatgctttcagcatcgcccaggatctgcggaaggccaacattcccaccgaagtggacctcagccgcaagaaattcaaaaagatcctggcttatgcgaataagatagatgtgaaatacacagtgctggtaggcgaacgtgacttggaggaaggaaaggttacaatcaaggacatgttaacgggagagcaggagttggtcgccatcgatgaggtggtggactacatcaaaggcaaattatattga

SEQ ID NO: 3464 - DNA, 414 bp, synthetic construct
  source 1..414: mol_type = other DNA
atggagctgaacttccggctgaacatggggggagaggacctagtcattgcggtggcccaggactacgaaacaaacgatgtgctcatggtagctttcatgaacaaggaagctgtggaacaaacactgaagaccaaaaaggcccactactactccaccagccgccagaaacaatggctgaagggcgaaagctccggcaatgtgcagactgttaaggagatgtatattgactgcgatgcagacgccatcatcatgaaagtcgaccagatcggggccgcatgccatgagggctacaggtcgtgtttctttagacagttggacattgataaggagaatatagacctggacagtcttacggatgaggatatcagcataatctcagaacgactctttgatcccaaagagatgtatggatga

SEQ ID NO: 3465 - DNA, 2163 bp, synthetic construct
  source 1..2163: mol_type = other DNA
atggattttaacgactatgactatgactcggagtacaacaatgacgaagaagaatacaatgatgaaattaaaagaattgtgccagatactagtgcaatcattgagggcaatgtagaaaagatcataaaggaaaaggggctgaactaccccgagataataattccagaagctgtcattgccgaactcgagcaccaggccaacaaccagcgccctacaggactacggggtttggagaacctcaagaaactccaggaaatggccgagattggagagctgtcaattcggatcaccggccgtcgcccgacaaagtttgagaaggacaacgccaagcttggcgagatcgacggtctgatccgggatgtggccaaagacgaattggctctactcattacaagcgacaagatccaggccaagacagccgaggcccagggcatccccgtcatctactatgctcaagagtacaaaggctcaatcgacctgaagatagccaaattcttcgacgaggagacgatgagcgtccatctgaaggagaacgtgccccctatggctaaaaaagggaagcctggccatatcaagcttgtgaagctcgcagacgaaaagttcaccttcaagcagctggagtttatcgctgaggagatcctggagaaggagaggtacgaccctaagacctatcttgaagtggaccgccagggagcgattgttgttcagtcacgggacctccggataagtattgctaggcccccatttgcagaggccctggagatcactgccgtgcggcccgttgcggaggtgtcccttgatgagtaccacctctccagccagctgatcgacagactcacgaacagtgcacgtggaatactcatttcagggtcgccaggagcaggtaaaagtacgtttgcccaggcaatcgccaaattctacgacgaggacttgaataaggtagtgaagaccatggaatctccccgcgacttacaggtggcggatacaatcacccaatatgccccgctcgagggggatatggaaaagactgctgacatcctgctgctggtgaggcccgactttactatctacgatgagctgaggaaaaaccacgacttcagcatatttgcagacatgaggctcgcaggagtggggatgatcggtgtggtccacgcgactaaacctattgatgcaatctccaggatagccaaccgcgtggacctggggacaattccgagtattgtggatacaacgatctacatcgagaacggggagatatctgccatctacgaaaacaagttaacagtgaaggtgccaactggaatggaagagcgagacctggctcgacccgtgattgaggtccgggactttgagaccggcacccttgtaaacgagatctacacctacggggagcagaccatcgttatggacatcggcatggttgaggagtctaaaaaggccaaagataaggaggaaaagacccccgtccaaatcatcgccgagcgagagatcctacggactatgaaaagaatagtccctaaggctgcaatggaagtgagcatggaaaatgacagaagggtgaatatctacatgagtgaaaagtacattccgaaagtcattggtaagggcggcaaaagaattgccgagctggaagaggacattgggatcagcatgaacattgaacctctggacaaggctcccgacagcttcagcgagcgcttatccaaaagatccaagaaaaagaagtctaaaaaggagaaaaagaaaaaatccaaaaaatcagggttgaaggaatacaatggagtagaggatggcgaattgtctgaagatggtttgaaggactacaacaaggataattacttcgacttcaccgacgataatgaggattattatgaggattatgaagattacgatgattcggacatcctggaagatgattatgaagagcttttctatgacacctttgaggtcttcccaaaagttagaaagagccgtgtggaactgccaatcggcaaaaagtatgtgggcaaatcctttgacatcttcattgaagatgagttcctgttcaatgcgaccgttagcaaaaagggaaatgtcaaggtacacaggaagctgaagtcctatggcaagatcgtctccgccctggatgcgggagatcgaatcattgctaaggtgcgcaaatga

SEQ ID NO: 3466 - DNA, 768 bp, synthetic construct
  source 1..768: mol_type = other DNA
atgaaactgggtgcgtcaattttccctcggaagattattccaatcgaaaaatccctggattattttgaaagcaaccgctacatcgagtacatggagatatttcacgactacccaaacagggacattgatgttgaaaaggacctcattgacaagttcaacagttacgatctaaagtacacagtgcacgcccccttcatcgaggtgaaccccgctagcgtgaaccctgcccttgccaaggcatccgtagatgagatcaaaagaagtgttgacctggcaaacttgctggattccgacattgtcgtgatccatcccggacgagccatatttacaaatgatatggaatatatggcctctgtctacagaatcgctgaggagaacctcaaggtgatcggagaatacgccaaggacaatggggtgatgacctgtatcgagaacttgccccgtctcagggggttcatgtatcaggacattaaccagctgaatgagaccctagagcggacgggtctcccaatgacccttgacatcggccacgcatacactgcgggcttcgatgtggatgatgtctcgttcgattgcataagccacatccacatccatgacaatgacggcatccgggacagccatctcccgttaggggaagggatcattgacttcaaacgcttctttgaaatctttgacaaatatgatggaatctataattttgagctgggctcaaaggagtatatagagaagagcatagactacctgaaaggcctgaagctgatttga

SEQ ID NO: 3467 - DNA, 774 bp, synthetic construct
  source 1..774: mol_type = other DNA
atgaagataggagcttcaatgctcgcaacagaagacaagacaatgaaagaatcccttgactacttcgatagcaacaaatacatcgaatatgtagaaatactgcatgactacccctatagagagctgaacgacgataaggagctgattgacttgatcaactcatatgacctcaaatataccatccacagcccattcattgacctgaatatcgcttccctgaacagcgcgcttgccaagctcagtgttgaagagatcaaaaggtcgattgaccttgctaatatgatagacagcgatatcgtggtcgcccatcccggctttgtgtcctttaacgggcggggcaaggaggatataatctacgagatcggacgcgaggggctagtggagattggagattacgccaaggacaatggcgtcaacgcctgcatcgagaacctgccaaagattgaagggttcatgtaccaggatgtgaaccaactgaatgatacactggtggaattggagctccccatgaccctcgatattggtcacgcccacactgcgggcttcagtccggacgagatttactttgactctgttaaacacatccatgtccatgataatcctggtgacgatgatacccacctagcactgggcgatgggacttttgacgtgaatggcttctttgacgtgttcaccaagaatgggtatgacggcatctacatgttagagttgaaccacatcgatttcattcagaaaacgctggactacatgaagaacctcggactgatcgactga

SEQ ID NO: 3468 - DNA, 1302 bp, synthetic construct
  source 1..1302: mol_type = other DNA
atgtggaatgaagaaatagaaactatgccccgggaggacatttacgagctgcaattgaagaagctgcagagcactgtgaaacgggcctttgacaagataccctactacaataaaaagtatagtgaagctaacgtgttccctgaggacatcgagactttagaggatatcgagaagctcccattcctaaccaaagatgatctccgcgcctgttacccctttggaatgtttgccgtggataaaaaggaaatcattgaagtccactcctcctccgggactacgggcaagcccgtagtcagcgggtacacgcaaaatgacatagacaactggggggagattgtggcccgcgggcttaccatgatgggcctggacagtgacgacatcatccagaacacccacggctacggcttgtttaccggagggttcggcgttcactacggggcccatagactcggggcaaccatcattcctatctcgaccggccagacacggagacaggtggagatcatggctgatttcggcaccacttgcctgattttcacaccatcctatgggatctatcttggagaggtggcaaaggaggagggcatagattttgacaagctcggcctgaaggccatcggctttggagcggaaatgtggactgctgagatgagagatcgcatcgaggagacattcaagaccaaggcatataacatctacgggctaaccgaactcatgggtccgggagtcggtatcgaatgttctgcgcaaaacggactgcacattgctgaggatttcttctatccggagatcatcaaccctaaaaccggagagaccctggccgagggcaaacatggcgaattggttctgacgaacctggaaagggaaagcatgcccattataagattccgcacaaaggacctgacagctcttcactatgacacctgcaaatgcggtaggacactggcacggatggaacgaatcacgggcaggtcagatgacatgatcaaggtcaaaggagtggccatcttcccatcacagatcgaaaaggccctcctgaaggtcagcaatattgagcctcattaccagatcatagtcacaaggccagacattatggatgaaattgagattaaggtggaggcttctgcctccctcttttcagatgacatcaaagagatgatggccgtaaaacgaaagattggagagtacatccagaatgagacgggtattgcagtgaacgtgagtctggtggcgcccaagagcattccacggagcacaaaaggtaaaatacagcgagttatcgacaagcgtaacttacactga

SEQ ID NO: 3469 - DNA, 435 bp, synthetic construct
  source 1..435: mol_type = other DNA
atgtacaaaatcacacaactgagcatattcctagagaaccgcagagggaaactctacaacacactgaatctgctggctaagaacgacatcaacatccgggcactgttcctggccgacacgaccgaatttggcatcctcaggcttgtggttcaggaccccataaaggcgaaggatattctggaagagaacgaccatatagtcaagatgaccccgatcatcggcgcagagctcgatgacactccagggggactgagcaccgtcttgaaaattatcaaggacgaagagatcgatctcgaatatctgtacgctttcacccacgagaaaactgagaaggccattcttcttttgcaggccgatgatctagacaatttgattggtattctcacagcctataaggtgcctttagtgcccgccgaagaggtatacaatctgtga

SEQ ID NO: 3470 - DNA, 951 bp, synthetic construct
  source 1..951: mol_type = other DNA
atggtcaaagtatgtatcattggagttaccggcgtgatcgggaagaatgtcgcgtttaaattggcacgggccgacactgtagacgaaatcgtgttcttcacaagggagaaaagcctatccaaagctaaaggagagatatacgacatgtatgacgcactggcggccgaggatatcgactgcaagctcactccaacgtcagattacaaggatatggctggcagccagattatcctgatcacagccggggccccaagaaaggagggaatggaaaggtccgacctggcacacaccaatgctcagattgtctataactacgcaaagcagatagcaatccacgcccccgattcaatcattctcatcgctaccaatcccgtggacgtgatgacagctgtggctctggaagcctcgggcttcaacaagaaacgtgtcatcggcctcggaaaccacctcgattccttaagactgaagacgtacttcgctcggcgcctggacattaacagcagtgaggtgcacacaagggtggtgggcgagcacggggagcgcatggtgcctctgttgagctctaccacaatagggggtattccactcaagtactttatcaaggatgtgaagctagacctccccgacattgtgaagacccttcgaaatgccggaaacacgatcatttccaagaagggggcaaccgagtacggccctgcctatgccatcagtaacttgatcaccaccatcattacaaacatccataagatactgactgtaagcatgtaccttgaaggtgagatcgccgatgtggaaggcgtctgcctgggtgtgccggttgtcctgtctaaaaaaggcgccgccatgattgttcccattcatatgaacgactatgaggtgaataagtttcaaatagcggcgaatcatgtccgggaactgactaacgaggttcttgagcgcctggaaaaatga

SEQ ID NO: 3471 - DNA, 2505 bp, synthetic construct
  source 1..2505: mol_type = other DNA
atgtacaaagatgcgattttagtccggggagctaaagtacacaacctaaagaacatcgacgtggacattcccctgggaaagatcgtggctattgctggcgtctccggaagcggaaagtcttccctagccctgggagtgctgtatgccgagggctccagacgctaccttgaggccctatccacatacacacgccgaaggatcacccaatctgagaaggccaatgtggaatctgtccagtatgtgccggccgctctcgcactgcatcagagacctaatgttcccaatatccgaagcaccttcgggacttccaccgagctcctgaactccttacgactgctatactctcgctgtggcagctatatctgtccaaatggacatatcctcaagccttcattgaacgttgcacgggagattgagctggaatgcgatgtctgtggcgagcgcttctacgggcttggcgctgaggaatatgccttcaacagtgacggggcatgtcccaattgtagcggaactggaatagaacgtgtcattgacgactccacactcgtgcccaatgaaaacaagaccctcgaggaaggggcggttgaatcatggaacatgtttggtatcaactggatgtaccatgtggctggagagcttggcgtgcgggtggatgtgccctttaaagatctgagcgataaggagaaggaaatcgtgtacaagggtccctctgtaaagagatacattaacattccatctaagaacggaaagctattcgagctcaacgcagaatacagaaacgcccacagggccgtggaggaggccctgaagaacgccaagactgaaaaagggcttacgcgtatcaacaaatacctcaagatcagggagtgcagccagtgccatggcacccgcctcaacaaacgtgccaacagcactcttttagggggtatcaacattagccaagcctgtcagatgactctagaagatatcgtcaaatggattccaaatgtcatcaacaatctgccaaaggaaatgcaggatatggcaaacaacattgcagaggagttcatggacaacgccaagatcctccttgacttggggctcagctacatctcactggataggccaagcaataccctgtccacgggggagctgcagagggtgcagcttgcccgaaccctccgcaaccctaccacaggggtgctctacgtgctggacgagcctagcataggtctgcaccccgccaatgtggaaggcctgatcaaagtcatgaaccggctgatcgaggatggcaatagcatcatcctcgtggatcatgacgttcggatcttaaggatcgccgactacctgattgagctggggccgagtgcaggttcgaatgggggaaagatcattgctgaaggcaccatcgacgagataaataaaaacaaagaatcactgattagcggattcctctcgaacgaggaaaagattatcattaggaaaaagtcagacaagaactccatattcaaaaacggcagtattgacatttcaacgtgccagatccacaatgtcaagccgatggatattagttttcccaaaggcaagctcactgtcgtaagcggggtttcgggcagcggcaagaccaccttgctcctggaatcgctgtatccagcggttaaatcattgatcaacgacgaaaatatccctaacaatataaaatccatcgacgccaagaacattaataaaatcgagcttatcgatagcgttccaatcggcaagaacgtgagaagcacagtgagtacctatagtggcgtattggatgacctgcggaagatatttgccaaattggactcctctattgaacggaatctgaaggcatctgacttttcatacaataccggcagcctgagatgcccatcctgcaacggcaccgggacaatctctatggatgtccagttcctccctgatgtggagatcacttgcccggactgcaacggcctgcgctattcggacgaggctggtgaaatcatgctcggtcacctgtccattagtgatatcatggcactgactatcgatgaggccattgatgagctgtccaatattgaagacgagagtatcgaccctctgctgaaaagagcgataaataaactggctaaactgtccaatttgggccttggatacctcacaatcggtgagtcaacacccagtctgagcgggggggaagctcaaaggttaaagctggcgtctgagatcggcaaatcccagcggaatagtatattcatctttgatgagccctccataggtctgcaccccttggacgtgaaggtattgcttaacgtgttccagacactgatagacgacggcgccaccatcatcgtgatcgagcacgacctcgacatcattgcaaacgccgactatataattgatattggaatagacgacaagcacatggggggagagatactggcgaagggcacgttggaagatattcttaactctaaggatagtctgacggctaattatctgaatgagattaacttgtga

SEQ ID NO: 3472 - DNA, 498 bp, synthetic construct
  source 1..498: mol_type = other DNA
atggtaaatgagaagatggaggcagccctgaatgcccagctgaacgcagaggtgtacagtggatacctctatttatccatggctgcttactttgaagatgttgatcttgcaggctttgccaactggatgagggtgcaggcagccgaggagttggaacacggaatgaagttctatgactatctcatacgcagaggcgcaagcgtgacccttacagctattgacgccccacagacggagtgggaaagccccctggccgccttcgaacacgtcctcgagcacgagaagatggtgactggtctgatcaacgatctagtggacctggcgatcgaagaaaaagaccatgctaccaacaacttcctgcaatggttcgtcgaagagcaggtcgaggaagaggaaaacgccatggagaatctggctaagctcaaactggcgggcgatgacaactcactgttgtacaaactcaatgaggagtttgcggggcggggggccgccgagtga

SEQ ID NO: 3473 - DNA, 156 bp, synthetic construct
  source 1..156: mol_type = other DNA
atggtctttgtgtgtgacatctgcgggtatgagtacaatcccgaagctggcgaccccgataacggtatagagccgggaaccgccttcgcggacctccctgacgattggacatgcccactgtgcggcgccgagaaggcagatttcgtggaggaatga

SEQ ID NO: 3474 - DNA, 159 bp, synthetic construct
  source 1..159: mol_type = other DNA
atggctcagcaccgctgtactatctgcggctatgtctacgacagcgagacgggcgaagagagaagggacctggccgcgggaaccgaatgggaggatgtgcccgacgatttcacctgcccactctgcggggcagtgaagacaatgtttcgggcccagtga

SEQ ID NO: 3475 - DNA, 618 bp, synthetic construct
  source 1..618: mol_type = other DNA
atgatttccctgaagacaatagtaatcaacgcaggtcctaaaaaaagggggttcaatgcggagatggccaagtctgctctgaggggcgcccagagtgttggtgcggaagtggaatttatagacctgtaccgcctgaagtttacaggctgcctgagctgtctcatttgtatgagagatgactttgaaagctgcaaatgcttcctgcgggacgacctgagccccctaattgaccggatcttggatgcagattgccttctcattgctgccccaatcttctttagcaacccctcaagccactacatggcccttttggagcgactgatcttctgcatagtgtcaaacaagggagagaacctgttcaagggaaaggtcaacgtggggctaatctacacgttccactatgacaagggctattttgaagagtctgtccgcccgcatttcaagcacagtgaggacatcctcaagatgctcaatggagaggtggagatctactccgctgagtatgattccaagaaaacctactccaccagctttgatggcgaaattagttcggaagacgagtgtttcactctcaatttagaaaaaacctacgagatcggggccaaactgagcaactga

SEQ ID NO: 3476 - DNA, 411 bp, synthetic construct
  source 1..411: mol_type = other DNA
atgttcaagaatattctcgtggctagtgatggctcaaagtgcggggacaaggcagtggacatagcgattgatttggctagcaagtacgacgccagggtcgcggccctgtacatcatggacttcggcctggacctctcctatgacgatatggacgatgccggaggggccgtactggatgatatcacagccaaaggtaaagaaaaggacgtggttgtggtggagcacattatcaccgcagacccgattcaggatatggaaaccatgatccgcaagatcaacccagacatcgctatctttggagccttcgggaagagcacggacaaagaggacaaaatccggtacgataagataggcagagtcgcccttaacgcactgaaggtggctaaagttcccgtcctgctagtgaaatga

SEQ ID NO: 3477 - DNA, 1722 bp, synthetic construct
  source 1..1722: mol_type = other DNA
atgatcagtattaaaaacttgtccaaatcatataaattagagaatggggaagagctgcccgccttaaaaaacattaatctggaagtggaggatggcgagatcctcggaatcatcggaaccagcggctcgggaaagaccacacttctgcgaatactgcgcggggttgagaaatttgacgaaggggaatttaccatcggcagatacaccattaagccggactcctcccagttttactacaatcaagtcaagaaggaaactgccatccacttacagcgctcatttggtatttggcctgaaagcgtgctggacaacgtggtgcgaaaactgtacggggccaaatacggagacgagtctgggacggactttgaaatcgctcatgaccaatttgacaaggaggctatggagatcatcgagctggtaggcctggagcataaggctgatcatctcgcctcggtcctgagcggcggcgagaagcagcgccttatcatggcccgtcagttggctaaaaagcctgcggtcatgctactcgatgagcctgccacgatggcatgtcccaagacaaagcaggaaatactggatgctatcaagaaaatcaacgatgaacttggcataaccgtaattctcgtgagccacctgcccgagatccacaagttcctcgctgacagggtggtcctgatggaggacggtgagatagtcaaagacggagatgtcaacgaagtggtggatgagttcctgaaggacattgaggaacctgtggacatagacatcgaatccactgacgaaaccataattaaagcaatcgatattgacaaaaggttctatttgctgaagggcaaaaacgtgctccatatgaaagacgtcaacctggaagtcaaccggggaaatgtgctctctctcgttggcccaagcggtgccggcaagacagttctgctgcggatgctcgggggtctcgactatcccgatagtggcgatgtgctcttcaagctggtcaataaggaggatggagaggaagagatccggtgggtgaacattgagaatgcaagccttgacaggatggaaatcagacgcaacctcggcttcatgcaccaggaatttgctctgatgtattacgccacaatccagagtcagctggcggtcaagctagggtacaaacggtgggatatggtagaggaggccaaaaagagagcgaaggaaaatggccttccagatatcttgttggacgcactgtaccagttgacagaccttcccgagcgcgaggcgaaggcacgtcttgagcagattggtctggacccaactatactggatgaattattccccaaattccccgagactcagatcaaggaggaggttaaggacttgtttgaagcccttgacctgccgctcgatatcctgccaagaaggagctatgagctcagtggcggtcagaaggtacgagccatgctcgcactggttttggtgtcaaagccagatattctcctgctagacgaaccgttcggggacctggaccctaagaccctgcggatcgtggccaactccctgaagagaatctgcaaagagtttggaacaaccctggtgatggtttcccacaatacggacttcattaaggagctaagcaacagggccgtgttcattgaccaagggcacctaaaagacgatagcgaggatgtggataagcttgtggatgacttcattggattctgcaaggccgattacctgatgtga

SEQ ID NO: 3478 - DNA, 2586 bp, synthetic construct
  source 1..2586: mol_type = other DNA
atgaatattaacctcaaaaaaatcaccttcctgtgtctggttctcgttctcatcgggttgatcagttttaactccatcagcgctaatgacttaggcactgtcctggaggacaatgacaataacggcttgaatgacctgaacaatgacgattttatcaattcagacgtgaacagtgatagtatcaataaggaagccatttctaatttgaaaagtttaaatagtcaggatgaatctaccagctccgattctaataactctgcgagttctaactctaatagctccgttgcttctagctctaatagtagcgccagttccaattcggcgaatagcaacagttctactagttccaattccgccaatagcaacagttctgtaagttctaacagcacgaactcgaatagttctgccagtagcaattcgactaactcgaacagttctgccagttctaactctactaatagcaatgcgaacaccaataactccagtagcgatgcatctaaaactcaaacgatcaaactgtcctcgcaggaggaaagtgccctgaacgagttcctcaatgccatcaaaacaactactaaaggcacaattgttctcaaaaacgatctagtgctgaatcagacgatctcactgaacaacaacattaccatcgatggtaggaatcactccatcagctccctcgatgtgaccaacatgtttaagacctttgcaaagatcacccttaaaaacattgtctttacaaactaccatgaaatagagaatctgcgggcaatacttaactccggagaattgacggtcctcaattgccagttcaacggattttcatatctgaccaacggctcagccatctataacagcaaaaagctgaccgttcaggggactaagttcaacaacaattatgtcaataacagcggcggggccatctatagcacagggaccctgactataaacaattcctcattcaacaaaaaccacgctggcaaaaatgggggcgccatctattccactctcaacctaatcctcaaccagtcggtctttagcaataactccgctaatgaaagcggaggcgctctctactcaaaaggcagcggacttaatatcaaatattcccgatttaacaataactcggcttcactcaatggtggtgcgctctacagctcctccaacagtacggtgatttcctactcaaacttcgtgagcaactttgtggaggcctatgacaaagcgagcaacggaggggcggcatttatctactatggatctaaaattgcctactcaaacttcacctctaaccactgcaaaacaacgcttaccaacagctctcagaagaagtccattcagtcaatggggggagctctgttctactacggtggaaatcataccctgagcttctccaattttaacaagaactcggtagagaacgacggcggggctgtgcgcatcgccaagaacgtggggaaatttacattgaacaaatgtaatttcacaaacaacaacgcctcctatgaggatgggggcgccatttccttagcaacccccaacatcacaatctccaactccattttcaagaataactttgccaatgaggacggaggagctattgacaccttcagtctaggaagctacaaggtaaacgtgttgattaagaactgcctattcaattcaaacaccgcattcaaggctgcaggtgccatatacctgggagtgaacactgtccaatccatcgtgaactcgaacttcacaagtaataaggcaaccgttgcaggtgcattctacatagaatccatttcagtgagcattagcaattgcatcttctcatccaataaggcggacaacgtgtccaagaagacaatatacaacaagcaaggcaaggtcgtctcccattcaggaggggctgtattcgtgaagaatggcagcaccgtcaccattaaaaacagccttttcaagagcaacaaggccacctcaggtggggccatcaccaatcacggcaagatggtcattgacaagtgcaacttcacaagcaattctgccaccaatgggggggctttatacggcgggggtaagacaagcacaatacgcaattccatcttctacaagaatagcgccacaaaaactggcggcgccctgttcatcaacgagggcaacgtcaatatgaaaagcagcatgatcgtgtcaaacactgccaaatcctactctgtgtacagcaccgtgtcaatcacactgaacaacaactggtggggcaacacactgagcattaaggacaagtccccaaagacgctgggcctgaccaatgttaaagtgagcacttggctgcacctgaaaataagggctaagaccactaagcttgctaaaggtaagaccacaacactgaccattgacctgagatataacaataacgataagctcgtgtcaactgcctttaacaatccgctgacgctgacggtgtccgagggcacgctgtcgagcaagaaggtgaatcttaagaacggcaaggccaccgtgaagtttaaaaagaccaactctaagactgcagtagtgaaggtcaagctcttgggaaaaacagcacggtgtaccatcaagacgaagtga

SEQ ID NO: 3479 - DNA, 1056 bp, synthetic construct
  source 1..1056: mol_type = other DNA
atgggcatgaagaatctgattttaagtaagagcgatcagttcaaccactacaaggacaaggccaatcagctcaaaaaggagaacaaggagctgaagcttaaaaacgaggaattggagtttaaaaacaatgagctgagtccggagctggaggagggaattagcctcatcattcccagctacaagggggagaaccatatccagcccctgttagagtccctggaaaagcaaaccatttcaaaagacctgttcgaggtaatcttcatcgtcaacggggaaatggattccacaatcgacattcttactgattttgcgaaatcgaaccctgacatgaacataataatttcttatacaagcgaagggggcgtgagtaatgcccgcaacattggaattaggatcgcaaaacgggaatatatcgggtttcttgacgatgacgacttcatctctgataactatctaaaagccctttacgaccacattgctcccaaccgggttgtgctctctaatttcatcgacatcgatgaggagaccggagaagagatcgggtctcgcctggtcccatactcgatgaacagggagggcatattcaatgatgtggttgtaaaactgacaaacctgtccatcatcaccacggccaagatcatccccgcactggccgtgaagggcacggacttcaacccaaatctcaacaacggcgtggacgtgtcctactatgcgaggctatacccaaagaatcattttgagttttattttgtgagtaaggaggaaggtgctgtctactaccggatacgcagaagcggttccatctcaagacaggaaacttcctatcagttcaatgtgctggaccgactgaaggtcatcgatgacatcaatgaaagctataaacaagttgataaaagcgacgagctctatgtccacttcctgaagatactctttgatgctcagacctacttcattggcttgtacttggatgaataccctcaggaccgagaaaaggtgattgaagaggtgagaaagcacaattttgaatacttctcatacgagaaactcgagggatga

SEQ ID NO: 3480 - DNA, 642 bp, synthetic construct
  source 1..642: mol_type = other DNA
atgtcgtttagtttagaaagcattgggatcaaggcgggcggcagatatgagaccatctacaccaccatgaacaaggctggtgaaatggacgcggccccgatcggattgaaatacattggagactacgatgtggccgctcggatattcgagggcagcaagacgctgaaaaacatccaggagacaggtatctttgtggtaaacattacaaatgacccttcagtctttgcccgctccctgtatgacaacctgaaggaagaggaatttgttaaggatgatgacatcgtgtacctcaaaaatgcagatgcttacttcatagccctggtcaaatccattgaagagatgaagcccgaacacgaccatgtgaacgaaggggcaaagaactacatcataaaggccgagccactgaagataatcatcaataggcagggggccaaggcactcaaccgaggactattcgcattccttgagagccttgtggactatactcgcgtggacatcatcgacgatgagaaaaaggaggagtataaaaagaggttcattgaaaatgagagagtcatccaacgggttgctgaggatgacgtgaaagagaatatggccattctgaaggaaaaaatgattgagaaaggcctggatctcgagtga

SEQ ID NO: 3481 - DNA, 1119 bp, synthetic construct
  source 1..1119: mol_type = other DNA
atgtataatgaaaacgtggccagcaagactaagaaaattttggatagcgcgcttgacgggccaatctccgttgaagatgggaattacctcatgaatctaaaggggtcagagatcttcccgctcctggctaccgcagatgcgatccgagagaaggtggttggtgataacgtgacattcatcaacaactgcaatatcaactttacaaatatctgtaaggtgcgctgtggattctgcgccttcggcaaagatgccgacgaccccgacgcgtaccacctaagcgacgaggaaatattgaagaaggctgagggtgcagtgaggaccggagcccgcgagtttacgctgatgggcggggtcctggaggatgccgacatcgaatactatgagcacctgctcaaactcctgaagagcgagtatcctgatattgagatccacggcttttccccaatgatgattaaagatgctgcactgaaatccgaaatgccgattgaggaagctttcaagatcctcaaaaaggcaggccttggaaccttgcccggtactgctgccgaaatactgaccgaccggtcaagagagatcatatgccccaagaaagtcacaacccaggagtggatagacattatcaaaacagcccataatgcggggatcacgggctctgccacaatgatgtacggccatattgaaaccatggaagaaagggtggagcacctggacatcctgcggaacatccaactggagaccggcggcttcaatgagttcattcccatgacattcatgcatgagtactcccccatattcctggagggccaggagaacctgggagccacgggcactcaggacctaaagctgtatgcagtgagccgactcatgtttcacgacattatcccaaacattcaggtcagctgggtaaagatgggattcagatttgcccaggtgtctcttctggctggggccaacgatttagggggaactctgggtggagacgaattgagtgaggcctctggggctccagacggtgtggatgcaagtatcaaagacctcagtcgccttgtaagggacttaggccgggtccctctcgagagaaactcggaatacaccgaattttaccctattgagctgtga

SEQ ID NO: 3482 - DNA, 537 bp, synthetic construct
  source 1..537: mol_type = other DNA
atgaagaggaaaaaccgtggcctgctgattggaaggatgcagcccgtacataacggccacattgaggtgataaaggagactctggaggaagtggatgagatcattatcggcattgggtcggctcagctgagccacgagctcaaagatccattcacggcaggggagcgggtgcttatgatgcgaaacgccctaatcgaggaagggattgacttgaacaagacctatatcatcccgatagaggacatcaaccgcaacaagctctgggtgtctcaggtcgagatggtcagcccccctttcaagaaggtctacagcggaaattccctcgttcaagtcctctttagtgaagagggatacgaagtaatcgcccccgaattattcgacagaaaggtgctgtccggcaccgaaattcggaaaagaatcttgatggatgaggactggcagtcacttgttccaaaggcgacagtggaaattatcgaagagataaatggtgtggaccgcatcaaacacctgaataaaaaggaaatcagtgagctgtga

SEQ ID NO: 3483 - DNA, 438 bp, synthetic construct
  source 1..438: mol_type = other DNA
atggtcattaagattgtggagaaagatgacgaatactttacaataggcgatctgatcgaggagattaaaaagtccgaccgcgtggacgaagcaggggccatctacagcttcgagggaattgtgcggggcgaagaagagaacctcaccgttgataagctcactctcacattacccgacaaggaaaaaggacttgaacagatagagagtatcgtcgaaaccgctaaggtaaagcatggggtctttgagatcagcgtgatccacttcattggtgagttctatacgggagatcagctgttcctggttgtagtgctgggcccacacaggggcgaaaccttggaggccctgaccgaggtggtggaaagagtcaagcacgagatcgactttaaaaaagaggagctatcaaatcaagggactaagatcatcatggcgggcggttga

SEQ ID NO: 3484 - DNA, 207 bp, synthetic construct
  source 1..207: mol_type = other DNA
atggcaatatcagcccggaacgggataaaaggaacggtcgagtccgtgaaactgggcaaggttatggccagcatcaagattaaagtggaggaccccgcgctcattaccgctgtcatcacaaaggaatctgcagaagacctggacctagctgtgggcgatgatgtaagtgccatcatcaagagcacccaggtgatggtggccaagtga

SEQ ID NO: 3485 - DNA, 207 bp, synthetic construct
  source 1..207: mol_type = other DNA
atggccatatccgccaggaacgggctgaagggaaaaatagaagatgtcaagctgggcgaagtaatggcaagcatcaaaatcgccgtggacgagcccgcagtgatcaccgctgtgattacgcgggaatcagctgaggagctatctctcgcggaaggcgacgaggtgagtgccgttattaagagcacagagatcatggtcgagaagtga

SEQ ID NO: 3486 - DNA, 207 bp, synthetic construct
  source 1..207: mol_type = other DNA
atggccatttcagcacggaacggaatcaagggcacagtcgagagtgtcaagctcggggaagttatggccagcataaagatcaaagtggaagaccccgctctgatcaccgccgcaattaccgccgagtccgccgaagaactagagctggctgtgggcgatgaggtgaaggcgatcattaaaagcacggagatcatggtagcgaaatga

SEQ ID NO: 3487 - DNA, 207 bp, synthetic construct
  source 1..207: mol_type = other DNA
atggcgatcagtgcgcggaacggactaaagggcaaaattgaagatgtgaagctgggggccgtaatggccagcatcaaaatcgcagtggacgagcccgccgttataacagccgtcattacgagggaatcagccgaagagctggctctcgctgaaggcgacgaggtcagcgcagtgataaagtccaccgagatcatggtggagaagtga

SEQ ID NO: 3488 - DNA, 207 bp, synthetic construct
  source 1..207: mol_type = other DNA
atggtcatctcagcccggaacggactcacaggcaaaatcgatagtataaagctgggcgaggtgatggccagcatcaaaatagccgtagacgaacccgctatcattaccgcgatcattaccaaggagagcgcagaggacctgggtctagctgagggggacaaagtgaaggcaattattaagtccacgaatatcatggtggaaaagtga

SEQ ID NO: 3489 - DNA, 1224 bp, synthetic construct
  source 1..1224: mol_type = other DNA
atgtctgccaataagaaattcatccgcgacagtatccacggcaacctccccctaaattcattcgaactggagattctcgactaccctcaactgcagcgccttagacgcgtgaagcagttaggcttcatctatctcatctacccaggagcgaatcactcccggttcgagcattcaatcggcacgatgcatcttgcatcgaagctggcagatcagctggagctgaacgatgacgacaaggacctggttcgcatcgccggccttctccacgatgcggggcatgggcctttctcccatgtatcggaagcggtgtttgatgttccccacgaggagctcactgccttcgtggtcaagaacacttccctggccgataagctctctgagaagttcaacacaagtgaaataatcgacatcatcaatggaaaaggtaaattgggaccgatcatctctggggagctggatatggatagaatggactatctaatcagagattcccactacacaggggtggcttatggcgtgattgataccgagcgaatcatcagcaatctgaagctcgagagggaactgattttggacataaaaggggtgcaagctgctgaggccgccctggttgcacgttatcttatgtacccaagcgtatatcagcaccacaccacgcggattgtcaatgcaatgtttaggagatgtctaaggcacatgattcatcaggacattttaaatcctaaagagatgtacaaatatgacgatgctgacatgatcagtatgtgccgaaactctgaaggcttcagtagggacattatggagcgcattgacaaccgtaggctcctgaaggtcgccaagtcaataccagtcaacagatttgagaaccctgacaagatatttaaaataagcaaggaagagctgctgaaggccgaagaggagatcagccaggacttcaatatagaccggaactacctcattatcaaccttccggagtatccccggttcgatgagatgaaaacctgggtgtcctttggagataaactctaccacttgaatgagatttcaagcattgtcggtgctctgagcagcgcccggttcaactccccagacatttgcttgtacgtgcccaaggaagacctggaaaagaccaaacggatcaagctggaaaactacctggacttgcccgaagaagtgcgaaggtacgatacaatccactttaaccagagcaaactgtttgattga

SEQ ID NO: 3490 - DNA, 555 bp, synthetic construct
  source 1..555: mol_type = other DNA
atgattattatcgctattaccggtgcaagcggggtgatctatggggtggagctcttaaaagccctgaagcagctcaagatcgagacaggcctgctgatcagcaaccctgccaagattgtgatcgaatacgagttggaagaatcagtagaggaaatcaaatcactggcagaccactactttgaatctgaggagatcgactcctccgtgaacagcgggtctttcaagttcgactcggctgtgatcattccctgctccatgaagacagtgagtgcgatcgccaacggctatgcctccaatagtattactcgcctcgcagatgttgccctgaaggagagacgcacccttgtgctggtcccaagggaaacgccgctgcgggatgtccaccttgaaaacatgctgcgaattagcaaggagggaggcatcatcctccccgcgatgccagccttctaccatgaccccaaagacataagcgacatgaccaatttcatagttggaaaagtcttggatgtcctaaagatagataatgacatgtttaaacggtgggagaaggagtga

SEQ ID NO: 3491 - DNA, 564 bp, synthetic construct
  source 1..564: mol_type = other DNA
atgataaaagacttcgacttcattaacacctgcgatatctctggattcattaaagaggagattcgcgcaattgccctctataagtcagatgtgagtaaagaggacattgtgctggacatcaactgtgggattggcgagatcagcaccgaattttccaagctgtccaaggaagtctactgcatcgatgaagacaacacggcgatcgagttttccaagacaaatatcgagaagcatggagatatcgataaggtcaaattcatcaaccaggaccccctatcggccatccgaagcatcatcgactttgacattgccatcataaaagcaaatgatgacaacattggtgagatcatagaagagattcacaacagaatcaattcaaagggccggataataatcttgacaaacatcctcgacttcgctctgatgagtgtaaataagctggatgaacttttatacaacccaaccattagccagatcgatgtgtctaaaggccaacagctcaacaagggggtgaagctgatcagcgacaatccgatgactatgatttacgttaaaaagaggtga

SEQ ID NO: 3492 - DNA, 732 bp, synthetic construct
  source 1..732: mol_type = other DNA
atgaacaatcagaacaagtactcttgtatagttctggctgggggcatgagccggcgaatgggtcaggataagggatcgatgatcatttacaacaaaccgatgattctgcacatccttgagcggctaaaccacaagataaacgatgctgtaattgtcctcaataatgccgagaggatcagtatctatagaaacctgctcaatcaatacgcagacaacgacatcgaagaaaacttcgattacgaattgagcttcattgaggatgaggtcaagtcaaaaggcccaatttccggggtcatgaccggactgaagaatatcaaaacagactatgcactcgtgctgccctgcgactctccattcatcagtggcgaatacatcgagagcatgtttgggatacttgacgaaaaccctctggccgacgccatcatcccttttcacattaagtccaataaggataagttcaaggacaatgaggagttcaacttcaaaaacgcggacgaaatgtccctggagatgaagatacagaacagtgagcccctgcattcaatctacaaaaaggacaacctgaataacatcaaatctctgctagatgatgacagcctctatgtgaagagctttatccgctcccttaaaagccccgtgttcattgaagtggataataaggtgttgtttgacgatgacttcaaaaatctcaacaaacaggaggacattgacaacttaaagtttaagaaatga

SEQ ID NO: 3493 - DNA, 699 bp, synthetic construct
  source 1..699: mol_type = other DNA
atggatattttaaataagtttgacatagtgccaaatgatatggaactgtacgagaccgcattcacacacagtagctacgcctccaagcaccatttgaacgactatgaaagactcgaatttctgggtgactctgttctcaacatgctcacctccgagtttcttcaaaacatgcaccctgatttcggtgaaggcaaattgactaagctgcgggctaattacgtgtgtcagaacgccttgattgtgtattcacatgagtttggactcgacaaatgcgtgaaactgaatctcgaggacaatgcactgaccgacaacgaggtcatctcgatcacagcagacgtcttcgagtcctttctgggagccatctacctagaccagggcatcagcaagtgcaaggagttcctgaccatcactgtattcccgtacattgagaacgagcagattttcttccacgactataagagtacgataaaagaatatggcgatgccatcgataaggaaatcacgtatgagctgattgaagagcatggggcgccccacgacaaaacatttgtgatgaaaatactgatcgatggcgttgatttcggccatggagtggggaagagcaagaaggaagctgagcaggtcgctgcctgcaacgccatcaagacccttaggctagatcacgggcaggacgtggcgtacatgcgcctgtacaaatga

SEQ ID NO: 3494 - DNA, 459 bp, synthetic construct
  source 1..459: mol_type = other DNA
atgctactgaattggtgcgaggagattacgaacatagacccgtccatcaactttcgcgcaactggagggtggctcaagaccgtgaccgggttagataaaagtgtcttgaatggctatagtctggtgggagagttcgttaaatcaggcgactataagcacgagtactccgatggactctacctggactgcaacaaggaggggaagaaaagcaagccaaagcaggacttcaggctcttccggctgaaaaacggcaagctgacactgatcgatcaggtatacgacggcaaaaagaattgggcctgtgaattttgggagagcgtgagcgaagagctgaaccccaacttccgagaatccgaagcggacaagattatcagccttattctggataaaacaggtaaagacaagaagctccttagagaggtgcaatcgcagttggatctggtcatctcagaaatctga

SEQ ID NO: 3495 - DNA, 513 bp, synthetic construct
  source 1..513: mol_type = other DNA
atgacaaaaagcctgatcctctatttttcaagggccggggaaaactacacaagccagggaataaagaacattgaaattgggaatacggaggtcatcgccaattatatcaaagagtttaccgaagcggatatgttcaagatggagcccctcaacgactaccccgaggactatatgcagtgcaccgaagtggctcagaaagagctgaacgatgacgcacggcctgagctgaaggagtacattgaagacatatccgagtacgatatgatctacctaggttttccaaattggtggaacactatgcccatgccggtgtggactcaattggaaaagcttgatttcgacggaaagaccatcaagccattcgtcacccacgaaggcagtggattcggcaagagcgagaaggacattaaaaacctgtgtcctggtgttaagctcgccaaaggcctgtccatccgcggctcgagtgtggaggactctaagaaaaaggtgaaacattgggtaaagaaagggtga

SEQ ID NO: 3496 - DNA, 186 bp, synthetic construct
  source 1..186: mol_type = other DNA
gtgaaaggcacgccctcaatggggaagaagaataaaaagacccatatcagatgcaggagatgcggtaaaaacagctatcacgtccggaagaaagtatgtgcctcctgcggcttcggacggtcgagccgactccgcagttacagctggcagaacaagaagtccacaacccgccagaggctggtgtga

SEQ ID NO: 3497 - DNA, 234 bp, synthetic construct
  source 1..234: mol_type = other DNA
atgagtggacagcaaaatgtccagagaccgcttgacgccttagggaaggcagtgaactccccagttctaatcaaactcaagggggaacgggagttcaggggcatcttgaagagctttgacctgcacatgaacctggtactggatgatgcggaggagctcgaaaaaggcgaggtcctgcggcgactgggcaccgtgctcattcgcggagacaacatagtgtacatcagcccctga

SEQ ID NO: 3498 - DNA, 705 bp, synthetic construct
  source 1..705: mol_type = other DNA
atggtggagctgcgagtgaatgctggaaacgtaaagaatcccaatgtgcacaaaattggcatcattgcccttggatcacacctcgaaaaccacggtccagcgctgccgatcgacacggacgctaaaatagcttcgcacattgccttccaagcaagcctagaaagcggggccaagtttctcggcgtgatctacccagcgcatgagctaaaggaaattaaccacggcatacacgtcagtttagaggatctgaccgacgaaatcgtgaaggtcctgaaatcagcaaagaaattcctcaggatcagcagcgtaatcattgtcaacgggcatgggggaaatctgcctatcgtcaccactctgtacgacatcgaagagcgcacaggcctgctgataacactgaacagcaagatcatcgaatccgagggtccccatggagggtctggcgagctctctatggccaaggcactgggaatcattgacgagagtcaggttgaaaaccagaccaaccttgaggagtacggtgaggtgggcctgtacatgttcggggaggcccggagaaacgatcccaacatcgaggaaggggccctggacgttgaggagaatggcgtgtacgtggatgatgtctatggacaggagcttttgaagctcgccattaattccgtgctcttggacgttgaaaaacagttggattcccattatggctattga

SEQ ID NO: 3499 - DNA, 546 bp, synthetic construct
  source 1..546: mol_type = other DNA
ctcattaaattgattaaaatcattgacttttttaacctgaatctactcaatggtttcaaggtgctgattctgaaaattaagaaacggtactttctcaaaaagaagaaagtaaaggagatcaaaagcgagcttggggattacggctcattcataaacaataaggacactctggaaatgctcgaggccgaggactacaacttcatacttgtgaacggagagccttatatcatcataattaatgacaagccatatcccaccctgaaggctgccttaaacatggaactggacagcaaggttgtagtggtggatatgggcgcagtcaggttcgtcacaaaaggggctgacatcatgagtccgggcatcgtggatgcagatgagtccatcgttccagacgacatcgtcatcatcgtggaagagacccacaacaagcccctggccattggaatcagcctgataacggggcccgaaatggtggaaaactccgagggaaaggcgattaagtcgatccattacgtgggcgatgccatctggaatttggaggtctga

SEQ ID NO: 3500 - DNA, 1488 bp, synthetic construct
  source 1..1488: mol_type = other DNA
atgagtgataaaaatgaatggggcagcaacctctccttcgtgctggcgatggttggtagcgctgtcgggctcggcaacatatggcggtacccgtatgttttatacagtaacggtggcggggccttctacatcccatatatcgtggccatactactcatgggcatcccatttctcatcctggagtatggcgtgggatacaatttcaaatcatccttccccaaggccatccgcaagattagttccaaagccgagtacctagggtggctgcttcctacctcagttttcatcatcatgatttactattcatgtattctgggctgggacgggatctacgtgatactgagcttctttaagggatggggagcagatcctaacactttcttcgccagcactttgctccagtcgagtgaatctgtctcggggatcacaaactttattccagtcatcgctatcgtaatgcttataagctgggggatcgtttggtacatctcccacaaggacctggaggagggcctgggcagggtgagtaagattctggtgcctttgctcttcatcatcatgattgtgatcgtgctctttagtttgaccttgcctggcgctatgattggcctgaatgaactcttttcaccggattggaacttgctgttagacttcaacatctggatggcggcgttcggccagatcatcttctccctgagcctgggaatgagcattgcctttacctatgccagctacacagggaaggaaggagacattattacaaatacgctggccattacctttgccaattgcgcctttgaaaacttctgtgcactgggggtcttttccatccttggctatatgtccctgcagagcggaacagcggtggcagacctcgtaactcaaggtaccggtctggtgtttgttgcataccccacagtcctcaacgtactaggacagtatgcctacgtaatcggacccttattcttcattacagtctatctggctgggctgacaagcatcctatcgactatcgagcccctgtctttctccattcagaataagttcacgtggtcccggaaaaagaccatgaccgtgctgtgcctgattggggccgtcctttcaatgatgtacgctaccgcttatggcggaaccttgctgggatacgtggatgcctatatcaaccaaatagccattctctttggcgtgatactcgagtgcattgtctttgcatggatcttcaaatgcgagaacatcattcccatcttgaacgagcgaagcaaaaccatcaagcttggcaaatggtgggtggtgatagtgaagtacatcctgcccctcttcataacgattgtgtggattggtggagtcctggacactatcaatgacggttctaccgaccagctgattgtttttgggatacttacggtgatcctgcttggcctgactgcactgtttacccatctcccagctacaaatgaggagtgggatgaaacggaatacagattatga

SEQ ID NO: 3501 - DNA, 450 bp, synthetic construct
  source 1..450: mol_type = other DNA
atggtgaatgatgaaaagagtctgtcccggatgagtaaaaccgattactacctggccatcgcctttgccgtctcaaaacgcagcacatgcctgaagaggcactatggggctgtgatcgtcaacaacgacgagattataagcacgggctacaatggcaaccccaggggagaggagaactgctgtgaccgaggctcatgtaaacggatggacgttccgtccaatagcggggactacagcgactgcttttccgtgcatgccgagcagaatgccatgatcagcgcaagcagaaacgaaatgattggagcgaccatctatctcgctggggaaatgttcaaggacgactcgtggttcgagatcgaagatgcagagccttgtccaatatgcttccgcatgattaagaactctggtgtgaaaaagatcgtctccaagggcgtagtgattgatctatga

SEQ ID NO: 3502 - DNA, 2424 bp, synthetic construct
  source 1..2424: mol_type = other DNA
atggagggggaacagaacaacctccgaccctatattgaggacttctttagagacttgcagctgtacgacgactacaagaatgggcatcactataaagacctcttagaaggcagcatcatcctgtttctcgagaaggaaaacacatataccgcctatgaaatctacgaaaactttttcatgatctaccaaatcacagatgaggacaagtcccacgggcacaagactgaaagcatcgacatcagcgagtccaattcattactgaaactggtgaacgtaatgaaggactacgaggagaacaccggggatctcattgaaaagcagcgggatcatttcatccactcagtaaacgtgttcatcctggggctagccatctacgccagcaatcataaatataggaatgcattcgaggcctacgtgacagacagtccctacaagaaatactataagactgcggacggtgaattttccgccgaggagttcctctaccgttggggaatagcctccctgttccatgacatcggctaccccgttgaaatcatcggaaagcagctgtccaaatttatcaacgacagcagccagtcaataagtcagaaatacaaggtcaataccgctgtcaacttcaagaacttcaacgagctgaacagtatcataaagctcgaccccaaattcccaataatctacaggatggactaccctgaaaccaacttcattgatgtgtacaagccaaccaacctgatggcgcaccagatctttacggacctgtatgtggattctgacatccgcgccattgacgagtttgatgagctgaatgaatatctatataagctggttgtccatctggatggcttcgtggactacatgacatcgaacaatttcattgaccacggcttcttttcatctatctttgtgctgaactcctacggggccatcatgcagaaacattatctcaacgatgacgaggaaaaattcgactactacataaataaatatgcttatttcttttacccggtcctgaacagcgcaacttccatactgctgcataattattttcggggaaccttaaacgagaaggaaagcaagacggatgagtttaatctcggcaaattggaacccatgcagaacccactggcttttcttttgattttctgtgacgaacttcaagaatggaaccgcaggccaatcggcctaaaggacaaggctaaaaaccacgtccatgatattaaaatcaatattaatgagaaccaggtcctggttgactacatcgtgaaaaacagtgcattagggcttaacttctctgagaacaaggaggaactgattaataatcttctcgatgttacatcgatattctccaacggtttgaaagtgaacatcacgccgtatctggatgagaagtaccccctggaggacatttcactttctgaagttgagacgccaaggatactgctccgccacgtggaggagattgcccgtgcaagccacaacagatacaatgaaatcggaaaggcccacggcaatccggatgagccatatgagagtctgagtcccaagcggaagctctccagcatcagacagactaaggagtttcccatgaagctgaatctcattggatgtgagatggtctcagagaacgatcctcgcgatgaatactcgcttagcgatgatgagctggacttccttgccgaaagggagcacgaggcgtggtgcagagagaaacgaaatgtgggttacatttcccaccacgacgcattcaaacgcggtctgatcgacgatgccgagtacgaccgactatgccggacaaacgaggagggctgcgagaccaacaagcacaataagatcgaatctccagagagaaacctgtatgtgcatagcaatattattccttatgacgaactcaatcaatattctaagaacaaggatcggaggccgttcgaggaccttcccgacaatctgaaattgattaagaacaatcccctcaagatcgtcgaaaaccgatacaagctcttcacagtggccatgcacaatgaatatatggattatattgcaggcaagaaagaagtgcctgagttcaaggacctcccatttgagctgcagcagataaattacaagcaaacctacctcatcgccaaatacctaaatgaaatcggctatgagattgtagagaaggatgacgagcgccctgctgtgaccaagtttgagaacaataaggaaactggctacttggcgggaagagagcacaatgcttggtacctgcggaaactgaacgatgggtgcactaatggtaagaacaaggacggaaccgacaacccccggatcaacccttgggatgaactggattacagtttgaaaaagcctaatatgaacacctttaagaaacttcctaaactgtgtttgaaagctgatttgaagattattaaaaacaaatga

SEQ ID NO: 3503 - DNA, 795 bp, synthetic construct
  source 1..795: mol_type = other DNA
atgaatgataaactcatcgaattgccaaattatggtcgcctgatggtggtcagcgatttgcacggtaacctgaacgactatgaaaagtatatagacctttgggattgtcaagaccctgattttcatatcgtctttctgggagacctcattcattcgccctactttaatgataagtctgtggagctgcttgatgatgtcatcgaaaaggataagaaatattccaatttccacgtcctgctcgggaaccacgaatgggctcacattgttcacagggacatattcaaaaatggagagaacattcgagaggacttcgagtacctgatcagctacaagaaagggaccatagagccagccatcacagaatatatccggttctttaaatccatgcctttctttgtgaaaactgaaaacggcctcttcctctcccatgccgggccgtcaagaaaggtgaagtcaatcgaggacttcaacggcattttcgatggggattaccataacccaattttagacgacttcctttggctgcgccccaagagaaacctatacggacggcgtaacatcctgacggacagtaatctgtacgatgagggagacatcttcaacttcctaaatattgtgggcgcaaactgcatggtggttggccacagtcccgtagacggctacaagcagtatggcaatcagctgataatcagcagcagctttcagaccgaggacaaggtgtacctcgacattgacttgtctaaggagatcaaacacatgagggatctgctggactgcatccggtactttgactga

SEQ ID NO: 3504 - DNA, 360 bp, synthetic construct
  source 1..360: mol_type = other DNA
atgatagactcatttcgatatgcattaaatgggatagcagtgagcatcaaagatgagagaaacctgaagatccagatgatcgtcatgatgcttgtcatcatagccggattcctgctgaagattagccgcacagaatggatcatttgcatcatcctattcgcactcgtaataagtgctgagatgatcaacacggccattgaaaacgcgatcgactacaccagggagatgaccgttgataaggacaatgacctggcccggattgccaaggatgtctctgccggcgctgtgctggtgatcgccatcgcttccgcgatcgtgggcctgattattttcattcccaaagtgctcctcttgctttga

SEQ ID NO: 3505 - DNA, 255 bp, synthetic construct
  source 1..255: mol_type = other DNA
atggaagaaattatccagaccctgaaggagatcgagaaggaaaacaacatcgagatcctctatgccattgaaagcggaagtcgcgcatgggggttcagcaatgaggagtcagattacgacattcggttcatatttaaaaggccgatcaaagattacatctccctaaaaaacaataaggatgcgctggacatcacaatcgacgattacgacatagtgggctgggacattaaaaaggacttcaagcccccactgtga

SEQ ID NO: 3506 - DNA, 444 bp, synthetic construct
  source 1..444: mol_type = other DNA
atggggaactgcgacttcctaaatgaactgccagacttcgacaaggatgtgttaaagtaccattacgcaagcatagcgtttaatgtatggaaggaagccttggatcgagaggaaatggatagaaaatccaccaagaggtatctgtattgtattcggtgcatcctggcttggaagagtgccgatctcggcaaagactcgtcaatcagcattttcgagctgatggaagactccgagatcaatgatgacttgaaaagtgatataaacacacttattgactactacaagagcctgtgcaagaacgagctggacgaagagctgatcgatcgcctcagcatttggatcgacgatacggtgaagaacatcaaggatcactatcccaaaaaagagaaaaaggacatgtccctttacgacgacgtcctctttaaagtgctcgagatcgagtga

SEQ ID NO: 3507 - DNA, 834 bp, synthetic construct
  source 1..834: mol_type = other DNA
atggggtttaaagaagacaataaagacaaatacctagacccttttaaaagagtcactgtggacgtcggcagctcattcaaccggataaacgtgtcagccgacgtgatcggcaaccgcatccgcataacagtgccaaaggacaagagtggtaatctgacgggaaccatcgtcgagaacatcgctctggaaaactccacctggatcttcgagcccgtggccgacgagataatggaagatcgcatcgaccgtaagctcagccctagaaaatacatggacttatctaagttcgattttgaaagggggttcctgccaaaggaaatcctggacgatcttgtatatcccattaactacagaaaggattattctccctttgcaaagaaggttttggagcatccaaacgatgagatccgaaagatcgccctgggatacatcgatgatgaggacgtgctcgcatccatcatcctgttcagcaaggataaggatctgtccttatttgttctcgagcacattaaggataagagcattctcctggacattgtccggaacgacttcaattactactatttcacaggcgcggtggatattttctacgacatggataaattgcccctcaagctcttcgaccttgacattcggaaggcggctctggaaaggatagatgataaagagctgctttttgacctagcctttgactgcgaggaatggttcaagccgattgacatgatcaaagacaataatctgcttagtaaaaaggagttggacagcctgaatctctatgcccagaaccgagagattcgggaaatcattaaatcgaggctgaaaaacgagctgtga

SEQ ID NO: 3508 - DNA, 1740 bp, synthetic construct
  source 1..1740: mol_type = other DNA
atgtgtggaatcgtagggtgcatactgaaagataagcagaagtctgtggctcccattctgctcgaatgtgtggagaacctggactacagagggtacgatagcgtcggcatcgccacgttcgacggcagcatccacgttaaaaaggacaagggaaagatccctgaagtggatgaaaagctcgacctggccgacatgccgggtaactttgggattgcccatgtccgttggccatccacaggcatcgccagcaaggagaacgcccatccccagctggatgagtccgacagcattgcagttgttcacaacggatcgctgaagaactatgacgaacttaagggggagcttatagcagacggattcaaattcaaatccaccacagacactgaagtgattccccacctcatccgaaaatacatgaacgaggggctggacttggagcatgcctttagaaagaccatagaaaggcttgacggctcctatgctattgccgtcatctcaaaagaggagagcaataagattctcgcgacacgataccagtcccccctgaagattggaatcagcgacgatgcctacttcatatcatcagacatcccggccatcataaactacacccggaagatcattcttcccgctgaaggggaaatggtcattctggatgaggatggggtccacgtgcacgatgaggatggcaatgagatcgaaaaggagatcctagtgatcccctggaccgcgcaaatggcaagcaaaggagaccacccctactatatgattaaggaaatcctcgagcagccagacgctgtggagtttactctgggtgagagggagaacatccagagaatcgttgatgacctgggcgatatcaaaaacatctgctttgtagcctgcggtaccagttaccacgcctccctgactggaaagtacctgctgcaacacctggcgaagataaaaaccgatgtggtgcttgctagcgagttcaagtacactgctgacacattagacaaggacacgctggtggtgttcattagtcagtcaggcgaaaccttagacagcatgaatgcgttgcggattgccaaggagacttcgccaaccctggcaatcgtcaacaatataggctcctcgatgacagaggaagccaaatacaccataatcacgcaagctggcccggagaagggagttgctgccaccaaaacatacattgcccagcttaccgccatctatctgtttgccggtctcttggctaatgacgaaaaactcatcaatgaattgtataatgtgccaggttacatcagggaagtgttgaaaaagagtagtgagatcgaggtgctaagcaaacgctacagcttcgctgatgacctgttctacctaggacgcggcttctcttatcctattgccctggagggtgcactcaagctgaaggagatctctcttattcatgcagaaggctatgcatcaggggaattgaagcacggccctctcgccttaatcaaccataagattcccgtgatcgtgatcctccctccaggcagtgattacgaggacacgatggtaaatctggaggaggtgaaggcacggaaggcaattatcctatccatatgtgctgagggggatgcgaaagccgaatgcaaatcccgcgatgtctttacagtcaacagcaaagtcagtgagaccattgcaccactggtctatacagtgcctctccagctcctggcgtattatgtgactctggaaaaagtagcctga

SEQ ID NO: 3509 - DNA, 3105 bp, synthetic construct
  source 1..3105: mol_type = other DNA
atgatagcaaacagcccgaaggaaattaaatccagattgattgaaatctataatgaagagctgttgaaccttaacatattcattaagaatagagatgagctgaaagggaacaaggatctgcggtaccttcttctggagcggatcaaggaggaatttgattatctggacgacgaggaactctttatccttctctcattttaccagaccatcccttcattctacagaaagacttttaacaagatccttgaggccagcattgacaaaaattacattgaaattcaagacgagctgctgaaactggtggaaatcatcaaagaggagatttccaatatagacggcgccatcgaagagcagaacctcaagatcgaggaaaaactcctaaagagtttatattcgaaggacaatcaaaacggagaaaactccgatattaatcacttgaacgagggcaaaagcttagacatcaacaacctaactgatgaggaaatcctggagctctacaacatcagcgacgaggagttcagccagttgcaggactattatgaatgggaaatatttgagagtgattttctcaacgaagagatcctggaggactacgatgaatctgccttcctggacattgcctataatcacaaggatgcagaggtgcgagggtttgcgttaggcatggtgctgaaaccatatgtttggctggatttcctctttaacgatccagatctgtttgttcgaaagtcggctctgttctacctgtttaaagagcggtacctgaacgacattgaggacattgactatctgggcaaaatccctatcgagatcgattttaacctggactatagcgacgccatcgatgactttaaaatcgacgagtcgctttttaacaggcatgacaagatcatcatcagcgagatctccattaaggatgatgaccttatcgtcaagacagaccccaaaaactcatacgaacacgctgtcagcaagatacggagtcaggacgccttaaaggccatcgctaattaccacaatcaatggtcggtgcgctacatcgcggtcaacaagatcacagacattgattacctctacgatatcgctttgaacggttttaacaaggacgcaaagcctcgccacggaatcttatactaccccggggagattagcgaaggagatgtactcaagtccctactcaatagacttcttagactgaagaacctgtctgatgaagactcccagagcttcctcaaggagctgttctacaagtcaaaggatagcataataaagcgctactgcttatcaaagatagaagatgacgtcttcctcgtgaatctggcaaacaccgaagcaaacccaagcttcgcccgagtgtgcttggacacgattaaggatgaggactacttgatcctcctgtccatcgccatcattaccaacccccgcttcaagggcaaaaaccaggacctgtatgacgggctctgcgagggaggtattggggatgaagacagtttcatcagggagtctcaattcgatgaaatagactatcacaatatccgggcctatgcctctaagattctgatcgccctcccgagaaaaactctcaatgagaccctggagagcttcagtctgaaattggatatccccaacctaaaggaacaccgggtgttcaagcccattatcaacaagaggattacggatattctgggagaccttgctaaaattgatgagagtcccctggtgcgctctatcgctgtgctgggtcttgaagataccaacgacctgatgtctatcgctctggacgacgaggacgacaaggtctcatttaatgctataaaaaagctgaatgatgataacttcattgaatactacctgaaggaaaccaaccgcaaagcctattatctggttgaaggaaatctcgtaaaagaccagtccctcttgaagaaaattgcactaaacgattcgtggggccctacacgcagtgaggctgtcagaaacatcaaagacgaggacttactgatcggcatcgcaaagaacgacccggaggcaattgttagaagggaggccgtcctcaagatcaagaatcagtctgcgctgattgatattgcctacgaggacgaggatgacctggtcagggacttcgcaatcagtaacattgatgacgaggatgtgttggaggacctgatctacaaaaatgaggattccaatatccttcgcaccatcctctccaaactggataacgaggaaataattaaggacttcgcgtacaaccatccaagagggattgtaaggaacgcagccatctccaatattgacgacaatcgcgtgctggtggacatcgccaaaacagacgaagactggacggttcgacgaaatattatcgcgcgcctcgtgggcaagttcatcaagagcagtgtcgacgtgtacgaggataaatacctgaatcatctgaagaggagggaatactataattctctgattaagggcgacaacgagaagttcaaatctgagaacaaggtcaagagcagtgaaaatgagaaaaatgaatacgccgatgcttcctcaatcgtgctatatgaagacgatgaaccatacacactgcaggatctgctagtggacagggccctgaatgacgaatcagaaaaggtgcgtgcttttgtggtgtcctacatcgatgacgagtatttcctcttctacattgtcagcaatgacaaaagcatcaaagttcagctgtctgccatcgacggcataaagagaaatgagctattggccaaaatattcatcaaaagcaagaatcaccatgtatatcggaaagccatctcccggatacggtatgaatatattctgctcaagttggtgtgtctgaagaactattacggggagctgtggcccaagaggcagatggctgaggcgcggatggaggagctcggatttaagtctcccctcataaagaaagaggataaccggaaaaacaaattcttcaggcctatctttgacatacgcgattaccagcgggatcttgagcttttggaccgtttggataaggagtacaagaaccgtagtaacaattcagacgacagcgacggttcctccgatgattttcagttcaaacgaattgtgttctga

SEQ ID NO: 3510 - DNA, 462 bp, synthetic construct
  source 1..462: mol_type = other DNA
atgaaacttatgtttgtttgcaccggtaacacgtgtcggagcgtgatggcggaatacctcttcaaaaccatgattagtggagacatagagatatcctccgctgggattatggcaaaagacggctcatcccctagcttgaacacaatcgatgtctgcaaaaagcacgggctcgacgtaagcaatcacaaggccaccaacgtgaagaggtcaaatatcaaggatatggacctggtgctgactctggaggagtctcatcgcaacaccttactgaatatgtaccccaacctctcgatctatacaatcaaagagtttaacgatgtggattacgtctatgacatcgaagacccgtataaccagagtttggaggtgtacgaagccactttcaatgagatcaaggagtctctggaaaagattgatccagacaagctgctaagctacggcttcaatgtcgaaaaggactga

SEQ ID NO: 3511 - DNA, 381 bp, synthetic construct
  source 1..381: mol_type = other DNA
atgattatggacaacatgtggattgaagccctgaagaacaagtacaggttcgaatttaagggcctcatcaacgtagaggacctgttcgatctgaagctggaggaccttgactacatctataagaacctgaaacgggacgagaatgacctgcaggtggatagcctactcgatgccaataaaaatcccttgaaaggggagctggactgcaagatcaacatcgtgaaaagcatattccagatgaaggtcgctgagatagaaaaagcaaagattgcgatggctaacaaggcccagaaggaaaagatcttggcaatcattgaaaacaaacaggatcaagagctttccgagaaaagtatcgaggagttaagaaagaatctccgctga

SEQ ID NO: 3512 - DNA, 2013 bp, synthetic construct
  source 1..2013: mol_type = other DNA
atgcgggaccgcctgttcaatcatttcaatgaaaatatggccccaagaaaactgttcattgtagaccgggattgggaagaactctggaacatgtatctcgacggctttccaagagagatgaaccccatctatcgggagaggcgcgaactggattgtagtgcatgccgcagcttttttaaacgcatggccaatgtcgtagccctggatgaagacacgggggattttatatccctgtttgctggggaaaccaatggagaaaaagaagttttccgggctctagacgaatacgtcaaatccgccaagattaaggacgtctttatgagcgatacccaaagggtaggtatcgaaagcaaccatgaaatgcttgattccggatcagtccatacttggtaccatttctatgtggatgtgccaagtgaatatgtgggaaacctgagccagaaggccatctatcggaataacagaattgtcctcgagaacagtacccagcggatctctcaagatgctgtggacacagtcctggagctgatcgcatctaactccctctatcggggggaccagtgggaagacgcgctgaaaagtttcaaggactacctgaaggagtacgaggcaaacgacatggatgaggatctgttctactggattaaatccatagagctgggatcgctgctggttagaatcaaaaaccacagtattggcgtgctgttgatggacgtgacccagggcgtgcccttagatgaagccgtctccaactatgagcgaattgtggccccgaccaactaccagcggccaaagcccatcttctctaaaagaatgctcgaggacgcacaggagaagatcaacgagttggggtttggcgagtcaatctacagacgctatgcgaatatggccgacctgtccattaacgatgtgctcttcgccaacagggattacaccagtgagattcaggacaatcagaacttctttgacaagctcaaagagctcacagtgaacagggcgcgtaactttgataaggttcaggagatctcactagaggactttgttgaatccatccttccgacggctcttgaagtggagctctacctatcatatgacctgtccaataatttcatgtctcttatcgcaccggtcaatagggacgctccctcaatgttcaagtgggacaatcctttcagctgggcctacaagaacaacattgcagacagtcttatgaaagagcgcgtaaaggcgcttggtggcgacgtggatgtggatttgagatttaccatccaatggaatgacaatgagtgggacaagaacgatctggacgctcactgtaccacacctgagggggaggaaatctacttcagccacatgcgaagctccaaaaccggcggctggctggatgttgatatcatcaaccctgagaagaatgtgcctgctgtggagaacatacaatttaaagaccggaatcagatgattcctggagattacctcttccgtgtccaccagtacacataccgtggtggagatgacggattcaaggccgagattgaatttgacggtaggatcttcaacttcatctatccaatgaggctgtatcagaatgagtatgtcgatgtggccaaggtgagcctgggggaggatggcaacttcacactcaatagctttttagacaaccagacagcctcggctaaagaatggaacctgaactacaaccgattcgtgcccgtgagcctgatttgctacagccccaactactggggcgacaatgccgttgggaataagcacatcttctttatcctaaaggactgcttaaatgacggccgacccaacccctggtttaacgagtacttggtgtcggaattgagggaccaccgcaaggtaacggaagccctggcaactatagctaaagtggaggagtctgatgagcagctcagcggtattgggttctcattcactcagaagaataaggtcactttgaaggtcaagtctgagaacatagagcgcgtgtttaacgtggttataggctga

SEQ ID NO: 3513 - DNA, 1185 bp, synthetic construct
  source 1..1185: mol_type = other DNA
atgggaactctgccactaggcaacgacaatgacctggatgactcacagttttacaacagggcagaagaaatttcattcatctctgagaatctggaactgactaagaagggtagcacccccacaatactccttaccggcatcagaggcgtcggaaagaccgcgctgatgaaaaaattaaagaaagatttccagaaagatggctacattgttgtgtatatggagctgtctggaatgaacaaatacaaaaaggattcgctcgaccgcttctgttttatgaagttattctacgagtccattatcaatgcatacaaggaaagcaacatcctctccataaacacgcagatcctcaaatacattaaaacccggaatttcaaaatagacaagatcagttcgtttgagaagattcctattcctatcatcacaacggaggaggactattccaagtttgctgggttcgtcatggacttgccccagatgatctatgacgatttcaaggacgagataaatggagtgctgatatttatggatgagtttcagatcctgaagcagctcgatgaagacgtgaacgggttcctgtggtacatcaggagcattattcagtcacagaaaaacatcgggtatatcttctcaggaagcatgagccttaaggatgacttgatcgccgacatcgctgggcaaaaaggggccttcggcgggcgtatcctgaactacgaaataaaacgcttctcttatgaaaccacaaagaactatctgaatgaaaaggccgactaccttaattttaccgaggagggtttcgagcggttttaccattgcaccaagggcaacctatactatgtgaacagtttcgccagactgctccccccaaacatcgagctcaacgaagagaaggtgaactctgaatttgacaagtccctgccgtacctcgtgattcacttgagtagcgagtggtataagctgagcaatcaagagcagcggatcgtcattgccctcatcgagggcccactgaaacgaatcgagatcgcaaataagttgcaagtaactagcggtgcgatcggcagttcccttaaaacactgcagaacaagatgctgattgaaatggataataacaaataccagatttacgattccattttcaaagcctggctaaagaaggagtatagggaaaagggagactaccccttttga

SEQ ID NO: 3514 - DNA, 4440 bp, synthetic construct
  source 1..4440: mol_type = other DNA
atggggtttttcgataagttgaaaaacgcgctggaatcaggaaacaaaagccacgacaagcgcgaatctcaaaagaacgaggcgatcagcgacaacccaagaggcgattctctgtcggacaacaaaaataggaacagtctgcccgataaccagaaccgaaattcttcggacaacaataatgttcgaaatttcaaatatctggacgacctcatccatagcggccaaaaggacatcgttctggattgcgacattgttctagctgacagtgagattgaatcttacaaaagaggaatagatatcggcgggagtaacataaccctggacgggaatggacatgtggtggatggcagaaacaaggcggagatttttaaggtttcatctaaaaaccttgccattaaaaaccttagaatcgagaatggatacagtgagctggatagcatcattgacgtgttctccaaaggcgagctgcacctgtccaattgcagcttcttcaaaaactccaacgagagccacaggatctttggcgacaatctggtgtgtattgggagcatcatccgaaatatgggggagctgaccattcaccactgtcacataagaaacaactcttcccgcggccagggcggaaccatcaaaaataccggaaccctcaacatttccgactcgatttttgaatataatctctctctggaggacgggggagcgatctttaatgaaggtttgctcaagctgtcagactcacggttcgaatttaaccactccaataaacggggaggtgcaatccacaatgaatttaatggggagacgatcatcgagaatagctcctttgataaaaacggaggccgcaaatcagctaatgacatttcaaaccggttcaatcttgtcctcaaggacatgcactcagacctgaagatcgataatgagtggacggtgttcattgaaaagggtaagagctttgacatcgacaataagggggggatcatcgagtttgctccactcaacaatgacgagaaaagtttcactttcctaaaggagttactggatggcaatgactcccaaatagatttgatgcatgacatcaagctggacatagccaacgacgagcagctgtacttccccgatggcattaactttaaccgggacaatctcatttttaatggaaatggccacacgattgatgcgctgcgaatgcgcaacatcttcaccctggccgggaacgatattatttttagaaacgtgaacctggaaaacggattcagtaaactctccaatggtgctgcaattagcatgaaagaaggattcctgaaaatctatgaagtggagttcagggataatgcagcatataacggaggtgcaatctccattaaggatgcctcggttagcatcgacagttccatcttcaggcataacgctgctaacgccataaagttcgaaacggggggcggggccatctataacgaaaacggctccctttccattatcgacaccctatttattagtaactcctctctttggggagaaggtggcgctatcttaaataagagcggtgctctgagcctgaataactgtgatttcactgacaaccgttctgtaaaaaatgggaatgatattagcaactacgatagcctgcggatctgcaaatgcagtttcgaaagtgacaaggctaataacagcaattcggatagtggggaaataactaatagcaacctgggcagtaaaatcaacaattccaactcagacagtggggaaattagcattttcaacaacaacctctccaagttatacgattccaacttcaaccattcaatcatcataaacaagggcctgttaaagattgacaaggacttcccaatcaaaagtgcccagatcaaaaattccggaaagctcaaggcttataactttaacgacaagcagattgaaggcattgatatcaacaacgaggacggtggcaagctggtttttgtaatagatggggtggaagtgctgaatacagtggaaatcagccagaagtggatcgaaattaagatattcattagctccacctttaaggatatgcactccgagcgcgactatctcatcactgaagtcttccctgagctcagcaaatggtgtaaggaaaggcgcattttgctgactgaagtggatctgcggtgggggatcacacgggaggatagccgctcaggcaactcaatcaacatctgcctccagtatatcgataagtgcaggcctttctttatatgcttccttggccagcgccgcggtcgaatcccagaaaaaggagaaagaaaggtgacggaagaaacctttataaatttccccaaggtctcaaaccttgtggggcatctgagcgtgaccgaaatggagatcgagcatgccacaacattgcctttattcaagctgctcgaaaatgattttgataacgagcatgcaaaacgcgcactgttcttccttcgtgagaacccctttgaggacgtagatctctccccggcccagagggacatctacttgaacagaaagcctgaggatgatgagaagctttcccagctgaaggacttgattagggagaaatgcatcttcttcgactattcctgcatctgggacgagaacatggagctgtacgagttgtcgtccagcaagggagggctcactgacttcacctgtaacggccggcccctctccgaggtcattatcgccgaggtgaaaaagcagattgaaaatgagttccccgactacaagcccgtgaaaacagatgatatcttcctcgatgacgccatgcttcagaacttggagattatgtccatctcgcacgattttgtcggcaagcaaaaggagatcgactacattaatgaatttatcgaatcagacaatgagagactgcttctcgtcaagggcgccgagggcattgggaaaaacacccttctttctagggtacacgccctactgaatgagaagggtatctcttcgataatgcggataagtaatgcaacagcgaaaagcaactcctcttccaacctttccttaagcattggcagtgaaattgggctgttcaacggagaggaggccttatacaaaggggtgaaacacgccctggacgatgagttcctgaagcagctgagcgacagtggagtgagagtgctaatcatctccaacgcagacaagctcaatgaccggctggtctttaatgagatcccagacaatctccatatcatactctcttgcggtgaaagctatgaaatcgccattctccacaaggagctgatcattgagggctttgaagatatctctgaaagggagcagctgatcaacgagtacctgaaccacatcctaaagaacctgaaccaggcccagaaggagctgattatctcgaaccccgcttcaaagtctccactgttccttaagatactcctcaacgagctcaaaaacttcggttcctacgagaatttagtggagaagatcgaaggattcggagattccaccctgagcgcttttgaggagctgctgcgcgcgcttgaaaatgacgcaagcttcgcaaatggctttgctcgggacacactcctgttgctcatctattcaaaacacgggttgaacgaggaggaattggtctttgggctggagtcactgagccatattgacgcccggagcaagctccgactattcctctacagaatgggcgattatatcctggccatcgaggacaggtacttcatcaagttcgatgagtttaagaaggctatcctgggcctgtacggtgattgtgagcaacggatcagggagatattggtggaaatatacaagaacaacatcctaaaatctccagatagccttgcaaacggcagcgacgagatattgtataatctagaactcctcaaggactacgacggcatcatgaatgttttaaacgacgatagattgatcaacggcattcatcctagttgcattttccttggatacaaatatggcaagttctacggacccagcaaagagtacctgggctttacaatgatagactctaaagacaagttcgagttctttagccagattgcgctggtcctggctaagaagagtgccgactcactgaagtatgccatgaaagcctatcctcaccctcacactcaatggccgcgtaaattccggaacgagaatgacagcgagagctttatgaaataccaggacgccttttacgccattccgatgtttattgaggctgcctgtcgttacgccaataaggcaatcaaggacgaagaggacttggataagctgcgcgagtttaaatctgagttcgacaaacgaataaacggtgtcgactcgtttctgaattacatgtctaattttggcagcagtcagttggatctgggatataaggtcgaagccttggccgatgatgccatcttctcactggataacctgaacgagtactacaatggtggggtgagtgaaaagtga

SEQ ID NO: 3515 - DNA, 2196 bp, synthetic construct
  source 1..2196: mol_type = other DNA
atgtccagacgcgacaaaatgattgcaaagataaaggagctcatgtacaagcccgaatacatcagaaacataggaatatgtgcacatattgatcacggtaaaacaaccctgtcagataaccttcttgccggggctggcttgatctccgaggatctggctggagaggcactcggaatggacactaaaaaggacgagcaggaacggggcatcacgattgacgccgcaaacgctagtatggtacaggagtacgagggagaacaatacctcattaacctgatcgacactccaggtcacgtggacttcggaggggacgtgacccgtgccatgagggccgtagacggggccgtggttgtggtgtgcgctgtggacggggtgatgccgcagactgaaacggttcttaaacaggcgctgagggaaaacgtgaagcccgtgctattcatcaacaaggtcgacaggctgatcaacgaactaaaactcggtccagaagagctactcaagcaacttacaagcattatcgttgaagtcaacgccttaatcaaaagcttggcccctaaggataagaaaaatgagtggatggtaaacgtagaggaaggcagtgttgcgttcggttccgcattcaagaattgggccatcaacatcccaaagatgcaggagacaaaattcacctttaaagacattatagattactgcaatgagggcaaggaagacgagctcaagcagctcttgcccctgactgaggtcctgttgaatatggtggttaaacacctgcctagccctaatgtggcgcaggtctaccgcgtgcctaagatttgggatggcgatattgagtctgaagtgggccagaccatgataaagatgtctcccgatgggcccttagccggcatgattaccaatgtggccgtggataagcatgcgggaatcgtggccacatgccggatctatggaggaaccctggagaagtcgagcgaaatatatctggtagggtcccacggcaaggccagagtccagcaggccggcatctttatgggagctgagaccatcgatacggggaaggttccagtgggaaacattgcttacctgacgggggtcaagggcgccagcgcaggtgagaccatctgtagcgcagactgcatcatcgatgagtttgagcccatcgaccacattagcgagccggtagtgactgtggccgtggaggctaaaaacaccaaggatctgccaaaattgattgaggtcctgcggcaggtctctaaggaagaccccacaatcaaggtggaaatcaatgagaccactggcgagcaactgatttccggcatgggcgagctgcacctggaagttgtgacaaaccgaataataaatgacaagaaactggagattctggtttcagagcctatcatcgtgtacaaagagagcgtgcttggccattctcccgtcatcgaagggaaaagtcccaacaagcataaccgcttctatattgacgtccagcccttagacaagccgctctacgatgccctgatcgaaggcgacttgaaggaaggccggatcaaaaccaaggagactgctcaagacttcattgagctgggaatggataaggaagaggcacgaagggtctgggatgtctacaacaggtccatgtttatcaatatgacccgcggtatccagtacctggatgaagtgaaggagctactccttgaaggttttgaagccgccctgaaagacgggcctctggccaatgaggaagctgtcggattgaaattcatcctctcagacgcgaagcttcatgaggatgcagtgcacagaggcccggctcaggttctgcctgctatcaagaaagcgatctacgcttcaataatgtctgccaacccatgtctcctggagcctattcagaaggtgttcattagtgctccactggagtatatgggcaattgcaataaagacattcagaaccgaaggggtagaatcatcgggcaggagacaaaaggagtcattgcagagatggactttgaagtgcctatcgccaagatgttcggctttgcaggcgacatacgctcggccacgggcgggaaaggggacttcagcacagaaatgaaaggatttgaaaccctccccatctatctccaggatgatattgtccggcaaatccgtacacggaagggtctgagtccagagccctatgggccagagcactattccgcctga

SEQ ID NO: 3516 - DNA, 1986 bp, synthetic construct
  source 1..1986: mol_type = other DNA
atgaccattccggtcatgtacgatctggacgaggaacggctcagagccttaaacaaagatgaaaagaaggaagaccggcttttttcaatcagccttctcaatcctttttatccccttgacagcctggtaactgatgaggaggaggatcttgacattcgcatagccgcgctggactgtctggatctgttcggcgtcacactgtaccatatcgatattgacagcgtgccaaaggagctggcccttgccgtgatcgagatgctcgacgatgggagcaagctaaaagagatagcgctcaaccacaacgatattgactaccggattaaagcactggaaaacaaacacctcacggacgaagatgccctgaaatacataattgagaacgaatcagcccccaaattgcgctccctggccgcgtgtcacccttgcttgaacgacagcaaatttctggaaggcctcgcactgaatgatgatgatgaagacgtccgtgccgccgccgtgtctaactacagcacaaagggggtggacgtgctgaagaaagtcattagtgatgatgaggatatcgttcgcataccggctttaaagaacttggtgttcaaatataatctgttcaacccctccctcaacaagaagtttaactttaagaagaaatttcacgacatgtcgtggcacatgatcagctcgatcgatgattacgtccctaaggaaatggacaatgacgagggaatcagggatctgattgacttcgagctactcgaccagatttatatttcctcagccaacgaatgctataacgaattgatcgacaagctcaagatcttcttcgaaaaggccctttaccactacgagattcataacccctttgacgagagtaaactggagaatgattcctatcggaaaaaaatgtatgacaagctcaagcttgcagaaggggaccagaggagcttctacctctaccaaatggcttatgacggtggacacgcttacttgaacttctacttggactacctcaatggtctggactatgattcctatctgggagactctgacagtagcaacgaggattcggatctgaaaaaactgtttaatgagtctaacgattcctacagcttggataaggagatcgaagagtcttacttcatcgacctggcatacgccgattccaattgcgaaatggtgagactggccattgaggcaataagcgacaacagcgtactgttcgactttgctaagaatggcaaaacaagtgacatccgaaaaactgccatcaagagactgactgattcagcttatctactagacctcgctgtcaaccagatcgacaaggacattagggaagctaatttctacgacgatgactggatatgcgactatatctctgataactcaaacgactacttcgatatctttaatacctatgacttttacagtcatgacctcgagcattacgagcgtctattcgacaacaggctggattccttttattatgaaaaggtggcttggaactattatcggaacaccatttcattctgccttcttgaaaggatagacaactacctggacctggtgtacgctatcaaaaacacccgaagcttcgttttacgggacctggtgatctacaagatcgagaacccattgttcctcacagatatcgcgctcaatgcaatcgacgagcgcattcgctataccgccttcggcagaatcgagagtaaggcattcttaaagtacgtctacctgaacagcaatgatttcagaataaagttgctgtatctgtccaaaaccacggacaatgcgatcctggaagaggccttcctcaacgaggagaatgacgtactgcgaaagtacgtgctggacaattccaatttcaagatcagtccaaaggtgattgagcactgtatcaatgaagagtctgttatctccgattacgcagagaataagtttgctgagcagtttgtgaattacaggctgatggataagaaatttttatga

SEQ ID NO: 3517 - DNA, 372 bp, synthetic construct
  source 1..372: mol_type = other DNA
atgggttttataatgattattaacaagctattcaacatgaatgaagacaatgagatctatttagtgattatacttgtgctcgcgccgctgatcttttcaatcatcgacttcacgtcctgccttgtggaccacggcgtgataacctggttcaactgctacacatttaagacctacatctgtttcattcccatcctgctgatttgcagcattatcgccaaggtgatatggcgggagaaaagcctgaaagatgtcctggagatcgcctttgctccattgttcttctggctcatcgaaatcggcttcgcactgtttgtcagtctcttcattggagtatttattgatatgatcatcgggatcgaggccatggtttga

SEQ ID NO: 3518 - DNA, 477 bp, synthetic construct
  source 1..477: mol_type = other DNA
atggctaattggtgtgaaaacaaactcacggtgaaaggaacaagtgaggagctggtaaagcttatcgaagaacacgtgattgatggggagttgtcctacaagaccttcgcaaccgagcacaggctattcggcgaaaaccattttgacctggatgagatcctgaatgaacgcataagcgaaatcgtcttttggttttcgacaaaatggtccccagtcccggcggagaaagtttgcgaagagatcaaccagacttatcccaccctgaaggccgaactgtcattcttctctgccgagagcggattttgggggcagtatagcgactacggcggtgaggagtactatgagctcaaggaagaggacattgagaagacgtccgaggaatttttcaagttcgggctcgaggagggcttccttgaaaagacagagagtggcaaatacgccttcacccacgacgtgcctacttttcggctgttatga

SEQ ID NO: 3519 - DNA, 4764 bp, synthetic construct
  source 1..4764: mol_type = other DNA
gtgagccttatggaatggaaatatgcaacgatctttattagcagcagtttcatagacatgcatgcagaacgcgactacctgatcaaaaaggtcttccccgagctagaggagtggtgcgaagagcacaagattcacctatcaaacattgacctgagatggggagtgccggaagaaatctccaacaacaaaagcaccatcgaaaagtgcctcatcaacattgacgagagccggccattcttcctctgtttcctcgcgcagcgcaggggctggattccagatttcgcggaagacatcagcgacgacactttcaaacggtatgaggagattgccgcctacagcggtctgtcagccacggagatggaaattgagcacgccttgctttcaccgttaaaagactttttaaatgatgacgatgagcttccagagaatctccgcacccgccattccctcttcttcatccgagacaagtcctcactggatgaaatcacagacgctcagaagagggtatatacaaattacgggttggtagacgcggaacacggagagtttatccccggggaatacgacagcgagggcaattgcatacgagaacctaagatcatcgatgacttgtccctgaaaaccaaggaaatcatcgaggacgccgacaactcctcccaaaagattgtggaccggatcatcaaaatgaaaggggactgtgatctgcccgaggatgagaagaaggttcacatcgaaataaccaagtacactggggactggaacaggaacttgaagatcccagagatcgaggccctcaccaataaagataaggacgacccagagaaaaaggtccgccggtacaatgactatgagtggatgggcaggctaagtaactttaaagaggttaaagaggactataaggatataagtctaatcaagaaatcggaaaatatagaatctaaaatcggcaggcccctgaaggatgtgattatcgaacagatgaagcgccagctggaattggagtttcccgaaaactttaaggaggatgaggacctcaccgaagaggaaagaatcctccagaacgagctgaaccagcaggacaactttgcctaccttaacagccagggctacatccccatcaaaaaggacacagacatactgagcaaatacatcgaagacgccgatgagagcaggatatgcctggtatccagtgaggcaggtttcgggaagactatgctgctggccaacttggccattcagctcgagaagaaatacaccaataaatatgatgagaccaggcctaaccagaaggctatctataagagattctgtggagcttccaatctaagttcaaaggccttctctctatgggatacaatcattcaagaagccgggctgacagaggatgatgatttcaagatcccaaagaatttggatgagctcaagaaatccatcgataagattcttgataaaatttcccagaagggagagtccgtgatcataatcgatgctgtcaatcagatgcccgacggcctggagatgctcaaatggctccctgcccccgagtcatcgaatctcaagattatcataagttgtaaggaagataatgaagacaaggaactctgcctcgaaagcctgaaattcatcaaggatcgtaacgccatctgcccgtactttgaggacggtcacgaggacgagcttggaggagaatacaagaactacagctttgagctgaaggccctcgaggattgtaagaacgagaagactaagattatcaacgcataccttaaaaactacctgaaggagctgtctaacaaggacattgaaaccatatgtagtttcgacgcatcgaaaaacccgcttttcctaaaggtattgctggccgagcttcgggtttttgcctcctttgaaaagctccgggatgagattcaggagtttattaaggacgagtttgcggatgaatctaaattgacgtctgaagactcctctaatcattcggatgattctgaaggctcgaaaaagcagagccaggggtctcccaagacagccttcaaccacgtgctggaaagactggagcatgacgaggaccttgtggagggggaagctctggtgcctttaatctttgcactgcttgcaaatgcccgggtgggactgtcccgggatgaaatggcttccataattaaggccgcaaagccggatttggatgacgaatacatcagagatactattaacctgaacctcaggcaagtgaagccattcatggcaagaaaggaaggacgcgacgacttcttctatgaaagcttcaaactcgctgcacaggaacggtatgctcccaaaaacatccccaagaacgagcggctgaacgagtactttaaggataaggaagacagcgataagttaatcaatgtcaatgccttgctggccgattacttcctgaaagacgctctgggtcaggattcggcggactctaatgataaaaccctagacttaagtacgattgacggtttcaactttaaaggggaaaacatccgctcctataatgagcttccataccatgcaaacgagtcacgggactttgaccgattgaaagacatattgtcgtcatacagtttcattaaaaacaagatcaacctcagcgacatcaacaatctgatcgttgactatcagttcaaggacttcgaagatgcccagcaccccttcatcaaggatgaggaggaccactcaatagtcctgatcggtcgggccctggaactctcggctcctatcctctctgacgataagtctgagctgccggcccaactgtacgggaggatggtggacctgcgtgacgatgaggtgataagtcccctgattgatgagattgaggctgattacgagatggtcctgaagcccaaatccaattccctttactctccaaagagcagtatcattaaaaggccaaaggtgaacggaaccaaatccacatcaagcatcgagattaccgacgacaaactgcttatctctgccaatgaggatggaacattaaacctcttcgacctggaaagcaatgacctggagattctggaagagcctcacgattctaaggtgatccgaatcatccccacagatgaaggccaaaatatgctgatggccagtagcaacggccagatcaataaatgggacataaacaatcgtagcatcttcaaggatgacgacaacatttatcccaaaattaatgccaacatcacagacatctatctctctggaacctacaataagatctacgcatcttcccacgagggaattttcaccattgacctggataccaaagagctatgtgaagagaaagagatagagcacaagaaatataatcaaatcctggttccccggagaaacgaggctatcctcgtctgcgacgagaaggaggtggacggctgggatgtctacgaaaagagaaaggcctacaaccgacagcaccagcagaaccctgcaggcgaggaaagctccacccaattggattcatccgaggagatccgctttatgggacttaataagcgtttcctgaccctgatttccgaaaacggccagatgaagttctggaacacccttaaaaacagcggcgggggagagagcattgatgaggcacaggtctgcagccctcacgacaagttcgcccaggctatcaccctggagaaggaggaccagatcattaccatttcagacatgggcgtgctgagggtctggaacattccacgcccccgacagcctaagtttgaaatcgcgaaaatcgaaggctccgacatccctatggacattcagactgggatcaagtcacctactgcgatcgactatttcactgacggggatgagagatgggtcattgtcgccaacgagaacaatgacataagcgtgatcgacctgaacaagaaagtggaggccaacaaggaaacgaaacatagtgagtcggtgttgagtattaaaatagatggaaatcatatgattacagcttcagataacggtgagatatttgcgtgggacctcaacaaggaagaatgcattaataaattcgccagtgagtttagagtcaactctattagctatgatcgcgacaagtcacaactcctcctctcaggtgtgaagaaggagaaagacggcaataaaatatataagatagctagccgggacgcgacagacatgtgggagcctatcaaggtccaggatgacggcagcgattccaaaaagtccaaaaagctgattgacctgaacgctgatgatcgcgacaatcctaatcctgtgattgacattgcgcagatcagtgacggcatggtattcatcgaggagaaaaagatttccatgccggactacgaggccggctttgataaaaaggctacaagcctggctacgcaattcgactccaatctggcttttgtgggctttgaagacggaagcatcagttcatatccaagagagaccgaatttgatgcaggcatcaattccccagtggttaaaatcagagtgagtggcgatcgactggtggctgggtttaaggatgggagcgttgtgatttttgacctgagcgggaccaaaacagcaagctttaaggcccatgataaggccataacgaacatctatctggatgagtcccgtttaatcactattagcgaagacaagactttaaaattctggaagaatgatgagtgcacttacacttacttcctggacatcttcgcaacaagcgtgagtgttaatgatggcaaattgattcttggtgacacgctcggtaacctgaggttctttgaactgtga

SEQ ID NO: 3520 - DNA, 2286 bp, synthetic construct
  source 1..2286: mol_type = other DNA
atgatgagacaaattagacgaaacacaattgattttgcaatcgatctcggcaccagcgactccgtaatagcctgttttaacgggcaagagtctgagatcatcaaaaatcactcgactggggaggaccacacgccgagtgctgtttacatagacagtttaggtgaaatccacgtgggcaggatcgcaaaggaagctgtcctcaagtgtccttccaatgccaccagtgaatttaagctcaatatgggcttcccaattccatttctcttcgagagctcccagattaagatgtaccccgagcagctgtctgcggaacttctaaaggatcttagaaaatccatctaccaccagacaaaccagaacattgaagagattgtgataaccgtgcccgccaattcaaaccccctgaagaccaaggcaacgaaagaggcggccgagctagctggattcaagagtgtgtatctgatcctggagcctgttgcagccgccatcgcctacggactgagggcaaagaaagaggacactggaatttggatgatctacgacctggggggcggcacatttgatgtgtccctggtgaaggcaaatgggcaggagatcgagaagctggccaccagcggggaggacaacctgggtggaaagctcttcgactggaagatcgtggatgactatttcactccaaagatcatcgatgacctgaatctgactgacttccggcgagacaatcctaactaccttaaggtattctcaatactcaaaaacgaagccgagaaggctaaaatcgcgctatccggttcggataatgacattaaagactatgaactgtcgatcgaaaagcttatcgaaataggggacaagagttacgacttcaactatatcctgggcaaagaagatctgatgaatataatgaagccatttctcaaaatcacctttaatcattgctatgaggtgctcgaggagagcaacctgtctattgatgatgtggaaaagatcatcctcgtgggagggtccacattaagctcaattctccgggacagcctaaaagacgaatttgataggcccctggaatacggcattaaccctttgacggtcgtagcacagggtgcttccatttatgctggcaccatcgaaaaacagtttattgaatgcgagaaccacagattcgctctgattctcgattacgagaagatcggcttcaaggacaacatcgatatcaacggaaaggtcttcgccttggacgagaagtacagcttcttggattatagtattgagattacaggctccaatggagaaatcatctacattgaggactccaaaacgggaaaccccactgaacgcatcgacctggacatcgacggcaatttccgcttgaatctgaatgtcaaagacagctataatgagttcctgatcaacatctatgacggcaacggggacctggtcgaacttgatgaaaattcaccaaattcaatccattacaagaaagccctgaatcccggttacccgattctgtcttcctcaatcagtctgtaccttgatgaggattcttcactgattctgaagaacagtgaggacctcattgacctcgacacagaaaacgactttattatcgaatattctaagaggttcaactcttcctaccctattgccagcaagggggatatcatccccatgagccgcaaagagattctccacaccagtaaaataatcaaaaagggcgacggtgacagcttcatcaaattctccttctattttggagagcttattctagccaactacaataccttactcggacagatagtcatcacaggcaatgacattattgacgatctgcccaaggacagcgagatagagctgaacataaacatcaacgagtctaacatgatcgactttgaagtgttcatcccgtatttacgccagagcttcaacaactcatttagcttcaataattacaacaactacaacgggtttattgataactatgataacttgaagagcaagcatgatgagatcatcaaaaaatacaataaaattcgggattttgcgcgtgatgaggataagaaagagctgtttctcaaaaatggcatctatcaaagcatagagcgggtctacgagaacattgaagagatcgaggaaaaggagataatcgactaccttgatatattggttgatatggctcggtacgataagatagccgtgtacccatccctggagtacctgaactatttggacgatgttttggacgaatgcaagttcttcctgaccattgccgacgtggagctttcgatctga

SEQ ID NO: 3521 - DNA, 1659 bp, synthetic construct
  source 1..1659: mol_type = other DNA
gtggtgctcttgaactataatcagacgaaagacatgatagaggactacttccacggccagtacgaggtccttaagttcctgggggaaggatcattcgcgcaggtattcctcgtcaagcaaaacttcctaaacgacaagcgcgccatgaaaatcatcaaagaaccactgtcaaacaccaaaaatatcgaccatatcttccacgaggtgcaaattgccagccagctccaccacgagaacatacttgatatctacgacgccgggcttatcggagacatcgcatacttcgtgctagagtacgtttccggcggagacctggaggactataggacttcatacctcaaggccaaccgcccaatcccgatccacatttccttggacatcatcaagcagatcctgatggggctcggcaccctgcactcgagcaatccgatcatcatccatcgggacctaaagacaaagaacatcctcatgaactacggtgatgaacgtctgatcgtgaagatatccgacttcggctttgcacgggagctcagtagcaacgcagatgactttgaggtaggtggcaccaagccatacatggcccccgaatgctttaatggcgtgttttcaacaagaagcgatgtatacgctgtgggcgtgattttctacctgctgctcgcaggggaatttccatataggctctccgactatgtcattggtgacatcgtggatggcaagccctggaagattgatctgaagccccctagccactttaatcagaacgtgcctaagtttgttgacaagcttgtgctgaaggccttggatgtcaatcccaacaaacggcatatcgacgcaaaggactttgaaaatgatctggataaggccatcgagaaatttaaggaatattcttactataaggagtacctgaacgagctgaaaggactggaagaactggacgagctggataatctgggaaaacttggcgagctgggggagttcggcgaactgaaggaattggaggaatctagtcggattgctgaattaaaggagtcttctaaactgggggaatccaataaggactcgaaagaccaggaccatatcctcaatgacaacatcctagaggcattcagactggcgaaaacagaggacggactggatgaggccagttccattcttgagaaggaggtcctgaaggattatgagattcgcaagacctacggcaaaactctgaggttatggaaaggggattaccccgatgccaaactaattagcgaggctttcacggttacactcaaaggagaaaattacaaactggcgattgacctgttaagagaagccttcgcctacaatcctatactcaaggacacttacggttactacatagatctttggagtattttcatagacctgaacaaaaacaaggactttatcatttctattaaccgactggagaatcttatggatcgcaacgacaagattagggacatctataaggatagcatcgacaccctcaaaagctatgatgaggatcgaattttaaacgaggccattgatctggctgatcgggggaacctgatcgacgctagcaagctgttggagctcttggtcgtgtatgatgacgaaataagaaaggattatgcttataaactctccttgtggaaacaggacttgagtatgtga

SEQ ID NO: 3522 - DNA, 1146 bp, synthetic construct
  source 1..1146: mol_type = other DNA
atgaagaaaaagttagaatatattcagacagaaaagataaagaacaagaactacgagttttaccgcaacatcgagaataacaaaacagtgatttttcgaaaaaccaagttcggaaaacgtgagaaagtcaatatcatcgattcagacgacttgaccgagcagattatcaatctgagctacaataagtccagtcgcaataaaaagattcaattcccgtacgacaaaatctgcaaattcgtatttaagaacaattttcaagcatgcaacatagtcttcaagctaggtatcgactttaactatttccttgacactgaagtgatcaatcagatttttgagtccacacggtcagacatagtcatttgtgcaaaggaggaaatcatatacataattgagttccagaaggacaagctgaagaagaaagataagatccggtttggcaattaccagaccaatcttcacaactactatcacggccgaaaagtgatcgtgttcgtgatcagtttcgaccctaacgaagagctgggggacattccctatggctatgataaggagtacgggttcaccatgcatgtcaaatcgtttaacgagcttgatgcggaggagactatcaatatcattaataagagaatccggaccagggccaaaatcaatttcatcgatattgtgctgctgcatttcctcccattcatgaagtctcacaggtcccaggaagagctgttgaggatcgccgtggatctgacgaaccaaatcaggaccctgaacgaagataagatcctggagctgaagattacacagactgtacttgctcaggaaattctgagtgaggaggagttcgaggagctcttcaaggtgataaaaatggaggacacgggattagtggaagaagttagacagctctactgggagcacaagatccgcaatgacatgaatgagctcaaccagatgcggaacgaactcaacgaacgcagcaaccagctcaacgaaagatccaaccagctcaacgagcggagcaacgagctcaaggaagaggggaaaatcgaagttgccattaacttgctgaaactgaaacagccctttgatctgattgctaaggccacggagctaagcgaaagcaccatcagaagcctgcaaaagacaatattgtga

SEQ ID NO: 3523 - DNA, 804 bp, synthetic construct
  source 1..804: mol_type = other DNA
atgagcgaagaggagattgactataccgaatttatagacttcgaggattcgaatctgatttcatttaagctggcggcaatcaacaacaaggtgcggttttccatcctcgaaatcctgagggatttccagaagctcaacatgaataaggacaagaccttcaaaaaagacccatactactctcgcgaacttaatgagattcttttaaagaaatacgatattaacatttccctgcagatgttaggccagcatatgaaacagctgctgacagctggcctcattgaagaggtccctctcaagaaagaggtgcccaataagatcggtgcccgaaacgtcaaggggtatatcctaaagccggacgcctttgaggagctgttcctggagatcaacttcctcagcgatgagctcctgagcttctttgacctgtacaaaatcaaccagaagttccacgacgaggactactgcattctgaccatattcaatggagccgataagggcaagacatttaaggtgcacaaggatgacaccgtccttatcgggcggaaagctgatttctccaaaggagatttggcctcatttgctatcctgttggacaacagctatacggcagtgagcaatgtaggcaaaccacacctaaagctgttctataaggacgacagttggtgcatcttggatgagggcagtacaaacgggacgttcatcggacaaaatgaagtggccactggcagaataactccccttaagaaaaacagttttctgaaactctccaggggtgaaggaggggcggttatctactgttctttctga

SEQ ID NO: 3524 - DNA, 771 bp, synthetic construct
  source 1..771: mol_type = other DNA
ctgaacattaggccctcatactcctacgcaagtatcctcaatgtctttatagaggaaaagtacaaagataacctcgggtgctttcggaacacaaatttttatgatgtgctggacttccagtcagatgattcgtctttttactatgatatggcctttttcagcttctactatggggactataagtccagcttctttctaagccagaaggccatgattctgggtcatgatgagggcgacttgaagctcctgcggctggcggctttcaacgagctcagcccaatcaaaaaactactgtttgactccataaaagaggagttctctaacatcatcaaggaagacgatgaggaactgttcctgttctatcttgaggacatgcactacctggagatcgcccttaaccagaaggacatcaacgttgaagaggactttctcaaccttattagtaatctgtacattcaagtgaaatacatggactacgtggattactacgccatgatcaatctctatcagttcttctatatcaataagttctacagcgaggccctgcttctgatcaacgagattctcgctcgcaacctgaacgtgttcaacctgaatagaaagttagacgtattgtttaatatcaacgacattcctggagcatatgacgtctatcaggatatacgactcttggacccgaactacttcgactcctctcccaatagggaagagatgtacctggaagtgtttaccgaacacttcttcaaaaatagtttgggcaagttagaatga

SEQ ID NO: 3525 - DNA, 717 bp, synthetic construct
  source 1..717: mol_type = other DNA
atgacaaatctggagctgaacatcctggatctaagcctcaacgaacttttacgcacagtgaataaaacagaatcaattctgaaagaccagtacgatgagataaaggaatttcgggacatcatcttgacggctcgaaacctgcgcttcgacaatggcaatgacgccaccatctttttggcaggttctggcaggtctggttttgtagcgaagttctttgccatgagactgatgcatctgggcttccatgtgtatgttttcggcgagactctcgtgcccccagttcacgatggcgatataatcctcttcatatcgaaaagtgggggggagaacgccgtgaccgatagtatcgaatccaccaagcttgaaaacattaaaaagtccaagagttccccttcaaaaaacaacatgatctttgagaatgtcaagattctctcagtctgcggaagctttgactgttacctggctagccactccgatgccaagattgtcattgaagccgagagggacagaaagtccaccaaggaagagagcgagcgtttcgacagcctgggattcaacagcaatgagctcgtgatcatggggactggattcgaagactcggcacttttgattctggacgcgctggtggtcgagatgatgaacaacctagggctgtgcgaggaggacctcgaaaacaatcacgagaacatcaatcggccgaaggtgtctaaaaaatga

SEQ ID NO: 3526 - DNA, 1113 bp, synthetic construct
  source 1..1113: mol_type = other DNA
atgtttgagctcagtggaaagtacaatactgctaaagtcttcgccgacaatatagacaacgacagcgtgtctcagatcattcaattcctcaatcagcctatcgccaaggaccagtccatccgaatgatgccagatgtgcatgccgggagcaactgtgtaatcggaaccacaatgaccatcacagataaggccgtgccaaaccttgtgggcagtgacattggctgcggtatggaaaccgtgtacctggacaccgatgagatcgatttcaatcgctttgatgagatagtccgcaaatacgtgccgcacggctatgacattagggaaaatccccacccttacataaagaaactgcggctcactgagatgcgttgctacttcgatctagaggccggctcgcagggcaacttttccctggggacccttgggggcgggaaccacttcatcgaggttggaaaggacaaagaggaaaacttagtgttggtcgtccacacaggcagtcggagaatcggtgccgacgtatgcgaatactaccagaaccaggctttgaagagcttcaaaagaatgcataagactgcaacgaacaaggagctcatatactgtgaaggccagctgttcgaggactatatccacgacatgaaaatcatgcaggaatttgcaagctggaacaggaaggctatcatcgagaccattctctcacactatgggatggattatacagacagctttacgacgatccacaattacatagacacagaccataaccaaatgatcctgcgaaaaggcgcggtgtcagcttacaaaggcgaaaagctactgattcccatcaacatgagagagggttccctgatctgtaagggaaaagggaataaggattggaattgctctgccccacatggtgcggggaggctgatgagccgccgggaggcaaaggacaagatctccctgaaagaatatgaaaacgcaatgaaaggaattttcaccaattcagtcaaccggggaaccattgatgagtcccccatggcttataagcccattgaggccattgttaacaatatccaagatactgtggagatcattgatattataaagcctgtttataactttaaggcctga

SEQ ID NO: 3527 - DNA, 735 bp, synthetic construct
  source 1..735: mol_type = other DNA
gtggaagttgagggggataagatgaatttcaaggaatttgaggagctcattaatagcggcgtcaaggagattagcctcaatgaggacatcagtctagaggataagacacaggcgcccattgaaatcaagaccgacggcttggtcattgacggaaaaaaccatatcatcgacgggaataacaagctgccaatcttatacataaaagcttctaatatcactcttaaaaacatcatattcaaaaacggcttctcagaggactatagcggtgccattaccaactattccaatgaccttaaggtggagcactgccaattcatcgataactcgaccgaaaatgcaggtgacctgtatgggggcgccatctacaatggagagaactcgaaactgacggtggaaaagtccatttttaaggaaaatgattcagactttggcggggctattttcattgacagtgatagcaccgtgaagataaacaactcagtatttgagctcaacatctctgaatttgatggaggagccatttacaataagggcgagctgatcatcgacaaatccatcttcaatcagaacatggccttcaaggggggagccatcttcaacgaaaacagtctgactatcaacgattctcacttcaaaaacaacaaagcaagcgacggcaacgacatacagacagaaaacgaggatatttccataagcaactccctgtgtgagtttatcaataatgataactactga

SEQ ID NO: 3528 - DNA, 1113 bp, synthetic construct
  source 1..1113: mol_type = other DNA
atgaatttcacggagtttgaggaattattggggggcgaggcaaaggagatcagcctgtacgaggacgtcattctggaaagtgacgaagactaccggaggggcatcgagctcaagcgggatggccttgtgatcgacggcaaggggcatgtcatcgacgcaatggagagggcgaaggccttccacatccaaggagacaacattactatcaaaaaccttaagtttaaaaatgccgttagccacaagggcaacgggggaggagccatcgagaacgtgggaaaggaactatccataaaaaacagccacttcttcaacaactgttcactgggtccgctggggggcggagcgatctgtagcttcgaggatatgaacattaatgactgcattttcgaaagtaacacttcagtgcgcagcgatggcggtgcaatatacctggagacctttttcaagccaaatgtaaccgtcataatgaagaactgcagctttaagaataattacgccgatggcgggttcaaggactttggctccaacgccggtgccatatttaataaaaacgctaatctgtatttgtttgactgtaacttcgaggacaacggggtggtgagcgcttacgattcaagcagtgaatcgattcagaataaaaacggcattataaccatggacaactgctgctttaataccagagagtcccactccatcttcaatctggggtttctcctgatcaacagttcccgcttctatcatcaccccgaaaacctcgagattcagggttcgatcttcaatcgaggcttcgtgggactgctctatggggagagaaaccagtacaaagtggagctggatggaaaggtcctggatagctcagatattggtgacctgatcaacgagtataagaagacatacaacctcgatacaaaagaagttgggttcatcttcaagaagaacattattgaatccatcaatgatctgagtagcgacaactttaatttagaggacttcaacctaggcgatattaatctttctgactacaaagacgacgagtatctcatggacctgctcaaaaataaaatcgatttgatctactccggagattttgaagactctgatgaatctatctga

SEQ ID NO: 3529 - DNA, 411 bp, synthetic construct
  source 1..411: mol_type = other DNA
atgctctactaccgcggggcgggatgggccgactgggatctggacaattttggaagcagaatctcgtacattgacgatttcccctttaacatcttgaaggctctcctgagctatttcgaaaccggggacgagcagtctgtggaatttaacgccgaaggctggttctacacgttcaagttcagttccgatgtccgggtaggcgagcgcgtgatctacgaaagcaccattgattttgcaaatgactttatctgcgagattgaggaacggatgggcctttgggccttcttcccatcccgaaggactagtgacgaggactattatgagctggtggacctgatcgtcaaaatcaggacagagctactggacaaggatctcataaacaaatggatcgatataatttcacagtcctga

SEQ ID NO: 3530 - DNA, 1761 bp, synthetic construct
  source 1..1761: mol_type = other DNA
atgatgggggattacatgaacacggattatctgaaggagtttgaagagttgaatcacaccaccgaaagcctcttcgatctgggcatctctgggcttctgatcattctgaaggacggaacaaacctgaccagctggagtgagctaagcaaccctgacgatatcttgtatctcagtgcagacttccggtgtaaggagaactacacggaatttagtaactttaagaacgccaaggtgctgatcctccagaattacgtccgccccaattttggcgtgggcagcttgtttttcaaagaggctgatctcatcactaaactgtctacctggcattccctggtggctttctacggcatcaactgggacatctccagcaccgattcgttaaagaacatgttcgccaattgcctttcactggaatacgcttactttgaggactgggacacttcccacattcgtaacttttgggggatgtttgttgcctgctgcagcttaaaggccatagacggcatggagaattgggacctgagctctgctgagaacatggaatccatgttcgagtcctgcatgtccttggaagacatttcattcctctctgactgggacatgtccaatgtggaaaacatctttgaaatgttcagggattgctacagcctaaaggatgcgagctgtctgaactggaaatttaagaatctaaaaaacggtgacaaccttttcgccaactgccgaaagcttgaaagctttccaagctggtacgatgatgagttcatcaatcagttcggcatccggaaccagctaaacctcattgacgacgatagctttttctataagatcgcagggggattcgacccccaggacatcttcatagcagtagggtacatcagggatgaggagtgtctgaaaagattgcttcgcgactcctctgtgcacttctatgcgcgaagggccgctcttctgaaccccaacctgaacgacacagagattctcgaggagtttgcagacagcaaggattacgtggaaagggcctatgcaattgaaaaccctaacttcaccaacatcggaatcatacggcgcctcgccaataatgataagagtcatctcgtccgcttcaaggcagagaataagctgaaagagctgaaaagtgaaggactggaaatcatagaggactaccctagagagttcaagcaagcctttgaaggtcatgacagagagagggcctctctcgtcctctcccaatggagaggatacgactccacagatgctaatttcattctggccaaggtgatctcagactcatcggatgaggaaatcgagtttagcgaaaccttcgaggcctatattatatcaatggaggagaaaccacaggacccatcactgttcaactggtttagttccacagctgtggaatgtatggaaaaacgggtggacgaggatattggcttctcccagctgttcaacaatatgtataagagtcacatgaactcaacagattatgcaacggcctttttagactttttccaggacattctggaaaatgatcgcgtcgagaagctcaatctgctgcggggtctcgttgattcgtgggatactgactgtccggatgacgccaatatgcactgcgcttacgttatccttaacatcaaaaagatttcgaaagacgaattggaggaccgaatagcgaaggctaaagtctgcattccggagaatttgaatagttatcccaaactgatggccttcatgaatgcggtactggaggccgacaaatga

SEQ ID NO: 3531 - DNA, 945 bp, synthetic construct
  source 1..945: mol_type = other DNA
atggagcttgaagaacggatcgaagaggctctagagtatatccagaacgacagcaactatgccttggagcttttcaacgggattctcaaggaagacccccacaatatcaacgctctcaatggcaaggggtcagccctgatgaagctgcaccgcaaccaagaggctctcgatgcattcaacgactcactgtccgtagaggaaaacccttcggcctatctcaacaaggggatcatactgaaaatcaacggagactacaggaacgcactgaagtccttcgatagggcgttgaactataacccgcgactggcttccattgtgagtctgctcaagaacgaaatactggaaatcttcgagaaggagagcacggatatcagtctgctatatgatttcaacgaaagctgtacagcactgatcaaaaaggcgtacggctacaagaaccagggcctgctctgggatgccctagactgcttggaggaggccgtcaagcaagatccaaaaagcgaaaacagtataaatgacatcattaaaaagcttattctgaccatcaagaaggaatttctgtacaaagaaatcaattccaaaagcaccaaaatcgacaagttgaaattccagactattaagagcattattgtggaggacaatccccataaaacactgctgctgaccaataagatatttgaaatcaatgagaacgatcttgacgccttaaactaccagggcatcgcctacttcagcttgggtgagtacattaaatcgattgagagctttgacaagtgcctgtccatcaatcccaattacacttactgctcattcaataaaggactcgtcctgagacggatgggactcttaaacgagtctctggactgttttaataaagtgatgaatgagtctgattttcttaataaggttaagccatttcaggaggaggtgctcaccaagatatga

SEQ ID NO: 3532 - DNA, 603 bp, synthetic construct
  source 1..603: mol_type = other DNA
atgaagacaatcgccaagccgttccagaacagtatagacatcaagaaatcccaattcatctgtcgcctttttcctgctcagacggaaaaagaggctaaagatatcattaaagagatatcggaggagtataaggatgccacacacaactgcaccgcctacgttgtaagcgacggggaaggctatgatgacaatggagagcccggcggaactgcaggccgaccaatgctgaacgtcctaaagaagaatgagattaacaacgtggtggccattgtcactagatacttcggtggtatcaagctgggggccggagggctggtgcgggcctactcaaaatccgtgttagagtgcctggctattgctgagatagtggaaatggaactctatgaactcttcaggttcacctttgaataccaggacatcaaggcaatcgacgcggaggtgagggccaagaacctggccgtcattgagaagcagtatgaggcacaggtcatctactttgtggcaaccgataatgtcggcattgttaaaagcgtgcaagacaagttggcgaagcaggtaaaaatcgagcatctcggcagccggtacctggaaaaaatcgtgtga

SEQ ID NO: 3533 - DNA, 510 bp, synthetic construct
  source 1..510: mol_type = other DNA
atggaggaccgcaaggcaaaatttatcgtttacgtggtggtgtgcctgcttgcttttatctgtagcagcaccgtcttcagcatgactggcggtctgtctgattggattgtaagcaacgtcaacactaacgaggatgccaataacaatggctacattgacagcagcgagggacaatactacagcgactcggacgggcagtattactccagttccgactcctatgacaattcaaatgggggcagtggattcttagatgggctgttcagcagttcggacaattccgaatccaactactactcaagctccgatgaggaacccgatttcctggccaggctcatacgggaatttatcggtggcagttcaacaacggacagttattatgactccagcgatagcaactactactatgaggacacctcaaacggctatgatctagggaacggattcagctacgatctgaatgaactcttcaccaaaacagacaacaagctcaatcagttgtttaactga

SEQ ID NO: 3534 - DNA, 3513 bp, synthetic construct
  source 1..3513: mol_type = other DNA
atgatagttctgaacaaaagaaagaaatcctgggaaatctatccgattggcagtcctaaaggtgctctgaatacaaaaaggcaggctgagtttgtcggcatcctccgcttcatggaaggggaggacgggttatcaatcaagcgttttctaatcaaaagcgacaaggaagaaaagcctttggctccctcgaaggcgatcaacctgttgcgctctcaggccgtgttcctggctcagaaagacgatgaaatggaggccttcctggaaaagaacaacgtcaaggtccgatttacaaacatctgccagcactgcagttatgaaggctacgtgaccattataaacagcgacttctcatataactatcatgatcagctcatctgcaaatcctgtgccgaagagaccatcaagcgcgagcttcagttgaggggatacgacaagaaggttttcagaaacttcaagaaggtcctggaaaagactggcagcctggacgacgtgctagagatgctgtcaccccgttttgaccctctcgcccatacagacttgactctgtttgacaccattaaggtgcacgaggataagatacctaaaatcgccatgaagcgtcttaaggtgccaaaggaatttcgggacgttctcctcaaggataaccaatacctcctgccggtgcagtacctggccatcagggaaggcctcctgaaggatgagaatctcttggtggtttcagctaccggtagcgggaagacactggttggcgagctggcaggggttcccaaggcactgaacggtaagaaattcctctttctgaccccgctggtggccctggcaaaccagaagtacagagacttcaagaagcgctatgagccacttggcttgaaggtggcgatcaaagtggggatgaacagaatcaaagcaaagggagagctgaagcttccagacagtaatattgccgatgcggacatcgtggttggaacctacgaggggattgattttctacttagatcaggcaaaagcgacctcttgaacgatttaggcctcgtcttaatcgacgagattcatacaatctccgatgaggagcgcggtctccgcctcaacggacttataaagagaatcgagcacctcttcccaaacacccaggtgatcggcctctcggccacaattaaaaaccccaagacgctggcacaggactttaacatgaagctggtccagtataaggagcgcccagtgcctttagagcggcacatcgtgtttgtgaacggcgatgttcagcggcgtctgctgatgagaaaactggtgcaacgagagttctacagcacatcctcaaagggtttcagcggacagacattgatatttaccaactcaagacggaaaacccacaagatagctaacttcctatctgggaagggcataaacgcctccgcttatcatgccggactctcctacttcaaaaaggaaaagattgaaaaggacttcagcaagggcaagattgccgcggtggtcaccactgccgctctagctgctggagtggatttcccggcatcccaagtaatttttgagtccctgttaatgggaaacaaatggatttccccaaatgagttctcacagatgctcggccgagcaggaaggcctagctatcacgaccggggaatcatctacctggtgcccgagattggaagtgaatttgacggggaaagtgaggagtccgtcgccctagaccttctggaaagtgatgtggagaatatcattgtcgattacacggaagacggctcactggagcagatactggcagacatcagtagccgatcattaacgaaagtgagggatgtaatcaacttctataaggacatccccgtcccaatcgacattaatacggccctggaagagctgagggacaaaaaagcgatcgagatacacgcagatgacacgattgacgtcactcggtttggtaaggcggtggccatgtcattcctgtcaattgatgacggggtcatcatcaaggattccattaacgataagaattacctgagccagtattacagcaagcccttctttaagaccaatcttcgcgagctgagaaggctgtccgaccggattgatgaggagaacgaggagattctgaatagaaacaggaagatccaacataagctggaccagttgaagaagaacgagagtcaaaagaaagaggacaaggataaggaagataagactgataagaagaataagaagtccaaaaagaataaatccaagaagagcaaggactctaagaaggacaaaggtaaagacaattctaagaagtccaagaaaagcgaggattccaagaaggacaagaaaaataaaaacaattcgaataaatctaagaaagataaatctgagaacaagaacaaaagcaataagtctaacaaatctaagaaagacaaatctgagaataagaacaaaagcaacaaaagcaacaaaagcaaaaaagacaagagcgagaataagaacaaatcgaataaatctaataaaaagaacagttcgaataaggaatttaaggactctaaaaaagataaaaagtctaagaatagtaaagacaacaaaagcgagagtagtaagaaggataaaaagtccaacaagtctaataaatacaacaaatacaacaagagcaataaatacaataaatcgaagaagtccaataaaaataataagaatagtagtagcaagaacaaaaatgacaactctaaagatagcaataaggataaaactaaccataaggagtctaaaagtgagtcgaaccaaagcaaaaacctcgaaaaagacagccaccctatctctaaggactacaagaacagtaatgcaagcgtctctgatgatctgaaggactattccaagaaagtaatgtataacaaacgaatcaacatgagcaaaaagcagcacaagaccatagaagataagcccattctggtaaacaagcttaactttaaggaaaacatcttcagcgagatcaatccacgaatgtcgaaaaaggaagtgaacgctaacaatctgctgaaggtccagtccattgcccttgacctcgagctgtttgaaaatgcttaccttgctcccgtggtgcacaagcagatcgtatccgccctgaaagtaaacttctccacacggctgttcagcgaatcaaccttggatattatatcctccggggaagccattgccaaactcgatatcaagttccaggatgctcttctcaagctccagatcgacttcctgcggtgtgactgcaacgaccgccccttctgtgagtgcttgcaaaggggcatttcctattacatcttgaatcagcggttgaataagagggaccccattgacatctccaaaagtcttctcaaggaatatcagatccaagcctaccctggcgatattttctcatggctggatgcctacgtgcggaatctggacgccattaaacgcgtggcccaggcatacgggaaaaaggacatcgttaaagaagcggataaactaatcaagataatcgagactgggaaatga

SEQ ID NO: 3535 - DNA, 969 bp, synthetic construct
  source 1..969: mol_type = other DNA
atgaacatcctcatcaacggaaccggagcgatcggcatagggctgggcgcgtcgatgatttcacagggtgcaaacgtgagtttctttgctagggaagagactgcaaatgccatcaggaagaacggaattaaaagaaccggcatcttcaatcactacagcttcgggccagaaagttttaaggtctacacagactacaaggacattcccgacaacgagtttgacttcgtgctggtatccagcaaaaccattgccaacgacgatataagcagaaagctaaacgaacacaagtccatcctcaaagaggatgccaaaataatcatcttccaaaacggctttgctaacgacgagccctacttacgcttctttccaaaggaacaggtctactgtgcacgggtgatcacagggtttaaacgccccgagcggtacatcagcgaggtgactgtccataccgaacctatattgctcgggagccttcagaaggatgatgacggcgagttcattgacagccgcccagtgtcgatcattagcaagatgatcaacgattcaggcatcccgagcgagaccactgaggaactggataagttcctgtgggccaaaatgctctataactgctccctgaaccctctgggtgccattttgaatgggaactatggcaaactgatggaaaatgagtattccgttaaaataatgaatgagctaattgatgaaatcttcgaagtaatcaaggcctcaggataccggaccaactgggacagccccgaggagtacagggaggtcttctatagtaagcttgtgcctgacacgtacaatcaccgttcttccacactgcaggacatttccaagcgacagaagacagagatcgacacgctcaatggaaaggtgatcgaactgggcgagaaatatggtgttgatgtgagtgtgaataagacgatttataatattatcaaaaccatagagtctgaattttga

SEQ ID NO: 3536 - DNA, 489 bp, synthetic construct
  source 1..489: mol_type = other DNA
atgatcatagtcaccacaatctgcgtgatcctgattctgatcgttcttttttacggactcttcccggggttgaccaactcaaacgataacagtgacaataatctaatcattcagaatcagacgtctcacttcaccatcgacatcgaaaacgggacttatctcagcggagaaggcaaaagcaagatggtggactccaactattccacactggaatcctacgagaacttcacgatttcaggctacgaggcctatgagatagaactcgacaatggctcttggtacatagtcagtctgtataaggtggactataacaccccctcgagcgactgggtatataatagtgatgtggatgaggatgggaacgcatacatcttcttcaatagcaaaggtgagtactacggctactttattaacattccaagctcatccgacccttccacatttgagaatttaagctttctgactagcatcttccattacaaccactga

SEQ ID NO: 3537 - DNA, 243 bp, synthetic construct
  source 1..243: mol_type = other DNA
atgagcgacgtgggcaagacagtcatcacaacaatcatcaccttggtaacgaccgccttcggcctggtcgccggacttgcctggaacgatgccattcagaaactgatcgacagcgtgatggggcccggagacgcactgactgggctctttacttacgctgtgattgtgaccatactcgccgtggttgtcaccattatactggcgcggatcgcagctaagatgggcgtggagctagaggaatga

SEQ ID NO: 3538 - DNA, 387 bp, synthetic construct
  source 1..387: mol_type = other DNA
atggaagagatcgtatttaagccgatcggatacattaaaagtaaatatgaaacagtcgagaacatgccaaaatccccaagggaaggcatggaggacgaggcagagctcatcgtcaatgaagagtacctggagagcatgtctgacatgaaagccggcaaggagtacatggtgatcttctatttccacaagtccaacgggtttaagcagcgcgttccttttagaggtgacgggccaataaccggcctgttctcaacccatgcccctaaccggcccaatcccattggagtgagcataatcaaagtcaaggaaattaacggaaacgtgatcaagttcaacggggtggatatgctgaatggcacgcccgtgctagatattaaggacgcttga

SEQ ID NO: 3539 - DNA, 339 bp, synthetic construct
  source 1..339: mol_type = other DNA
atgaaacgggtcgttgcggtgtttcgtcaacagaagttcgaggatgtcaaacgggccctgctcgcaataggctgtgagggcatgaccatctccgaagttaagggcaggggaagacagctgggggtgaaagagagctaccgaggcagcaactattgcattgacctgatccccaagacacgcctcgaattgattgtcaatgaagatgacctagaggatgtgatcgacacgatcattgaaagtgctaggaccggtgaaatcggggacggaaagatcttcgtaagcgacgtggaggaggtgattcgcataagaactggagagcgggggtcaaaggccgtgtga

SEQ ID NO: 3540 - DNA, 1212 bp, synthetic construct
  source 1..1212: mol_type = other DNA
atggtggtgcttagcgccggggacactgcatgggtgctcatcgccactatcctggtgctactgatgagcatccctgaggtggcgttcttttatagtgggctaacaaaacgcaaaaatgtcctgaatacaatgtttctgacgtttattgcattctccattgcaagcataatatgggttgtatatggctacccctttgcctttggagatgtcagtattagcgggttgatcgcgcagcccgctcatttcttcatgagcggcatcggcattgaagatttgacaggaaccatccctaccatattgtttattgtgttccagctgacctttgccggtctgacggcggccctgatctcaggttcgatcgtcggcaggatgaaggtctcagcctggatagtcttcatcatcgcctgggtcaccctggtgtacgttccgattgcccactgggtatggggcggcggattccttatgcagatgggttccctggacttcgctggcggtacagtggtgcatatcaactctggggtgaccgctctcgccttggccctggttctcggacggcgaaaggacacttccctgctaccacacaacctgggatattcagtgctcggggccggattcctctggttcggatggatgggcttcaacggaggatctgccctcgcagctaacggacttgcggccagcgccatcctcgtttcgaacgtggctgcggcaacagcactcatcacttgggtgattattgacatcgtgaaagtcggcaagcccaccatgctgggggcaatcaccggtggcgtggctggcctggttgccatcacccctgcagcaggattcgtggatgtgccagccgcgattgtcatcgggtttgtgaccacgttcgtgtcctactttgccatctactacctgaagacaagattcggctacgacgatgccctggacgtgtttggcgtgcacgggctgagcgggatttggggcgcaatcgccaccgggatttttgctgtgcccgctgtcggcggtgccgctgggctgctctatggcaatccagggcaggtcacaattcaagtaataagtgttattgtaaccattgtctatgctttcacgatcagcttcatacttgctaagatccttgacaagaccatgggcatccgcgttgacgagaaaactgagatcgaaggattagatactaaaatacacaaggagtccggttaccggttatga

SEQ ID NO: 3541 - DNA, 420 bp, synthetic construct
  source 1..420: mol_type = other DNA
cttaaatcagataagcgggctaagtttgccatcttcttcagtattgccatcctagccctggggctgagcaacattgctgctgtgtggacgggagacttgataagcggttccctcccggtcatcaacgaaacagataagctcatcgccctggacaatgacaatttctctcccgcaagtctgaataccgtatacgaagagaaaaaggttgtggaggtggtcaacgacacatctgacgcgaacgatactgattccacccccaacaatgcggactccaatacggaaagtgacgatacttccaactcaaacaataacaacaacaaccaaaacagcaacggcaacggcaatcagaatacaaacccaaataacaatgccgagcctagcagcggaggctcggcagggcagaccgaaaccgaggagtga

SEQ ID NO: 3542 - DNA, 570 bp, synthetic construct
  source 1..570: mol_type = other DNA
atggaggagaacaaaaaatttgctcagaaggtaaaagatatcagagagcgccagcagatgagtattgaagaactggccgaaaagagcggcgttaagcttgaggtgctgcaggccatggaaaacggggagatcattccctcactcactcctctgacaaagatggcgaaggccctcggggtccggctaggaaccttcctggatgataccgaacagctcggtccagtggttgtccgagatggcaagatggaaaacaccctgtactttagcggcagggaggacgtcgcaaatgcaacaaatctcgagtttcactcgctgggggccggcaagcatgaccggcacatggacccgttcatgattgatatcgaccacgacgacgagtacgagttgtcctcccacgagggtgaggagttcatctatgtgatggaaggagagatcgaagtggtctatggccaagacagcataacgctttccaaaggagacagcatatactatgatagtgtggtgccccatcacttacatgccaaggcggaaaaggctaaaatcttggctgtgctgtacactccattctga

SEQ ID NO: 3543 - DNA, 1665 bp, synthetic construct
  source 1..1665: mol_type = other DNA
atgagtgagctatttacagagctgccaattggtaagttctttgagatgcaagtggagaagcagccggatcacgaatttatggtttatccagaccgcaatctccgctttacatacgaacaatttaacgagcgcgtggacaatttggcaaaaggcatgctctcaataggcatagaaccgggggaccgtgtgggaatctgggcaaagaacgtcccggagtggcttacgttcatgtttgccactgctaagatcggtgctgcaatcgtgaccatcaacactgcctaccagtcccacgagctggaatacgtcctaaagcagtctgagatgaaggcgattgcaatgactgacggattccgggacacgagctatttcgatatcatctatggccttgtccctgaaataaaggagagggaaagggggaatctgaaaagcgaagagttcccttatctggaatacattatccacgtcggtcaggaaaagcataggggcatgtacaacaccaatgaattgctgctgctggggatgaactatgacaatgataagtatcaggagatcaaggatgccgtgacccagtatgacgttatcaacatgcagtatacaagcgggaccgaggggttccccaaaggagtgatgctgactagcagaaacatcctaaacgacggctattacattggagagaatatgaactataccgaaaaggacaggctgctcctccaggtacccttgttccactgtttcgggaccgtgctgggggtcatggccgtaatcacccatggctccaccatggtggtcctggaggagtacgatcctctccttgctatatcccccatccagaaggagaaatgcacatcagtctatggggtgcctacaatgtttatcggaatgatgaaccatcccatgtttgacatgtttgacatgtcctcccttagaactggtatcatggcaggcagcacgtgtccagtggaaaccatgaaagatgcgatcaacaagatgaacatgaaggagatcacaagcgtgtacggcctgacagaggccggtcctggctttacccaaacaaatgccgccgacagttttgaaaagaaaatcagcacggtgggacgaaaattccccaatattgaggtaaagattgtcgaccccgaaaccggagaggagttgggccccggcgaaaccggcgagattatgtgccgagggttcaatgtaatgaaaggatactacaacatgccggaaaagactgcggagactatcgagccagacggatggttacactctggagacctggctactgtggatgaggatgggtactactcaattgttggaagaatcaaggatatgatcatccgggggggggagaacatatacccacgggagattgaggaatatctcttcacccacgagtgcgtgcaggatgtgcaggtggccggtatccccgatgaaaaatacggcgagattgttggcgccttcattatcaaagagcccggctacgatgacattaccgaagctgacataagagacttctgcataggctcgatcgcccgatacaaggttcctaaatacgtcttcttcgtggatgagttcccactcacaacgagtggtaagattcagaaatacaagttaggcgacattggcctgaaactcctggaagagcggcgcgaacggggagagctgtga

SEQ ID NO: 3544 - DNA, 879 bp, synthetic construct
  source 1..879: mol_type = other DNA
atgacccttgttctgatcgggccggcctgcgaggacctgattataatcggcaatgagaagagctccaggatcggaggtgcaagctactttcagagcttcgtctacgaggagttttacgacgactacatcgctatcgtaaatgctcagaacaccgacctgatcaatgagtttcccgacatgtctaaaacagagctcattctgaaggacgatacccactacttcatcaatgaatatccagataaggacaaccgcgacatcagaaagcagtccacgaatttcgcagacattccaattctggcggatgacctcaaagccatctttaacaacctgggcttgaacgaggacaacatcgatgccttcgtgataaatcccctgaacagcaacgacatccccctcgagaccctagagtatttaaacagtttcaatttgcctatctttatatcccttcagggcttcctgcggttcaaggacaaagataattccatggtgctcaagtcatatgaggatctcgattacatcttcaacattgccgaagcgatcttcctggatgagaaggaactgaagattgtcagtgacgaagacaagtctgactctaaaattgaaatccaagacattggttttgatgaaaaaaccaacactatttttatcattacaaacgggagcaaggggagccggatcacggatttcaagggcatcaacataaagatagattcagtgaaatgcgacaacatagtggatgccactggctgtggagattcctatatggctgccttcatctcgaatcttctaaacggaaatgatctgaaggactcgggagactttgcatcactcattgccagtaaaaaattggaatttttcgggccttaccgaacagactga

SEQ ID NO: 3545 - DNA, 552 bp, synthetic construct
  source 1..552: mol_type = other DNA
atgaacatcctgaacctgccactgaacatcctcattgggaatgggatcagtttctttgcctcaattgcgctgatcctgagctgcgttgtcaatgacaagagagaggcctacaaatatcaggtcattgaagccctgatcctcacggtgtcctccgccttctttctctcgtggactggcatacttacaatgctcattgctgcggcacggaactacctagtcatgaatgagaggctgagctcccgcttggccataatctttatcataattactctgatcatatgtccgctcattaataccatgggcttaatcggtctgcttcctatgattggaattatccagctgaccatctgcaactattaccttaagacaatcaaatggatcaaggtggccttcattgtgaacgtattgatctacgctgtttacttcattggaatctatgacttggtgagttgcgcaacccaagtgattaccgcaatcatcgggttcataagcctggtgaagctaatcaaggatgaaaaagagggcaacatagactctcagcccaacaattga

SEQ ID NO: 3546 - DNA, 273 bp, synthetic construct
  source 1..273: mol_type = other DNA
atgagcgacgacgaactgtatcgccgggcggagaggaaagtggatgagaaaattggattctacaagcatctctacagctacatcggtgtgaacatcctgctgtttgccataaatgcaatcacatccttcggcaaatggtggttctattgggtgacgatcttttgggggatcggcatagtaattcactttctaaagaccttcgtcctcaccgggaagcttgaggacaacagagaggagatgattcagaaggaaatggaaaagatgaaaaagtga

SEQ ID NO: 3547 - DNA, 951 bp, synthetic construct
  source 1..951: mol_type = other DNA
atgaaacggctttttaagctagtcgaaaaatacttcttcatcatcatcatcatcgcagtggcaattgctgttgtctttcccggctcattcgactgggttatgggagagtttatggggatcaacatcataaacattctcctgggtataatcctttttggcatggggaccactctgaagatagaaaactttgtaaacgtattcaaaaggcctaaggaaatcctgctcggggtcggcgcccaatatatcatcatgcctctggtggccatcggggtggccagcctattcggcctcaatgaggctctgacagttggcctcgtcctcgtgggcacagtaccagggggcaccgcttccgacgtgatcacattcctggcaaagggggatctggcgctgagcgtctcgcttaccgccgtctctaccgtcataagtccgattctgaccccgttaatcactctgattctgattggaaacaatatcgccttcaatcctgtggatatgttcattagcatcgttcagattgtcattctccccatagctattggattgctcctgaattacaagtttccagacttctgcgaggagcttaaggactatctgcccgcagtgtcctctctggtgattgccatcatcgttgccggtgtgataggtgctaataaacaggccattctgggctcaagcgtggtgattattgcagcgatcgtggtgcaatacttcatcgccatgctcttagggtttgtgatcggatacctcagtggcatgaagagaaagcagatggtgaccatagcgatcgagcttgccttccagaacagtggattgagcacaagcctagctaagacgcactttcccgcgctgtccctggcaacggtgccaggagccttgtacagcgtatggcagaacttcgctggttccatcttggcctatatttttcgcaaatacttcactgatgaggaatga

SEQ ID NO: 3548 - DNA, 2817 bp, synthetic construct
  source 1..2817: mol_type = other DNA
atgtcggaaaatagatgttatgatcccgattgtgatgccgaggattgccggaatccccagcactacaattacatttgcttcgaccctgactgcaacgacgagaaatgtctgaacgaagagcattacaataaacagctactgcgagattatcaggaaagcaccgatctgagcgtttacgatcatcgggaagagattgattatgatgaagatgtggatataagtctttgtggctgtcccgattgcgcggatgaccacgaccacaatcacgaccacgaccatgatcatcaccaccaccatgaccatgaccataaccacgaacacagtcacgagcacgagcattcttacagtcacgagcacgagcacgagcacagtcacgaacatggccacgagcatggggatgagcacagccacgaacatagtcacgaccatgaccacggccatgatcacgagcacgagcacggggatgagcatagccatgagcacagccacgaccatgagcacgagtctgaggatacttgtggctgcgggtgcgatgatgatgactgccacgatgatctggaagaacacagtcatgagcatgaccattcacacgaccaccatgaacacgaccatgagcaccatcatgaacacgaacacgaccaccatagccatgagcatgaagatgagcaccaccataatgaagaacactctcacgagcacgaacacagtcacgagcatgatcacgaccacgagcatcaccatgagcacagccatgaccatgaccactcccacgaccatcatggccacgaccatagccatcacgaccatgaccacggagactcctgcggatgcggcgaggaccacgatgatgacgacttcagcttatgtgcttgccctgactgtgccgatgatgacgatgacgaccacggccaagaggaactcctcgccgagggaaagccactcatctacaacagaccgattcaaatcatggtgtccagtggaatactgtttatcacaggccacatcctcgagtttctctccttcagcccaacaattgtcacgatcatctacatgctgggagcattgattgccggctatgagatagcaatcctcgcatacaagtcccttgtcaagcggcacactgtcgggccggctttactggtggtgatcgcctgcattgcctccttcatcattggccacggggaagagggtgcagctgtggcgctcttgtactacatagcagaatttcttgaggacttagcggagcaccgggccaaacgctcaatcaagtcactggtggaaatcgctcctgaaaccgctagggtcaaagtaggggacggggaagagtcccgccggattgaggaggtcaaagtgggcgagattgtgttagtaaaacccggagacaaggtgcctttggatggggaggtggtctatgggacttcctctatcaatcaggcttcaatcacaggggaaagcctgcctgtcacaaaaaccgttggcgatgaggtcttctccggtacagtgaacgaagacggctacttggaggttgtggtgaccaaggaagctaaagactctgtaatcaataagatagttacccttgttaagcgctctcagcttaacaggtcaacaacggaaaccatggtggaaaagatctccaaatattacactccattgatgattattattgccgcctgcgtggctttcgtccccccactggtctttggccaggacctcatcgactggatctataaggccctgtcaatcatggtgatatcgtgtccctgcgcattcctaatctccactccaatcggcatggtgtcagctatcacatcagccaccaagaagggggtcctcatcaaaggcagtacctatgtggaagagatgagaaacgtaaaagccgtcatctttgacaagacgggcacactcacggagggaaagcttgaactgaacgacatcaacattatcaatgacgaatacagcgaagaggagattgtaaggatagccgcatcccttgagaacagctcgtcccacccgattgcccaggccatcgtgaactatgctaatgaaaaagagataggatttgaagagattgaggacttccgaaacgttcccggtaagggcatcataggaaatatcgggggaaagcagtactatgccgctaacgagtccctgattgaaggaagccagttcaacatttcccaagaggagattaatcagtactcggctgaaggtaaaaccctgatcttcattggcgatgagcagtctgtcattgctagcatcactgtgatggacagaatccgtgacaacgcttcggaggtaattaaagacctgaagagccagggtgtcaagacattcatgctcaccggtgacaataaaattgccgcagggaaggtggcggatgagataggcctggactacgtctattctaatctcctgcccgaggacaagctaaacattttggataccctccgaaacaagtttggggatgtggcgatggttggtgacggcataaacgatgcccccgccttggcccgcgcaaacataggaatcgccatgggtgccgcaggatctgacgttgccatcgagactgccgatgtggcgctcatgcaggatgacatcagcaagctgccatacctattcagtctgagccaaaagacgatgaatatcatcaaacagaacatcaccctggccattgtggtgaaggcactgtttgtgatcctggcaatcctgggattgattaccctgatgatgtctgtgggtatcggggaccttggcctgaccctggtggttatcctgaactcattcaggatcgcgatggtgaaggaccctctgttttga

SEQ ID NO: 3549 - DNA, 384 bp, synthetic construct
  source 1..384: mol_type = other DNA
atgaaagattacaaggagccaacaaacgacaaccacaatgacgatctgtgtgaagtgttccatccccacgaggagtcaatagagcgagcaaagaaacacgtcctctctgaagaggagtacagcgatctggctgaatttttcaaaatcttcggaaatccgaccaggctcaagattatctcccttttaagctttgaggacctctgcgtgtgcgacatctgcgaaagcctgggcttgaaccagaacgcggtgtccaaccagctgcggatactaagagcccataatatcgtaaagttcgaaaaagaagggaagtcggcccgctacagtctgaccgacctgcacgtcgagatgatttataagatgggccttgagcacatgacggagtga

SEQ ID NO: 3550 - DNA, 639 bp, synthetic construct
  source 1..639: mol_type = other DNA
atggggaaggtgttcatcatgtcttatattttcatcgatgagagcggggacctgggaaccaaaaagtcaagctccaagtactttgtgatggcaggaatcaaggtggaagacagccagaaactggatcgcgtgatccggaagatcaaaagagacgacaagaagaatatcatcacaagtaacgagattaaaggctccaatttgccacacgacataaaaattaaaatcctgaagaagcttgattccgttaactaccaggtctttatcatcattttcgagaagatcaataggtacaaggtgaacgatggctatgacaacattaagttgtacgaccttctggcttgcgaactcgcgaaacaaattgatataagtagctcttcgaagatcttcattgataagtcaaaaaataagaaagaggaaatcgtcaatttcaacaaggcatttctggaaaatctgaacaacttcaagaagtttcccatcaaactcgagcatgccaattccatgagctataaaggcttacagatagccgacctaatttcttgggccattttccagagtgtcgagcacaacaacaacgaatttatagacctgataaaaaataagaaaatcaaacgagtattcgaggagaagaagaacctctga

SEQ ID NO: 3551 - DNA, 183 bp, synthetic construct
  source 1..183: mol_type = other DNA
atgaacagtgagtttatcatactttttagccacattctcccgctgatcctgggcttcttcagcatcttgctaatgatcaatggaatcatggacaagcagaaagtgataaccgccttcggcattattctctttctggcagctgccttctccccattcgtggtcctgcccatcctgggggtatga

SEQ ID NO: 3552 - DNA, 696 bp, synthetic construct
  source 1..696: mol_type = other DNA
atgctggagatcattcccgtgattgacctgatgaatagcgtcgccgtatctgggaaaagtgggaacagggaaacttacactcccctgcagaccatatatgcgagctcatctgatccactggaaattgcactgtccctgaaaagcgccggtgctaaagagatgtacattgcagacttggacttcattgaacggaacggaaacaacaacatcttcaaaattaaggaggttaacagcgtactgcctgtgatcctggatgtgggagtcgacaagctggagacatttgagttcctccttgagtttgcttataaaataatcgtcgctaccgaaacccttgaatcgatagaggagttagggaagatttttgagaaatacccaaaggagcgcatcattgtgagcgttgatgtcaagaacaacgagctctacgcgaagaatatggatctggaccttgaaggcttcaaggaagtgctacggcgaatcgaccctaatgagatcatcctgctagacatctcctcagtgggcacagaggggggcttcaataagccgctcttggaatcctttgaggagttcaaggacaaaatcatcctgggtggcggaatcaccccagatgaaataagtcagctcgatgccttgggcatcaggaaggccctcgtgggaacggccctccacaagggccaaatcagattaaatcccttctga

SEQ ID NO: 3553 - DNA, 624 bp, synthetic construct
  source 1..624: mol_type = other DNA
atggaaaaaagtgaaatagagcattacctgagagatatctgggtgcgcgagtatgaacgcggagaaaagctagttgtagatgagtttaatgctgacgatatcgagctgttagctaaaaaagagtacatcaagaccgatgacggcttcgtcaatctgacagagaatggggaatacctggggcggtcactcgtgaggaagcacaggatagcggagaaagtggtggccgacctcttcctcgcagatatggacgagatggaagagctggcagaccaaatcgagcacgtgatgtcggccgaggtggaagagaacatctgccgaatcctgggaaaccctgaaaactgcccccataataacccgattcccaagggggacaccactcccggcattagcaaggaatactctgttcctctggtctcctgccacagcggagagagtggtgaggtctcccacatcaagacagaggacgcccgtaaacttagaaagatcatgaacctgggtcttattccaggcagccggatctgtctgattcagaagttcccaaattatgtcttccagctcggcaacacgcagttggccgtggacaaggaattggccaacgagatatttattaaactcgatgaatga

SEQ ID NO: 3554 - DNA, 219 bp, synthetic construct
  source 1..219: mol_type = other DNA
atggacgaaaacgataataaaagtcagattatcaaatgtgagttctgcggattcacatttcagaagtgtgatggcatcagctgtgactcctgcccaatcaactgcaaaaccgtccgctgcccgaactgcgggtacgagatcctccccgagtcaaagtcttataagttcctggaagacggcgtgaaaaagataaggaatcggctgtttaagagcatttga

SEQ ID NO: 3555 - DNA, 2049 bp, synthetic construct
  source 1..2049: mol_type = other DNA
atgagtgaaagtattactcctaacggtggggctaaatactcaaacaacaaaaacaaagccctggccagcaagaaaggcaatgattcctactacaaaaatgtccttttgataggaagtcccaatgtaggcaaaagcctgaccttcaataagctgactggcatgactgcgatggtgtccaattatcccggaaccactgtggacatcgacgagggcaatttcacctatgagaacaagacggtccacataacagaccctcccgggctttatgatctaaacacaatcaccgaagaggaacgggtagccaagctcctcgtcctcgacaaacgctttgacctcatggttcacgttgtggacgcaaagaacatagaaaagtcaatcgacttgaccctccagctgatcgatgccggcaaggaagttatcctggtgttgaacatgatggatgagctggagaagatgggcgcaactgtggacgccccgtccctctcccacgagcttggaatcccagttgtgctgacggccgctgcccagaaccgaggattggatgacctgaagcatacaatcgtaaactacgattccatagagaaccaaatcttaagcgagtctaagacgctgctggatgtcgactatggacgcagcatcgaaatcgcaatctcggagatccaaagaaatatcaaagggaattatccggtgtccaaaaggtacctagcagtatctttgttggaaggtgatgaggacagcgaagacctgctaatggaaagtgaggattgggataacctctcccaggtcatcggtgctcagaaggcaaaattcgaccagcctgtcaagtatctgactaagctgcggcttgccgactatgcaaaacatataaagtcaagttttacaaccattgacagcgtgaacattcaggataccgacagcctgggagaaaagctatccagaatcatgatccaccccttctacgggctgatcattctggcctgtgttctgttctttggcctttacctgattgtcggagtgcttggggcgggcattttagtggatttcctggagaacaccatattcggccagtacataaaccctgctgtgacatctgtggtcgtgcagtacattccctgggttcctatacagaacctctttgtgggggagtacgggattgtgacgctcgggctgacctatgggttcggaatcattctcccgatcgtgtccttgttcttcattgtcttttcaatactggaggacagcggctacctgccaaggctggctcttcttgtggataacggctttaagagaatcggattatccggccgatcggtcatcccttttgttcttgctgtgggctgcggaagcatggcgacaatggtgacacggaccctcgagaccaaacgggagcgaaacattgcaactatgctcatggctctcacaatcccatgctctgcccagctcggggtaatcatggccttactgtctgccaggccaaggtcaatctggatctggctggcggtgattgtcttcaattttgtcgttatcggttacctcgccaagagattcgttccaggggcccagccaagcttctttatggaactgcctcccctcaggtggcccaagctctcgcacattgccaagaagacgtggacacgtctggtgatgtacattaaagagctgattccaatctttattctaataagtgtaatcatttgggccctggacttggtcggcattttccaatggattatcgcgtgtgtgactcccatcgtgaatgcaattggtctgcccggcagcaccagttcctcattcgtcctgggcttctttcgccgggactttggcgcagctggactaatgaccatccaaaatcagctgaccggagttcagctgctggtggcctctgtgaccctgacactgttcctcccgtgcgtggcccagctgatgatcatgatcaaggagcgcggggtgaaattggctggtcttattgctgtgatgagcatcgtgctcgccttcagcatgggttttattgtcaacttcatcttgacgagcctgaatgtggtcttatga

SEQ ID NO: 3556 - DNA, 1197 bp, synthetic construct
  source 1..1197: mol_type = other DNA
atgatcgagaccgatgtgttggtaataggggccggtcctgccggctcggctgctgcaaagcatgcagccctgggtggggctgatgtgatcctaatcgataaaaagtctgaaatcggcacccccaagagatgcgccgaaggcatctacgaccacggactgaaatggctggggattgagccggaccccgcatgggctgtgcagcgcattaacggtggcaccctgattgcgccagataaaacccgcctgacccttgatgagacaattctgcccgagaagggctacatcatcgagcggaaggtcttcgacaagtatatggcgatggacgccgcccgagcgggcgctcagatcatggtgaagacgcaagcaaaatccattcagaggggtgaagactccaaaggctcattttatactgttgactgtgagcagatgggagagatcatcgaggtgaaggccagaattgtgatcgctgccgacggtcctgaatcacgtgtcgctaaggccttcggcgtcaattcaactacaaaaccaaaatatatgatgtctggggtccaatacgagatggtgggggtcaactgcgagcggatggatttgatagagctgcacctgggtgccttcgcagggggaggatatgcttgggtgttccctaaaggggacgacattgccaatgttgggataggaataagtagcgaaagcgacaggcccgccatcgactatctcaacgaatttattgaatcctaccctccactgaaagacgccaagccggtggagctaaatgtgggaggcgaccctatcggaggactcattggccagatttacagcgacaacctgttagtgtgcggcgacgctgccgggcaggtggaccccataacaggagggggaataatccttggaatgctgggcggcatgactgcgggccaggttgcaagtcgcgccatcaaggatggcgactactccaaggaaaggttaaaggaatatgatgagttgtacgatgagtacacgcaaggtgcgatccccaaactcgccgttggccgggatgtataccttagtctgagcgatgatgacctcaaccagatcattcacgcattcgaggggctcgactacaagagcatgagcccaaaagatatcctgaaggtcttctttaaactgtccccaagacttgcactcaagttccgaaagttgtttaaggtagtgctctga

SEQ ID NO: 3557 - DNA, 909 bp, synthetic construct
  source 1..909: mol_type = other DNA
atgtttaacaagaagatggtgttggccatcagcctattagctgtcatctttgcttcgatgtgcatagtttcagcggatgactccggagagggaagcttcaaggaactggccaaactcgtgtccggcgataataagaccggggtgatcactctcacaaaaaattttgcaaatacggacggctacgacgctgatggaataaagatcactggggataatctggtcattcgcggggaagaaggcaaggacattacaatcgacgctaaaagtgcagggcggattttcaacgcgaacggcaccaagaatgtcacgttcgagaatattcatttcgtgaacggcaactcttccgacgccggtggggccgtgctcctgggtgaggagcccagcagtagcgtcaagaattgtcagtttgacaactgctactcagatgcatttggcggtgccgtagatggaaatgccatcgggtgcacgtttgaagactgcagcgcaaactaccacggcggtgcaatattcgatggatctgcgaccaactgcaccttcaacgactgtttctcaaaaagctgtggcgggagcaaatttccgatcatcaggcaaccaattgccaacttcacagactgctattcctactggcagggcggggccctgtatgaggtggaggccatcggctgcgacttcaaaaactgctattcgagcgagggaggttccatgtgtggaggctctgcctttaactgtaatttccaggactcccttgccaagaatgggaacggtggcgcgaccctgaacacaaccgctaagggctgttcattcagtgggtgcagtgtaacaaatggagaaggaaacgccatgtacggaggcactgctaccgactgtaaactggataaggcagatgctgttaaggtgaacttcaaatga

SEQ ID NO: 3558 - DNA, 441 bp, synthetic construct
  source 1..441: mol_type = other DNA
atggcgaatctctcatttatcaacaataattttaagatgattgtgggcatcctgtccatcatcctcgcgatagtggtgtatttcatcaccccgccatacatcgagttctacctgatcttcgtctttctcattcccgccatagccttgatcgttcccaacgacgccattaagaacagcagggctataggcgctcttacctttattctggtcattatcgtggcatatttcgcaatctcggggatgctgggggcctacgacgtgctaacaaacatgtacgtcaacggattaatcaactccacgcctagcacttccgatatcagcgcttgcagcaacggctatttgatggtactgatttacgccctgttcaatatattctgtggagccctgttctttaaacggacaagtagtattgacgacgtggacgatgaagatgcattctga

SEQ ID NO: 3559 - DNA, 1407 bp, synthetic construct
  source 1..1407: mol_type = other DNA
atgcaactggatttcaaccacgtcctgactcggatttcagactacgaaaagccaatcgtcttgaaccacgatgttgtgctgacacggagcgaagcccaccagtttaagaagggtatagaaatcaagcgggacaatatcgtgatcgacggaaatggccactccatcgacgccaggggcaaaaaccgtattttcaacgtgctcagtaaaaacgtagtcataaagaatttcacctttaagaacggcttttccgaaaagtttgggggagcaatccgcgttgccggggaatgtaagctcatcaactgcacgttcgagaacaaccgcgcaaaaaaaggaggaaacgacatttccaacggctctgagttgagcatctgccactgtaatttcagcgacgctgatgggtcaatcaataacctgggtacaatttaccttctgaaggacgaggaacacgagataaagcccctgatctctaataacggggagatcaaacgcatcatccccaagcatgatgtcagcttccttataaatggtgataaagaccacatcaagggcgccctgattaggataggggacaaaagcggattctccaatgacgagggtgcctgtgttttagagggcatcgaagagggcaaacattcgctcgaggtgagtgctgagcattacatcagctttaacggaaatattgacgtgtccgaaaataatgtcctttttgacatccagctagagagactgattcaacgacacgacattaaaattttagtgaagcacaagggcgagcccgtcagtgacgcaattgtgagcgttggcggcatcaaaggctctacagatgaaaatggagaatgcatctttgatgatgtagaggagggagaaatctcggtaaaggtgaactccaacgagtacgagaatcagaagtataccatcacagtctccgataataaaaccaccttccctattaacctggggttcactcacttgataactccattccctgcgagtgatgaggacccttatatttttgccagctactctcatgatgatgccaacagggtgtttctcgagctaaagcgctttcatgactgtggcctgaacatttggtacgacgagggcattgaatcagggctggggtggcagggggttgtggagagtaagctcaaggcttgcaccctgttcatcgctttcatctcagcgaatgcggtggagagcatcaacgtgaggcgagaaatcttcctcgctatcaacaagaaaattccggtggtgcccatatacctcgaaaagaccgagctgcagtatggtcttgatctgcagctgagcccagtgcaggcaattttgaaatatgccatgacggaggagttctacgtggaaagatgcagacgggccttcgtcatgtatggactcatggacgaggaatga

SEQ ID NO: 3560 - DNA, 759 bp, synthetic construct
  source 1..759: mol_type = other DNA
atggcaaaagtgacaagcatcttcttctctccatccgagactaccaaaaaagttgtcaatcagatcgcagagaacttcaaggaggaaaagagcatttgcgacctgttatacttcaatgataagaaggaatttgagtccgatgatatcgtgattgtggggatgcctgtattcgccggccggctgcccaagactgctagcgaaaggctatcaaagctcaccgggaacaatacaaaggcaattgctgtcgccaactacggaaacgctcacgtcaatgacgcgttgatcgagctggtggacatcctgaatgaaaacaactttgatgtgattgccgcggcttccaccgtcagccaccattcgatctttgatggggtcgcgctcggcaggccagacgaggacgacatcgaaaagatcaacgactttgcccaaaaggccattgagaaaatagaaaacggcggctccctggagagcgacattcccggaaaccgaccttacaccgactataagcagctgccattcgtggtggcctgcgatgtggacaaatgcgtattctgtcttgaatgtgttagtgtgtgtccggagaaggccatccccgacgatgacccggccgacatcgaccttgagatatgctcaagatgcacggcctgcataaacatctgtcccgaggatgcacgcagtttcgctggtgatgctttcctctctaaaaagcccctgtttgaggaggcaaatgccgaacggaaagagcctgaattttatttctga

SEQ ID NO: 3561 - DNA, 297 bp, synthetic construct
  source 1..297: mol_type = other DNA
atggaagcgaaattgaaaaagctgacccaggaggacatcgacgacataagcgactttttcgcaggcgtcatcgataagaaaatcgccagctccgtgaagagccaaaaggagattctagctatggacattgatatagaagtggcctacaatgatgagaacgaggaactgatggtagatgtggatgttgatatcacgacagacgaactgtccaacctttcagacgaaaaagtcaaccagctcatcgaggacagttacgtggagctcgacgagtacattaacgacaattatcggaagtga

SEQ ID NO: 3562 - DNA, 348 bp, synthetic construct
  source 1..348: mol_type = other DNA
atggagattccacagaatgtacagcaccaactgaaccagttccagcagctgcagcagcaagcgcaggctgtgaccgtgcaaaagcagaacgtggacatccagctccgcgagacagaaacagccctcgacgagctcaagaaaacgcccgaggatgcagaagtctacaaaagcgcagggaacctactgatcaaggttgagcgagccagcaccttagaggatttggaagacaaggtggagactcttaagctgaggcagcagaccatgcagcggcaagaggaaagagtcatgaaaaaactggaagagatgcaggcctccatacagcaagctatgcagggcctgcagggatga

SEQ ID NO: 3563 - DNA, 135 bp, synthetic construct
  source 1..135: mol_type = other DNA
atggagctcacactagatggcaacagcataaagatcaaaatcgacgccgaggacgccacctccttccgggcgagtatcaatagcgcaatcaaatggattaagctggctgtcgagattaacgaactggtggaatga

SEQ ID NO: 3564 - DNA, 492 bp, synthetic construct
  source 1..492: mol_type = other DNA
atgctgatctccacctcacggaaaccaagtcagaaaacaagaaccttctgcaagaacttcagtcatgcctttggctttgactatacaaaccggggcaaatcgagcctgagggatctgctggtaaaggccaaacagctgggccacgacgggctcgttctcgtctaccaaatcaagggaaaccccagcaagctgacgttctatgacctggaagaaaacgagagacttgctctgctcatcagcgtgaacactaccaatgagcgactccacatcaagccagaggaattgaagatacgctcaactgtgcccgagttggacattcttgccgaagtgctagggatcgaagtgaccaaggagccgcaggactccaattatataaggatctcctacgcggattacgatgacgagagcaattttgcaattttatacttcattaacaagaaaggagagcagatcgatttccgcatcaatgtcaaaaagattgtggagccttga

SEQ ID NO: 3565 - DNA, 132 bp, synthetic construct
  source 1..132: mol_type = other DNA
ctgtacaaatgccccgaatgcggcgaggaggtcgaccacaaggggtacatggaaaacaagtgcccgaagtgtagatatcggatactgttcaagaaagtgccagaggtacgcaagctcgtgaaagccaggtga

SEQ ID NO: 3566 - DNA, 270 bp, synthetic construct
  source 1..270: mol_type = other DNA
atggcaagaacaaagaaggtaggaatcactgggaggtttggcgctcgctacgggcggaaggcaaagagaagcgtgaagaatattgaagagaacatgaaaaagaagcacgtctgcccgaagtgcgacaggccttatgttaaacgcgtgagcgccggcatctgggagtgcaagaaatgtggtgtcgtcttcaccggaggcgcctacgtgcccgaaacgccaatggcgaaatccgccacccggagtataaaacgagtggtggggggcgagtga

SEQ ID NO: 3567 - DNA, 792 bp, synthetic construct
  source 1..792: mol_type = other DNA
atggatatcgtgcctgaaattaccagaaaaagtattaccagactaataaatgatggtaagagggcggatgggcgcgcttttgatgagcggcgagatattttcatcgaacccaacgtgattgacaaggccgaaggttctgcgagggtgaaattaggcgacactcaggtcatagttggggtgaagccaaccattggcgaaccctttgcagacactccgaacctgggggtcctgatgaccaactgcgagctgctgcctatggccgctcccgggtttgagccagggcccccaagcccggagtcaattgagcttgcccgcgtggttgaccggggaatccgggagagcgaattggtagaccttgagaagctatgcatcgaagagggcaagaaagtttggatgctgttcattgacttgcacgtgatcgattacgacggcaacctcttcgactgcgctaacctggccgtgatgtccgccctcctgaacacaaaactgcctgtggccgaatacatcgatgacgaggtggtcctctcggaggatgaaacaatggacctccctgtgagggacaagctggctttatccacgttcgtaaagataggcaatggactgatcctggacccatccctggaggaagaggaaatcctggacgcacgtatcacaatcggagtcacggatgagggcaatcacatctgtagcatgcagaagggcggagaggagcccctcactcgcgatgacatcctcgatgccgtccatttggcattcgagaccaaagatgacctgcttagttatctcgactga

SEQ ID NO: 3568 - DNA, 711 bp, synthetic construct
  source 1..711: mol_type = other DNA
gtgttctttattatctcagagaatgagaagctccgcggggacggacgcgcctacgacgagctgcgtccgatcaaaatagaagccggagtcctaaaacgcgcagatgggagcgcctacctggaagtaggcggaaacaaaattctcgccagcgtgtatggccccagggaatcttatattaggcggctgttgaagccaaacactggggtaatcagggtcagatacaacatggctccattcagcgtggacgaccgaaaacggccagggcccgacaggagaagtacggagatctcgaagattgccgctgacgcccttcggcctgctctcatgctggaaagcttccctcgatccatggtggatgtttcaatagaggtcattgaggccgaaggaggcacccggtgcgccggcatcactgcagccgcagtggctctggcagatgctggcatccccatgaaggacatcgtggtcggctgcgcggcaggtaaggttaatgatgagattgtgctcgacttgtccgaaaaggaggataaggagggccaggccgacgtgcctattgccatcatgcccagaaccggtgagataaccctgcttcaagcagacgggaacctgacagaagaagagtttgaagaggcgctggatttagctatcgagggatgtatgaaaatcagcgagatccagcacgaggcgctgaagacacgctacagttcccagtga

SEQ ID NO: 3569 - DNA, 1476 bp, synthetic construct
  source 1..1476: mol_type = other DNA
atgggcagtatatgcatgatatatgtgaatgagaaagacctggtggttccaggcgaactgctggctgaggatgactactactcaggccgcgggacctttgaggatgatggaaagatatgctccaaactgttagggttggtgagcctgcggaacaagaagatcagtgtaatccccctaaaaagcaagtacattccaaagaaaggagacgtggtcatcgggaaaatcgacgatgtgagatttagcatgtggggagtggacattaacagcccttacagtggcatcttgccggcctcggaggtgttcggacgcgagaaaaaggaattaagtagggtgttcgacatcggtgacgtgctcttcctgaggatcgtcgatgtcgacgaggtcaagaaggtgaagttgggcctgaaaggccgtggaatgggcaagttccgcggaggcgtcattgtggacatcgctcccacaaaagtccctcggctcatcgggaagaagggtagcatgattaacatgatcaaggacaaaacgggctgtaagattgttgtagggcagaacgggctcgtttgggttaaaggtaatgaggacatggaacagatcgtgaagaataccattaagctcatcgaaagggaagcccacacctctgggctgaccgacagagtgaagaacaagctctgcttgctgattgatggagagcttccagaggaggaaactgaggtcatggaagagaaggaagagatagttgaagagtcctttgaggagggcctgaagaagcctgaaattcaagacttcagagacgaggtggagaaagagattgccgaggagatggccctggaagagtcagaggaagacctagacgaagagtttgatgactccgaggagctggacgacagcgacgaggagtttgatgattccgaggacatttcagatgacgaagactttgacgacagcgaagacgatctggattccgaggaggagattgattatgccgatagcgaagacgacgaagatgagctcgcgatagaagaactggaggaaaaagtagagacagaagagttcatggacgactccgacgaggattccgatttcattgaagaggacatcatcgaactagacgaagatgcagagtcccttaatgaggaggatgacgaggaggagttcgatgtccttgaagagtctgaggcagagatcttcgatgaggcggaagtgctggatggcgctgaggaaatctcagatgacgagctcgaggaagtgatcaacgaggccatctcagaagatgaagaaagccaggacgactctatagaggatgaaagtgaggatgaagaggaaaaggagaaagaagagaagtctaagaaacccaagtttctcgacacattcgaatatattaacgaacagaaaaagaaaaacaaatcgtctttcgatcttagtcgggcagataattccgactcgcccactctgaacatcagccagcgacgaggtatctga

SEQ ID NO: 3570 - DNA, 705 bp, synthetic construct
  source 1..705: mol_type = other DNA
atggtgaatatcgatgatgctatcattgccaggctggaaagctacggggagaagtttgagatcctcgtcgatcccgacttagccgcagactttagaaaccctgataacgagaaagagatagatatcgaagagatactggccgtcgaggaaatattcaaagattccaagaaaggggacaaggcgtcggaggaaagcatgcggaaggtgttcgacaccacagacgttctagaagtagcagagcagatccttcataagggaaatgtgcagctgactgccgagcagcgccgacagatgcaagaggacaagcgtaagcaagtggtggcgaagatagcaagagagggcatcaacccacagaccggtctccctcacccggctgtcaggatcgagaatgccatgaacgagtccaaggtgaagattgacgctttcaagtcagtggacgagcaggtacagacaacgctgaaggccatcaaagtgttgattccaattaaattcgaaaagatcaaaatggcggtccgcctgcccagcactgctgccggcaacggctattctgcaattcggccattcggcaccatcctcaatgaagaatggcagcaggacgggagttggatcgccattgttgaaatgcccggcggtctgcaagatgactttaaccacaaaatggcttccatcagtggaggagaagccgagaccaaagtgattaaatga

SEQ ID NO: 3571 - DNA, 144 bp, synthetic construct
  source 1..144: mol_type = other DNA
atgtccgtaaaaaaactgatcatcaaaaaggtcattctgagcaagacagccaggaaaaccgcaaagaagggcataatgttcgtggtgcccagcgacttctttgatcgccatcggcacctcgggaagatcgtggacatgatgtga

SEQ ID NO: 3572 - DNA, 885 bp, synthetic construct
  source 1..885: mol_type = other DNA
atgcaacccctccagcaacagaacgccggttatgaccgggccattaccgtatttagccccgatggaaggctgttccaggtcgaatacgcaagagaggcggtgaaacgaggcaccacttccctaggtcttaagtcaaaagacggcgtggtcctcattgtggataaacggaccgtcagcagactggtggaagcaaagtcaatcgaaaagatattccagatcgacgaccacattggcgtcgccacatccgggcttgtggccgacgcccgggctttggtggagcgcgctaggatcgagtctcagattaacaagatcacgtacaacgagcctatccttgtggggggactggctaagaagatctgcgacctgaaacagctgtatacacagaatgggggtgttcgcccattcgggtccgcactcattataggcggagttaatggcgaagaaactcgcctctacgagacagatccaagcggagccctgattgaatacaaggccactgcaatcgggagtggagtgcaggctgccgtggacgtctttgaagaaagatacgaagaggacctgagcttggaggatgcgatcaacttaggcctggatgccctatacgaagcgacggaaggcaggacaaccgaggacagcgtcgaaatagctgtaatcgaggttgcaacccaagcctatcgtaagctgtccgatgaggaagtgtctggctatgtaaaagatctcctggagcgaaatgccgaagaggaggagccggaggaggaggctgaggaggaggccgtggaggaagccgtggaggagagtgaggaggcagaggacgctgctgaagaatcggaggaagagacctctgaggaagaggccagtgaagacaaggatagcgcggaggagtga

SEQ ID NO: 3573 - DNA, 2244 bp, synthetic construct
  source 1..2244: mol_type = other DNA
atgaactttatgaagaccaatctgaaaaagacaacaatcatactggcactgctgatggccattcttattttgtcgattggggccatctctgcaaatgatttgacatcagccgactcgaatgtcgatatgaacaatgatctgaacacaaacttggacagcaatgacatcatcgccaattcgaacagtaattccattgacgctgagattgatgaagccaactattcaaaccagagagccgatgccaaggaaaagttgaaggaaagcaacagcttaatcgagaacgaaaacactgagggcaacacgcagatcgaggatgaaaatagtagcccctcaaataaaacagatacatcaataagtattgaaacaaacagtatcgaaaggggaagcgatttaacgatctatctaaaggacataaatgggactggaatcgccaatgagaagctctcaatccagattataaacaagacctacacacggaccacagattcaaagggctctgccctgtttaaaataaatcttgcatctgggaaataccccatcgcaatctcctacaatggcagcgaagattacgagagttcctccgacgacttcaacattagcgtttcccctatgaaaacaaagatcaatatgctctccaattccattgtgaacgggcgcaaactcactattgagctgttggacaagaacaacaatcccctgaaatacaaaaagatctccattatcctaaataaaaagctatataacctcaccacaggcaaagacggaaaggttagcctcaacattaacctgaatcctggcaaatttcccatccaaataactttcagtggggatgcaaactatcatacggtgtctaaaagctctgcgattgacgtgtacaagctgaaaagcagctttaccgttccaaagacctcaatcatcaaaggcaagtacctgtacgtgtacctgaaagacagcgagggcaaagccatcccatccgcgaaggttgccttcaagatcaatggagtgagctccaccaaaaccactgacaagaacgggcggatcagccagaagataggcctgaaggtgggaaactacaccgtccagctcaactacaatggggacaagtcccatttgaaaaaagtccagagctttaagattcgctcttgcaactccaaaaccaaattcactgtggctaattatacagtggtgcggggaaaatacctaagcgtctatctgaaggacagcgagaacgccaaccttgctaataagaaagtgaccttcacgtatcttaaaaaatcatacacaaagaccacagacagcaacggaaaggccagcctcaagatgacggaggctgggacgactaccgtgaacctgcagttcaaggggaccggcccatatctgaagagtagtgcgaatgtcaaaatcaaggtactcaagaacacgaccgctgatatcattgcaaaaaaccagacccgtcacctgaacggcagttccacgataaggtactatgtgaagcttactgacaataacggcaaccccatcgaaaatgaaacgatagagctgaaggtcagatgcaacaacatcaccaccggcagcggtaacaagattactaaaaagaccatcgtgttatccagcgacaacatcattaacaagtcggaggacaagaagctcctcaacgagatggcgaagatcctcagggcaaaagggtataaggtgatcgtttccgggatcggtcctaactatcacgtgtcggatgtgcgcgactattccaatgtctgcgtgttcagcctggtgggaggcgtcgactctggcatgtttgttgacatgagtcactcctactataagaactaccttaaaaagtacaagaaccagttcgtactgggatgtgtagcccccccggtatacctgaacctgggtaatatgacctggcttaaacgagctcacgatgatgactacagtccgaagagttttaaaggactgtattatccagggaagtacttcaataccgtgactaaactggattacgtctacggtgatggtgctgaggagctggtcaataacttcctgaactacgccaagaaaggtaaaagcatcgacctcggccagtcagtacctaagacaactacaacttataagctcactaccgacaagaatggaaacgcttacgtcgatttgcaagtgggcacttacaccatttcctcatctattctgggcaataattataaggttgacacccaaaccagcaaggtgaatgtgattaagtga

SEQ ID NO: 3574 - DNA, 378 bp, synthetic construct
  source 1..378: mol_type = other DNA
atgaagcttaaggtcctgcctcccaccctgcggaagaatcaccattacctgattctggatgtgaaaagcgaggtaaaactgtccaaagacgatatagtgcactacatctgggacgcgtgcatccgatattggggggagaaccattcaagtaacttcaatctctgggtgatgcggcactacccaattgaagaaaccatctataataacgagccggtgttcaactacaagacagtcttgaggtgtcagagaagctatgaggatgacgttcgctctgcactagccacactcaacaggtacaataagaaaaaaatctccataaacacgatcggcatttcgggaactgtgaagagcggcatcaacaagtttattgacgaatga

SEQ ID NO: 3575 - DNA, 972 bp, synthetic construct
  source 1..972: mol_type = other DNA
atgaaattccacgacctcaacataagaggtaccgactacaataacgacctggctctaatcaaggaggcctataagttcggatgggattaccttaatctgaactattcccaggaccattacaaggaagccctctcgtataaggatgatttgctggaggagatatctctgtttgaatggaaagacagctacagaaacaaatacaacagccagtccattgagatttccatgggcatcaacattcagaatgccaattcaaatgagatcaggaagatcgttaacaaatacaggaacaattgctcttatatgagtgctctcggcggggacctcaaggtaaaccgtagcgtctgtgagaaccacaggatggatgtcctgtcccgcccctactataaacggcgggactccggcatgaatcacgtcttggctaaggaagcagcccgaaacaatgtggcgatcgagctgtgcttccgggacgtgctgaagaacagcctgaagttccgggcgaatattatcagcagctttaaggagataatgatgttccatcgaaaatacaattttcctatcatcctgacaactgattccaaaagcatctacgacattcgcagcacaaaggacatagtcggcttctttaagtcaatcggattcagtgacaaagagatctataacgggttctactactacccaagggagattattgactttaaccgccaaagaaagaacatggtgattaagggtgtgaaagtgatcgaaggagccagtgatttcaccgaaatcgactcaaagaccccgaaatttgaagagagtgagtgcttcgatgaagcaatctcccagaaagaagacgacttctttgattgtgatgagtcggaagatgacttctcagactatgatgaggaggacgaagtgtttgttggggagtctgaggatgaatttacggatgtggagttcgaatctcttgagaaggaggacttactctga

SEQ ID NO: 3576 - DNA, 441 bp, synthetic construct
  source 1..441: mol_type = other DNA
atgattcataacatcaggtaccgggtgtttatttacgaaaacgaggataaggacaaggtgttagaagccctactcaatatccttccaacagccgagcctgaggctgaggaggccgaggggctgctcgaagagaagatgctgattctgacgggagccatctccaaaaagcgcgagaccaaagagttcctcaacaccctgatcgaaagcattggtgaagatcagctgatcaagctctataacgacttggatcgaaagatggacgaaaaaggcaatctcttccttagactgagtaaagagaaggccctggacgaggaatgggaaatattggacggcggggacagcatacacctgaagataaagattgcggcatacccggctaaaaaggaggtagcactgaaaaagatcaaagaagtcttccccgaggatatcatcaatgcgtga

SEQ ID NO: 3577 - DNA, 552 bp, synthetic construct
  source 1..552: mol_type = other DNA
atgatgtacaagtatattagggatgcctggaaaaatccagatgagtcgtatgtaagggagctgatgtggcagcgagtgccaaaatggcgaaagcaacctgcaatcacccgcatcgacaggcccacccgcatcgatcgcgcccgcagcctcgggtatagagctaagaaagggttcgtggtggtcagggtgaaggtgcgccggggggggcgtcgcaagactcggttcaagcacggtcggaggccaaaacgtatgggagttaataaaataacgatggctaagtccatacagaggatcggagaagagcgggtggccaagaagtaccctaacatggaggtccttaactcatactgggtctggtctgacggcaagtacaaatactttgaagtgatcctagttgacccccagagcccgtccattaagaacgaccccaaaatcaactggatttgcgagaagcagcatagaagccgagcactgagaggcctcacaagtgcgggtaagaaaggccggggccggagaaatggaggaaagggcagtgaaaagagactgaaatga

SEQ ID NO: 3578 - DNA, 420 bp, synthetic construct
  source 1..420: mol_type = other DNA
atgatcaagtgcgataactgtggattgaagttcgatgacgacactgaaatctgtccgaattgcggcaacaagctagactctacccagagcgtccaggaaacggaagaggcatctaagaaatgccctagctgcgggagtctcattggcataaacgagttcatttgtccaagctgcggaaataagatagaggaactgaaaatcatccggacatgtcccaactgtggtgtgaacctggacgacgacgccgtgttctgcgataactgcggcgctaatctgagctcaacatcagatcagattcaagagttcaataagtccctcatcgagtcgaacaaatccctgatggaccagattgccgatctgcttaccaagtttgggaaatttatcgacgatctcttctccagttttaaaaaggacaagtga

SEQ ID NO: 3579 - DNA, 921 bp, synthetic construct
  source 1..921: mol_type = other DNA
atggttaaatgctccaactgcggagccgaggtgggagatgcaagtttctgcttttcctgtggggagaaggtcgacggtggaaatgtggacagcaacatttgccctaagtgcggtaccgaaaattcaaaaggaaccgtgttttgtgtcggatgtgggcagaaatttgacaatgcattagttccagaatccgtagcgcgcaagcagaaggaatgggagctgcgccgtcagcagatcatcgagcgatatgatcagctggccgatgagtttggcattaaggataaggactacttcctcacctcggtggtcagggtgaatatgttggaggagaagacgactaaacacaaagtgtgggggtcggtgggctcctatggcgggaacaagactacaatcgatgggttcttcctgatagaagacgataagtttgtcttcatggaaatcgacaaccgggactggaagaaggtcaatgcgggcataaacaacttctactttgacaagatcgtgagcatgcgaattacaaaaagactgggcgacatctcaagatacgaggacattaccaagagaacaagcctcaattccgctcatgccattaaacgggccattcaaaacgatatccaatcccttaaagccacccgcttcaaggatctgattgtgaacaacgacagtgctgatatgttcgacaggctgctgatcaagctcgtagataacaccagcttcgagatcaggcttcccagcttcgagtttggcgagaatctcgtggcattgttcgaaatcagccggaacagtccgcagactgtggtcatcgagacggattcaaaacccagcaaggctgacctactgaaggaatacaaggaactactggacagcggcgccataacagaagaagagtatgacgagctgaaaaaagaggttctcagcagttga

SEQ ID NO: 3580 - DNA, 534 bp, synthetic construct
  source 1..534: mol_type = other DNA
atgctggtacggaacctggatttcctgtcaattcccaaggagttttccaaggttgaactggatatttatgagggcaaatcgatcgtgcttgtgtacattgaaaacaaaggttactccctcgtcttaaaaaagaacaacgaaaacgactctatattcctactcaagactgacctggctccagacaatatcgacagtgataaagaagacttcattaatgtcataaaaatgctgctcgacaaaatctacgaaggggcagagattaaggagtatgagaagcagcaccacgagcatgtgtttctgcaactcatggatctgctcatcgagggagaaacagtggagaccatcaccgaggaaagcaagatttacgccgacatcgagaagggatttatgaagttggagttggacatcatggataacaagatcaattccctaaacagtgccatcggcgagatcagcgggaatctgaacaatctgggcagcaaagtggaagatagcaagatagagaacaggcttaagaaaacgttctcacagtga

SEQ ID NO: 3581 - DNA, 549 bp, synthetic construct
  source 1..549: mol_type = other DNA
atgaaggacccgaacatggaccggattcttgaggataatcgaaaattaatggaagaaaacaggaagctgaaagaggaccttaaggagctcaagaacgagttttatcagttcaagaagaactcaagacccggcaagcctttcaacctggaaaacaatgatgactacaaaccctctggaaactattatttccataacaattttaaagaggagtttgatgacgctaacatcaagtacaactccaaggataatccagaaggttcgttccacaatgactctgcaaatatcgtggatatgagcctcatcagctttctggccaggtccaataaacgggtggaaatcctgaagtcactgaatcaaggggacaaaataccatccaccattagcaaggagatcgacgacagcagtcaccacgtatccaagtacctcagtagcctaaaagagaaggagctggtcgtgtgcatgaacgaagaggataaacgcttcagattctaccgcataacagccaagggcaaatactatttggaaattatccagaacaaccagtactga

SEQ ID NO: 3582 - DNA, 546 bp, synthetic construct
  source 1..546: mol_type = other DNA
atggccgatctgaaaggcaccaaaacggaggagaacttgaaggccgctctggccggcgagtctcaggccagagtgaaatatgaattttatgcctcccaggcgaaaaaggatggctacgtggagatcaaggacattttccaggagagcagcgacaatgagaaggaacatgcaaagatctggttcaagctcctgaacggtgggaaagtacctgacaccctgactaacctagcagacgctgcagccggagaacatgaagagtggacctcaatgtacaaggaatttgccgagaccgcgcgggaagaaggctttgacgacatagccgcactgttcgatgcagctggagccacagagaaggctcacgaggaccgctacaatgctcttactgataagataaaggccgacaaggtgttcaagaaagatgaagagattgcctggaaatgcaataactgcgggtatatccactacgggaaagacgcgccggaggtctgtcccctctgcgatcacccacaggctcacttcaggaagcaagacacaagttacatctga

SEQ ID NO: 3583 - DNA, 978 bp, synthetic construct
  source 1..978: mol_type = other DNA
atgtgtaccgcgagtgaatacctcacggaaaaccattattttggcagaaacttcgactacgaaatcagctacaaggagcgcgtgtgcatcacgccacggaattacgagttcaagtatcggaaaatcgacgacatgaagtcccactatgccattattggaatcgcggccggtattgacgagtaccctctgtactatgatgcttgcaatgagaaaggggtggctattgcagggctcaactttgcaggcaacgctatatacagggagatggaggaggatatggttaacgtcactccattcgaatttatcccgtacctcctctctcaggccgacagtgtggaggatgtcaaagaactgctgcagaatctgaacttagtgaatatcaattactccgagaacctgccattgtctccgcttcactggatgatctccgataaggacagttcgataattgtcgagcctctggaggacggcctgaaggtgtatgacaaccctgtaggagtgttgaccaacaaccccaaatttgatatgcagctgttcaatctgaacgattacagaaacctctcagtaaagacacccgagaacactttcagcaagaacctcaatttggatgactacagcaggggaatgggcgccatcgggcttcccggggacctctcaagcgcctcccgattcgtgaaggtggccttcacaaaggaaaatagcttttccggcacaagcgaaagcgaaagtgtctcgcaattcttccacattctaggttccgtggagcagcaaaaaggactgaccttcatcaatgaccccgacttatatgaatataccatctattcatcttgctacaacacaaacaagggcatcctgtactataaaacctacgacaatcatcagataactgccgttgatctaaaccgcgaggatcttgacggggatggcctgatcatctaccccctgattaatgaggcacagattaactttataaattga

SEQ ID NO: 3584 - DNA, 546 bp, synthetic construct
  source 1..546: mol_type = other DNA
atgaagatcctggccctgatcgggtcgcccagaaaacactccaactgtgaagccatcgtcgacgaaattgccaaaggcgccgaggaaaacggccatgaagtgatcaaatacattattcaagatctggacatcgctccatgcagcgggtgtgagctctgccggaaaggcaaggactgccgctatacggatgacggcactgaaatcatagaccagctcgcagatggagcaagcgtgatcctggctagtcctatctactttggccagatgtctgctcaagccaagacaatagtggacaggttctattccatcttcaacaatcccaataaaagcttttcaaaggatgcaaaggcagcgattgtattgacacacgcctatccgggggactacgatgcttaccttcagttaaccattgcccagcctttccagaacaataccgagatggagtttattggagcgatagatgccggagacctaaagttccccggtgacgtcaaggacaagccagagatcctgcgagaggcgtacgagctcggtaaaaagttctga

SEQ ID NO: 3585 - DNA, 777 bp, synthetic construct
  source 1..777: mol_type = other DNA
atggcttcctgcaatatcggcaagaaattcattgcagagctgataggcacctttttcctcgtgttcttcggtaccggcgcggccgtggtgactttactgattagtgatagcgtgacaccaggaaaagctggcatcggcctgctcggcgggctgggagattggatcgctattgcactggcatttgggctgactgtgatggcctgcatctacctctttggaaagatctccggggcccacctgaacccagcagtcacaataggactcctggccagcaaaaacatctctgccattgacagtatctactacattgtggcccaggtaattggggcttgtctgggcagcctgttgctatatgtttgccttggagcccaggcggtcacaatcggcggattaggggctacagctccaggtatgggcgtgggatatcttcccgcgctgattgccgaatgcataggtacgttcttcttgatgctcgttgtgatgggcgttgctgtggacgagaaggccgaacccggatttgccgggatttcaatcgggatgactgtagccgctgtgatcatcgtcctaggggcctttaccggtgcttcgatcaaccctgcccggacgtttgggccctacttgatggacaccctccttggcggcaccaatttctggggattcttcccgatctacctgattggtcctatcgtcggggcagtccttgccgcaatactctatggctacctggcgaagggcaacgacgcctgtgcactgccccaacctttctttgaggagtga

SEQ ID NO: 3586 - DNA, 1497 bp, synthetic construct
  source 1..1497: mol_type = other DNA
atgaaggagctgtatgaaaagatgattaatgagtcagtggcggcactgcaagcagatatcgatgtaataagtgccaataggtacaacgactttaagattgtggatgctaaaccttatgcagatgcggtggcgggaatgacctgtatagacggccaagctaaatctgtgatagacttgcacaagaaatctgtggagagccattacaaggtgttgacgtccgttgccgagaccatccgacccgaagacgatccattcatcgaacattaccagactcccccgatactggagatcctatgtgaggaagacggggaatttgcagacagtatggctacatttattcaggccattgctgacagtgagacactaatcacacgagaatccgtccgccgttacggcggattctacgggcccacctgcgtggtggacttcgctttgatgccaggcagcacttccaatgttgttaaccagatcctgaagaccatccacattcctgtcatgcacaagcaggccatcctcagcgccaaatcttggggcatgaacacaagctatgggatcggcgatagctttgctcatgccatcgagaacggagccacggcagcagaggctgctgccaaagaggtggagtcgatgcagatgatctataaggaaccggtagaggcccagggtaagctgatggacgatgccggccactcgagtttcgatgtgcgggccttcatggagggctacaaaaaggaaatgcgccccgtggtcaaggccgctatggatgatggcgtgcattatggtaatatcgtcaccgttcctgcatactgcgttggggacattgggcaccacatcggtcaggccagctacaacatgtgtaaggatgacgtgactttagccatcattcaggcaactgcgaaggtaatggaagcctccctgaaggacaacattggcaaattcatgcatccatcacaagtcctgaacctggctaccgggtcaacggcctgcgctacagagtacattcttgagctggatggctttaattccactatggtggtggacctgttaaccaagaggttccacaacttcgtccagcagtatcccacccggggagcagctgccgaactccacaactgcgactttatggacatgatccacagaggttccacgtacataagcgcggcccgcaaggccaggagcagtgccaaaatcgaccttgtccctaaggtcaatggattcgccgtggacctgggagcaatcacccataatgaggtgctcatgaacccacagcggtacacttatcctgcctgcggcatcacagtcagattctcctcactcatgcggcttgcggactatccatgtctcctgacccccgaaccggtcacagctaccatgatgaccaacatcattgccctcaataaggaggtgcccgggagccccgtgagaggatgcaaaaactgcgcgtcttgcataattgatgcaaaacacgagtactgtcagtggaaagaatctgtatga

SEQ ID NO: 3587 - DNA, 627 bp, synthetic construct
  source 1..627: mol_type = other DNA
atgaatgagatcgtgctgaatcaccccctgataactcacaaattggcgattcttagagacgtcaacaccgggacaaaagagtttcgagagctggtgacagagatatccactctgttatgctacgaagccaccaaagacgccaagcttgaagaggccgaaattgaaacgcctctcgctaagatgaagacaggcaagctgaacgaggacaattatgcggtagtccccatcctccgcgccgggatgggcatggttgagggaatcatcaacgtgatcccaaacgctaaagtcgggcatattggtctgtaccggaatgaagagaccttcgaacccgtggagtactactataagatgccagatggcatcggcgataggatagcgatgattattgaccctatgctcgcaaccggaggcagcgtgagcgctaccattgacaagctcaaggccgacggggtaaagcagatcaagttcctatgcatcgtggcagccccggagggaatccgggccctggaagcaaaccatcctgatgtccagatttactgtgccacggttgatgagcacttgaaccccaacgcatacatcgtgccaggtctgggggacgctggagataggatctatggcactaaatga

SEQ ID NO: 3588 - DNA, 1188 bp, synthetic construct
  source 1..1188: mol_type = other DNA
gtgaatagtactgttggcgaaccggtgctaagcgttccagtggcgctcatcacgagcgggataggcacactcatttatgtcatctgtacacggaatcggagtcccgtgtatctgggaagctcatttgcattcatcgcccccatggtggccggatacgccatcggcggcaaaagcagtatcttctccgccttgatggtggtcggcttggtctacgtggccattgccattatcatcagggccaccgggaaggaatggatcaataagctattgcctcccgtcatcgtcggtcccatgatcatggtgattgggctttgcctggcccctaccgccatccaggagataggccttgatcaggccgtggtgccaatcaataacattattgtggctctggcagcattcctgaccactgctgtcatagccatccgaggaaaaggcgtactgaaggtgatacctttcctcattgggattattgtagcatacgtcgtggccgcgctgttaggtatggtggacttttcgggattcttctcagccagcctctttgaggttccagagttctatatgccgtttataaactacagcttcaatcccacagcgcttctaacgatagttccgatcgctcttgtaacaatggtcgagcatgttggggaccacaaggtcctgggggagatcatcggacgcgacctcattcaggaccccggcttgaacaagacccttctgggggacggtctggcgaccttctttgcagcgctcctcggcgggccagctaacaccacttacggtgagaacacatctgttgtcggtctgacacgcgtggcatcaatctatgtgatcggcctgactgcagtgtttgcagtgatctttgccttctccggacacttgacggctctcttagccgctatgcctaaccctgttatcggaggcgtggctatcctgctgtacggattcattgccgtaaatggggtcaagctcctgattcaggaggaggtggatttcaacaataacaaaaacattgtggtagcagctaccatgctggttctggggttaggcggagccaccctgtccgtggcccaaggtgatctgtccgtgtccatctctggcatggctctggctgctatcgccggcgtcatcctcaacctgataattccagaaagaaaagaagataacaagtttgtgcccgaagtgaaatga

SEQ ID NO: 3589 - DNA, 480 bp, synthetic construct
  source 1..480: mol_type = other DNA
atggctaagctgacttttaggaacgcgagcgaggaggatgtgccactcatcttagaatttatcaagaaactggccgactatgagcatcggttggacgaggtgatcgccaccgaggaagccctgaaatactggatttttgataagcaacaggcggaagtgatattcgccctggaagacgggaaggaaataggattcgcattcttcttcttgtcattcagtacatacatcgctaatgtcaacatgcacctggaggatctcttcatcgacccggaatatcgagggaatgggtacggcaaggccctgcttcgggagctggctaaaatcgtaaaggagcgcggatacggcagattcgagtggacctgcctcgactggaaccagcccagcaaggacttttataaatccattggtgcaaaacagaaggattggaatgtctttcactttacgggccaggaactagaggacttcattaacgaggattga

SEQ ID NO: 3590 - DNA, 1725 bp, synthetic construct
  source 1..1725: mol_type = other DNA
gtgtacatcaaaagcttttttaatgacttgaacctcaccaagaaggatggcatatatctgctggcactgactgtgttttcaattctctataccgtgcacctaatcgatgtgaactatacccttaactttaaaagcgacccgtttgtctatctgattaacggtctggtctacgctgggatgcagggccatatcgagaactattcctatggaatgttcctcaccccggtcgtgagcttcctgacatcacttctctttcggatgggcatagtggacaagatcgccatcatgatcgtgagcggagtcattagcatcctgggtgaaattgggttgtacctcttgtttaaaaccaagttcaacgaggtgtactcctttttcggctgcatcctctttgcaagcttccacatcgtcctcacaatctggggcgggggcggcatcgacattccagtatgtgccttcagcatcattacattcttattcatggtactggccgttgacaaaaaccctaaatactacattccaacctccatcttcctgattatctccattttcaccaaatacgatgccctgttcatcattcctatcctgttcttatactacctaactaaacatgacttcttcaacctggtggatttggccctcagcgacagggatgagctgaagattgtgattaagaactatataaaaagcgaagagttcaaatacattgtcatctctctgattatcgctgtggtcctgttcatactgttttgtgaagtgatatggtcatacggggctaatctgacattcctgacgcagtctcaggagtctctaaacggcttcaacagtgccaaagcagcgcgcagtcatttttactataacgataagaagttctatataagaaacctctacacgttcttctaccctcagatcagccaagagttttccctgatcattcccgcaatcatcgccatcggaacggtgttcaactttgcaaacatcatccgacgacggaaggaataccccatggtgcgcgattacaagacaccccactttaaatacctgctggttgggctgataattatcctcattccaatcgctatcatcggatttaagtatatctcacacatggtgactaatgttgccctcctcaccatctgcgtatgccttctctcgctggccgataagttcgacatagataagaggaccttcaatctggacatcttcttcttggcttggatttttgtctttgcagtcttcttcagctttatcacaatcaaaggtcaaagatacctgattattgccttgcccgctgttgtgtattttgtgttaaggacaatcgaagagatatttaataagttcaaggattccaatatcctcaagataactttaataatcattgccgcgataattattgtctactccctttcgttcacattcactgacggcaactttgacactgaaagaaacaataccgccatccaggaggtgtacgactacttggttgaatatgaccccgactaccttaataagaacctgagttccgactacagctatggatcgcgttttggtacctggacccttaaaaaggacgtgcggtatgtcaagctaggggtgatcgaccagagtgagagtgattatctgattgttaagcacgacaatgtaagtcttgcgaattacacggagatttatcgcgctggaaagatcaaactgtatcagaataatatgtacgataactcctcaatctga

SEQ ID NO: 3591 - DNA, 735 bp, synthetic construct
  source 1..735: mol_type = other DNA
ttgtctatcgtgagtgcaaacgacctgaacagtatcgacgactccattgaagccgacaacctaaactccatcgagatcgaggacattcaggtagactccgtggagtcagacgatcttgagaagtcgaatatcgatgaaaaagttctgagtgacggggagagcgacggcgactccggcaacgaaactgaaacgcttagctcaggagatgaaaacaatgagtcagacgtgtcctctaatccaaacgaaggtgtagcgaccaacctggaactggataacgacgctgacaaggaaaacgtcaagataggcgagctggttacctggaccctcgaggctaagaattacggaccctatgatgcagagaacacccaagtctatgacgaactgccagaaggcttagagtacgtgagccacacggtcacaaagggagaatttaatcccgagactggcatttggaaaatcggggacctcaaagtcggggagaaagagtacctcaaaatcgtgacaaaggccgtcacgaccggggaaaaggttaataaggccaacctgacaagcgacacagatattatcgatccggatgagtgctacgaggaggaggagattgatgtggaggatgatgatgacaatcatttcgagaaggtgatacacagcaagcagctgcctcgggtgggaaaccccatattcctacttatcctgagcctgttgaccgtgctcggtctcaatactaggaaaaaatga

SEQ ID NO: 3592 - DNA, 1455 bp, synthetic construct
  source 1..1455: mol_type = other DNA
atggactacgacgtcatatacattgggagcggcaatgcctcttggcagggcgcgaggttcctgcgcaaagagggtctgaagattctaattatagaaaaaagcttatatggtggtacatgcgccaatcggggctgtaactctaaggccttgctggatgctccatatgagatcaaggcatttgctgacaactttgaaggctatggcaagtctggcaactttgaagtggactggcctgccctcatgaagctcaaaagaaaacggatcgcaaacatggctcctttcttggacggcaaatacaaggaatacgatctggatgttgcccatggggagggatacattgtggatgagcacacagtgagagttggggacaagacattcacaaccgataagatcgtaatctgcactggcctgaagcccatcatccccgacattaaggggaaggagtacctgcacgacagtacggactttttagacattgaggagctccctaaacatgccatcattatcggagggggctttgtgggaatggagtttgcctcaatcctcgcggaggcagggcttgaagcggatgtgatcatcagagggaacatggccctgaaattcttccaccagccttatgttcaaaatgtgatcgagatcctaaaggaaaaaaacatccgattccacttcaatgagaccgtcaatgaagtcattaaagacgacagcgtggtcattgagaacccagaggagcgtgtgaatatcttcgaaaacgcgcagaataccgatgacgacctgagggaccccgatgcaaaggtggacaacaaggcgtatgagaatgccttcacggtcaactgtgattccggactcagcctcaccggcgactacgtgatcgctgctatgggacgcaccgccaatgtggacaccataggccttgagaacgttggcctggactacacaaaagccggaataaaggtcaataactatctgcagactgctgtacccaacatctacgcttgcggagatatcgccgataccgggatcgcaaaacttgtgactgtagccatccaccagtccaaatatctcggcaaggcattgctgggggatgctgaggaaatagtctacccagtggttccggccgtggcctacaccatcccccgaatagccaccgtaggtgtgccagcctacattgcagaacagagcgatgaatatgatgtccataggattcggtatggaaagtcctactccctggagctgaaaaacgacacacgcagtgaggcaaaggtcattgtggataaggacctcaacatagtgggtgctgagatttatgccgctgatgctgaaaacgtggcaaacatgtttacttttatcatcaatcaaaagatcacgctggaagagcttgacaatatgatttacgccttcccgtcaagcagttcggtttgcttgtacaaactgcataacattcactacaagttctga

SEQ ID NO: 3593 - DNA, 1194 bp, synthetic construct
  source 1..1194: mol_type = other DNA
atgaaaattttggtggtgcaggaaagcgactggctgaagagaaaccctcatcagcagcaccatttgatggaccgcatggtgttacggggacatgaagtaaaagtgatcgactaccccatcgactggcccaaagaagactcaaaaggcctaatctttcaccgcgaagtccacgaaaacgtctctaaggtcaagccagaggccgacatagaggttattcgtccctccttcataaaagagccagggctgaactatgcctccctctacttcacacacaaaaaggaaatcaaaaagcagatcgatgagttcaagcccgatatcatcatgagcctcgggctgctcaacgcatacactggttcaaagcttgctaagcagcacggcattcccttcgtctactaccttatcgatgtgctatacgcactgatcccagagaaggcatttcagagcttcggcaagaaggtaaacatgaaagcgatcgagaacagtgacctcgtcatcactatcaatcaaaagctgaaagaactggccatggaactcggtagcaaaccagaaacgaccattttgattgatgctggaattgacctgaatgactttgacccccagctggatgattccaacatacggaatatgtacaatataagtgaagatgacacagtcctattcttcatgggttggatctacgaatttgctggcatgaaggagctggcaatggagctggggaagaataaggaaaaatatcctcacatgaagatcctcatcgtgggggacggcgacgcctacgacaggatggtggagataaaggaggagtacgacctgggggaccaattgatcctcaccggcaagcagccttatgagaggattcctgaatttttagcctctgccgatttctgcctgctgccggcttatattgatgaggaaatcatgcaggatatcgttccaatcaagctgtatgagtatctggccatggaaaaggtggtgatagctagtgagcttccgggcatttccaaggagtttggatacggcaacgggatcgagtatgttcagaaggcggaggaggtgctcgagaccgcgcaacggattctggatgagggaagatatgaggagatttcgaaaaaaggacgagaatacgtgaagagcaacgactgggaagccattaccgataaattcgagaatgccctggaggagcttattaaatga

SEQ ID NO: 3594 - DNA, 540 bp, synthetic construct
  source 1..540: mol_type = other DNA
atgagaatctgcgtttacggtgctggcagcacgcagatcaaaagtaaatacacagatgaagcatacaagctgggggaggagatcgccaaacggggccatgaccttgtattcggaggtggctctacaggaattatgggagccgtgagcaaaggggccatcgacaaccacgggaaagtgctggggatcgcccccgagtggatggaggagtttgaaggcatctgcaaggactgtgacgagttcatctataccgaatcaatggacgagcgaaagaagctcttcctggaaaattccgacgcattcattatagccccaggaggcataggcaccctagatgagttttatgaggtgatcgtgctgaagaagctcaataggcacgataagaagattgtgatatttaacatgttcaactattacgatcacatgctggagatgatcgactttatgatcgaggagggggtcattcgggcgggccgcgacaagaagactttcaaaattgctgattccattgaaaaggtcttcaaaatcttggaaagggaatga

SEQ ID NO: 3595 - DNA, 492 bp, synthetic construct
  source 1..492: mol_type = other DNA
atgtcacacccacacgtggagagcataaacaatatgaacgcctccagcctcattggcatcatggaagagtcgaagattacctacgtgcgagaaaatctggatatccacttgcatgcaagtcagatcaaactgctgaagcaggtccggaagcatgagaagccgcaccataaacgcattagagttaaacgctatgagcaagccgagaaaagcgacttattcaatctgcatctcgatctgtacttgaacaattacaagaagctggccaagaagggactcatcgagatcgacgaagatcctgagaacggcctgccctacgactgcgcacttacagagaaagggaaagaagtgcttgatgacatcgacaggctagagaaggactgggaaaaagtagtccacatcgatgataacgacctggaggcgctcaagcggatagctctggactcctttgaaatctcttatcagcacaagaaaaagcagaacttcattttctga

SEQ ID NO: 3596 - DNA, 321 bp, synthetic construct
  source 1..321: mol_type = other DNA
atgggcgagaaggtgttctacggaaaagggatacgccggatcaaagaagaagacccacaattatacgactctatcgaaaacctcgacaagaacatttggaatgccaactcgctggactataggacgcagaagctgattgcaatagccatcagcgccaccaatccggagagtagctcattcctcaaacagctatccaaggcgaaaaaagagctggatatctccagagatgaggtaatggatgtcttgaaggtggttcttctgacaagcggcatgatgccctttaacaaggctctggaggtggtcaataagctctacgactga

SEQ ID NO: 3597 - DNA, 336 bp, synthetic construct
  source 1..336: mol_type = other DNA
atgcgggtgagtatcatgaaggaggaggttttctacggaaaaggcatggagcgcgtgaaaaaagaagatgaaggtctgtatcaagctattgtagggctcaacgaggcggtgtggaacggcaaagtcttggactacaagacgcagaagctcatcgccatcggaatagccgcctccaatgcagacagccgagcaaccgaaaggcagattatgagcgctaaaaaggagcttggggtcacaagagatgaggttgtggacgtgctgaaggtggtgctgctaacctcaggcatgcagcccttcaacaaggccctgcagatcgccaataaggtctttgaatga

SEQ ID NO: 3598 - DNA, 756 bp, synthetic construct
  source 1..756: mol_type = other DNA
atgaatagtaagggaaaatatctagtgctctttctcattctgatcttatcattcagcattatctctgcctcattcgcgtataccggaactggcttttctcatgacattcccttttccaaatactcaagccagtccaactcggacatcctcaacaaatacaacaataccgattgccacagcgaaatcaaagggatatgtacgtacgtggcagacggggacaccatcgatgttgaaggggttgggagagtacggtttgtgggtgtcaatactccagagagaggcgtcacagcctatatctgctccaagcgcttcgtgcaaaagttctgcctgaacaaggaggtcagcctggatgtggacgactcgaagcgaaacgatcgctatggacggaccttggccgtggtgattgtagatggcaaaaacctgaacgagatgctgcttaaggaaggcctggctgagatcatgtacattccccccagtgagttctacccatatgactggagctccgactccaccacaagctcatcctacacgtccggcagcagctcatccaatagcggagggtcctattcaagcagcagttttaccagcggttctacagtctctgccccgtacgtgggcagtgccaacagtcacaagttccactactccacatgcaaatggggcaagaagatctcggataaaaatagggtgactttcaacagcaggtctgacgcgataagtcagggatacgctccttgtaaggcatgtcagccttga

SEQ ID NO: 3599 - DNA, 414 bp, synthetic construct
  source 1..414: mol_type = other DNA
atgaagatgcccgaaaagatcgacaacatgatgttcgcaccctgcggaatgaactgcaagctctgcatcaagcacatatccaaatcaaacccctgccctgggtgcctgattgacagtccaaacaagaccaagaacgccctcaaatgcaagatcaaaaaatgtctggagacgaagagggtcaaatactgtggccggtgtagcgaatttccatgtaagctaatgaaaaagcaggacaagaactataaaaaacgctataattactccacactggataatgcgaaacggatcacctacactgggataaaccgaatcatgctggaagacaagcttaattgggagtgtccgtcgtgcggcggcattatcagcattcaggagagagtgtgcagcgattgtggattgaataaggaggattga

SEQ ID NO: 3600 - DNA, 513 bp, synthetic construct
  source 1..513: mol_type = other DNA
atggcagctatcatctgtccccgatgcggcaaaatgaacgacgggtccctggatttctgcatctattgcgggacttacttcgacgactacaatgaagaagacaacaacgacaacctcttttttattcggtcaatgaccaatgatgggagacctggcaagaaacaagtggtccgcctcaacgagatgccagataatctccagaagcccaagcacaggctggccatcctgctgggatacctgttcgccatacttggcggactgatcggcttcgtctttgcgatttatctcattacacggaaagacaagaatgccagaaggcatggtctcatccagttggtgattctactgattgagtatgcattaataggtgttctaatcctgaacggacagttggacataaacatggtacttgatccgttcaacatgacccgcatgaataacatcacgcagctgtacaactccagccagatgaatgtgagcgggtcgaatatcagcagtctgttcggcttttga

SEQ ID NO: 3601 - DNA, 1842 bp, synthetic construct
  source 1..1842: mol_type = other DNA
atgaagaaaaacttaagcctcaagaacattttaatcctgtcactcatcttcctgttcgtccttagcatcggatcgtcatttgcaaccgaggaccttaatacaacaggggataacaatctaatagatgacaatgccatggcagacaccctgagcgatgagaaggagatcagctatcagaagccactgatgtctgatgaaaactcgaacagcaataatggatcagacgaggagaaggttataagttccaacaacagtaagtcagagagttttctcatcattcggcccaacgaatcttctattacagtgctgggaggtaattttcaggacctccaggacgcaattgactatgcctccgacaactacaccatatatctaatttgtaacatgctgggtgaagggaaacccatcattgttaacaagagtgttgtcatcgagggaaacggccatactttggacgctaactactcatctcgaatcttctgcatcttgagcgacaacgtagtgctgaagaacctcgaacttatccacggctatcagcgggcttatgactcttacaagctgaggccatatgatagtaaaaacttcgacaatgcccctgctcttactcaggagttcttcgattacagtgtccctccgctaaacagcacggatgacattgaatacggttggggtcctgctattaaatggctgggcaacaatgggacactcattgactcggcaattctgaataataagattgattatgctaacgatatcggggaaggtaaagccgtgtcctggctgggaaccggcggacgcataatcaacacatttatggtgagcaacgagtaccatcacttttttgtgccatgggggattgtgggctaccagcaaaagtctgagggaaaggttctcgatacttctccccacggggtgtactacggcaatattgaaggaaacgtgtatttcctggacgtggccctgaatgtgttgcctaatttggacgtgaagaacgtcacttcctactatggtgaaggcaaaaagatttcatttaacttgaaccatggcaatgcgtccttcgtcaatgagagccttgaactcagcatcctgtccaagaaatacaactacaccttcaacgtgttcagcgacgaaaatgggaactttgagtttaacctccccaagaacttaagcgtgggaagctacaacctgatcgtggggttcaatgatggcaaaaacaatatcagttccaataccactgtgaagatcaataaagctactgtaagcgtgtccgcgccggatttcaaggcccaatactactccggcgccaaatacacgctgaagctgatcaatgccaagaccaaaaagcccataagtggcatgaaagtaaacttgaatgtctataacggcgagaaagtcaagacgtacacggtcaaaaccaataataaggggatagccacctttgataagttcaccctcccaagcgtgatttatgacgcgggcaaacacaaggtgaccatctctgtggataagagttatgacctgagcaagaaagagttcacggtccagatctccaaagcaaagacagacatcaagctctccaaaacaagcttcaagtataagaaatcagacaaccttaaaatctccatcaaaaaccagatcaaaaagacagccatttcaggcctgaaactgaaggtaaaggtttacaccggcaaaaaatacaagacctacactctgaagacagacaagaacgggatggttaagataaataccaagatcctgtccaaaggatcgcacaagatccaaatcacatccgaggataaaagatacctggtcagcaagaccactagcataaaggtggcctga

SEQ ID NO: 3602 - DNA, 2958 bp, synthetic construct
  source 1..2958: mol_type = other DNA
atgaaaaggaacatttattttattattctgctggtgacactctttcttatctccatgagtgtggtgtccgctgcaaacgatgctgacgtctcttatatcgacgacgaaatagtgagcgatgaatatctggagctgtctgatagcgagatgggcatttcggatatcgactacgatgatattgaatccgacatgcttgaaaacgaaatcaaggagaacggattgtcagacaataatgacgttctgaaatccaatctgcccgagaatgaatttaaggagagcaactataatgagtattatgaggacatcatgaacagtaattcccagaagtacggggaatttattaatttcttgatcaacaataaatcattcgaatttcgcgaaaactccctgagcgaggacggttattttctgtatgctactaagaactataccctccggctttgggatggtgtaaactacactatcttaaaggatgattattacttcgcgagcaccgcggagaagtccggctatttcgtcaacgagtccttttacgacgatatcatctattaccatgagtataactactatctggacgaagagtttcttggatggctgatgtggaacgctaactacaagaaagtgttcgtgagcggtagcatagaggataaggtggatatctcctcagtcgtcaatcctgagaagggaggaagccccaagagtggcaacctaccaagttcttatgacctgagggactatggctttgtaactcctgtgaaagaccagggaaatactgctaactgctgggccttcgccacaatggctgctctagagagccatctcttaaaaactgagaatacctcatacaccctgtccccccagtgggatttcagcgaaaacaatttgaagaatgtgatgagttccctgggccgaaacgggacagacaagctggtcaatagtggggggaatatgctgatgtctctggcctacctcattcgttggtccggccctatcaatgagtcagacgacccctataactctaactataccaacattagcgaggatgtatatccactgaagcatgttcagggagtaaagttcatccctaaccggcagaactacttggacaatgactacataaaggagtcagtcctcgaaaacggggcagtgtatattagtatgtactgggactcgtttttcgagaagaacgatgcctactacttctataatggaagcgggtacaactttaattccaactacatgcatgccgtcacgatcgtggggtgggatgacaattaccctaaaaacaattttttaatccagtctgaaggtatggggaatggcgcattcataattaagaatagttggggcaccaacgcggggaataacggttattattacgtgtcctactatgaccaaatgctgggtttcgataacacatacgccggcttcgccttcacaaatgtggaaaacgtgacaaactatgactacaattacaactacaatcccctgggctttacaaatgtttttcccgtgaacagcaccagtgcgaaattcgctaaccaatgggccgcactgaaaagcggcaccctgaagtcttttgggctctacgtggtaagtccatctatttgtacagccaacttgatcgtgaatggcattagcatcggcaacacgaccagttatctgagctccgccgggttccatacgattctctttaaccaggccgcatatgttaatgtcggtcagacctttagggtggagattactcttcaacacatcgggagctcacacacgtacattcccctggaggagcgcatcgagaactactccaatgtggtgtccggatacaaccagtcattcctttggctgagaaaaaatggcgtcgaccagtgggtggatctgaagactgaggtggacaacgccaatatctgtttgcacgtgtatacggagtgcatcgaaggcttgctcgaaacccacgttcggagcaacaatctggtgacttacttcaacaccagcagtcttaatgcaaccctggttgacggatcaggaaatccgatcgcaaacaaactcatctacttcaagctacttaacgtgacctacaacagaaccacagactcgaacggcaaagtaagcttgccaatccatctgaacccgggctcgtataaatttctcataagcttcctcggggatagcatctaccacaagtccaatcggctggtcaacgtcaaagtgaataagatgcacacaaacatcaaccagaacgtcagtacggttcaccagggcgagtatctcggtctgatcctgaaagacagcaacggcaaggccctgtccggacagaaggttgcattctgtctcctctccgtcacgtacaacagaacaacagacagcgcgggaaaagctaagctgttaatacgactgaatccacgcaaatacaccttcactctaaagttcttcggcaccgccgggtactacgcctgcaacaagactttcaatctcacagttctcagcgccaagtcaggacaaagctatgagatgggcatcgacgattacgacggaaagaacatcgatgagaacattataattaataacgaaaccttcgagagctcggacgtcgtgaacaacgacatcatgtacatgtacaatgacactcagtattacaatataattaatgaagataaagggtactacaataaccactcaaacgacatcaattttgagctcttggataatgatcagaactacatctactctgacctcaatcttctggagctattgaacaatgatcaaaacgacatatgcttcgatctgaaccttctggaatatattgacttcgataaaaccgattactacaacgacaatctttacaacctcgagcactactacatgaaagactcgttaaccgaaaacgaagacctgtacatttgcgagaacaagctaaacattcacgatctgaaccagataaagatcggcggtatctga

SEQ ID NO: 3603 - DNA, 996 bp, synthetic construct
  source 1..996: mol_type = other DNA
atgagtaaatataacgaatatcaggataaaactattttggtcacgggaggagcaggctgcgtgggcagcaacctgacacggaaactggccgagcttggggcagagaaagtgatcattctggataatatgtccagcgcatacgaatggaatgtgccaaccaacgaaaacgtggagcttattcaaggggacatcctcgatgatgaggagttaaagcgcgtatttaagatgaagccagactatgttttccacttggccgctcacttcgctaatcaaaacagtgtggacaacccggaaaccgacctcatggtgaacggcataggcatcctaaaggtgctccagtacgcccagctcactggtgttgaacgattcgtctactcaagcagcggctgtggagtctacgggcttgacagtaagatgccttttgaagagcatgacatatccatttccctgcacaccccatatcaggtgactaagctgctgggcgaactgtatacgaattacttccataacttgtacgacatgcccatcgtgaatgccaggttctttaatgtattcggccccggggaagtgcccggaaaataccgcaatgtcattcccaatttcttctattggtcgatgaccaaacaggccctccctatcacaggagacggcaccgagacaagggactggacatttgttggagatatcgtcaacggcctgctgtcaatgggagtggaggaggaggcgatcggtgaagcgataaacctagggagcgggaaagatcacagagtcattgacatggccaacaaggtcaaccagctcacgggcaatgaggagggcatcgcctacgtggcaagacggaactgggatgctaagaccaagctgctgtcttctatcgacaaggccaaggacatcttaggttacaagcctaccgtatcctttgatgatggtctggagcgggtgtacgggtggtttacagacaactgggaagacatcgagcgtgatgctgagttctga

SEQ ID NO: 3604 - DNA, 774 bp, synthetic construct
  source 1..774: mol_type = other DNA
atggagatcgagcatactcacgagctgatcaaagatgtctttggaatgaatatgaaagaggccaggctactggacgatctcttaaagactaacgacctatccgagatcctggaattgggctttgcccatggagtgagctcctgttacttcgcatccacacttaaggatatgggcaaaggtcacttgacgaccatagacaatactacagctaaaaccagaaatcccaacatagaggaactgctgaaaaagacagggttagaggaatacgtgacctactattttgaagcggtgtcatacaactggcggttgatgaagctgattgaggagaacaacgggcccatcttcgacttctgctacatcgacggcgcccacgattggaacaatgacgggtttgcattccttctcgtggataagctcctcaagccgggaggcattatcatcttcgacgactataactggagctttagtcgaagcccctccatgagccagagtccaagggtgctggccatgtctaaggaggaacaggaaacccctcagattaaaaaggtatatgatatgctcgttaagacccaccctaattaccacaatttcaaaatcctgaatgacaacagctgggccctggctcaaaagaaggaggaggaggacctgttcgaaaaccaggtcaataagctcgaatctgaaaaccgcaaactgcggaaaaagcaaaaggagattatgtcgtcaaacagttggaagatgacgaagccactgcgccagcttagaaacaaaaaatga

SEQ ID NO: 3605 - DNA, 636 bp, synthetic construct
  source 1..636: mol_type = other DNA
atgaaagctaaagagatgatggacaagaagtttgtgtatgtctccaaagacgatacaatagaagctgtgtctataaaaatggaagagtcgaaacggttcaccgccccagtgctcgacaaggacatgaaattggagggatggattacctcattcaacattaccaagggcctccgagagggcaagaagctgatcagcgaggtcatggacccggtggagaacatactggccattaaggaagatgaggccgcaaagaatgcggtgatcgaaatcagtaagcacaagctcatcagcgttcccatcattgatgacgaaaacaaggtcatcggggtctgccggagcgtagacgtggttgattcaatgtcctccctgtacgacattaaggttagcaagatttacgaagctatggagaaagagcttaaaggggtgacgtgggatgaactgatggaggcttctgccaaaatcagtacaagaaccacaggggtgaagatcactgccgaggagtacgagaagaatattcagaacgccacgttcggagaggcgatctgggcaactggtggactggaaaagttctttgcaggtctaatcagcgtgggcgaaatcgtcatcgcccgcaaagtaggcagggcaaggcgctga

SEQ ID NO: 3606 - DNA, 828 bp, synthetic construct
  source 1..828: mol_type = other DNA
atggagatcaaactaaaaaagcagattgagaccctggagagggaaataacgcttaaaagcgtcgatctggacgaggatatcgaagactttaacgtggatatccacagctacgaagacaacgacaagctcattaccatcagcccacgctgtgtccgatgcaacctgtgtgtcgaggaatgtcccattaacgtaatcagttcgtccacctggctcaaaagggcgaagattggcgaaggctgtgtgcaatgtgagatctgcgctcagacttgccctgtttcatgcatctatgtatgggacggggaaacagtcatcaaagaggatgatagtgtggaatacaccctcaaggagctgaaggtgccccatagaaatctgaaaatggaagacatttccataaatcgtgaagtctgcatcggctgtggctcttgcctgaagtattgcccgactaacgcaatatcccttagaagcaaggagttcattgaggcccacggagaggaatgcccagaggtgggggccatcgactccgagcatgggcacatgtatagctacattgacaaggaccgctgctgcggttgcggatcttgcgcaaacttatgcattcagggagccatcacactcaagcgggatctgggtccagtggttatttacagccacctggatgtaaatcaggacatctgcgtggcctgtgagctctgtgaggacaactgtcccgtcggcgccatcaaggtggtggatggagagatcgtgctgaacaatgacaaatgcatacggtgtaaggaatgcagttcacggtgtcctgtgggggctttgaatttggttagcgataactga

SEQ ID NO: 3607 - DNA, 1029 bp, synthetic construct
  source 1..1029: mol_type = other DNA
atggacgaaaaggatctgaaaagctcaaataatgtgacggcagaggacttaggcgttgatgagattgtctatgacgcgatcaacgtagatgtcatcggctttggcgcactgaacgtggacaagctttaccgggtgggccacatcgccgagattgacgaagaaagcttcatcaaaggtgaagagcaatcccccggtggtagtgcagccaatacaatcatcggcctaagcaagctgggatgctccacatcgtatatcgggaagatagcagacgatgaggagggagacctactcgaatataaccttatggtcaataacgtctacctgaccaatctgatctacgccgacagtggcaatagcggcaaagtgctcggatttgtgtcagacgagggggacagggccctatatgtggacccgggagtgaacgatgacataaccatcgacgagattaacccactgaacgtaaatgcctgcaagatactgcactacacctcctttgtaggggattcctttaatgctcagaaggaactgctcaatgtcttgggtgatgatatcgtgttgagctttgacccagggatgctctacgttaaaaagggagtcttagaacttaaggaaattctcgaaagaactaacattctgctcattaatgaaaacgagctgaaaatcctcttcgaggatcattacaaggagaaactcagtgtgagcaaggacttgaccttccgggacttggcagtgttcatccgcgatgacggcattgatacagtggtggtgaaacgaggggagaacggggtctacgccataaacaaagacgacgatgaggtcaaggcccccgcgttcaagtgcgaggccgttgacactacggctgctggggattccttcaacgccggcttcctgtacagctatcttaagggctacgatctggctaaatcatgtctgattgctaactgggtggcctcgaggtctgttcaggcgatcggaattagtggactgcctaacctggaggagctggaagagttcatcagctccctgtga

SEQ ID NO: 3608 - DNA, 891 bp, synthetic construct
  source 1..891: mol_type = other DNA
atggtcaattatgacaaggtcgaggataccttcttcgagtcattcgatgggatgtacatccgggccttgatcacagcagaagacgagctgactgtgaaggaagccgcctatgacgcgacagctacgccaagtgccgtgatcggcagggtggaagccggggtggagtcctttgtaagtggagataagactccagacggacggccgggagccattgttcagttctggctgaccgatgacctcgctaagtttgagaaagaactgtcgtaccgcatccgccaggacatcctcgtcaagccattcacccgggtcttcagcataacggaaaatccggtggggagtatccctatgatggaaagcgtgggccactgcggtgacggctacgagtgggaaatcgaggagtacgggcgaaaaatgatcaatgtgcccattgccgtccccgattttcaaatcgagtccgagctggcttacgcagaaggcatcatgggaggaaacttctggtatatgtgttccactaaggaagcagtgttgaaggcaggcagaataataatcgacaccattatggaggtggatggggtctgcacaccctttggtatctgctctgcagccagcaagcccgaaacaaacttccccgagatcggtcccagcaccaaccacccttactgtccttctctaagggagagactcggcaaggagtcaaaagttcctgagggcgtaaactatattccagagattgtgattaatgccgtaagccaggaggcgatgaacttagctattaagaaagcggtggacgccatcattgacatagggggtgttgaacgtatttccgctggaaactttgagggccagcttggcgagcataaaaccaacctgctggatatcctgaaagaatga

SEQ ID NO: 3609 - DNA, 1107 bp, synthetic construct
  source 1..1107: mol_type = other DNA
atggtcaaaaaggttttcatcacagattgtgaggggcccctgacccttaacgacaacgcctacgaactagctgctgaatttattgaagatggagataagctcttcaaaatcatcagtcgcttcgacgactacctcgtggacgaggtccacctggagaactaccatgcgggggacactctcaaactgatcgtgcccttctataagctagccgggctgacgaacgaaaagatgattgagttttcacgtaataacatctatatcgtggatggcagcaaggacaccctgaaattggcaaacgagttgatggactcgtacatcgtgagtacaagttatggccaatatattgaagcgctctgcaattacatgaacttcccatttgaaaacacctaccacactcaactcgatatagacggggccacgaacttcaaccagagcgataaaaaaagctccacaatcggagtcaaatctcccttgtttattgaagagctgaagaaagtggaggaatttcgaaagatcattctggagcacggggatgaaaatgaggacgacttcaatgtactctacgacattttctttaatgagttcccgaagcttgaaataaacaagtacatccagtccgtgaagactgttggaggcaagggcaagcagattgcagtcgaggatatcgtggagagactgtctctggaggaaggttccatcatctatatgggcgacagcatcaccgacgtagagcctctgcagtatgccagggacaatggagggttatctgtgtcgtttaacggtaacgagtacccactgaatgtggccgagatagctgtaatctccgacaataccatcgtcagctcaatccttattgaccttcattccagattcgataaggactacgtcatcgattttgtgaaagcctacgctgagaaaggcccagacgatgcattcaaggacttcgaggttgactattcactggtggaagagtttgaaaagatattctataacaggcaggcccctataattgatataatcacagacgagaatcgcgattacctgctgggcttaagcaagaaaatgcggaatggcattcggggtaaggatattggcggactcggatga

SEQ ID NO: 3610 - DNA, 114 bp, synthetic construct
  source 1..114: mol_type = other DNA
atgatccacaaaaagtactatatgaagaatgaattttacctgctcattaaagagataaaccagaacatgatgttcatctacagcaaggagtattaccccaagaccggccggtga

SEQ ID NO: 3611 - DNA, 1452 bp, synthetic construct
  source 1..1452: mol_type = other DNA
atggtcactgtcaaccctatcccacggccactgcgtgatgtgcacatagaatacgagattgacaacgaaaagtgcatcaattgcagtgataaaccctgcctgggcgtttgcccgattgacgctgtctaccaggacgaaaacaccaaacttatcaagctcgacgagcactgctttggctgtgtattatgtagcaatgcatgcccttacgacgcaattcacataaaaaagaccctgtctgaacccatccgggagaacgtacccaacattaataaaaagctttgcagagcctgtggtgcctgcgtgaacgcctgcaaatctggagctatccatctcaaaagcacgggaggggaggagatgcacagtgaaatagacgagaataaatgtatccgctgcggctattgtttccgcgcttgcccaactgatgcgatcaagtatggcgagattcttcccaagacagttaaggagggtaagactctctgcattgaccatgaccaatgcatcggctgcatgacctgtacaaggatatgcccttccaagggggctataaatgtcggtaagaccaataaactgccgttcattgaccctgcctactgtgcacgctgtgaagaatgtatgcacgcctgcccaacctatgcaatcgactatgtggaacgggaggaggcatttgagtcattcaataaaatcaagacgttggagatcgcctcggagatactggatagggatatcaataagatctccaaaggcatcaccaacattgacaacgtgctggtgaagctcctagatgacatcagcaaagattaccatttcgatgactttgactatgaaaactcaatggacattcgagacgtgcccaggggcatggagttttcggatgtggagatattcacctgcacaaactgccgatccattgtcgtgaatgttacagaatacctgaacgagcggttgaatgcccagctgaacaaggacctggatgttgtaaaggtgctagacctcgtggaatttttcccccccagtttagggattgaagtggtggaggaaaactgcatcagctgcgggctgtgtatggacgtatgtccaaccaagagcatcagcctggacggacctaatccaattaagatcgatacagacaatagctgcgtgtactgcggactgtgtgccgaggcctgtaattttgaggcgatcaagctggccgaagagttcttcacaaacagaaaccacgagatcttctttattaaaagagacctcaggggcagacgcaacgggactgtggagatcaatcattccgcttgccagctctgtgaggtctgcattaagaactgtcccgttgatgccatgtcagtggaagatgatatgatcaccgtcaaccacgatgaatgtatttcctgccgaaactgtgagggaatctgtccggtgaacgcggctcgggtcagcacgatctggcagttcttgtga

SEQ ID NO: 3612 - DNA, 1035 bp, synthetic construct
  source 1..1035: mol_type = other DNA
atgtcctcaattatttggtacatttatgaatttgcccgaaagacgtggatagacggcttctttgatgcaaaatccaaagaggacatagcccataagccagaccggttcagagacttccccaacgtcatcaaggagaactgcattggctgtggaagttgcacagcaagctgtccatctcctaacgcaatcaaactgatccgcgatagcgatacagaagacgcctttggccttatctatcccgtgatcaacaaggcttcctgcataagatgtgggttctgcgctgaagtctgcccttccactccaaagaccttggagtgcggtgagaatcacttcatccgtgaagagttcaatatcattccatcgaagcgaaaatacattgtcgacgattacctctgcataagatgtcataagtgcatggacgcctgtgaagtgggagcgatcgaagagtttgatgacagggtgagcgtaaatcagagtaaatgtatttcctgcggcaaatgcctcgaggcatgtcccgttaaaggtgctatgcggggggtatttgtgaacaacctggaagagcagaagaaaatcatcaaccttgcggtgactacgctggaggactacatagagagcaagcaggacgatttgattcaactcggcacagacaagctattcttagatgagctgcccttcaaacctatttttgataagtcactgaatatcctcaatgataaggaagtggtgcacgaggtgctggaggatgccatcaaccgcctgaaaatccgcatcataacctgggacagtgagaactgtaaaaagtgtcaaatgtgcattccggactgtcccaccggagccatcagcttcgactacgacaaggacaccatcgtgagggacaaggaaaagtgcctaaggtgcagcatctgctaccagacctgtccgtttggggttatcaagtatttcctggccaagttcaatctcgataagaacgacaatgatgaggaggtcattcacatctcagtcaaagcttctcagctggcggaacggcgggcctga

SEQ ID NO: 3613 - DNA, 1128 bp, synthetic construct
  source 1..1128: mol_type = other DNA
atgatacttccaattgggccaatccacccaggcctcaaggagcccctacgcctcaagctgcagactcagggtgaaaaggtgatcaaagctgagattgattatggttatgtgcaccgggggattgaaaagattatggaggggaagacctggcagaaatgtatttacctcagcgaacgcatctgcgggatctgctcatatgagcacacacagacatttgccgagacattagagggtatctctggtgtacaggcgcccctgcgagcccaatacctccgggtaatcacaaacgagatcgaccgaatccagtctcacctgcttgccaattcaaccttcttcaagaccctggaccatgagacattgttcatgcatgtgctggccctgagggagtacgcgatggactccctggaactacttacgggaaacagggtcaacctcggctggaatgttgtgggaggggttcgcatggatgccgacgagcgtcatttcaacgctatcctggagaacatgaagaaaatcgaagatggattcgacagacacgtggcattgttcgaagaggctcctatagttgccttacgcgcaaaaggcgtcggcgtcatgacgaaggaagaggccataaaaggccacgcagtcgggcccatcggaagggcttccggcatcaagcatgacctgcgagaggaacactacacctacaaagatcactttgacttcaagccgatttggagaaaggagggagacaactacgcccgtactctgaataggctctatgaagtggagcaatccatcgacttggtgaggcaggccattgaaaacatgccgaaaggcgatataagaacccctgtcgacatccccagtggatatggggaatggcggaatgaggcccctcggggcgaggtgagatacatggcggaaaccaatggcgatctgatcaagcggattagcatcagaacccccagtatcatgaacattgattcctgcgcacgctatatgctgaaggacgtcgcaacagtggccgacgctgtatcgacctacgcaagcagcgatccatgcattgcctgtactgagcgggtggctataacggacattgatagcggcaagtacaccactaaagacttttttgaggtgaaatga

SEQ ID NO: 3614 - DNA, 462 bp, synthetic construct
  source 1..462: mol_type = other DNA
atgctgaagaaacttaaggacattgtgcgcaagagtagcattcatgtctgtatagtaaactgcgggggctgcaatggctgcgatgtcgagctggtggccctgttaagcccaagatacgacctggaacagtacggaatctatgtccacaacaaccctcgtgaagctgatgttctactggtgacgggtgcagtgaccgaacagtggcgcgacaatctcagaaggatctacgcaaaggctcccgagcccaagatagtggtagccgtggggaactgccctcagtccggtgacgtctttgcacaggaggggggcagggtgctcgcgccggtttcagacttcatcccagtggatgccgccattccgggctgtcccccccgaccaagcgagatcctcgaggcagtcttgacagtggcgcctggagccatcgccgctaaaggacgggctcaagacgcccggaaagattga

SEQ ID NO: 3615 - DNA, 384 bp, synthetic construct
  source 1..384: mol_type = other DNA
atgaatagcgaggagaagtacgaaatgatgaagctgagggtacttcacagttttaaatgggagaaggatcttaccattcccctgagcgaagagtttggaatctccaaagaggagttcgaagaaatcctgatgaaccgattcgacatgtcagacttggagaacatgcacgctacattcgaaatcgccaaccgggaaaagatcaaaaggcagatgcacttagacctacgcctctattggctcagcgatgtcgcgaagctgatatccgaggaggacgcagaccgcatttgccatcaactgacgaaggatgtgattcagcatgggaaaaagtacgaagacgccctggatgagggccgggcccagatcgtggagctgctcagagagtga

SEQ ID NO: 3616 - DNA, 333 bp, synthetic construct
  source 1..333: mol_type = other DNA
atggaggagctttactacatgatttatattatcgtgtttatagtaggcagtattctcggcctactgctgagctataagaagcacatggagcccttcatcatatctgaaatcgacgtgctgaccctcgttctggctatcgtcgggtggttccttctgctcaaccatggcttaattggatttgtgtcctcagtcattctgctcaccatagccttcttctgcattgggctggcgatcggccgccggccaggatacggtaggaaagaaacggccatcggaatcttggtggcagtgatcgtgtggatcttgacaagcggggtcatctttaaattctga

SEQ ID NO: 3617 - DNA, 156 bp, synthetic construct
  source 1..156: mol_type = other DNA
atgaacgacgagaaggggatgagagtgctcaccttcataagttgcttcaggagcctgtactgttgccgcttcagcagcatcctgcccaagcactcgtccatctcatacggctataaccgatttaatatccggtccatttacattgatgccaaatga

SEQ ID NO: 3618 - DNA, 861 bp, synthetic construct
  source 1..861: mol_type = other DNA
atgaatctgatggcccagatcctcatcaacgtggtcattgccttcctggcagggagtctgctgctgggtttccatcgaaaggtcatggcgcgggtccagctgaggccaggcccgcccatcattcagtacctcctgcactcattgaaatttttctttaaggaaaccagcttccccaaaactgccagcatgccattctatgtgggaatcacagtcatcctagccggcatttgggtgaccggcgtaattgtggggcccgtttgcaagggttcccttatgatcatcttcgggatctacgccatccacaagattgtagagcacaatgccggcagcagctcaggttccccttacgggaagctaagctgcgtgcgcgccgtgttctcggcggctggagaattgcccctcttcgcagtcatcgctgtggtcttccttctcactggcaccatggacattgggggaatcatccagtatcaagcagcgaacgggcccttggcatttaaaatccctcttgccgctatcatgttctttaccctgatagttacgaagtccccttattctccatttgccataaccaaaggcaaggaaatcatcacaggatttgagaccgagcatttcggtatgctgagaggctacataatgtttagtgagagtatcgcctggtacatcctgctctggctcttcttaacaatattctttgcaccgattggcgtggtgggatacctgataggcatgattctgatttgtgtgattacgggatttatcaatgctacaactcctatgttaaacccaaaccactctgtaatggctcagatatccattgctgtgatctgcgtggttgggagcattatcatgattatcatttga

SEQ ID NO: 3619 - DNA, 216 bp, synthetic construct
  source 1..216: mol_type = other DNA
atgaaaaagatggaaatggccagctacattatcctgattgcatccgtgctagctatcttgtacgcactgatcttcaaccccgcggactggatcgtctatgccatagccattgtatgcatccctttcctggtgcttagtttcggcctcctcaccatgagcaaaccaataaaggaggaagaggaggagcggagggaggaaccgtttacagggtactga

SEQ ID NO: 3620 - DNA, 669 bp, synthetic construct
  source 1..669: mol_type = other DNA
atgctgattgagaacctcggtggagactttctcggaacaatccctctgggagatatcgtgctctacctgaacccgctccatatcttcctgtttgttacgatccttctatttacagctctcatagcaatctcgcggactgaaacccaggttgaagctatgtttggctccctggacgagaataaagtggccgtgggactgaaggagtttaaacacaggcgattcttagcgattatttgtgggatagccaccgcgggagctatgattaccggggacctgttcaacttcaccctatttatggccctgattggtatcgtcaacatcggtatcgtgagtgccgtaaagcaagtggaagtcttaaattcagcctatcagtacggcttgatcgccatgatgtgcggcttgccattgttcgggggcgcggctatcatactggccgctacagggaccctgagcctgttcgagctggcatccatccccgccaatcctatgatgatcttcggcgcactggtgatgctcattggcgtctgcggggagagcggcatagcccccttctttgcaagcaaggccgagatgtttcgcacgccaggcagccccttcatccttattattcacctgagttcccttttccttatcgtgagattcattgaaatcctcttgactatactgtga

SEQ ID NO: 3621 - DNA, 678 bp, synthetic construct
  source 1..678: mol_type = other DNA
atggtggccagcgtaatcccccaggtggtgcctgccttctatagctccatgtataccacggccctttacgggggcctcattgtagcttttattggcctcattggagtggcaatggaaaagagagacatccagattctgattctaacagacatagtgggactcgctatgctgatcgtcgtggcggccgtcgggactgacctgtcggaagctctgatcctaccagggctggtcgttgaattggcagagatcatggccatttcagagatcctgatatctcgcgagatgcgcaaggccgataaagacaccagttttagcccaatgcccctggatattgatatggagattatgacaactgcgcctaacttcattgcattgcttctcatcggatacggcatctttctgtccggttttaccggcggtgccgttgctggcggcgggatcgtcatctatgtcctgagtaggaaggtgcggggattgcccatctttgtgctcgacggcgtgggcgcaatatcagggatctcctggtgcttatggataatcggtttcatattcttcttcatcctgccgcaatactggctgctgagcctcttcctggccgctcttggacttttactgaaggttgccagcaaaatcgggttgattggaatcctcatgcgagaggaatacggccggaaatga

SEQ ID NO: 3622 - DNA, 600 bp, synthetic construct
  source 1..600: mol_type = other DNA
atgcctaaaattgcaaaattatggaataagctggccgacccgaagaacattccccgcctgttcgctgtaattctggggctgctcctcatcgccggcttcctcatccctatggggttgaataccgaccaaatctacactcggccggcaccccagagtcagatggacgcaggactgcccttggcgccctacgacaggggcggggaggtgctggagagcccaggcataacagaggcccagtatcctgaaaatgccgagaaccttggctggataaactcgtatatgactccaatagcggagatgctcaagggaatctccccctactttggaacaagtatctgcagctctccaggtggtctgattgatgaaatcctgtactataccagaggcttcgacaccatccttgagtcctccatcctcatgatggcattcatcatcgcttcatggctggcgatcaactttacgatggacaggaccaaggatgaacgggatattgctgaagatgtcaaacgcgccattgccagctcagaccgactagccaacgaggtggaagaaagcaacagaaaggctcgtgagaagcaggccaaaaaggagtttcggtga

SEQ ID NO: 3623 - DNA, 261 bp, synthetic construct
  source 1..261: mol_type = other DNA
atgtttaatctggcgatttgggtgtacctgggcctggcccttgctatcttcggaagcctcgcaactgtatggggccccggggtcaaggacccagtgattaggactataaacacagaagttgcctccgtgggtgtgagtctgatcctgctctgctataacagcaccctagcccttctgacattgatagcaacgaccatcatcgtgaccctgatcctcttccgcgccatttcacggttagaggagatcggggctgatgtctga

SEQ ID NO: 3624 - DNA, 342 bp, synthetic construct
  source 1..342: mol_type = other DNA
atgttggagtttatcaacatagagacaatttcaatggccctcatgattatcggtgccattggagtagtgctcctgaagaaaccattggacaagatcatcatggtgtcggtgctggaggcagggctgttcctggctatcgttagctttaaataccttgatgtggccttcctaaccgcagtcctcgatcccctgtccatcattgtcttcctcctggcgctgatcaagatcaataaagtgcggaagtctaaactggaggactattccaccctggacaagctcaacataagcacggagaatcttgaagaaaaaagcttagacaagaacagtgaaggcggcaagtga

SEQ ID NO: 3625 - DNA, 279 bp, synthetic construct
  source 1..279: mol_type = other DNA
atgtacatcgagatcatcggagtgatcaccattctgatggccctcagggccgtgattactaaaaaccgcgccgaaaagctcctatacatcaatgtcatagggttctgcgtaagtgcgatcatcgcactgtacattaaaaccacgtttggctttgtgctggctgccgctttcttcatttccagcacaatcggctcaaacgcaattgcctatagccttaaggacttggaagatgagataagctatgacaaggatatggaggaacgggacgaggagaactga

SEQ ID NO: 3626 - DNA, 501 bp, synthetic construct
  source 1..501: mol_type = other DNA
atggatatgatcatcggaataatcctggctgcagtgatcagctggattaattttgtagtggtggacacgttcctcggcctgcccgaggctccaggggtgaagggtgcagagaccgtgggctactcgatcaaggaaaggaaaggcgacttggcgggcggtttcttccagggaaacattctgtgtagccccgacgcctcagccgggaccctgatagccgccataggggtctacgcgttaggcatccaaggagggctcattgccgcccttctggtctatattgggaaccgcctctgcgcagatccgggatacgccggcacctgcggggctctgaccatgacactactgatcttcattttctcctttgtcggaatcgaagttgagatgttcatctgcggaatggtgattgcaatctttactattcagggtatccatcaccctacaagtagccggttgcttggcaagatcgctaagtcctttggcagatatactaaatacgagtga

SEQ ID NO: 3627 - DNA, 327 bp, synthetic construct
  source 1..327: mol_type = other DNA
atgattagtataggcgccaacggatttcagctcctgatcaactacatcgtggctatcgtagtggcagtcattatcgcgtttgccctgcggttgccattacttcccgaacgccccatcaggttctcttggacgacaagcgccctgttcccaacccctattttcgctatcggcatcctggcaatattttactcactaaacgtttactggatttatgacggtctcatcctgagcgtgattgtgggcctggcctccgccctcttcgtgaaatatggatttgattacatattccccaagcctccgcagatcgaggacggggggaatgtctga

SEQ ID NO: 3628 - DNA, 936 bp, synthetic construct
  source 1..936: mol_type = other DNA
atgaaggataagaacgtggtggtaaccggagggctggggtttataggatcacacattgtggatgctctgatcgatgacaataaagtcacgataatcgacaacttgtcaagcggtaagatggaaaacctcaacaatccgaatcacgagaacctgaccatcatcaaagaggacctgatggacgcggacctcgaaaagatactgaaggataaggactatgtcttccacctggccgcccttgcaagcgtgcccggctcggttgccgagcctttacgctacaatcagaacaacattgacgctagcttaaagctctttatcgcctgcaaaaacaacaatatcaaaaaagtgatcttcagctcttcctctgccgtctatggggagaatccgaacatgccccttaaagagagcgagaacttcctgccctgctccccttacgcggcccaaaaggcgagctgtgagctatatctgaagagcttccatgagtcctacggcctggattacgttgccctgaggtatttcaacgtcttcggtcccagacaggatgaaaactcaccttatgctgctgttattcccaaattcatctctgccatcctgaacggcgagagtccagtgatttacggagacggcgagcagagccgggactttatttacgtgaaggaaatagctaaagcaaatatcctctccgcagaatcagactacaatggagtcatcaatgtggccctcggcaagtcgatgacaatcaacaggctctttgaaatcatctctgacgtgctagaaagtgacattgatgtgaaatacctggatgagcggccaggggacattaagcattcccttgcagacatttccaatttggataagattagtttcaagccagatgaggacaagtttgaagagcagttgcgagagactgtaaaatggtttatcagtcagatggaatga

SEQ ID NO: 3629 - DNA, 1494 bp, synthetic construct
  source 1..1494: mol_type = other DNA
atgaaaatcgaagtactggatacgacactgcgcgacggcgagcagacccctgggatctctctaaacactattaaaaagctcagaatcgccactaaactcgatgagataggtgtcaattccatagaagccggctctgccataacctccgagggggaaagggaggccataaaggcaatcacctcccagggactgaatgctgaaatcgtgagtttctcacgcaccctaatcaaggatgtggattattgcttagaatgtgatgtggatgcggtcaacattgtggttcccacttctgacttgcacctgcaatacaaactaaaaaagacccaagatgaaatgcttgaggatgcagtgaaggtgaccgagtacgctaaagaccacggcgtcaaggtggagcttgccgctgaagactcaacaagaacagacatccagtacttgcgcaaaatcttcaaggcaacgatcgacgccggagccgaccggatctgcccatgtgacactctgggaatcctcaccccacttaagtcctttaacttctataagcagttcacagacctcggcgtgcccgtgagcgcccactgccataatgactttggcctggccgttgcaaacaccctctccgctatcgacgggggcgccagcagattccacgccaccatcaacggacttggggagagggctgggaacgccgccctggaggaggttgttgtcagtctctacacactgtacaaagacgagtcgaacgaacggaagtacgaaactgacattaagatcgatcagatttacagcacttccaaattggtgtcacgattaagcaatgcctatctggctccgaataaaccgattgtgggtgaaaacgcgttcgcgcatgagtctggcatccatgccgacggtgtcattaaaaacagcgcaacgtatgagcctatcatgccagagctggtcggccacaggcgtaaatttgtaattggaaagcacgtgggaacaaaaggcctgaacaaccgactggaagagctcggcctggaagtcaacaagaagcagctgaatgatattttctacaaggtcaaggacctgggcgacaagggcaagaccgtgacggacacggatttggaggcgatcgcagagcatgtcctcaacatagagcaggaaaagaaaatcaatcttgatgagctgaccatcgtaagtgggaacaagatccggcccactgcctcaataaagctgaacattgagaacgaagaggtgatagaggctgatgtgggtattgggcctgtagacgctgccatcaatgctgtgaataagggtattaaaagctttgcagacattcagctggaagagtaccacgtcgatgcagtgacaggagggaccgacgcgctcattgaagttatcatcaagctcagcagcggagataagatcatctcggcccgggcaacagagcccgacattattaacgccagtgtggaggcttatattgacggggtgaataggctgttggagaataaatga

SEQ ID NO: 3630 - DNA, 525 bp, synthetic construct
  source 1..525: mol_type = other DNA
atgaagtacaacaaagagctggctaatctggacaatgtggaaattttaggcttcaagggcactatcgagtccattccaaagacgttggaggagattgacaacatccgcaacagttgttgcgacgtaggtaccatccagctgatgaatgcagacgcgatcgctgggccgaaacaccttgagcacggcacaatccacgcaatgaacgcgtttgaacgaggagacaacctagctaatgacctgggaatcgagatcctgctcagaacctcggcccagaggcagatatccaaggccttcaagatactcgggctgaaggagggggagatgaacattgccgtggtcatgatcgattgccccgattactttatcgacgaactttctaacatcttcatacgggatgatagcgtgttggaagccgacgagtcaaaactgatgaagatctatgatattcctgaaaaagaactgaagaccatccatctgagcgacatactcattgataagacaagcaaactcatcattgcccaatga

SEQ ID NO: 3631 - DNA, 1443 bp, synthetic construct
  source 1..1443: mol_type = other DNA
ctcttcgctatagtgagcctatcggccgtcagcgccagcgacgatttttcaagttccctggctgatgactctgacagcgacatcctagccattgacgacatcgcacaaaaggacagttcccacaaactgatggacgaagaggacataagtgttgagttcgagatcgatgacggggacgatgacactagctacgattcctactatgacgactcgccaggtgatgactggtcaaactacgaggactacgaccccgaactgattagtgaggacgctatactgacgaagatagaagtcctgaacgtccctagccactacggtgacgacaacatttcatttaggctgatcgatttgaataccggcctgcccatccctgatgtgaatctgggcctccaggactcctacgattatgatgtctacagcttcttcaccgatgaggatggggttgtggtatacccgatccccgtgaaagttggagatttctctatcgtcatcggattctacgaggatatgatggtggtgaacgaactggatgacatggtatgcaactttaccaaactcaacgtctcaattcccactgtgccagcgtcaataaagatcactaaaacaggcacttattataatgatacagtcttaaaggtttccttggtcagttctgttaaggaagtcttaagcaaccagaaaatcaacctcaccttctcaaatgggaagaaggccacagtgaagactaactccaagggaatcgcaaactatgcccttaaatttgcccccggaaactacagtgtaacagcagcgctcgtgtccgatggcattgtggaggccaataagtccagcctgaaaaacatcaagatcatcaaggctccaggcacactcagccctaccgcactgtcaaccacgtacgcctcggggaagtacttccagatcaaactcaccaattccaagacaaaaaaagccattgggggcgtgaagcttaacttgaaggtgtatactggtaaaaagtataagaccgttacagtaaccaccggatcaaatggaattgccaaattctccgcgtccaccctgtctgtgggcactcacaaggtgattgtgaccgtgaaggacaccaaatatgtctctgccagttccaaaacaagttccatcaagatttctaaagccagccgggcgatttcggctccgaaagtcacagccaaatataagagcagcagcacgttcaaggtaaccgtgaagaataaggcctctaagaaaattcttagcggggttcaggtgagcctgaaggtgtatacgggcaagaagtttaagacctacaacgtgaagacaaacagcaaaggcgtggctagctttaataccaaatccctgacgaaggcaaaccataaggtgatcgtgaacatcaaggcaagtgccaattacaatgcagctagcgctactagctacatcaatataaaatga

SEQ ID NO: 3632 - DNA, 1503 bp, synthetic construct
  source 1..1503: mol_type = other DNA
ctggaagagaatccaattgattttaaggataatagcatcaattctaaagccttaaaggacagcgactacgagcacgcctcggacgagttgagccaggacctctacaatcggatcatcaatgcaaaggaaaacgaaataatactgatcgagcccggaacctacaagatacacaaggtccacctgaccaagaacatcactctgcagggaactggcgacccacgcgaagtgattatcgacggtgagcagctcggcagtgtcttcttcatcaatgatatcaacgtcacagctcaattctacaacctcactatcatcaatgggctgagcgataatttcggcggtggaatttgtattgaaaccgggaatacatatgtggacaactgtatcttcataaataacactgctttgaatatcaccaacgggggggcgatctccaactatggaaacgagaccaataggagttacctttttataaacaactcactctttattggaaaccacgctgatcatgatgggggcgccgttaccacatgctacgcaatttccgacatctacaacagcgtgttcattaataatagtgccgtgcgcgacggcggcgccatccgtgtgagcgtgtatggctacgggaatgtccaggactgcatattcattggcaaccacgccgacgaatgggcaggggcctattacagctgggctggcaattcaagcattgaccgctgcatattcctaaacaacactgcaggaacaaacggcggggccgtgatggtctccggcagcctgaacctcaccaattccctcatcgtgaataacaccggcggcgaaacaggaggttccttctacattcagcagcccatgtttgatgctaagacggtcatcaatgtaaacaacaacattattaccaacaactcaagccccctgggcaaggaaatctttgtgaaatggaacgccacccaactgctcttccctaacttcaacaataacgattggggagacgaggacccgacaggccccgatgtggttgacccgaataacgtaagcgataggatcatccctgagcgaacgaaaagaattacagttctgtatgacaagcttaactgggggttactggatcggtacactgatgtgctggatgactattacggaaaatcgagtagctccgactccaaagcaaacagtgataccaaaacgaacagcagcggtctgaagttcgatactgagaacaagacaaacgacgattcgaaagaagagcagggtagtatcctgaacaatagcaacggattcgccttgcttaatcataataactccagctcttccaactcaaccgctggtggcgggctggagaagaaagacaattcaacctttgtcagcccaaaggactatcagaagatggtggagctatttgaggacaatcctagtgcgtccaaatcaacggacattcggtattttgcagttctcgcctttatcttgctggtattccttgtggggctggcgagaaagaggaaatga

SEQ ID NO: 3633 - DNA, 1014 bp, synthetic construct
  source 1..1014: mol_type = other DNA
atgaaccttaaatttaagaaaccgtcgcgggaaagtcagatggccatgtccaaggtggctatcggtgaggacaatattgattaccacaacatggccgaggagaagctatccaacgccacgaatcatcagtatgcgaagctggtaaatagtggcaacgcagctatcctgacagccatgaatagtattgatggggcaattttaatccccgaccagggagcctggaatggcttcaagcagatcgctaacttcctgaacaaggatttgatcaccgtgactaccaaccagtgcatcatcgacttggattatctgcaagaatccatcaaccagaacgacgacaatatcgatctggatgatgagaacaacaagtcggccctctttctgaccagctttgcagcttacacagcagagcaggacataaaggagattgccaagttcctgcacaaatacaacattctcctggcagaagacgccagcggggccatttgtgatatgaaaggcgatctggccaatggcaaatactccgacatcatcatcgggtcaaccggctctccaaagataatcaatgtcgaggacggtggatttattacaacaaatgataattctctcctcgagaagtcacgacttattctcaaaacgagcaaatgcagcaatatcacagcctgtggaataagtcacgagatagaatatgcaaaggacaacctgaacaaaaccatagatttcaccttaaacctgaaggaaaagctgaatgacagcactgacttcgaagtctttcacagcaacaagaggggaatcaaccttatcctcaagaccaacgaccctaagtccctttcatataagctccgccaggagttcgcgctagacagccacgggatgatcactaaatgccccaactacaatagattgaaggaaaaggctgtggcgattgagataaaaaatctggacatttcctgcctgaacgagcataatagcaaccaaatcttcaacacgattaaaaaatacgaagacttcgcttga

SEQ ID NO: 3634 - DNA, 1194 bp, synthetic construct
  source 1..1194: mol_type = other DNA
atgagaacatcaaaagctactaaaaatgcctacctggcgaaactcacggaaaagatccagatgcagagcgtgaacgtcgggcgcgaccttgacggcagcactccaccctcggtgttcatagggcgctggagctaccctaaggtctacgccggaccgatgatggtcgcccaaacgggagatacagccattatggactctccagagagttggattggtcagaataaaacccaggaggacattattggctaccgtatgaacctcgtcagaggaaaacagctaatctccatcaaggatctcgagaaccccttcgtggaaaagctgcaggacatttccctggccgctaagtccatcgacagcgaggcaacctttgggtcccggccaagcggtgccatgttcaacgaggaaagcatgccccacggccctagcgcggtgatcgagaagtttgatatcgacgccgttaaatgggacaggcaactggaaaaatccttttacgacacggacctcaaggcacgggatgcggtgatgaatctccacaataaggatgttcccttctctgccatgcaaaaggcattctctgtaggggcctttgggataaagaaaaaccgccggctggtacctacccgatggtcaatcacagcctgtgacagtaccattgcagatagcctgctgaaggaagtgcgacattataatataatggactcgtacagggtctatgagttttcaagcttaaagaactactatgctatcatcctgacccccaccgagtggcagtacgaatggttcgaggctttcattaagatccttggcaaggaagagatgatcttttcagattatgagaccaacactgataagagagagtatagctgcgtgggaggatgctattacacagccaagatggctgtgctggataagctggccaagctcaagcttcagagtggcgttatcatcctgagggaagcttacagtggttacgtcccgttaggcgtgttcaatgtgcgggaaaacattaaatatgcaatgaacggcgactacaaagagtttgagtccctaaaggactctctggcttattgctcaacaaagctgaaaatacctatctccaaatacgtgaagcagtccaacctcctgaatgagcttttgcacagtcagcagactaccttggacgcattcttcaaaaaatctccagatttgcagtga

SEQ ID NO: 3635 - DNA, 927 bp, synthetic construct
  source 1..927: mol_type = other DNA
atgctagaaccgaaggaatttattagcgacgcgatagcaaagatcaaagaggaaatcggagatgaaaagaccattatcgctctgagtggcggcgtagacagctcagtgtgctctgtgctgacacaggaggctattggcgataacttaacggccgtctttgtaaatcacggactactgagagagggtgaggccgagcaggtgtgctccgtgttcgaggagcgcctgaacttcaaatatatagacgcctccgacgagttcctgagcgagctcgccggggtggaagatccggaagagaagcggaaaatcatcggccgtgtctttatcgaagtgttcgaacgagaggcccaggcggtggacgctaaatacctcgttcaggggaccattgctcctgactggattgagactgaaggggagatcaagacccaccacaatatggccctccccagcggaatggtcctgaaggtggtggagcctgtcagagacttgtacaaagatgaagtgcgacttgtcgggactgagttggggctgccagacagcattgtccaacggcaaccattccccggccccggtctgggtgttagggtggtaggagacctgacccgggagaacctggccgtctgcagagcagcggatgcaatcgtcagggaggaggtggagaaggccggcctcgataaggaactgtggcagtactttgccgtgcttaccgacacgaaggttacaggcgttaaaggagacgagcgcgacttcggctatcttgtgatcataaggttgatcagttccatcgatgctatgacggcaaccgtgcctgagatgccctgggaagtgattcggacaatctcaaagcgcatcacttctgaagtttcggaagtcacccatgtggccctctccataagtgataaacccccaagcacaattgagttctgttga

SEQ ID NO: 3636 - DNA, 240 bp, synthetic construct
  source 1..240: mol_type = other DNA
atgttcgataatgcagatgacttcaaaaagaaagccctggacaacaaggacgagctcaagcgggaatacatcaacattcccataggagaggacgagcagagcttcaggatcagcggtattggcgaaaaggcgatcaagatagaaaaatacgtgaaatatgatgacatggtcgatgctgtggagtccggcaaggaagaggggctggaggccgtgatcatgaagtttgtagaggaatactga

SEQ ID NO: 3637 - DNA, 567 bp, synthetic construct
  source 1..567: mol_type = other DNA
atgaaaatcctggttatcaataataaggggcagtacaatcacaggattcagcggactttacagaaccttaagatcccctccgagctggtgaagaataagctgtccatttcggagattgaagaaaaggagcctataggcttgattctcgggggcggaccaagcatcgatggtgtcggtaacgcagcagagtacataaagcacttcgacatccccatccttggaatatgcctgggccatcagctaatcgccaaaacatttggcggagaagtggccacctccgacacggaaagctatgcccaagtcaagattaacatcaacgaagaaaacccactgttcaaagggctcacatcacctatggacgtatggagttcacataaggacgaggtgcacagcctcccggaggactttgatatcattgcggagagcagtctgtgcgatattgaggctatgaagcacaaggaaaaagagatctacggcatccagttccatcccgaggtgcaccacaccccaaaaggggagtacatctttaaaaacttctatgaaatatgtcaaaactataatgagtga

SEQ ID NO: 3638 - DNA, 147 bp, synthetic construct
  source 1..147: mol_type = other DNA
atggagatcgacgaactgattacatacctcatcattattgcagtggtggccatcctaatcaagatcttcagctggctcctgcccatctttgtcatattggctgtagcctatgtgatttacctgtacataaccgagaacaatgcgtga

SEQ ID NO: 3639 - DNA, 1446 bp, synthetic construct
  source 1..1446: mol_type = other DNA
atgaaaagacggtacaaggtgctgtttctactggccatcctgactattatcagcattaatgccatctcggctagcgaaatcggcctggatgacaacaatgccatcgatgagaatgacgggtttaagattaagcaagacatcatgtctgagaagataatctctgataatgaggatgccgattcgaataacgcaaacgacgtgaacaccgactcatccgatgaagtaaatgaggataacgtcatcgagcagaatacagacaccgataccgtggacgaggatgaggaagatccaatcattcccgtcgacactcgccttttcaatcccgattctgttatcaagggaaacgacctcaacattgttctaaaagacatcgacaacaaccctctggccaatcagacaatcaagttcaacatcaatgacaaacagtaccagcggactacggataaaacgggaaccgccaagctgaagattaacttaagccccaagactcacacgttcttcatagagtatgacggctgcgatgaatactatccgaccaatctcgtattcgacttgaaagtgataaagcccgtgcaaacaaaactcagcgtaaagagcaccatcgtgtataaaaacaataaactaatggtgtacctgaaaaccagcgacaacaaggcgctggcaaaccagaaaatcaaaatcggattgccgaaaaaaacatacacccgcaccacggacaagaacgggcttgcaagcctgaacatcaatctgaatcccaaaacatacagcatcaacctgagctatgacggcaagggcaaatacctcccaaccagcaagaaaataaagattcacgtctttgaaaacgagctgcttggaagtacctactacggcaaggtggagctccttaaggggattggcaactcctcctcaaaggtgaagatagcttacgtggtgggtctgcatgtactcgaacaccagatccacgatgaagtttacaatatcatgaagcagaagactagtatgcattatagttataacgtctacaagattaccctgacaaagaaatccgggaactacaatacagacaggatgcgagggcaaatcctcgccaagaactatatcgtgcctcatgttaacaagcagaagtataatttggtcgtggacgttcactccaccacgggcgtctactataagaaatcctacttcatacacgtgcctcagaacaggcataagccctccttaaacctggcgaataaagcaattaaaataattaacactctggataagcagtcaaagattgtgtactggtctccagactcacagacaagtcccccatatcttactttgcctatcatgaaagctggaactcctacatttgtctttgagaccctcaccagtgagccagtctccagaagcaagtatcgtgccaatattctgattaacgctgtggacaagctcttcggttga

SEQ ID NO: 3640 - DNA, 948 bp, synthetic construct
  source 1..948: mol_type = other DNA
atgatctttatggaaaattacgatatcataatcgtgggggcagggcctgccggcctcactgctggcatgtacgccggtcggcagaatagtaaaaccctaataatcgaccgagggttcgctggaggcttaggtctggaggtgcccttgatgcagaactatccagggttcgatctgattagcggaatggagctcattcagaagatgaaggcacaaacggagaactactgcgaaataaaggaaaacgagaccatccaatcaattgaaaaaaccgaagacggcttcctgctgaaaacccgcacaagcccattgctgatgagcgaagagagtgacgaaatccgcgagttcaaagcaaaggcaatcatccttgccacgggggcctctcaccggcacctgaatgttcccggggaagctgagtttctgggacgtggcgtggcctattgcgccacctgtgacggaatgtttttcattgataggacagtactcatggtgggcggcggaaactccgccgctcaggaggcactgtacctaaaaaacctgggatgcaacgtgaagctcgtgcacaggcgggaccagctccgctgcgagcatcatcttcaaaaagccctggaggagaaggaaattgaggttatctggaatgctactgtagaggaaatcaagggagatatggtcgtggagtcagtcagactgaacagaaatggccaggaggaagactacaagacagatggcgtctttattgccatcggtgacgacccgtccaacgagattgccaaggagctggggatcgaccttgatgaggatggctatatcatcaccgataagaggcaggcaacaagcgtggagcacgtgtattccgccggcgacataactgggggagtgaaacagtgggttgtcgcctgtggcgaaggtgctgtcgcggcgatttcggcgtacaacgacctcaatttgtga

SEQ ID NO: 3641 - DNA, 1848 bp, synthetic construct
  source 1..1848: mol_type = other DNA
atgatggggctcgagattcaccagcagttgaacaccaagcacaagctcttctgtccatgctcgaccgaacttaccgatgatgaatttgatgacgggatcatccggaacctaaggcccacccagtccgaactcggccagatcgaccgggccgctctgcaggagtccctacgacacatgacctttaagtacgagtcatttaacaaccacacctgccttgtggagatggacgacgagcctccacatgccttaaacagggaagcgcttgacatatgcatcacaatcgcgtcactgctgaacatgaaaatggtggacgagttccatacgatgcgcaagcaggtgattgacggcagtaacactggagggttccagcgcacaggtctggccgccacggacggatacctggacactccatacggcagagtggctatcgagagcttaggcctggaggaggacgccgcacggaggatcgacagcgacgatgagtttacccagttcaggctcgaccgtctgggaatccccctcgcagaaatcactacagacccctccatgcaccacccggaacagatcaaggaagtagcatacatgatcggacaggtcctgcggagcacaaatgtgaaacggggccttggaactatcagacaggatgttaacatcagtatcacaagaggggcacgcgtggaaatcaagggggtgcaggacttggaccttatgcctgagattgttgaacgggaggtgcaacgccaattggcactcgccgacattaaggacgagctgattgcaaggaatgccagcgtggatgatacaatctacgaccttgacgaggtctttaaggacaccagctctaagatactgtcaaaggccaactgcatcaaggggataattctgcggggcttcgacggcctcattggaaaagaggtccagcctgggaggcggttcggaacggagctctccagctatgcgaagaagatgggtgtgtccggccttttccataccgatgagttgccggcttacgggatcaaggccgatgaagtggatgctatgaaagagttcctcaaaatcggccctcaagatgccatcatcattgtagcccacgatgaggatatcgccataaatgccctgaatgaggtcatcagacgagccgagatggcatttgacggcgtggtcgaggagacaagaaaggccctggatgatggcaacaccgaatatatgaggccgctgcccactgccaaccgcatgtatcttgagacagacattccattgttccagattactgatgacatggttgagcccatcaaaaacaacctgcccgagctcccagacgctaaaaaagaacgaattaaagcagagtacaagctcagtgaagatctggctagccaaatagtccgcagactactgggcgacacttttgagagcctgttggccagggtgaaagtggaccccaccacggtggcttcagtcctcgtcagcgacctgcgcgatctgaagcgcgagagatataacgttgatgtattgacggaagacaaactggtagaagtgttctccctgttagaggcaaataaaatttcgaaagatgcgctgaaggacctgctcgtggaagtctgtaaaaaccccgatgaaaatgttgaaaagatagctgaagacgctaacctgaccctgctcagcgaggaagaggtgcgagcgatcattcatgagattgcccaaaataatgaatccatgattaaggagcgtaatatgggtgctatggggcctctgatgggcatgagcatgaagcagctaaaaggaaaggccgatggtagtctggttaataagatagtgcgtgaagagattcagaatatcttaaacggttga

SEQ ID NO: 3642 - DNA, 1308 bp, synthetic construct
  source 1..1308: mol_type = other DNA
atgacttataaagagatctcgaaagagtttctcgataaggcaaacgtgaccattggggatgtgatcaaggtgaccaaggaggatatctcctatgagggaatactactggaccggtccgaagacgcaaaggacgcgtatatcgtcattaaactggatagcggttacaatgtgggcgtcaacattgaatctgccacgatcgaactgattgaaaagggagaccaaccgaaaataggctttgaaggcgataccattgagaaagaccccaacaaacagaacataagcatcatctccacgggaggtaccgtctcttcaatcattgactataagacaggcgcggtccacccgaaattcactgcagaggacctcctgcgcgccaaccctgagctgttagaccttgctaactacgatgtgaaggccctgtacaacatcctgagcgagaacatgaagcccgaatactgggtgaaggccgccgaatcaatcgcggacgatataagcagtggggctgacggaatcgtaattgcccatggcacagacactatgcattacactagcgccgctctgagctttatgatcaagactcccgttcctatagtggtgacaggtgctcagaggagttccgacagaccttcaacagatgcattcctcaacatctacaactcgtgtggcgccgcactctccgacatcgcagaggtgacagtgctgatgcacaactcattggatgacggagactgcgcccttcataaggggacgaaggtaaggaagatgcacacaagccggcgggacaccttccgaagcatcgattccgagccaatcgcccttctgcgcgatggcaaggtcaaaagtgtcaatctcccatacgtcaaacgtggggagaatgaactcgaattgaataccgacatcgagagcaaggtggccctgatcaagtctttccccgggatcagcagcgacataattgactatcacatcgataagggctacaaaggcctgctcattgagggaacaggcctcggccacgttccagactacatggtcgactccctgcaaagggccaatgacgagggcattcccgtggtaatgacctcacagtgcctatatggtaccatcaatatgaacgtgtacagtaccggaagactactgcaggatgctggggttatttccggggtggatatgacgccagaatgcgcgtacgtgaaactggcttgggctcttgggcagagcgatagtttagatgaggttaaaaagattatccagaccaatattgccggagagttgaatgaaagttcgtccctgaagtatttcttgaactga

SEQ ID NO: 3643 - DNA, 840 bp, synthetic construct
  source 1..840: mol_type = other DNA
atggaactgaccagctacctaagtcagataatcatctcagtgataatttttatcatcctctgtctcctagccaaccaagtgaaaaagatcatagagaagcactacggaatacaccttaatcccaatgactttctgcctattgaggagatcaaatccctgatgcagctgtacttcttgctcattatcctgcttatctacatctgcatcatgaacttctttttcaacaatttcggaatctccggggagttgatctttatcaattcgctgatcgacattatcctgtcagtatttctcgtgactatatactatgacggctctacaagaggcaagattattagcatattcctgttgcccattgtgtccatctcctacatcctcttcgggggcagtttaattcgatactgggacttcatccgcatcccaatcctgctctatctggttgtgattttctataacaagttcatcgattacacggagcggaataaccttggaaaaaccatcctgatcctactcagcattatctatacaggcatcctgttaaccatagtcctggaaaaacagaatccgatagatgccgtggccatggtgaccaacgcaattactagcaacggttatgccgcgctgggggacagcgagggcggtgtcttgactagcgtcttcctcgcgtgggggggctacattattagtggagtcgctaccgccacacttgctgcagatatcattcataggaactctcgcaagaaatttaggaatatggagacgaagatcgacaacctggagaacaagattgataatctggaacggattattgttgaatctcagaaggagaacgaagaatga

SEQ ID NO: 3644 - DNA, 429 bp, synthetic construct
  source 1..429: mol_type = other DNA
atggcagacaagtttagcaaagagaagaggagttatatcatgtcgaggattcggggcaaagacaccaagcctgagatccttgtcagaagctacctgttcagcaaagggctacgcttcagaaagaatgacaaacgatatcccggctcccccgatgtggttctgccgaaatacaacacggtagtctttgtgcatggctgtttctggcacctccacgaaggatgcaagcacgccaaaattccaaagtcaaacgtggagtactgggaaaagaagctgtatggaaaccgggatcgtgataagcgcaataagaaggagctggaagatatggggtggaacgtgatcacagtgtgggaatgcaacctgaaaaaggacaagcgggaaaaaaccttgttcgagctctacaatcagataatctccgaggacgaggactga

SEQ ID NO: 3645 - DNA, 615 bp, synthetic construct
  source 1..615: mol_type = other DNA
gtggtggcagccctgtgcaccgaggctctgggcaaggaccgggttatcggggtcctgatgcctaatggcgtgcagtcagacatcgactatgccaaactcctggtatcccacctggacattaagcactacatcattaatatcagggacgctgtcgatggggtcttaagtcaaatgaccaaaagcggcattgaaatctccgaacagacacgcatcaacctgccacccaggatcagaatgtccaccctatacgccataagccagtctaacaacggacgcgtggcaaacaactgtaacctttcagaagactgggtgggatatgcgacacgttacggggatggggccggtgacttcagcccacttagtaacctgacagtcagtgaggttaaagagattggcagaagcctgaatctgccgtcggagatagtggataaggtacccattgatggtctctccgaccagtctgacgaagagaagctaggatttacctacgatgtgttggacaagtatatacgaactggcgagatcgaggacaaaactacgaaagaacggatcgattacctccatgatctcaataagttcaagttggagctcatgcccagcttcgagtacaagtga

SEQ ID NO: 3646 - DNA, 1494 bp, synthetic construct
  source 1..1494: mol_type = other DNA
atgactgatattaaggtcgacaaaaacgtagaaaaggccaaatctagccaggttgaagagcgagttattaaaaagccagaatccctctatgattccttcccgagaaaaggaaatgacatttacaacacccactactgtgcaggatgcggtcacggtatcttacacaagttgatcgccgaagtcatggatgagctcaatatccaggatcggtgcgtcatgatttctcccgtgggctgttcagtattcggctactactatttcaactgcgggaatgtgcagacggctcacggtagagcccccgcagtggcgacaggcatctctcgcgcggaggacaatgccattgtaatgagctatcagggcgatggcgacctcgcatccatcgggctgaacgagacactccaggccgcgaaccgtggcgaaaagatagctgtgttctttgtgaacaatactgtgtacgggatgacagggggccagatggcccctaccactctggtgggagagcgcaccgtgacgtgccaaaacgggagggaccctcattatgcgggatatcccctgcatatgtgtgagcttgtcgacaacctgaaggcccctgtttttatcgaacgcgtgagcctggccaaccctaagcttattcggaaggcaaagatcgcgattaaaaaagccttgatgattcagaaggagggcaaaggatactcattcgttgaggtgctgagtccatgcccaaccaacatacggagggatgtgaaaggagtggaagacttcctgatcaatgagatgggtaaagagtttcccgtcaagcggttcagagacctatcgaaggaaagggctccggttgaaaggaatgtgagtgacttctctattgaaagtctggataaggcattcggcgtcgacagaacaaaagaaatcgctgaggtggaagacgactttgaggactgcaaggtaaaaatagtcgggttcgggggccagggagtcctcagcacaggtcttaccctggctcaagctgcctgcagtgagggaaaagaggtgtcctggtatccaagctacgggccggagcaacgagggggcacgtccaactgttcagtgacaatcagcgccaagactatcggcagccctgtggtggaggagtgtgacgttctcatcgccatgaacaagccctccctggagaagtactcaatcgatgtcaaagagggcggcaccatcctttacgatagccgagccggaaactacaccaatgacaacctggatgtgaaggacaacgtcaagatcatttccatcccagcacgggagatagccaccgaaatcggcaatgccaaagctatgaacactgccatcctgggggctctgatggagttaggaaaggacagccccatactctcgcaggatgcctttgccgagggtattaaggaaacctttgcagctaagcccaagctgattgatataaatctaaaggtgttggacgcaggggctaaatggttgcgcgagaacatcaattga

SEQ ID NO: 3647 - DNA, 1167 bp, synthetic construct
  source 1..1167: mol_type = other DNA
atgtctaatcagattgttaaaggaaacacggccgtgatcatcggcgccctctacgccggctgcgattgcttcttcggttatccgatcacccctgccagcgagatcctccacgaggcttccaaatactttccaatgttaggccggaagttcgtccaggcggagagtgaagaggcatctgtcaatatgatctatggcggcgcttccactgggcacagggtaatgagcgcttcatcagggcctggaatatcgcttatgcaggaaggtttcacctatctcgcaggtgcggagctgcccgccgttatcgtggacgtgatgcgagcagggcctggtcttggcaacatcggccccgagcagggggactacaaccagatagtcaaagggggcggccatggcaactacaaaaacattgtcctagcaccaaacagcgtacaggagatgtgtgacctgacaatgaaggcctttgagctttcgaacaaatacagaaaccccgtggttgtcctggctgacgcggtgctgggacagatggccgagcctttgaaattccccgaggaagctgtggaacccgtgattgacaattcctggtctgtgaggggaagcaaggaaaccatgaataacctggtgacctcaatctttctggacttcaatcagctcgaggactttaacttccaaattcaggagaagtacgagaaaatccgagagaatgaggtggtctatgaagagtatatgctggatgatgccgaatatgtgatcgtttcctatgggacaagcagccggctgtcccgcactgccgtggatattgcccgtgaaaaggggattaagctgggactgttgcgcccaatcacattattcccatttccggagaaacggatcaaggagctggcagatgagggtgtccaattcatctctgtggaaatgagtaacgggcagctcagagaagatattaaggccgctgcaaattacgacgaggtccacctggtgaacagaatgggcggaaacgttatagagctgaaggacattctaaatgaaatataccaaatggtaggaagcgatgaacgccataaggtggacagtgaggacaaggaatttgacaaatcctacctcagtgataaggactacaaggaagagttggataatgacaactaccacaatcacaggatggtggattga

SEQ ID NO: 3648 - DNA, 255 bp, synthetic construct
  source 1..255: mol_type = other DNA
atgaaggtcaaccagatcaaaccataccctatcattagcaaaaacaactgtaaggcatgcctgcggtgcataacggcgtgtaaggaaggctgcctaaagctgtccgaagagatcaatgacagcggatatcagtatgccgagtacacaggagaaggctgtatcggctgcggggactgttactacacctgccccgagcccctcgccattgaggtgcacataccgaagaggctgcgcaaaagtgctggggatgcctga

SEQ ID NO: 3649 - DNA, 1665 bp, synthetic construct
  source 1..1665: mol_type = other DNA
atgacaagtctgataggaaactttgtgaaccgggtcgactttaaatcctataaggacttctacgataattttgaatttaatgtccccaaggacttcaactttggtttcgatgtagtggatgagtacgcaagaatagacccggataaaaaagcactgatctggtgcgacgactacgaaaaaagggtgtttaccttcctagatatgaagaaactgtcgaaccagactgccaacttctttaagagtcaaggcatcaataagggcgacgcagtgctgctgacacttaaaaacagatatgagttttggatctgtatggttgccctgcataagatcggggcgatagctatcccaactacgcacatggtaaagctacacgatatcgtctaccgggttgaaagcgccagcatcaagatggtggttacggtggaggaggaccagctccttcccgactttgagcagtgcgaaaaagaattggacattgagctgaagaaggtcctggtgaatagcttccgagacggctggttcaacttcgacaacgaaatcgccaaaatgagcgaggagttcgagaggccaactggagatgaggccacccatgaggatgagacattcctcatctacttcagcagcggaaccactgggaaccctaagatggtggcacacgcgcatacctacgccatcggccacctcattacagctaaatactggcataatgtcgtggaggacggggtccaccacacctctgccgatacagggtggggaaaggctgtgtggggtaacttgtatggacaatggattgctggcgccgcaatctttatctacgactatgtgaggttcaacggtttggatttaatggagaagatcattgaaaacaaggttaacaccttctgcgctccccccacaatctatcgattcctcattaaggaggacctgtcccagtttgacttctcagacattcaatatgctacgaccgccggcgagccattgcctccggaggttttcaaaagatttaaggagttcactggccttgaaatcaaggagggattcgggcagacagagaccactctctccctcgctaccttcatttggatggaatccaaaacagggtgtgtcggcaagccctccccggcattcaagatcggcctgctggatgaggaaggcaatcccgtggatattgggtcggaaggcgaaatcagttttgatgtatctggaggaagacccgtgggtctgtttaaggagtattatcgtaaccaggaaaagaccgacgaggcgtggtacaatggttactaccactgtggcgacactgcctacgtggacgaagacggatattacacgttcgtggggcgcaatgatgacattatcaagtcttcagggtatcggatcggaccatacgaagtggaaaatgccgtcatttcccgcccttcagtcttagagtgcgccataaccggtgtggatgacgagctgcggggccagattgttaaggccacaatcgtgctcgccaaaggctacaagccaagtgaagagcttaaaaaagagatccaggatcatgtgaagcacgagaccgcgccttacaagtacccccgcatggtagaatttgtcgaagagctgcctaagaccataagcgggaaaattcagcggaaaataatccgcacgaggaaaagcatttattga

SEQ ID NO: 3650 - DNA, 561 bp, synthetic construct
  source 1..561: mol_type = other DNA
gtgatcgagatgagtgacgtaaacaaagacatcggaatgcggatcagggagctgagagaactgtccgacatcacaacagaagatatggccaacgagctcgacgtggatgaggagacttacataagctatgaggacgggatcatcgacatcccagctagcttcttataccagattgcccacatttttaaggtggacctggctttgattcttaccggcgaggagactcgcatgacctatttcgacgtcacccgagcagataaggggttcgccgtggaccggaggaaggaatacaagtacgagaacctgtgcaagaaattcgttcacaaaaaagccgaaatgtttatagtcacggtcgatccgaaagaggacgctatgccctccctcaattcacatgccggccaggaatttaactatatcctagaaggaacggtgaagattttcatcaaggacaatgagattattctcaacgaaggcgattctatattcttcgatgcaacatgtgaacacgccatggtggcactgaatgatgagaccgcgaagtttctggcggttatcatgtga

SEQ ID NO: 3651 - DNA, 369 bp, synthetic construct
  source 1..369: mol_type = other DNA
atggtgaaccgggaggactgcgtgatcttcaaacaggaatacgggaatgaactactcgtcaaccagcaatatgtgaaaatcagggcgaaggaggaaggattcatgtcatttaacctgcgcgtccctaaggaggatatggaaggtattgagaacttctttaaagggtttaaaatcccagagcccatcctcatagacattgcctgtaccggcaatatccattgctacttcaagggaattagtcccatcataaataagccggagtacagcttcatttccgttagcgtacaggagctgaagaaggaaattgtggaggaggaacaggagatcggcatcccagcacacgaatgcgtgggctgtgggctgcactga

SEQ ID NO: 3652 - DNA, 1098 bp, synthetic construct
  source 1..1098: mol_type = other DNA
atgtcattcctgacgttaatcctgaaaaatccctttcggagcaaaagccgagccattctggctatcatcgggattggaatcggtatagccactatcatcgcgttgggcgcgattaccgacggaatgattgcaagtgcagatgacacactgcatgccggaggctgcgatttcaccgtatctggtaagattgagagcacatcatcccagatggctacattcgggacgagcaccatcgatgaggattatatagataagatagccaatgtaacgggggtgaaagatgctattggcatgtatatgaccgtcctaatgaccactaattcgccatactttgctgtggtaggattggaccccgaagactaccaggtctccgacctgacgattacagagggccggatgtacaaaaacgacactaacgagattgtgatcggaaagattgcctctgaaaacgaagagaagggggttggggacacaatcacactcgatgacaagaaattcaagattgtgggaatctatgagagcgggaacaccctgcaggaccaaggcgggttcaccgccatcaaaaactcccagaaactctcgaaggatgaaggcaagatcagttccatctacatcaaggtgaatgacggcgaggatgttgataaggtcagagataggatcaccgacaaatacggcgacaatctgaccaccatcagcagtctgtccgacttggagatgactaagaacatgatagacatgctcaacggtgccagcctggccatttccctcctggcaatcataattggagctgtcggcatcataaacactatgcttactagtgtttttgagaggacacgcgagcttggtgtcctgaaggcagtgggctggtctgacgaaaagattctactgatgattgtgggggaatcaatagtcattaccatcgtggccggcatcatcgggtccatcgtgggcgtcatcggagtggaactccttgccgcgtctaagatcatgcagctgctcaacccggtgtactcagttgacatctttgtgaaggcattcgcaatcgccctcttcgtgggcataattggaggtatctatcctgctttaaaaagccactga

SEQ ID NO: 3653 - DNA, 717 bp, synthetic construct
  source 1..717: mol_type = other DNA
atggcaaacataattgagatcaaaaacctggtgaaaagttatgagaatggcaacatcaaggctctgaatggcatcgacttgaccatcgaggaaggcgagttcgtatcaatcatcggaccttcagggagcggaaaatccacactgttaaacatgctaggggctctggacattgctgatagcgggagcattaacgtggccggctacgacctgacagtcaacaagaatctcaacaagttccgcggagagaagatcggctttatcttccagcttcacaacctcatccccaacatcagtgtcgttgagaacatcgagattccgatgtactcccaaggaaaatcctcgaaggaaatgagaaaaaaggcgcttgagctcttggatatggtggacttaaaggacaaggccaatatgaaaccaaacaagctgtctggtggcgaacggcagcgagtggccattgcgcggtctctggcaaatgacccaagcatcatcctggcagatgaacccaccgggtccctcgatagcaaaaccagcacaaagatactcgaacagattcacaagctgcacaaggagaagaacattacgctgatcatcgttacccatgacatgactgtggccaagcttgccgatagggtcattgaagtgctggacggtaaaattctgaatgccgaggaaagtactctcctagataataagatagagataaaagtgaatttgttttga

SEQ ID NO: 3654 - DNA, 1380 bp, synthetic construct
  source 1..1380: mol_type = other DNA
atgcagaccaataagaacatcgagtcaatcatcggggacccgaaaaaggccataaatagactgacctaccccacaatcctgtccatgcttctcatgtttgcaaacaacctcatcgacagcatgtgggtgagcggcctgggcgctgagcctctggcagctctcggattcatgtctccactgtatctggtgattatcggcttcggaagtggagtgggcgccggcgcaaacagccttatatcccgcctcattggtgccaagcgttacgatgagtctaacaatgctgccatccactccattataatagctcttatcgtttcaatcatcatttccatcattgggatgttcttcttagacgacttgttagtgctctttggagcggggtcggtgctggattacgccatggactatggtatgatcatctttctatccagcatcattatactattcccagccatcgtgagcagtcttttcagggcagagggggacattcggcgcgccactgtgcccctggtggttaatgcaatcctcaacattatcttcgatcctattttcatctatattttcaattggggagtcaagggggcggctatcgcgaccgtattgtccaccctggtcaacctgttaatgatgctctactggtatctggtaaagcgcgatacattcattaaactgagtttggagtactttcatagcaaaatggaaatttataaggagattcttttcgtaagcatccctgccagcctggaagagcttatctactccattgtggccatctgcttcaactacctcatcatgatcactgccggaaccatggaagttgctgttttcacggtggtgtggcgattcgtgtcaatcgcctttctgccatgcatttccattggcatctcaacaataacagtggcaggcatagcctacggggcgcggaactacgagaactttaagaccacaatcaattactcgactttcctaagctttacaattactttgataatatgtatcatcttcttcgtatttgcctatccgatctctgaaaccttcaacttcatctctggggacgctgaaatgatcagtagaacggctgaggtcctgaggataatggtgttctacaatattgtcattccctttggaggcacggcagtttatgtctatcaggccattggctctggctttaagtcattggccatcaccattctgcgggaactgatcctgagtgtgttcctggcttatctctttggcattgtcctcaaaatgggcatctttggggtctacctgggtgcgatagtcggaatggccattggttgctttatcgggtttacctgtatcaaaatctaccaaggtaagtttaagaaagaatgcgagagcctgaatcagcccgtgtga

SEQ ID NO: 3655 - DNA, 1035 bp, synthetic construct
  source 1..1035: mol_type = other DNA
atggatctactgctgatcctgtcacaggagcatgacaagctgcccctcgctgagttacgcgctgtcctcgagacagaggaaatagaaaccgaacttgagatggtctgccctggcctggttctgctgaaagagcttgaggaagacgtgttcgatgactattaccgcctccttgttcggcgattaggttacacccacgaggtccaccagctgattaagacagtggactgctcagacctggaaagcgaagtgaaaagcatcgattggtctgagttcattgacgagaactttgccgtgagggtcaagaggttcaatagcgagatagacactgtggacacggagcggaagatagggggatatatcctgacaagtaccgacaatatcagcgttaacctatccaatccaaaatcgtttatccgagtggtagcctacaagaacactatctatctgtgctatggcaaataccaattgaacaaaaagtatttcgaagagatgaaaccgcataagaggccctttttccaccctggatgtatgagtcccaagctggctagatgcatggtaaacctctcaagagtcaaggagggggatctcgtcctcgatcccttctgcggaacggggggcatcctgattgaagccggtctcatcggggcaaaggtggtgggctgtgacatcgactggcgcatgaaaaatggaacagcaacgaacctggagtacgccgggatcaccgattacaaaacccatgtggtggacatccgggagatggaaatgtacgaagaggcggatgcagttgtaaccgacccaccatacggcatttctacaaccacttgtggagaaggtgcctccggcattttcaaagaatttctcgaatccatcgagcacagcatgaaggaggacgcccttttggtgatggccagtcctgattccctggacatagattccctatttaaggatgtcggcttcgtgttgttggagcggtacgcgattaagatgcacagaagcctgactcgtatcatttctgtgattgctaagatcgattga

SEQ ID NO: 3656 - DNA, 1299 bp, synthetic construct
  source 1..1299: mol_type = other DNA
atgagtttcgattacgacgtagcaattgtgggtgcaggacctatcggcagcagtctggcttatgagcttgctcagaacggcctgaaggtgtgcctcatagacaaaaagaagcgtatcggtttgcctttgcagtgcgcaggcatcgtcaacaaacggatttctagtttgtgcgacatcccaaaagagctcatcctgaacgaagccaagggtgcgttcatacactctaaaaaccatagcctgacggtgtccaagaaggagagccaggcctacgtgttagacagggtggcctttgaccagtacctgttcaatcgagcccgggagcacctggacacctacctaagcagcaaggtagtggatattgacacagagcttgggattgtccaattcaaattcgactgtgagatcaaaactatccgctccaagattattgtgggggcagacgggccactgtcactttcagcaaaaaaggtcaactccaagctgaactatttcaatgccagccagtatcttgttaaggttgataagatcgatgaaatgtcctttgtagacttatacgcttggggcgacctctttccgggctttatctgggccatcccagtgtacagtaacatctacaggattggactctttagcgaagacgactataagagccagtccaagatgctggatgactatctggaaaatgaatttcgctacgacgaatatgaggtgttagagaaatacaagggaaaaatacccatctacgataaaagtaacaagctttttaagaatcggcttatcctcataggggacgccgcgtcgcaagtcaaacccaccacaggaggcggaattttgatcggcctggagtcggtgcagttcgccaaagatgccatcttgaatgctctcaacaccctggacttcgataaaattgatttcgatctggtgggggggtctgattcaaatgaggatgacagcgatctaaatgacgccaactataaagaagagctcaataacttcctcgatgagctgtctaagatcctggagaactaccagaatgacttcgaaaacagattctccaaagagttcgagattcaatttaaggtccagaagagcctgtcaaccctgtctaacgatgacctggactacgtcctaactaagctgaaagaaaaagacgctgataagctcatatccgaatatggagacatggacaatcagtccaagctggttaaggagtttctgaagagaggcctcatcttctcactggctcccaagattcacaagaaggaattggcgaagatctggctgctcaacaaagattga

SEQ ID NO: 3657 - DNA, 1911 bp, synthetic construct
  source 1..1911: mol_type = other DNA
atgtttgggaaagataaaaaagagaactcgaacgaaaaagtgctgtacgaagggcagccaaacctgatcgtttatagtaagagcatcttcatcgcggtgattttactgggatttctctttttcctctattcaactggaatccagtacattggaaacatgcaggtctacatgatcgaatcgaccaaattgccattgactcgctattttgcaatcgccgtcttcgtgatcataatggtggtgatcctatacatcatcataaaattcctctcttggacctcaatcaagtatacaatcaccgaaagccgggtgatcgtggaaaaggggattatattcaataagaagaattacatgccttttaacacaatccaggacgtaagtcgttcgcaaagcattctgggaaaagccttcagcgtcggcaccattaccctttacagtgcctacgacggcaaggacatgtcactgaaggatgtctcaaaccccaaaaagattgaagaccttatcttcgagaatatgcggacaacgcacctccgcagccacaacctgtacgacgactcctacggcaatccctacaataacagttacaacaaccataacaaccattggggatacgacaactatggtgattcctaccaaaacagggacttcaagcccataaggcccaactccgatgaaaaggttcattacaaccgtatggaggacctcgacgaccttgagttggttgatgtgaaggagagaaagcgaaatctgcgcgaaataaggcgaaaggctaagaatagtcggggaaacaactacaataatcagccgattgacggtccgagtaacaattacaatcggaactccaattacgaccctaactataacaggaactctaattataagcagaatccgaattataacaaccgcaacaactacgatgatttcggctacgatgattacgagagcggctataatcaaagatccaaaagagcccctcagggcaataggggctacagcaaaaggaatgcaaaccagtacagggacgactcacgggccaatcaccagcacagagagacaatccgggagtcctatcaaagaaacccaaataagtattttgcacagaactatgagaaattccatcaagacaatctagaggctcagaatagggggggggaaagttttaatgagatgaaccctctggattctaacgactattatggtatggatgacgactttatctccgatgaggagtttgatagcacgattaataaggctatggaaaacattggagacaatattaaatttaagcccaacaatcactcaagagtggtcaactctcacgaggacttcgactcccgggtagtgaactcccacgaagacttcgatagcagaatgaatgactcgtacgacgacttcgcgagcggctctagacataacactgactacgccaatagcaaccagaacaggcattataacagcaactaccccgacgaccggcagttccgaagcaaccagtcttacgagggggattaccgccagtctcgttctaatcagccttatgagggggattatcggcaaagtcgacccaaccggtcctatgacgatggctatggtcacagcgggtccaacccaaactacaataactcttacgaccagtccaactacggctatgatgactacagacagtcaaacaatcccccacggctgaataaacagagctcaagtgataactaccacaaatccaacaatcgcaaccgctcaagcaactatcgcaatcgcagctataacaatcaggaaaattacaactcctacaacgatatggaggataacagcaataactatgaggagagtgataagaagggcaagaagaagaaaaagaataaggattccaatgacctgctggagaagcacagcaggaaattccgacgctcgtga

SEQ ID NO: 3658 - DNA, 297 bp, synthetic construct
  source 1..297: mol_type = other DNA
atgatctttgtgctggcgaaggccattcccaaggacgaggaagcctgcgagaaaatcgtcgaatttgcacaggacctgatcgaaaatagccggaaggaggatggcaacatcgactataacctatactccaacacttgtgatggcaccctgctgttcgtggagcagtgggaaagcaaagagatactcggagcccatcttcaaacagagcacttcctcaccttcgggaagaatatagcagatttggtagccgctgaactggacattgccgtgtacgaggcggaggctacggacctctga

SEQ ID NO: 3659 - DNA, 684 bp, synthetic construct
  source 1..684: mol_type = other DNA
atgaaagtcgcggtgattggtggcactgggccacaagggctgggcattgccaaaaggttcgctattgagggggttgaggtgatagtgggcagccgcaaggaagagaaagctctgacaatagtggaggagacaatcgaggagcttaaagattacgatctaaacattgtcgggatggctaatgaggatgcagccaaggagggcgatatccttattctcactgtgcccctggccgcccagaaaccgacgctcgaaggaattaaggagttttgtaccgacaaaatcgtattggatgcaaccgtccctctggagaccgctataggtggcaagccattccggttcattgacctaatggagggcagcgccgccgaacgcacggccaaaatattggatggaacaggtgcgaaggtgatctgcgcattctgcaacatcagtaattctcatctctccaacatcccaaacgagatcgactgtgactgcctgatcgcaggagacgacaaggaagccaaggaaatcgctaccgaactgatcaataagctgcccggcgttaaggccatcgacacaggcattctcgaaaagtcaagaataatcgaaaagatcacccccctgctgatcggattaaacattaagtaccggtcccactatggggggctccgaatcactggaatccctcagtttgaagactga

SEQ ID NO: 3660 - DNA, 1077 bp, synthetic construct
  source 1..1077: mol_type = other DNA
atggcaacgtttaaaggctttgccatgaaacgactcaatgaaatcggttgggtggaaaaagaagtgcccgagtgcggaccgatggacgctattattaagccaacttgtgtgtctccatgcacatccgatatccacacagtgtgggagggcgccatcggggaccgccgggacatgatcctgggccatgaggccgtgggcgaggtggtggaggtggggagcatggtcaaaaagtttaaacccggcgatcgcgtcattgttccagccatcacccctgactgggatgatgaggccgcccagcgcggattccctagccagacaaccgaacccctcggtggctggaagttcagcaacttcaaagacggggtattcggcgagagattccacgtgaacatggcggatgccaacctcacgttcatccccgacggactctccgacgagggcgcatgtatgctgaccgacatgtggagcacggggatgatgggatcagaaaacgcgaacatccccctgggtggaactgtcctagtgattggcataggggccgtcggcctcagtgctattgctggcgccaagtgtctaggggccggtagactgttcgctgcaggtacccggcccatttcggtcgaggttgctaagaagtacggggctaccgacataatcaactacaaaaacggaccaatcgatgagcaggttcgtgagctgaccgatggtgcaggggtagacagcgtcgtgattgccgggggcaatctggagaacacatgggcggaagccattaaatctgccaaggctggaggaactgtgtccaatgttaattatctgagtggcgctgacaatgtcctgatcccacgggtggagtgggggtgcggcatgtcaaacatcaatataacaaacggattgtgccctgggggagccgtcaggatggagaggcttgcggatctggcactttgcggcaggcaagatcctgaacttctggtgacccacaagtttaagggcctggaaaagatcgaagatgcattgctcttgatgaaggacaagccgaaagacttaataaagcctgtggtaatgctggacatcgactga

SEQ ID NO: 3661 - DNA, 825 bp, synthetic construct
  source 1..825: mol_type = other DNA
atgattatcagtgaggagctcttcgaaggaatctgcgacctggacgatttcaacctcctcaagtttgttatcagcagcgagctacgactgaaaatactgtttagcctttacgaaagtagcaagagcattaaggagctggagagcgagatcaaccggaaatccggcaatatttcccgcggcctgaatgagttaaaatcctgtaaactgataaccaagctcccaaacaaattgtttgcgatatcatccacggggttcttggtggcaaagaacctggaaaatcttatggacaatatgggaagtatcgagagcaacggggaattttgggagaatcactccatcaaatcaatccccaacaaattcctaaaggaattatccatctttaataacagtaccctggtgaaaagcaccattacagattttgccaagccgattaacctgtaccttgagaacattaaaaagtctacctatatctgcatgatactgcccgtattctcgaaaatcttcaacgacgccgtcaatgacgctataatcgaacatgacggctatctggacttggtgactacaaagaacatctatgatttgagcattaaatcagactcggacaataagattaagtccctcgtgcgggataagaagatcaagttctacatcgtggatgacctgcctaacatcttctttactgtctcagatcagttcgcaagcctctacctcttctttgatgacgtggtcttcgacaattctgagatgctccttctggaggacgatctgaacctgaatgatgcctacagattctacaggttctttaagaacgaaattctgaagtga

SEQ ID NO: 3662 - DNA, 861 bp, synthetic construct
  source 1..861: mol_type = other DNA
ttgaccaaccgctttgaagaggaaaatttcctggaactgcaggaggacatcaagttcctgattaactccgaaattcggctgaagatcctgggctgcttgtataactcctccgctagcataaaacagatcgaggcaatcaccaactatagttacagtagtattctcgacaatatcaataagctggagcaaaaaaagtttatctacagcatagaggacaaattctacctctataataagacaaggctgaaactcaacagcattctctactttaacaagtcagccacctttttaagagagaatagtgacttcctgaaccagtcccttatcgatatcaacagcgaagccataaaggacctctccgcccttgagggctctagactaatcgaatccaacaacatcgatctgtttaaatctacagaaatctttcagcgctctcttatggggttcaaatttctcaagggtatcttcccgtacttccatccacgacacgacgatattattagctattggatagacaacgactgcactgtggaactgatcctgcctgatgaggtttcagaggccgtaaagaacttcattattgattatgtgccaaaaagccccgggattaagaataggtttgtcaaacttaaacccaacgaccacaacatccagttggcgttcacagtgtcggataagtgtttcgtcttggccctctacacgaagtcgggccagttcaatcaaaatgcagtgctggtgtcaactaaccccgaagctatcaccttcgggttaaagctgtttgaggagtacgaggagctgtgcggagactacgtcagcctagagaatctgatataccctaatggacgggaggatgactattga

SEQ ID NO: 3663 - DNA, 1275 bp, synthetic construct
  source 1..1275: mol_type = other DNA
atggacgattctcccaatgaagtcccagagctgaaccgcccaactaaaatagataacatagaagagcccaaaacagtagacgagctccagaaggaacttgacttgcttaaagctgaaaaccagaagaccaaacgcaaccttatgtggaaggtgaggaagctggagaaagacaagattctcactgaaaatgagaaaataagattggagcgcgagctcaaaagcctgcgaggtgaagtggagcggttccgatcaccgcctctggtgatcgccactatcacggaaatcattgacgactccagaatgaccgtaaaaagcagcaccggccccagtttcctaatcaattacagcaaattccttgatgaagacctactgaagccaggctcaagggtggcccttaatcagcagaccttcggcgtggtggaggtgctaccctccgagaaggatgcaaatgtcagcgggatggagattgaggccaaacctgacgtgacctatgatatgatcgggggtctcgacgagcagattatagaagtcaaggaaacggtcgaactgcctctgaagcacccagaattattcgagaaggtggggatcgacccccccaaagggatcttactgtacggcccccctggaaccggtaagaccctgctggctaaggccgtcgcgaacgagacaaacgcaacattcattaaggtggtcgcctctgagtttgtgaagaagtacattggtgaaggggcacggatggttagggaggtgtttgagctggccaaggagaaggctcccagtatcatcttcattgacgagctggatgccgttgccgcccaacgcctgaaaagctccacaagtggcgatagggaagttcaacggactttgatgcagctcctcgcggagttggacgggttcgagtcccgaggagatattggaatcattggcgcaaccaacaggccggatatcctggacccggctctgctgcgccctggacggtttgacagattcattgaggtcccagcgccaaatgaagacggcagacgtgagatcctgaagatccatactaaaaagatgaacatagatcctgaagtgcggatgtcggagttggttgagctcaccgaaggcctctctggcgcagatctcaaggctatctgcacagaggccgggatgtttgctatccgtgaggaaagagaccacatcatcaaggcagactttgaggatgccatcaacaagattatgggaaaaaacaagacaggcacgctggacgataatggcggagtaatgtttggatga

SEQ ID NO: 3664 - DNA, 504 bp, synthetic construct
  source 1..504: mol_type = other DNA
atgaactgtgagatctgcggcaaagaaatcgaaggaaaaccactgagaacgaagatagacggcagcgtgttactggtttgcaacgattgcgccaaattcggcagggtccagagggacaccccccttgagcgcaaattcgtcactcgcgacaagaaggggcgaaaagaggcaaatgcgaaaacacgccccaagaagacctacacacggaatgaagagccgatggatgagctggtggaggactttaacctcgtggtgaggcaggcccgggaagctaaagggtggaagagagaggagctggctgccaagatctatgaaaaggccagcgtaatcaacagaatcgaatcagggaagatcctgccagacctcaaattggcacggaagcttgagaagaccctgaacattaagctcatagagaaatacgatgatatggacctagaagcctacaagagttcctccgcgggtcctaatactctgggaagcattgtgaagattaaacgaaagtga

SEQ ID NO: 3665 - DNA, 423 bp, synthetic construct
  source 1..423: mol_type = other DNA
atggccttgatcctcatcagaggtgagaacaacgccaagatactgaatgcaatcgccgatgtcgaaaggcacgcaaatctgactctggagacaaagccgaagaaagtggaccccaaattcgccgacaagctcgttgagaacgtgttaaaatcccctctgcggacgaagtctaaggtggctaccgcctttcgggtcaaggaggacactacgatcgcgattcttcaggtgaagaagatacacccacccgctcatatcgtggtggtaagcaacacctacgacggctaccgcgaactgagcaaaatcattaatgaaggcaaggtcttcaagggatattactccaacaaatcaagttcggggacccgaatgaaagattacaaactaacaaagaccagcacaaatgaggggctcaacatttatatgtga

SEQ ID NO: 3666 - DNA, 1227 bp, synthetic construct
  source 1..1227: mol_type = other DNA
atgctctttagcgtaattgcgactgtctctgctacttgtaacgtcatcgtgataactgaccctagtggagaagaccccaacggcgccgcagcaggaagtatgtcctttgctaataacatgttccagtcgagcttcatcatgagcaaagatgatggatacgccatgctgtcagggggggaggggaatggtaccgaaaggaattacgcgattatagcagcgcttgcagccatgcagcatggagccactccagcatctgctgccgccttggcaagtggatttaagggcatcagacttgtgattggcggcccctcgatgggggccgccatcggcggcgactacaacgcttatctcgtggtggtcgacgatgccggcaccattaaggtcacccaccacacaggaggagtggtgcagctgcctcaggggtccaagggcgccatcattcacttgcggaacagtgcagggaaccccatgtatggcactgccgaacgcgtccgccgcgagacggcagtgaatataggcaaaatgatcagggacggttaccccgccacctatatcgtcggtaaggccatgaaagaggtggccgaggattcaggggaaaagtacggggggggtgccgtcaacctggtgtccagcatcagcacgggagacatgttcgtgcccgatcaggtcaacaccaccgggtacccgatggatgagaactattccaagtcctgtgaaaaatgcggatgggctacaggcttcccagatgccgagcgatacaacgtttgcccctactgcggctccgagctgaccgtgaactctgctacagatgtgctcatcgacagcatcacagtgtcgaaggactctgtgtctgtgtccgtgtacggaagtgaccggcttggactcagcgacattacaagagaggtcgtcaaggcgtcagttaagaaatatggctacaatgcgagtaccattgccggcagcctgaacaaagggatcaataatggtctgatcgttggcgttgactacgtagagccaagcgacctcaacgtgaagccggacgttcgagctgtaggtgtgtattataatccactacctaatggcagaagctcacctgcttggaacctgccaatcaattccatggttctaacgatcttggggaccattcaaacggctattggcttcgtgctgataatgctggtaatctttaggacacggctgttaaaatccttcaaggatcgtgtgtcatga

SEQ ID NO: 3667 - DNA, 498 bp, synthetic construct
  source 1..498: mol_type = other DNA
atgtttatcaaaattcgaagagacacactcatcatcctgctattggcctttatcctcattctgtgcgggcgcctcattatctacgtcgcctacgcatcctcggcccaggtcgaggagggcgtaccaatcgcgggtattatcgtgaagggcaacgacatagttccgatcgacaacataaggtacaacgtggagaactcagggctgcgggaaggcagctatattgatggagacatccttaagaccagcatacgggagctgcctgtgacggaagccgaggcaaatgccgagaagttcgtcaaaaggtccacaattcccgggaccactatcgctccaattgctggagcggacgtgaatgttaacaagcagactggaatcgtcaccgtgactgtgatagaagatttctccaccatcaatatcacaggcaacagtaccaccagcacggatttcacagaaaacgagccctcaaaaagtgtgtacaattatagcctggctggttga

SEQ ID NO: 3668 - DNA, 1125 bp, synthetic construct
  source 1..1125: mol_type = other DNA
atgattatccccactctggggtgcccctccaactgttcatactgttggggctcggaggacaacgctgaactcatggacatcgatgtcattaagcagattgtggagtggctagcggattttcgcgatgagccggtgcacttcaccttccatgggggagaacctttacttgcaggctatgatttttacaaggaggcccttcccctgctcaatgatgcagagacccatgaaacggaagggttctcattgcagagtaatctgtggctgctcgatgaggagatggtggaattattctccaaatataacatagccatcagcacaagcattgacggccccaaggagatcaatgactaccaacgaggcgaaggctactacgacaagacgatgaaaagtgtgaagctggctaccgaccacaacatccaaattaacttcgtctgtaccttcacatcctactccaaagacttctcagacgagatatacgacttcttcaaggccaacggcctgaacctgaagatccacgctgccctcccctcccttcgtggtaacaatgcagatccatgggccctacctcaggatgagcacggaaaattgctgattgattggctggataagtatctctacgacctggacaagttcgtaattatggacctggaccatatcgccaaaagcagcctgcggagggttggaaccctctgcacatttaatgactgcatggggactaccttggctgtgggccacgatggtagcatctatccttgctaccggtttgtcggaatggacgagtacatcatgggcaacgtgtatgacaagccatctatggagacgctcgagcagtctgaagcttgggagaagctgatggaatttaagaatttcgtagatgaggactgcgccgactgtaaattcatcaaattctgcagggggggctgcccgtataatggaatcgtggctacacagagcccaagggcggtggacccccagtgtgaagcctataagatgatctttggggaggtcagtcgcagagccaacgaagactttaagaagaacgcaatggcggcatttggtggtgccccacgggttagaaaagaaggagatccttttagcataatggatctgatgactaaaatgtga

SEQ ID NO: 3669 - DNA, 219 bp, synthetic construct
  source 1..219: mol_type = other DNA
atgaagttcgaagacctgatggcaaaatgtcccaaatgcgggagccaggacaagaccgccgtccggaggttcatcgacaaccatcacgcccacgctgaactcaaggagtttaaatgcgataactgcggcttcgtgtatgaaacgggaaaagattacgaggataatgaggacgagacaattaagaagggcctaatcaaggagctgaacaagaccatgtga

SEQ ID NO: 3670 - DNA, 1047 bp, synthetic construct
  source 1..1047: mol_type = other DNA
atggactattccattaagagtggcatattcggcctcgtggtagcagatgccctgggagtgccttatgaatttaaagacaagcactactgtgatatgaatccgatgacagacatgatcgggcacgggacctacaatcaggaagcgggaacctggtcggatgacagctcgatcgctctcgctacactggacggattgaccgactatgaatttggcgaagacgacgtggaaggcatgcggatcaagaactttgccgagatcatcgactacgacagcattgcccataagttcgccgattggctaattaataagaaatacactccccacggggacgtgttcgacgtgggcaacaccaccagccacgccatctactccttttacgctggtaaggtcgatgccctgcacgcaagtggcgcagggaaaaaggatgctggaaacggcagcctgatgagaatattgcccgtctcattccttatttacttcctgagcctcaaatatgacttcgacgaggagggggaaatggaagcaatccataacctgtctagcattactcacaggactttacgatgccagatggcctgtggcatctacataaaaatcgcgatcgagctcttaaagaattactttgactctgaagacgattcaaacttgctagagctggtgaataacggtataaactcagcgaaagagtattatgagacgaaggaggagttcgcccatgagctgagtatttacgaggacgtgttctcccttgagattcaagattttgaccgcgatgatatcaaagggtccggttacgttgtcgaggccctcaaggcagctctgtggtgccttctgaataacgatgattataaggacacagccttggcagcggttaatctgggtcatgatacggacacaaccgccgctatcgccgggggactcgctggcatttattacggatacgacaacatcccatccaactggcttgataagatcgccaaatctgattacatcggcgaactctgcaataacctgagcgactatctgttcgagattctggaggattga

SEQ ID NO: 3671 - DNA, 780 bp, synthetic construct
  source 1..780: mol_type = other DNA
atgtcgctggagattctcaaaaagggcacaagtgaaaacttcctgcttaagcagatcattaggaagaactttaccagcaaatacaaggactctgtgttgggcattctttggtccttcttcaaccctctgatcacaatggccctattgacagcgatctttagcagtgtcttcgcacgcaacattgaaaatttccctgtgtacttcttgaccggccggtgcgtgattgatttcttcaatagcggaactaaaatcgccatgacctccctgaaaaagaacagcgggattctgaataagatcttcgttccaagatacgtatttgcactgggcggaatcttttctgagtttattaactttctgatgagtatgatcgtgctgattgtgatcatgatcgtaactagggcgcccttccacctctatgctatcttttcagtcatcccaatagccatcctattcatcctgattttaggagtggggctgacactttccattctctgcaccaaattcaccgacattgagtacctctataagatatttaccagcctcctcgtgtacgcctgtgccatcttttatcccatcgacatcgttccccaacccatccggcagtacatggaactgaatccgatctatggtattatagctcagttccgcgagtttgtcatgtatgggcgattcccatcaacgaagctgatgctgataaccttcctgacttccatagtcatcttcatcattggtgtgatcatatttaagaaataccagaacagaatcacgctcgagttatga

SEQ ID NO: 3672 - DNA, 1230 bp, synthetic construct
  source 1..1230: mol_type = other DNA
atggataataagaatgaaaacagcaataagatcaaaacccagttaatcccatctattcataacactgtatctctccaagcacacctcactacaaaagatggcgagcccattgtgggtgaggaggtcgtgtacaaactgtactccatagacaagagctttcttacccagtattctcggataacaaatgaagagggcctagtgcaccttaccctcaacatcaagcataaggtctatattgaaatctgctatgagggcagcgaaaagtacgagagcaacaacgtaatgaccttcaggaccaagccttcagacgatgagaagaacgtaaaaaccaaacaccccctgcaggttcaaagagaagagaagctggaacagaagaaaattgaggagaaaaagaaaaacctattggacttccagcagaaacagaaggacctggaaagtgtggatgaggacaacatcgccatcgagctaaagaatgtgaatctgagttttacaatcggctcagataagattgacaacttaaaggagtacgtgatccgtaccatcaagcgcacgaaagaaaagaaaacaatcttcaaggccacagatgatgtgtccttcaagatatataagggggaaaaggtcggccttatcggctttaacggcgctgggaaaagcacgctgctcaagatcatctcaggtgtctacactccagatgacggtgaggttatcgtcaatggaaagatagcgcctctgctctccctgggggcaggctttgacaagaattatacgggccgggagaacattttcctgaacggagccattctgggatacaatgaggagttccttaacagcaaatacgacgaaatcctcgagtttagcgagctggggcagttcatcaacctgccagtgaaaaactactcctctgggatgctttcgaaactcgggttctccatagccaccatcgtggagccggacattctcattctggacgaggtgctgggagtgggagacgtgaatttcaaacgaaagagtagggagaaactcaattcgctgattgagtccaacattaccgttttgctggtttcacacacaatcagtgagatacgcaacatctgtgaaaaggccatctggctggaaaacggtaagatcagagaaattggagaagtcaatgacatttgcgataagtacttggaagaagctaaaaaggtgagcgatgacaagactaaaaaattgaagcccaagcggttttga

SEQ ID NO: 3673 - DNA, 681 bp, synthetic construct
  source 1..681: mol_type = other DNA
atggcaagcatagtggctattatccctgcctacaatgaagaggaagcgttggccgacgtgatagcgaagacctcaaagtacgtggacagagtgatcatcgttaacgacggcagtgctgataggacggcagatgtggcgattgaagccggcgctgagctaatcaaccacccgacgaaccttggaaaaggagaggcattaaagtccgggtttgaggctattaccgacgattccatcattgtcacaatcgacggggacggccagcacaaccccgatgagattccaatcattctgaagcctatcatcgaagatggagtggacctcgtaaatggcagccgttatctgtatggtcatgaggagaacacccccgcctacaggagagttggacagcgggtcctggacattgccactaacatctccgccggcatcaaggtgacagacagccaaagtggcttccgcgccttcagcccaaaggctcggaattgcttccgctttaaagacaccggttttggaatcgagtcggaaatgctcgtggatgcagccgaggccgggctgaagatagtggaagtcccaatcacagttcgatacgacgtggacggctcaactaaagatcccgtaacccacggggtgggggtcctgctcaagataatgaaagataaagccgtccggactttcaaaaagtga

SEQ ID NO: 3674 - DNA, 972 bp, synthetic construct
  source 1..972: mol_type = other DNA
atggagacacaaaggattatggtaactggcggaagtggcttcataggcacaaacttagtgaatgaactccgaagccggggacatgaggtcctgtccgtcgacctgctgcatcacgaggatgaggctgacctctacagcgactcttacagcgactacgtgaggggagacatccgcaactaccggcagatggagcgcatcttcgatgacaatgacaagttcgactatgtgtacaacctggcagcagagtacggccgatggaacggtgagggatactacgaaaacctttgggagaccaatgtgatcgggttgaagaatatgatccgtcttcaggagaaactgggttttagaatgatatcattctccagcgccgaggtttatggggactatgaagggataatgagtgaggatgtaatggagaacaggccaatcaaggacacgtatcagatgaatgactacgccatctccaaatgggccggagagttgatgtgcatgaacagcgccaccatgtttggcactgaaacggtgcgcgtgcggccagtgaactgttacgggccgcacgaggcttactcgccttataaaggcttcatcccaatcttcatctacaaggccctacatggcctcccctattcagtacacaagggtcacaaaagaatcattgattatgtggaagacacggccaatacctttgcaaacattgtcgataatttcatccccggggaagtctacaacgttggcagcaaacaggagtgggaaatgaccattgaagagtattctgacctggtgctcgaagctgtggggatagatgattccctggtgacctacactcccgcggaggactttaccacaaaggttaagaccattgactttagtaaggcgatccgggatctgaaacacgatcctaaggtcagccccaaggaaggaattaagcgcacagtcgaatggatgaaatggtattacagaattgaggattga

SEQ ID NO: 3675 - DNA, 543 bp, synthetic construct
  source 1..543: mol_type = other DNA
atgacaaataaaagccccgaagaggagatcgaagaactcaaggctcagctgtccaagtaccgcaaggaaaaccggattctgaaagagagatgcgcctcctacgaagataggattgagcatttcgcgatagagcgaaaagagctgtctagagccatcacgcagttcgaaagcctggagttggagctgcgtcagtacgatctcgaggagctgattcaaaacacccgcaagctaaaccaccggatcgacattcttagacggtatttgcagacagagcgagaggacaatgagaagctcaacgagttgatcaacaagctaacaaaggaactcgatgacgcaaattacgaaatatcacggctgactactgaatttcacaagcttagggtgcgcaaaaatcagaggacctatttcctggaaaaccgcctggatatcgcatacaccaaactggcccaactcaaatacaccttaaacgagtttgaggagcttgggttctgggacaggctgagaggcaagaagccagaaagttatgacgacatcgacatctga

SEQ ID NO: 3676 - DNA, 846 bp, synthetic construct
  source 1..846: mol_type = other DNA
atgaaagcagtcatccctgctgcagggctcggcacacgcttcctgcccgccactaaagctcagccaaaagagatgctgccggtgtacgacaagccgaccatacaatatgtaatagaagagagcgtcaatagcggtgtggacgatatcctaatcgttacgggaaaggggaaaagatcgatcgaagaccatttcgacaggtccttcgaactggagcaccacttgaaaaccaaaggcaaggaggacttcctcaaggaaattgaatatatttccgatttggcagacattcactttatacgacagaaaaagcagaaagggctcggagatgcgatctactgtgcgaaaaagcatgtcggcaatgatcccttcgtggtcatgctgggggacaccattaccaaggataccgttccctgcacaaagcaactgatcgacatctatgaaaagtatgagaaatcagtgatcgccctggaggaggtgcctgatgaaaaggtggaaagatacgggatcataggcggtgaggagatagaggacagcatctacaagattgataagctagtggaaaagccacccctgcgggtggccccaagtaacctggccatcatgggccgttatgtccttacacctgacatctttgattgcatcgagaacgtggagcccggatacggtggagagatccagctgactgatgccttgagcaagcttgacgagatttacggccaggtatttaagggcgagtcatacgacattggaaaccggatcgactggctcaagacgtccttaaggttcgccctcgaagacgacagtgctcgcgatgatatcctggagtttattaaagaagagattatttga

SEQ ID NO: 3677 - DNA, 414 bp, synthetic construct
  source 1..414: mol_type = other DNA
atgaacttcaaaattaaggccaaggggcataagaacgtcctgtccctccataaatccacgttcgagatcaccaaagacaaggatctctcgctgagtggggactgcatcatcggtttggacattgataagtgcatgctggacttcccgaaggaatttaaggaaaagttagcaaacgatgagaccatagtgacagtaaaactgaagagcccaaatgcctacgatgagatagtgggatatggccaccacgacttgacccttgaccaccccacagacatcgtctgtcggaaaagtgactttatctgctcaaggactctcatgattaaatctgataaggccgctattgatctgaaccgcgatctgatcgaggacctggcgaatggcgagagcctagacgtggaaatcatccttagctga

SEQ ID NO: 3678 - DNA, 939 bp, synthetic construct
  source 1..939: mol_type = other DNA
atgatcataaataccgggttacgcacagacatcccgggattttttagcaaatggttctataacagaattgaggaggaatatgtctacgtcaggaacccctactacaaaagccaggtatttcactacaagcttaaccctgagctggtagactgtatcatattctgcactaaaaatccaaagcctatgctctcaaatctggacaagatcagcgaatttaatcagttctggttcgtgaccataactccctacaaaaaggaaatcgaacccaacgtgccctcggtcaacaaggtcatcaaaagttttaaggaactctctagtcagactggcaaggagagcgtgtcccttaggtacgacccgattctgatcaacgataaatacacactggactatcacattgaggcctttgaaaaaattgccagctccctgtcagaccacacaagcgaaatcatcatcagcttcattgacctgtatgaaaagaccaagcgaaacttcccacaagctcgtgaggtttcgaaagaggagcgcctgattatcggcaaagagttctccaatatcgccagagagaacaatcttatcctgaagacatgcgttgaggggaaggaactggataagttcggaatagattcttcaggctgcatgacgaaggaggtgatagaacgggcgatccacaataagctcgatgtgcgggtgaagaaatcccggaacagaccctgtgactgtctactaaacaatgacattggggagtacaacacgtgcaatcatggttgtctctactgctatgcaaattccaacaagcaattggtgaagcgaaactttaagaggcacgacccagattctcctatcttgattggcaacatccgcgaagaggatgagattaaagagatcaaccaggagagtttcctgattcatgaggataccgtgcagaccaaactcttctga

SEQ ID NO: 3679 - DNA, 459 bp, synthetic construct
  source 1..459: mol_type = other DNA
atgaaagggacgtactgcctcatcataagtatgaagaaaagcgacaagatcaagataggcaatctataccccgaagcgtacaaattcaagaagggatattatgtgtacatcgggtccgccatgaacagtctgatctcacgccttaatcggcacctgtcggacgataaaaagatgcactggcatatcgattacctcctcaccagcgagtatagcgagattcgagagatcctttttacagactcagagaaaagaatcgaatgtgatctggcaaacgagattgctgaagacggattggagattgagggcttcggctgtagcgactgcaactgcaattcccacctgattttcttcaaccgcaagcgggatgccctgaggagggtcaaggacgcctacgaatccttaggtattgaatattacgacctgaaatattttagaaccatcgacaacaagaaggattga

SEQ ID NO: 3680 - DNA, 2883 bp, synthetic construct
  source 1..2883: mol_type = other DNA
atgaaaattatcttcaaacggtgcctcgtgctcatctctcttatttttattctcattttaactcttggccttgtatcagctagcaataatattaaccaaatcaacgacatgaattgtagcgtatacgaagactacagtgaaaatattatcacagccgatctcaattcaaacagcaacgagcttaattccgattttgcctacggtgacagcgactctgaagaaatcctggatgaaccctctcagaagctgaaaacaggtagcgataattctgatttcaaagacatacaaaacctgatcgataatgctaaggagaatgacgtcattgagctgagcggaacctataccggtgattctctaattgtcgtaaacaaatccctgaccctgaagtcttctagcagtgccacactggacggagagtttctaaatgagctgatggctataaatgctcccaatgtgatattggacaacatcaactttatcaacgccaattacactggtctgagcgttaataacaattatgtcaccattcagaactgcaacttcgacggctgtatcaacggagagctcgggtgcgccctgattatccatgggaacaacgtcaacgttctgaacagcaattttaccaataatgtggcaaacaagtccagctgccatcacacggacggggcagcaatttaccttatcggcaacgactgccaaatcgacaattgcagcttcatcaacaactgggggtacaattttgaaacatccagctcaggaggcgccatctggataaagggcaacaatattgtaatcaacaattcctatttctttaataactccgcgaccgcggaagttggctggaccttccacggcgaggagataacctacttggcagatggatacggcggagcagcctttctcgtgggaaaaaacgtgaaaataatcaattccctgtttgacagtagcctgtcccacgcccaggggggggcattgtactataagagcgcatatgactgctcaatcatcaactcaacctttctgaactcattttctgtgggggagggcggcgtcatctatcttggtcagaatatcgacgggctaatgatcgactcgtgtaatttcataaacaacacggccgacggattggacggggttcttgtcaagtacaccgatctgggcagtgtgctctatgcctcaaagttcgctgagaatgtcgtgatcaccaactcaagcctgctgaacaataaaggaacctctgctgtctacttcctcggaaataacctgaatatttcaaacagcatcatcgaaaacaataatctatcgaccgccgtgatttatatgaatggaagtatgaacgacaacttctggagcaagaacttcgattctgccgatgagttcaagaacgactgcttcattatccgagacaacgagtctcaggtgcctgacacttggttcaacttagtgtgtgacggcttggacagtctgaaggcgaagggggtctacgattacaacatgtccttcgtcctcaaggatgcttccctggataatcatgcctccaaaatttcactcacaaataacctgcctaattaccacattaacctgaaaaacagtgccaagaataagatcaacccaaacgagctggtgattgttgacaaccaggcggacttcacgtatgattacattgagtctgctaaggactccatcgatgtgtatgatgactacaacaacttgatcttatccaagaaggttctcagcggcatcacgtatattaacgacagtggaaatgacacaaaggaccttcaggatgcaattgatagtgccagttctgggagcctgatctccctgtccaacaagacctatgttctggacacaatcttaataaataaggacattcacattagcggagaggaaaacacaactgtcatgctctcaaacagttcagattatatatttaaaatctcgaactgttccgctgccaactattctgactacggcatagccatctccaacatcaacttcatcctggataatggcgacatcgtggccctggctgaggctgtgaatgggtctggctcactgtccattgacgtggcctcaataaagatcacagacaactcattcacatcccgtgaaggggtggtgagggagagcattacgatcctggagctggacagccaaagggctgtcctcgcccccacacggaacatctcgatcagcaacaactccttggaaatcggaatgaacccattcgattttaatgttaagtcggtcatcaatggctccgatgtgcgcgtggatgtcgggggcaatctcgccagcaaaaaagccagtcagatcatttgtaaagatatggtcacgaaagccattgcaagcaatgtggattcccgctcgggagagtacttcaacgtgagcctgaaggacagccagggcaaaccattgcagaacaagtttgtgcagataggttttaacggtgcggtttacaacagaaccactaatgagagcggcgaacttagactacagataaatctggcgtacaaaggagtgtacactttcgccatatcctacttgggggatgacgagtgcaacggttccttcgaagtggcgaagatcactgttaatccgcagagtcccattctcatggccaacaacgcaaaatacaaggtaagctccactaaaaccctctcggctagttttaaatccatgaaaggcagtcctatctcgggcaagaccatcaaattcactgtagatggcaagacttacagtgggaagacaaattctaacggtatcgctagcgtgaaagtgagcctcaacaagaaggggacctataagttcacggccaagtttgcaggcgataacaccttcgcagcggtgactaagagcgctaaggtggtgattagttga

SEQ ID NO: 3681 - DNA, 804 bp, synthetic construct
  source 1..804: mol_type = other DNA
atgaaaagacagaagaagatcgccatctatggaaagggggggataggtaaaagtactacagtagctaatattgcggccgcgtacagtgaagacaacaagaaagtcatggtgattggctgcgaccccaagtccgacacaacgcgcaccctgtgcgggaagcggataccaaccatagtgcacaccctgaaggacaataagaagccagagcttgacgatttagttttcgaaggatttaataagatcaaatgtgtggaaagcggcgggccagagccgggggtgggctgtgcagggcgtggtgtcatcgtggccatgaaacggctggagaacctgaatgccttcgaagaggaatttgacgtgatcctgtatgacgtgctcggcgatgtggtctgcggaggcttcagcgttcctctcagggaggattacgctgatgaggtctttatagtctcctcgggagagtacatgtcactgtatgctgcaaacaacatcagccgaggcattaagaaactaaaaggaaatctgggtggcatcatctgtaactgcaaaggtatcgacaacgaggaagagatcgttaactcctttgccaaggagattggcactcaggtgatcggagtgattggcagaagcaatctcattcaaaggagcgagttggatgcaaagaccgtagtggagtacgctcctgaatccatcgagtctgatgcctaccgcaagcttgccaaggacatttttgataacgacaactacagcacaccccagcccatggaagacgaagacttcgagaacttcttcaaatcattcatcgattga

SEQ ID NO: 3682 - DNA, 1260 bp, synthetic construct
  source 1..1260: mol_type = other DNA
atggtcgagctgctggctccagcaggaaattttatctcactcagcagtgcattaaagaacggtgctgatgccgtgtatatcggcctggaagacctgaacatgagagtgaacgcaagcaatttcagcctggaggacattaaaaaggccagtgaaatgacaaaggaatatggggctaaattatacgtatgcacaaacaccatcatgaaagataaggacattgagatgctcaaagatcagttgccctacattaaggaatatggcgctgacggtatcatattgtcagatattagcctgatcgagctcgcttctcagaatggcctcgaagcccacgtgagcgtccaggaaaataccactaacttttacgccctgaagaccctggagagactgggggcaaaacgggccatcctatctcgagaactgtccctggacgagataaaggagatcactcgaaaactaaaggagtcggattccacgatcgaaactgaggtctttattcacggggccatgtgtatggcgatcagcgggcgctgctttttgagctatggcctgtacggccgtagcgccaactgcggagactgtctccagccctgcagaaaggaatggaagcttagctttgaggagaatgaagacgacgacgtcatcaacttcagtgactgtgacgacgaatccttcataatatcccaatcatacgacgactcctacaggaccaacttcttctcgccaaaggatatggcactcattgagcacattccggagcttatcgaagcgggcatcgattcattcaagatcgaagggcgggcgcggtctcctgattacgttgccgctgcggtttccgtgtaccgccaggccatcgatttgtactacgacgacccagataactggcaattcaatcccgagtggatggaagagcttatgaaagtcttcaacaggggctacgacacaggattttattttgacacgccttatgagatcagcgagaacaaccagtccaagttcatcaaaagggatattggcaaggtggtgaactattacaataagatccgggtagcagagctgaagatctgggatgacctggctcttggagaggagattatgattcagggacccacaaccgggagtatcacccatgtgatagagtctatgcagatcgatggaaaaagtatagagaaggccgagaaaggttccaatgtggccattgccattgacgaaaaactgagggaaagcgatttcgtgtataagctcgttcctcgcgaggagtga

SEQ ID NO: 3683 - DNA, 1443 bp, synthetic construct
  source 1..1443: mol_type = other DNA
ctaaaggacaaatgcggtatagtggggattcactccaaagactcctctaaggacgtgtcgcacctgatctactacgggctgtatgctctgcagcacaggggacaggaaagcgcaggaatagccacgtacaatattaactacggcctgaacttccactgcggaatgggcctggtcacggatgtgtttaacaacagcctcatcaatagcctcagcggaaacgtagggattggtcatgttcggtactccacgacaggccagtcaaaaatcgagaacagtcagccatttttcacagagctcgacgatggattcatcgccatggctcacaacggagacattgtcaactcaggtagcctgagggacgaactgaccaaaaaaggctaccaattcaagagtggcactgatagcgaggtggtctgctatctgatcaaagaggcctacgagaaggataaggacatcctcaacgtgatcgacgcggtgtcgcagaagctcatcggcagttattccctggtgattttaatcaatgacgagctgtatgtgctccgcgaccctatggccatgaaacccctcatcctcggccaaaccaatgatcactttgttgtcgcatcagagagcgtggcatttgacgtcatagatgctgaaatcatccgggacatggcgcccggggaactgctctacttcaagaataatgagattaactcgtatatcctgccaagcgccaaagggtccagacgcgcccattgtatgttcgaatatgtgtacttcgcgcgtccagacagtgtcatcgatgatcgcagcgtgtataacaccaggcttcgcatcggagaggcattgtttaaggaaaaccctattgatgccgatctggtccttcccgtgcctgactccagcatcccggccgctatcggctactcaagagcttcagggattccctacggtgagggcctgatcaagaaccggtacgttggccgaaccttcattatgccaacccaggaggagcgggaaattgctgttaggctcaagctgaatcctctgaaacatgagttggtgggaaaacgggttgtggtaatagacgacagtattgtaagaggaaccacatccgaaagcctggtgcgaatccttaaggccgccggcgccaaggaggtccatatgctaatcgggtgccctccggtcatcgccccatgctactacggggtggctttggcaactaaggatgagttgattgcagcaaatttggaaattgaggaaatcagaaagcagttaggtgctgatacactgggctatataagcatagaatctcttatcgaagccattggcatagatggggacagcctttgtctgggttgtattaccgaagactaccccactgagatccccgaggatctggaggcggaatcctattatgactactatcaggacctaaaggatgccgtggaggaggacgagtga

SEQ ID NO: 3684 - DNA, 1413 bp, synthetic construct
  source 1..1413: mol_type = other DNA
atgaataacgattttgagtctgacgaatttaactccaatgacaacaacaataacgatttcgaatccaaactggtcgatatccgaatcgtgttgactgatctgaactatattgaagccattagcaaggcagtaagtaactttgacctgtccaattttaatgtcaacattagttcgatcattccaagctccgatattgagatcgcaaaaaacacgatcatcggcgctgatctggtgctcatcgccacaagtagtgattttgaaggcaaagagctgtacagtaacttcaagagggccttaaagacggattacaacttcgttgagtatttgaaattgccgtctctcgacgaactggaggattacgactacgattatgacgaggacaacacctttgaagacgagatagccaactccataatccgggcagggctctacagcatcagcaacctgagcagcatcaataagtctaaaaaggcctactataacgtgaaaaaggacttcgacgacagccggctgcgctttgaaaagattaccaaggaaaatgatatactcttgaacgaatcaaagcagattagggagaaaaacgagaagcttcgagaagaggtgaaaatacttcagaaagacctcgataacatcaagtcagattatagtgacctgaaaagccgcttcgaaagcattcacagcaaaaacagcctagaagtcttcagcctgatggagttatggcaggacctcttcaacgagaccttcaccgaggagatctataggtttatcctaatcagcacagacaatttccgccctaagaatcttatgatcggacagggtgccatttgcgccgagtcaaaggaagacgcgatggattggttgaagatcataaagactgcttttatcctcagtgacacaaacaagcaagagctcaatttcaacaacttcaacagcaacttcaagttcgaagacctggactccaacattagcagcagtcagaatctggattccaacatttctaacaccagatacgacctggattctaatgactccaatcttttttctagtctggactcgaatatttttaatgcgcataatagcgactcgtcagatgagttcatctacaacgagcggtttgaaggaaataataactcccaggaggaatttagacagctggactttgatgacgctttcgacctgaacgacaatgaagggcaggaatcattcaaccaaaatgatctggataattcctacaactccaaggacgacccctcagacgagataaacgtgttcaatctaaagtcccttaaaggcttcagagaggagtcggacgaggatgagtccgatgagaatggggactacagctatgatgaggatgatgacctcgacgaggctgacgacctgttcaatcccttctcaaacatctgggattga

SEQ ID NO: 3685 - DNA, 975 bp, synthetic construct
  source 1..975: mol_type = other DNA
atgattctgatcaccggaggggccggctacataggctcccacatcaataagcttctcaataaatccggttacgagactattgttctggacaacctgagcaaaggacacaagaaggccgtgaagtggggcagtctcgtaaacgccgatttgagtgacagtgataaactgagagagatctttcaaaacaatgatatcgaggccgtgatgcacttcgccgccttttcaagcgtggccgagtctgtggaagagccggaaaagtatttcaaaaacaacttcgaaaacacagccaatcttttaaggattatgaaggagtttcgggtacgcaaattcatattctcctcaactgcagctctgtacgggattccaaaggagatccctatcagcgagtcagcggaactcaagccaatcaatccctacggggagagcaaattaatggttgaaaacctactgaaggacgagagcgactttgggggattgaaatatgtctcgctccgttatttcaacgcagctggtgccgatctggattgtgagatcggcgaagatcataatcccgagtcgcatctgatccctctggtcttggatgccgcaatcggaagacggaacagcatttccatttttggtgacgactacgacacgcccgacggaacctgcataagggattatattcatgtgcaggacctagctgatgcgcacctgaaggcactgcagtacctcgaagagcctttcaatgacagcaacatattcaaccttggcaacggcaatggcttttctgtcaaggaagtcatcgacacctgcaaaaaggtgacaggaatcgacttcgaggtgaaggtggaggggcgccgaccgggcgaccccgacatcctgatcgctgattccaaaaaagctgaagaagtcctcaaatggaagccagagtaccccgatctggaggacattgtggaaagcgcgtggaactggcacaagaagctccacgggtga

SEQ ID NO: 3686 - DNA, 1191 bp, synthetic construct
  source 1..1191: mol_type = other DNA
atgattaagaccgacgtcctggttatcggggccggccccgccggttcttcagctgcgaggtttgccgctaaaggcggcgtcgatgtgattctcatggacaagaagtccgagataggcgctccgaaaagatgcgctgagggtgtatccaagaagacattcgataagctggacctggagatggaccctcactgggtgacccaggagatcgcaggggtcaggctggtcgctccggacggcacagatgtatggctggatgaagatgtgatcgacctccccgaggccggatatatcctagagcggaaggtctttgataagcatatggccatggaggccgggcgcgagggagcccaaatcaaaatcaaaacccaggcgaaaggcctgaagcgggaagaagatggatcattcaccgtcacttgcgaatccatgggggagacctttgacattaatgctaagataattatcggagccgacggtccagagagccacgtggcacgctgggctggcttgaaggcatacaccaaacccaaacacatggaagccggagtgcagtttgagatgtgtaacgcaaagatggagaagagcaacgtgcttgaattttacttcggaagcgtcgctcctggaggctacttctggctgttccctaagggagatgacattgtgaatgcaggcctggccatcatcccagatatggctggagacaaatcggcctacgagtacttggtggatgccgttaacaactgttatgccacaaaggacgcacagcccgttgaactcaacgtagggggcgaccccgtgggcgggctcgtgaaggaaatgtacggcgacaatatcatgctgtgcggcgatgcagccagccaggtgaacccactgacgggcgggggaatcaccaatggtatgatgggcgggcgattcgctggtgaagtggccgccgaagcgattaaagcaggggactgctctaaagacttccttaagaagtatgaggatcttgtgaaagaggagatgggtcatgaaatgcagaaatatacgaaggtctgtgactacttatggacgctcgacgatgacgacctaaacagtatcgcccacgcgttccaggatatggagtttactaaaataagtacaactgagctggtgaaggcggtgattaaggttcaaccaaaagcagccttgaagttagggaagctcttcctgtga

SEQ ID NO: 3687 - DNA, 165 bp, synthetic construct
  source 1..165: mol_type = other DNA
atgatcgtaaaagactggtgcagctactgtggctgctgcgcgggggtgtgtgctcggaactgcatagaagtgaaggagaccgccctggtcatcagcgatgactgcaatgactgtggaatttgcgtgaaggcctgtcccctcgccgcactggaactagaggagtga

SEQ ID NO: 3688 - DNA, 606 bp, synthetic construct
  source 1..606: mol_type = other DNA
atgccgagttttttaaatatccggggcaacaatcatgaccccaaagacccacaactcatcagagacgggatcaagctgggcgtcaactacaaacggttctcgaaagagccagtcctcggaaagaatatcctgctgcggtcaaatacggtgatctataatgatgtgatcataggggacgacttcaagactggccacaacgttgtggtaagggaccacaccaccatcggggatgatgtgttgataggtacaaacaccgtcattgaaggtggatgcaagatcggaagcaacgtcagcatccagtccaacgtgtacattccacgaaacagcatcatcgaagataatgttttcgtagggccctgcgcctgctttaccaacgaccgctaccctgtgcgcgtggagtatgatctgaagggccctcagctaagaaaaggctgtagcgtgggcggaaacacaacattcctgtccaatattgaggttggagagggcgccattgtcgcagccggtgcagtggtcacccgtagtgtgcccccttactatctggcgatagggactcccgctaagattaagcccctcccaacgtcccttagggtgccgaacatgatttga

SEQ ID NO: 3689 - DNA, 312 bp, synthetic construct
  source 1..312: mol_type = other DNA
atgaccaagcacgtctgtccaaggtgcggaagcacgaacgtggagtggatcataccccagaactggagcaagtgggagtgccgggactgctcatacacaggcccgatcatcgacgcagacgacgatctgattgcggaaatcaaggccgattgggaggagaataaagaaaaatacatagaggaagagtatgcacgcgctgaacagatggcctccggggaagatgaaagactggacgaggagatggagattgccgaggaggacgagctcagtgacgaggaactagataagaaactggaagaactcgatctttga

SEQ ID NO: 3690 - DNA, 1161 bp, synthetic construct
  source 1..1161: mol_type = other DNA
atggtgtacgatgtgagtgctcttttaagtcacattaaccgaataaggcgcgagatcggacacgaagaggtgaatatcgagatcaaagaggtcttgtataacattgaaaccaacgagatgtggatcatcaccaatgaccgaccggacaagtccgccgttattggcaaaggaggatgggtggttgggagactgagggaggagctccagataaacagcatccatgtggagagctactcagacttcctgacaaaggaataccgcatgggactgtccctgaataagctcaaaagctttgtcacaacagaagacctgagcgacgacgtcaagctatccctgtacaatctaatcgacttgctgaccatcaaatcggataatttgtactcctttgacttcaagtcctactttgacgacctggaaaacggcccgtattcgtatttcgaagcagagaaacctgtcgccatcgtcgccctgtctggcgggaccgacagtagcttcagtttgattcttgccaaaaaactcggcttcaaccccattgccgtaaccgtagatcccgggactatcgtgcttccaaatcagttcaaatataacattgacaagctgaccagcaagctggacgtcaagcacgagtatatcccagtggcgtacgatgatatcatcgaggattcactggcagggcggttccatccctgcgggaggtgttcaaagcgcatagaggaaacgttatttaagtacgccgtagataacgacattcccatggtgatatttggcgacatgctgtcaacgggcagtcagtgcataaccgagcagttttacggtgaaaactctgaggatagcgtgtctcaggatctggaggactcggtttcttccgacttggaagatagcttcaatactgagctggaagactccatcaaccacaagcttatcagacttaacctacccgccgcactcgctgtgtccaagctggagaataaagcgctcacaagccattatgaactcaacaaattcaagggcttcggatgccctctcctgtacgaggtgcacaagaagttcccacacatgaagaagtactccattcaaagaatcctccgggagactcggtcaagcgctctggagcctggtgaagctctcgatctgatttggagtttttataaaacggattga

SEQ ID NO: 3691 - DNA, 1419 bp, synthetic construct
  source 1..1419: mol_type = other DNA
ctgaaaattagaactggcagactcgagaaggagatgacggacgaagctgcggtctacacatcttcactcgaatttgaccgtttcatcttcgatgcagacattcgctgcaactacgcgcacacctccatgctgaaggcccaggggatcatcgacagcgaaatagcggataagatcctcgatgccttggataagctgagtgaagagggcttcgatgccctggagttcgaccactccgtggaggacgttcatatggctgtggagaactatgttacaaagcttgtaggtcccgaagctggcttcatgcacactgccaaaagccggaacgatcaggtggctacagacatccgactgcttctcagggatcggatcagcgagatacagatcgcaatactcgaatttattgagggaatcctggagctggccaaggaacacaaggagacggtcatgatcgggtacacccacctgcagcacgctcagccaattaccctggcccatcacctgatggcgcatgctcaggccctcaaaagggactaccaaaggctcgatgacacctataaacgggtcaacctaaatcccctcggctcggcggcaatggcaaccaccagtttccccattgaccgcgaacttacgacacgcctcctgggctttgatgactaccttgagaactccatggatggtgtatcatcgcgagaccatattgccgaggccgtgttcgacctgactgcactgtgcacaaccctaagcaagatatgcgaagagcttgtcctctggagcacatatgagtttgggatcgtcagcatggccgacgagtacagcagcacttcctcaatcatgccacagaagaaaaatccggacgtggctgaggtggccagatccaaatgtgctattgtgaacggagagctcatgaccatcctaaccattctgaaggccatcccatacacttataacagggatctgcaggaaatcactcctcatttatggaatgcctgtgatgtggcctatgacacgctgaaaatcacaaaccacatgttgttaactgtcaccttcaacacggaacgctgcctggagcttgcaggtgctaacttcgccacagcaaccgacttagcagacatcatggttagggaacggaagatacccttccgaaccgcacacaagattgtgggaagaattgtcaatgaggccgtggctgaaggactgaatccaagtgaaatcgatggagcctacgtggacaatgtggccgacgagttggggtttgataaattgaacctggatgacgatctgatccacaacgccctgaacccgattgagaacgttaagatccggaatgtacccggcgggccttctcctgaaatggtgcaattggctattgacaatatgaatatatttctggacgtggagtttgagaaacaaggcatctga

SEQ ID NO: 3692 - DNA, 159 bp, synthetic construct
  source 1..159: mol_type = other DNA
atggcaaccaaaaaggagctgtacacagtggaaggggataaaatcgtcaggaagaacccattttgcccccgctgcagcgagggcgtgttcatggcggaccacggcgaccggtatgcctgcggtaagtgtggatacaccgaaatgaagacgaaagagtga

SEQ ID NO: 3693 - DNA, 315 bp, synthetic construct
  source 1..315: mol_type = other DNA
atggaaatagaaattaccgagaagaaagagaacatcctcttcgacaggacggaagttaaatttaactgcttgtacgaaggcgaagcaactcccaaacttctggatgtgaagagcaagctggtggctctactggacaccaaaaaggagctgatcgtcgtggacaatatccagccgggctatggggagcctaaagcaacaggttacgctaaggtctacggacgggaagcctccctcctggacgtggagaagccaagcgtaattgccaagaacaaggagccagaagcccccgccgaggaggaggatgaggcggagtga

SEQ ID NO: 3694 - DNA, 501 bp, synthetic construct
  source 1..501: mol_type = other DNA
ttgttcagaatcgatgagaacagcattgacgaatttaagaaaccactgggagtcctgtaccctgactttgaagatgccatccccatgatcaaggaggccagtttcctaatcagcgttggagaccagactattaagaatcttctcgataacgatctgtatccgaacctggggatcattgacaaccggattcaacggaaagatcacaaccatgacattatccgaacagaaaacatcctcaaggcggacaatcccgcaggcaccatcacggaagacctctgggagaccatagagctggctatctcctcaatacttgaggatgaggacactcgcatcattgaggtgaaaggggaagaagacctggccgtgctgccatgcttactgatcgcacctgaggatgccgtgatactgtacggccagcccaacgagggcttggtctttgtaaatgtgttcgaagccaaagacaaggctaccaggctcatgacattcttcaataaggagtga

SEQ ID NO: 3695 - DNA, 831 bp, synthetic construct
  source 1..831: mol_type = other DNA
atgggatacctcacagatctcttcaaggaagcccttgtctaccccctcagcaacatcgtgacattaattattctgggcgtactgctcaccatcagcaagttccccaacgtgctcagcagttttggagtggatgtcgattttcagttaatcatcatctttgccctaatttcttttgtcgtgtcacttttcatggacggctactcactggctgttattaaggatgcagtggacttcaacgtatcgatgcctgcttttgacattatgaaaaacttcatcgacggcgtgaaggtctgggtgctgaaaatactgtactatattatcccgaccatcatcacaatttttgttgcgctgctgaccggcggagttgacgcaatcctcaatatcttcaggttcatcggtgagaatcaggagctgctgtccaatctaaataccccagccgagttgataaatgccatccctcaagaatacattgctactttcctgactagcctcttcattaccgccatcgtggcaattatcctgtacattatctttgggcttctttacaacattggcctctgccgcctggcgaaatacgacagtttcaatgaggggataaacttcaaggccatcatcaacgacattaaggccatcgggcttggtacgtatattctatggtatattatactgttcctgatcatattcgccatatccatcgtgatgggcctgatcgcagctattccatacatcggaatcatactgctgaacttgctgtttgctccctttatcttcttgttggtcaaccggtccctggggctcttgtatacgaaagccgaagggtataacggctga

SEQ ID NO: 3696 - DNA, 183 bp, synthetic construct
  source 1..183: mol_type = other DNA
atggcgcttcaggcctgtacccactgcaatctactcacggaaaagcaacagtgcccagagtgcaagaacccgactagcacaaactggagcggcctgctgatcattaccgatcccgaaaactccgacatcgctcgggagctcgggataaaaaaagcaggagagtacgccctgcgcgtgaggtga

SEQ ID NO: 3697 - DNA, 570 bp, synthetic construct
  source 1..570: mol_type = other DNA
atgacaacaattgagggcactgtgcgcatccccccacaccgattcggtgagcccttggaggacgtagccatcgaaactctcaatgagtcctacaacgggcagctggataagaatctgggcctgattgtcggggtgaccagcattgaagagatgggggagggcgttctcattatgggagacggagctgcttaccacaatgtgatctttaacgccatcttcttcaagcctgagcaacaggaggtcgtagaaggagaagtgattgacatagccgagtttggggcattcgtgcggatcggaccgatggatggtcttgtgcatgtctcacaggtgaccgatgattatataaactacgacccaagaaacgcgtctctaatagccaaggagtccaaaaaaatcctcacggaaggcgaccgggtcagggcgcgcatcgtgaccttaagtctgaaaggcaaaaccgttcaggaaagcaagatcgggctgacaatgaggcagcccaaccttggcaagtttgagtggatcgaaaaggagaaggcaaaagccctggagaagaaaatggctaaggtggaatga

SEQ ID NO: 3698 - DNA, 402 bp, synthetic construct
  source 1..402: mol_type = other DNA
atgaaaagtgagtccagggaagtttttatagatactaacttcttcatgattcccttccagttcaatgtggacatcattgaagagtttaaacgggtgctgccaaactacaaactcgtgacgaccaccttcgttatcgatgagctcaagggcctgaagaacaacaacaaaggaaaggtccgactggccgcagggttggggctgcggatagcccaatcagacgagatcgagattaggaacgtgagcttaaatgatggagaaagcgtggacgacgccctgattcgcatctctaaggtgttggcaacaaatgacatcgtcctgaagaaaaaagccaagaagaatggcatcgcgctggtctttctaagacagaagaagtacctcgctgtagatggctatcttgcttga

SEQ ID NO: 3699 - DNA, 1224 bp, synthetic construct
  source 1..1224: mol_type = other DNA
gtgaaagtgcagtcggatgtgaacataggactggtgggccatgtcgatcacggtaaaaccacccttactaaagcactctcgggcgtctggacagatacccactcagaggaaacaaaaagaggcatatccattcgtctgggatatgccgacattgagtttcgcaaatgcccaaactgtgaggagcctctctgctacacgactaaagaggtctgcgaacactgcggcagcgagaccgagctcatcaagaaggtctccttcgtagacgcgccaggacacgaaaccctgatggccactatgctttctggggctgcaattatggatggcgctgtgttggtgattgctgccaatgaagagtgcccccagccacaaacaaaagagcatctaatggcactggacgttatcggcgttaaagatgtagtggtcgtgcagaacaaggtggacatcgtgccccgcgaacgcgctatcgaaagttacaaggagataaaggaatttgtaaagggcacttgtgctgaggacgccccgataatccccgtttcagcgcagcagggagcaaatattgatatcctcatcaaggccattgatgagacaatcgtcacgcctgagaaggacttagataaacctgccagaatgcacgtggccagaagcttcgacatcaataagcctgggtcccaccccgacaagataaaaggaggcgtaatcggaggcagtctgacgcaggggactctgaaaattggggacaccatagaaatcaggccgggcatcaatgtgaaggaaaacaagcagaacaagtggatcagcttgagctctgagatcatcggtctccaagccggaggcgaggctgtcgaggaagtgggacccggcgggctcattggagtggcgaccaagcttgacccagcactaacgaaggcagattcattatccggttctgtggccgggatggagggcaccctgcccgacgtgctgcatagcttcgacatgaaaacagagcttctggaacgggtggtcggtaccaaggaggaaagggatgttgacccaatcaagctcaaggagctgttgatgattaactgtggtacaacaaccactgttggtatcgtgaccagtgtgaagaagaacattagcgtggacctgaaactgcctgtctgtgccgacaagggggatcgagttgccctgtcccgaagggtcggcgcccggtggcggctgattgggttcgggatcatccagtga

SEQ ID NO: 3700 - DNA, 390 bp, synthetic construct
  source 1..390: mol_type = other DNA
ttggcattcaaaattgtggtatctgagaaggagctgagctatcagctcgaagtggaggaggcgaaacaactcaacggtctgaccatcggcgaagagtttgatggccagattgtgggactggacggctacacactaaaaatcactggggggtccgacaagaatgggttcgccatgaaacgcgacgtcgatggtccacggcgaatcaagagtcttctgacaggcggagtcggctacaaccccaaggtggatggagttaagaggagaaagaccgtccggggaaacactatatcagaagacatcgtgcagatcaacacgattgtgaccaaggctgggagcaaatccataccggaaatcctgaatcctgaggaggaggaggaagccgaagagtga

SEQ ID NO: 3701 - DNA, 1791 bp, synthetic construct
  source 1..1791: mol_type = other DNA
atgaagattagatcgccaattgtgtccgttctcggccatgtcgaccacgggaaaaccaccttattagattacattagagggagtactgtagcggatcgagaagcgggggggattactcagcatatcggagctacggaaatacccattgatacaattaacgaaatatgcggagaatttatttcaaaactagccattaaagatacaatcccgggcttgttcttcgtagacactcccggccacgccgccttcacctcacttcggaagcgcggcggagcactggccgatctggccattctgattgttgacatcaatgagggcttcaaacctcaaacctatgaggcaatcaacatcctaaagatgtacaagaccccattcattgtggttgcaaataagatcgacaggctcttcggctgggagactcatgaaggggcctcctttatggaaagctacaataaacaggctccccgaatcaagtctgacctcgacttgaagatttatgagcttatgggcaagctgcacgaggaaggtttccagtctgagagattcgaccacgtgactgactttgcaagccagatatccattgtgcccatctgtgcaaaatccggggagggagtcattgagctgatagccctgttgctgggcctggctcagcaataccttacacagcaactggaaataagcgaagatgccccggcgaaaggaacagtgctggaggtgaaggaagaggtgggccttggaatcacagtggacagcattatctacgacggagttatccgcgatggggacgagattgccctcatggatgctaacaacgtggtcacaacgaaaatccggtctatcctacggcctctgcctctggaggagatgagagactccaaaaacaagtttaaaaaagtcgatgaagtcgtggcagccgccggtatcaagattgcagctcctaaccttgacgatgtggtttccggctctcccctgagggtactgagcgaccaggaggatgtggaagcggaactcttgaaggaactcgaagacatcacggtcgacaccgacgatgagggcatcctggtcaaagctgataccttaggttccctggaagcggttgtgcacttgcttaaggagatggacttgccaatccggagcgctgaaatcggagacatcagcaagagggatgtcatcaacgcatcaatcgcaatggacgaaaacgaggaatacggcgtcatcatcgccttcaatgtcaaagtgcatcctaaggctgaggatgacctgaaaaatagtggcgtaaaactctttgccggcgacgtgatctatcagataaccgaggactacgaggcctggatagaggagcggaaggaggctcagaaaaagcagtggctcgacgcaatcatcaagcccgccaagatcatgattctgcccaagctcatattccgtcagagcaagccggccatctgcggtattgaagtggaggccggtacaatcaagacgggatattcgctgatggatgccaatggcgactatgtgggtgtggttgctagtatggaggataagggggaaaccctgcaggctatgccacgcggccaaagggtggctatggccataaacgatgccgtggcggggaaggactttgaggagggagactcactgtacgtggacattccagagaagcacttcaaggtcctcgaacgcgagtttaaagacaagctcaccgaggatgagtttctggccctagatgagatcgtggagatcaagcgcaagcgagatagtgactgggggaaactcgggctgttcgagtactga

SEQ ID NO: 3702 - DNA, 453 bp, synthetic construct
  source 1..453: mol_type = other DNA
atgatcgagcgcagctttgtcatgatgaagcccgacgcggtgtcccggagactgatggggcagattctgagccggttcgaggacaagggactcaaaatcgtagccatgaagctaagacagatcgacgaggatcttgccaaagaacaccatggtgagcacaaggagaaaccattctttggcgggttggtggagtacatcacaagctcgccggcgctgaccatggttatagagggagacgacgccattagtgtgatcaggaaaatggtcggggcaactaatcccaaggaagccgatatcggcaccattcgcggagacttcggcatggacacgggcaggaacataatccacgcatccgacgcacctgaaagcgctgcccgagagatcgccctcttctttgatgaggaagaaatttgcgattattcaatgagtgataacgcttggatttacgaatga

SEQ ID NO: 3703 - DNA, 162 bp, synthetic construct
  source 1..162: mol_type = other DNA
atgagaacctgcagcttctgcggcaaagaaatcgaagaggggacgggaaagatgtacgtgaaacgggacggtacaatctatttcttttgctccagcaagtgtgagaagaacatgattaagctgggccgcgtacccaggaaagtgaagtgggtcaaacagtga

SEQ ID NO: 3704 - DNA, 207 bp, synthetic construct
  source 1..207: mol_type = other DNA
atggaggaagggagcccagccgaggtgatagaagtactacaccgcaccggcatgaccggggaaatcatgcaggtcaagtgcaggattctggaaggacgagacaaaggacgcattctcacacggaacatcatgggcccggtgcgggagggcgatatactgatgctgctcgacacgatcagggaggcaaaggagatcagaactccctga

SEQ ID NO: 3705 - DNA, 408 bp, synthetic construct
  source 1..408: mol_type = other DNA
atggatggcaagagccagatgaaaaaggaggtaaattatatggccaacatttacgtgaagtttgacacacccgaggagatcgcgaacaaagcagaagaagccctggaggtggcacagaatacggggaaagtcgccaagggaacaaacgaggtgaccaaattcatcgagcggggaaacgccgccctggtcgtgatcgccgaagacgtcgatccggccgaaatcgttgcccacattcctgttctcgcagaggagaaggagataccatacgtatacctcgcgaccaaggataaagtgggtgcagctgctggcctgagcgtgggcactgcttccgcttgcatagtcgacgccggggacgcggctgaccttgtggaagaagtggtcgagaaggtggccgagctaaaggaatga

SEQ ID NO: 3706 - DNA, 198 bp, synthetic construct
  source 1..198: mol_type = other DNA
atggaactcccaatcgctcccataggccggatcttgaagaatgctggggcagagagggtggccgacgcagccaaagaagagctggcggaagcaatcgaagagtacggaaacgagattgctcagaaagccgtcaacttcgcccgccacgcgggcagaaagaccgtgaaggccgaggatatcaaactggccattaagtga

SEQ ID NO: 3707 - DNA, 1197 bp, synthetic construct
  source 1..1197: mol_type = other DNA
atgattagatgcgtgagctgtggagaggagtacgaggatgacgaggtgatctacaactgtaagaagtgcgggagcgtactggaggtggaaatggaggtcgatgttcctaaatccaccttcgaaggccgccgggataacctctggaaatacaaggagtgcctccctgttgatgccgataaaagggtgtccctggatgagggcggcacgccattctgccgatgcgaaaaactgggcaaggaactgggcattgacctctatgttaaagtggaaggatcaaaccccaccggcagttttaaggacagaggaatgacaatcggtatgaccaaagccatgatgctgggtgtggacacggtcgggtgcgcgagcacaggcaacacctcagcctcccttgccgcttatgccgcacgtgcgggactgcgctgtgctgtgtttctgcctgcaggtaaagtggctctgggtaagttggcacaggcgatgttccacggtgccgaggtgttctctatcaatggcaactttgacgaggccctggaggcgatgactcagctggcccgggagaaatacctatacctcctcaatagtatcaacccattccgcttagagggccaaaagaccatcgggtacgagatcgtacatgacttagggtgggaaagccccgacaggatagtcttgcccgtgggaaatgcaggaaacatctcggccatctggaagggcataaccgagtttcacaatgcaggattcatggacgacgtgccaatgatgactgggatacaggctgagggggcctgtccgattgctaacgcatatcgggataatacaatggacatggtgcccgtcgaaaacccagaaacaatagcaacggctatccggattggagctcctgtcagtgccgtgaaggccctgcgagccatctatgattccaatgggatggctgaaaccgtaactgatgaggagatcctggccgcccagaaactcctggcaaggacagaaggcgtaggggtggagccggcttctgcggctagcattgccgggctcaaaaagctagtggaacaaggcgacgtcgataagggagaaagagttgtctgtgtcgtcaccggccacttgcttaaggaccccaacactgccatcgatgcctgcgtggaccccgttcaggtggacgcagacatcgacaagattaaggagattctgcttaataagtga

SEQ ID NO: 3708 - DNA, 702 bp, synthetic construct
  source 1..702: mol_type = other DNA
atggaggactttaaatattacaagaataagatcaaagaggagatcaagctcgcattcgcgcacaataaatacttcctgatcgtctctgccctgattttcatcatcccgatgtttgtcggatatttctatagtgaccagattactccatacattcagcctatggttgatacctttgaggaaaacattagaaacgggaccgtgacgctgagcaccaagtccctattcgccaataatgtcgaagtggctataatcctatatgcattaagcgcccttggggcgattcttggcattgtcgtgctggccaacaatggcttgtttattggattttacggtgccaacttcgaattgacacgctatgttctcctgaccttgccccacggcatattcgagatctcagccatcatcattgctacaacaggaggctttgtgatcctctcatttgtgctgaacttcctctataacgtgatatacccagactacagctacacggatatattcgacccctacttcagcgatgccaagatcactgtgggccaacggtttaaatcctctttcaaaaagcacggtcataggatcaaggaaagtttcattctgctgtgcgtatcggtaatccttctcataattgctgctttcatcgaggcaaacatcaccatccccttcgcatactggatttgttccctgtttgggatcagcctgatctga

SEQ ID NO: 3709 - DNA, 1092 bp, synthetic construct
  source 1..1092: mol_type = other DNA
ctgattgatccatgggcctcatttagcctcgattacgataaacttgtaaatcaattcggtataaaaaaattcgaggaggtgctggacagcatcgaagatcccgccagacttatgaaacgcggggtgatctttggacaccgtgactttgacaagctcgtgcccctcatcaacggcggcaaggatttcgcagtgatgactggtatgatgccaagtggccaaatgcatatcgggcacaagatggtcatagaccagctcaattggtacttcaaaaaaggcgccagcttgtccttatccattgcggatatggaaagttacgccgccaggggaatcagcttcaatcaggcaaaggacattgccataaatgagtatttaaaaaattacatcgcattgggccttgacctcacggcagataatgtgaacgtctatctacagtcccagaacaagacactgaacgacctgacattcaagctggctaaaaaggtgaacttcaacaacatgcatgccatctatggatttaatgaaagcaccaacatcgcccacctgtatgtgccgctggtgcaggttgcagacatcctgctgccccagaccgaagagtttggagggcctaagcaggtggttgtccccgtaggtgttgaccaggaccctcacctcaggctgacccgcgacattgctgcgaagatgaacgaggagtacggatttctggcgccagcttccacctatcaccgattcctaactggcctgacaggggataagatgtcaagtagcaagccgaacacggccatttacttgaacgaaactcccaagcaggccgagaaaaaggtcaaatcttctaagaccggcggaagagagacactggatgaacagaaggaactgggcgggcggcctgacgaatgcgtgatctacgagatgcttgtctaccatctgattgatgatgacaaggagctggataagattcgggaggagtgcatcaatggggagctcatgtgcggccattgtaaggtgcacaccgctgagctcatgaaagacttcttcgaagacttgaaggtcaaacaagaagagtctctggacatcgctgagtcgctactcgactga

SEQ ID NO: 3710 - DNA, 516 bp, synthetic construct
  source 1..516: mol_type = other DNA
atgcggggtgatctgagcgacgggatagttacagtcaagataggggaggggaacgaaagagctatctcccttaaccagaaaagccagttcggtaagctgtcggaagactgcttggagctcagtctgatggaagcgtcctacctaatggagagcggacgcctcgatatctatgaggatgacgaaaaatgtcagctcgattatatcattgacatgatcaaagaccaagacctctatgggaagtacttggtttaccgcgatcttaaaaatagaggctacattatcaagacgggcttcaaatacggcagtgagtttaggctgtacgagaggggaaccggccccggcaagtcccactcagacttcctggtaaaggtgctgtatgaggccaacgaagtgaatgtcttagacttcgcaagctacgtgcgagtgtcacatggagtcaacaagaagctgctgctggccgtggtggatgatgactttgacgtgacttattacaatattgagtggacccggccatga

SEQ ID NO: 3711 - DNA, 654 bp, synthetic construct
  source 1..654: mol_type = other DNA
atggcgcgggaaatctccgagaacattgaagagtatctggagaccctctacaaatttggaagtaaagatagctacgtgtccacgaccactctctccaaggaactgggcatagctcccgggagtgttacacagatgctaaagaagctcgaggacatcgggtatattgactatgtcccttacaagggagcattcttaaccgccgagggcaacaagatcgcgcagaagattacaagaaaacaccgcatcctggaaaagttcctcaaggatgtccttaacataaaggatgagaacctccatgcccaggcatgcgccatggagcactctctgagcgacgaggccgaacgggccatctgccacatgctggagcatccggacacttgtccagatgataatatcatccccgcatgtgactttaactttgaaagctgcgaagactgcctgaacgaccaccttgatttcgacgacattgaagagagggacttcaatctgttctcaatttcacaactgtctaaaggagacgagggggaggtattgttcatcaggggctcggatgatgctctggcccagtgtgtgcgagtgggcatcaccgtgggtagcaaggtgaaaatagaggaaagtgagagcccaaattttttgttctaccactccaaatga

SEQ ID NO: 3712 - DNA, 1449 bp, synthetic construct
  source 1..1449: mol_type = other DNA
ttgagtagcaatagtctgagttctaacgaactgaactccaatcagctcaattccaaccaactcaattctaactcgatttcaaacagcaattccaactctaatcaaaaagccaattcaaaagactcgcgtctgatcttgctcaacgacaagaacctgaaagtgaacgggacggaagagaaatactttataaagctggtggacggcaacggtaaccctataccctacgtggatcttattttcaacatagatagctcaattgagtttgtgggaggtaccgttcgaacggacgagaatggaatcgcttatatctttatggatttcagttaccctggtccatacactgtgtatgcttcatttgagggtgatggcaatcataatccgtccagcacgttaagttctacagtctccgtgtataaagacacggagatcagctcactgcagtcgtacggctatcttggagagaacttctccttcaagattacaagttgcggggagcccgtatccaaccagaaggttcttatcagcattgacaacaagaactacaccgcaacaacagactccgaggggatcgccaaggtcaaactcccaaaccagcagaagacctattcaatctcctgtaattttagtaaccgggtctattactacggctcgagcctgagcaagaacatccccgtgtataagagggctttcacccagccaaattgctatgccctgttaagaaaaagcaccttcaccgtgaccctcaagggagcagatggcaagatcctaagtaaccgcaccttgagattcattgtggacggaaaggaatataacaaaacaactaactccaaaggggcagcttccatcaacattgacctggaacggggcgagtaccggatcaattactacttcaacaccgacggggtttacgggcccgtcagcaattacactgacctgaatgttgtcgaccctagcggccagtacaaacgccttctgaatgtaaagagcagcgcgtccgctaagatttacctcactggcggcggatatgccacagtcaccagcctaataaagagcactgcaaaatccatcactaaaaagtacaagaccaactttgaaaaggcagtggccatctataattacgtaagggataatttggattatcaatattactacaacacaaggaagggagccacgaaaaccctgaagaccaagtctgggaactgctgtgaccacgcgaacctggtggtggcgctctgccgggcctctggcatcccggccagatattccaactcaaagtactgtgtgtttggttcagggctgcgaagtgggcacgtctgggctcagatttacgtgggaggcacttggtactctgccgatgccacaagcagcaggaataccctcggccacatcgaaaattgggacacaaaaactaataagaaagattataacttccgcaacctgcccttctga

SEQ ID NO: 3713 - DNA, 348 bp, synthetic construct
  source 1..348: mol_type = other DNA
atgagccggacctggagtttctacaaaagctttaagaacctgatagtcggagtgaatattaggacaaagcttctgttcctttcagcattactgatactcctgctctccatctcgagcgtatcagccgacagcagcatcgacgactccaacctggacatcgacagcaatttgggcattgatagcaatttggacctcaacgccgacctgtacgctgatctgaacaacttcgatgattttaataacctaaacaattatgactactccaacaattatgtggattacagtgatattctggagggggactccctcatctggaaactgaagcgcatcatcattctcatcaactga

SEQ ID NO: 3714 - DNA, 3033 bp, synthetic construct
  source 1..3033: mol_type = other DNA
ctgcttttagccgtgctcttaatgggctttgtcctgatatcctcggtctcggccatcgatatcgacgaagccagttcttcaagtgacctgagtgactctagcattagcaacgactacctggtggcaaactctggagatgattctgtggccagttcaagtgcatcgagttcaattgctgccgatgattcagacctgtcgaacaacgctagctcaagtaatgttaacttcgaaaatgaggtgctcagtactaacaacaatgaggatacagagtccgaaatcgtaaaggattctaaaaatcagctgtcgtcatcttcgcttcaggccagtacgaaaactaaaaccacgctgaaaggcagtgggagctccgtctatcgcggcaacccatactatgtaactctcactgacagtaacggtaaggttttggccagccagaaagtgacgtttaacatcctcggcaaaaattacactcggaccaccgattctaaaggggtggcgtccatcaacattaatctcgccaaaggaaagtacaacatagcgtgcctgtacgccggcactgagaactacgcctcatccaagctatctgtagccttgacagttaatctgatgtccaccaaaatcaatacaggtggatcaaccgtgaaaaaaggcaacgcttacagtgtgaccttgactgatgggaatgggaaggcactgtccagtcagaaggtgaccttaaatatcctgggaaagaactacaccagaaccaccgattctaaaggtgtggcttccattgctatcaacctggctgctggtaagaaattcaccctcaccgcatcctatgctggctctgcaaattacctctcttccaaggtatcggccacggtgactgtgcagaaaggggataccagcataaagcctagcggcacgtccatcgtgaaggggaacagctacagtttcaccctggtggacgggagcggcaagggactggccaaccagaaggtcgccatcaagatcagcggcaagtcctacagccgcaccacaaactctaacggtgtggcctcaatcgccatcaatctggctgccgggaaaaaatattcgatagtctgctcttacgccggctcttccaattataaggcgtccagctcgaccgtaagtctctcggttacaaatccaagtacaaacagcaagactttctccattgcaaaaatagaggctgccgccactaacctaaaggcttatgtaaataagaataaggcagtgcctaccactgtcagcgttggcggaacgaacctgaaaatctcagagtttagctacctgatgtcaaaagccattgtcaatctcaactccaacaacactaacgccatcactctgccaagcggcatctataacggggcatcagcttccaatagcctgaacgctacagtctacaaggcccaatacgtggacctctccaaacgcgtctataactacatagacaagaacaaggtgcccgctgcttacgggaccgtttacaacgccaacggcgcctccctgggaaacgcaggatttaacctttacacatttgcatttgccaagatcttggatttccataaaaccaataaatatctaccgaattactgcagctttgacagtagcgtgttcaaagcgtccaatggttcgagctcaagcaacagctccagttccaccaacagttcaagctccacgaacagttcaagcggctcttccaactccagcggatctggaagttccacgcccgcagtgaccgtgaaggcgacaagccttaaggcagccagcacttccgtgatccgaggggatgactattcagttactctgacggacagcagcggtaatgctctcgctaaccagaagattacatttgccctgtccagttccagctacaccaggaccactaattcaaagggggtggccagcctgaccctcaatctggcagggggcaaatattccatcacgacgtcctacgcaggcacatcagcctacaaggcgagcaagcttacaaacacagtcacgatttcaaacagctcttccagattcttcttgaatgacattgaaacagccgctgagaatgtcaagacttacgtcacaaagaacaaggcgctgcctaacaccgtgacagtggccggcacccaactcaccctttcacagttctcctacgtcatggctaaggccattcacaacataaatgctagcaacagcaattatatctcccttaaaagcgtggcaagcagcaactctacaggagattacctggacactacagtctacagggcgcagtatatgaacctcaccaatagggtcatttcctttgtggagagcgataagattacgccaactttcgccacagtctacaacagcaatggcaaaagcgtgggcaaggctgaatttaagctgtacacctttgcattcgccaagattctagcgttctacaagaccaacaattacctccccacctattgcaccttccagagctcagctatcggtgttgtgccggacgttgccactaacgtgacaatcaacagcaagatcaatgccaatatgaaccagttcaaggttggactgaatgagaagaacaccgtcagcaacctgtcagcctatctggtggggaccggccagtccacaatcacaacaaacattaagaacgtggctgcgcagctaaccaaagggttgaacagtactgcaaccaaggccttggcaatatataattttgtgcgggacgacattagctacagctattactccgacagtcgtaaaggtgcagacgggaccttaagctctggatcggggaactgtgtggaccaggccagtttggttgtggccctctgtcgggcagccggcatccccgcacgatattctcatgcgcaaggatgtaccttctccagcggactggtaacaggacacgtctgggctcaaatccttgttgacggcgtgtggtatagcgccgacgccacgagcgtaagaaatagcctgggcaatattgtcaattggaatacaaattcctatcactctatgaagcagtatgctgcggtgcccttctga

SEQ ID NO: 3715 - DNA, 3897 bp, synthetic construct
  source 1..3897: mol_type = other DNA
atggaggataatctgttgaaaaacagaaaactaattttgataagtatcttccttgtgtccctgctggcaatttctgctgtaagcgcgaatgaggatgtggacaatggactcatcgactcagacgattctatcctgcagtcagcggaagtctcggactctgccattggaagtgactcgatcttgcagtcagctgaagtctctgattccaccatagagtccgactctattgaactggaagataagggtaacgttttaaagtcaagcgataatgcgagcttcgagctagacgataaaaataatataggaagcgccgattcggagctggaagacgattatctggagcccaaagagaagaatgtgctgtcaatggacgagaacgcttggttttacaattatattgtgtggtatgacggtgacgatggagattgggtgtcccttgattttgtagacgacctcaaaaatcccgagaacatcaccatccgattgaacagttacgacactccatttgacggggtggatctcgcggttattaatgactacgactacagcatcactaaactgaccacggatgacaacgggaccgtggtgtacaatgttccatacgaggtggatgaactgtcggtcttcgtaggcttctggtacgatggggactttgtggccacttatggaaactgggaaagttacaccatctgcgccgtgaactggggcacgtggtatagggacccctcgaaacggacttacgacttttatgtctctgtgtctgacatggacacttacgaaagtcccattggcgcccaggtggtgttcacaagcgactccaatcagtacgtcggaacaatagatgagaacgaacgcgccatcatccccaaggtcagctacggcacctatgatgtgaaggtcatatacgacggctactgcattctcaatctttcagattctagcgccattgagttctatgacgaccatcacaccgaccccgactcactgggggatgaaaggatcgattatatgtatgtggatagcagtggagttgtgtatctggacctgtgctacgacggttcgctcaaagtgccagacaactccacttatgagccttatggggatgacaacccatccgggggcggttcaggcaaccagtctggggggactgtggctaatggcaccttcacttcactgcaaagtctgtttaaccgtgctgccgcaaattcaacaatatccctgacaagggattacgtctacgacgacggcttcgacatcaaaggaatagtcattaacaaggacctgacaatcaacggtaatgcccacacacttgacgccctaggcaaatccagaattttctacgtgaacaacagcactgtcaaattcaacaatatcctgtttgccaacggtaatgccacgctcggaggtgccatttacaatggcagtgccgtaaactgtctgttcattaataatactgctcaggatgggggggccatttactacggcagcgctctggtgtgtgattttatcaacaactccgcatctcggaatgggggcgcgatctatagtggcggggccgtaaactgtagcttcattaacaactcagccaacctggggggcgctgccatttatgattccctgtttgctgtgaatagtacgtttgtgggtaataccttggcctctagcaatcctacaggggggagcgctacaaccgacgtttccgtggtgtcattcaaccccataactacctacatacctagccctccctccatgacaggttccattggttggggaggtgccgtgctggacttcaccaggcccgtgatctatacggactataatgaaaccttctacctgctgaccaacttcacgctgcagcaggatggctttaacaactacggcaatgtgcaactcacgggcagggacctggtcttcaagtccttgtatccttacagcggaaactattcaatggctcttatcatctctgggcagatctttactcctacctacgtccttggggaaaatgacacttatgaagcccactttaagctgaatggtctgtcgttagggctacacatggtttatgcctatgttgacttcggatatccggaatactatagctacagaattggtggaggctatatggatcgggttgcttacgatcgcactgcggagataatcttccctattctcattaataagacagtagaaatctcatcttccaatctgaacaagtactacggtggaaccggtaagtataccgtcactctaaccgacggcggcaaccccatcgccaacgctaatctcaacgtcagcctcgcgggcaagacctacccgttgaagaccaatgctaacggtcaggccagcatggatataaaccttacgcccggcacctacgaggccgtctgcacctatgacggagtttctcagagaagtaatatcattgtgcgcagcacgatcaatcttcagaacctcacgggcatttatcagaacgcgaaagtgaacgccaccttcttgaacgctgccggcagtccgctggccaacaccaaagtcagttttcgcgtagggtccaagacttactccgcaacaaccaacgctaatgggctggcgacagccaacgttgatttggctgccggcacttacgatgtgattgccatcaatccggtaaataatgagcagaagacaagcaagctcactatttccaaagcgaagtcgtcgatcagtttgagctctaccagcaacaatgataaggtgaccttaacagcaagcctgtccccctcaacggctagtggaaatgtgaccttcaacttaaacaataagaactacactgccaagatcagctccggcaaggccagccaaaccattactggactcaacgagggcaactacactgcaaacgcttactactctggagacagtaatttgaactcttccagcgcaagcacgaaggtggttgttaaaatagtcattccaacgaagatcatctacaaaaatatgaccacggggccagtggcaaaaagcgatggccgaatcggaaactacttctgtgtaaaactcgtggatggcagcaataacgcattaacaggccttcccatcaagataggcttcaacgggaaaatctatgaccgaacaaccgacagcaacggcgaggccagactgcagataaacctggcgaacgcggacatttacacctttgcaatctgctaccttggagacgatgatcatcaagcatcctttgaggtggccaagattgatgtgaacaagaagtacccaaagccaaacagtgccaatggaaactccaacggggtgcctgcccaagagaccatcagcaatacaaagctgaagacctatatccaatacagcaacatgaccaccaagtccgtccttaagtcagacggacgggtgggagactactttgaggtcaaactgctggacaataacaaaaaggcaatggcaaacgttccaatcaagatcgggttcaatgggaaaatctatgaccggacaacagactccaacggcggggcaaagctccagatcaacctcctcaagccaacaacatacacctttgctatcgcatacctcggcgatagcaaatatcaggcttcattcgaggtggctaagatcgttgtgaaagcccagagccctaaactgacggctcctaaaaagacatttaaggcaaacgctaagaccaagtctgtctccgccactctcatctccgagcgcggaaagccgatggccagtcagagcctgaagttcacaatcaacggcaagacatacaccgccaaaaccaactccaacggggtggcaacagtcaacatcagcctaaacaagaaaggcacctattcctgcacagtcaagttcgccggcgtgactggagcaaatgcaaagaccactaaaaccacaatcaaaattagttga

SEQ ID NO: 3716 - DNA, 1650 bp, synthetic construct
  source 1..1650: mol_type = other DNA
atggcccagataaaccagcctatgtatattctccgtgatgacactgagagatttcagggacgacaggccttaagaatgaatattttcgcaagtcagctgctggctagcatcgtccggaccacgctggggccaaaaggcatggacaagatgttggtggataagatgggcgatgtcgttgtaacaaacgacggtgcaaccatcctgcaggaaatggacatcgctcaccccgccgctaaaatgctagtggagattgctcggaaacaggaaaacgtggtgggcgacgggactacaactgtggttatcattgctggcgagttgctcaagaaggcacaggaactcatggaggatggcactcccgtgcccaccatcctgatgggataccggctcgctgttgcgaaggcaatggaaatcttgtttgacatttcattcgatgcccgcgataaggacaccctcttcggcattgcaaagactgccatgaccgggaaagggtctgactacgccaaagacgagctcgccgagcttcttgtgcaggctgtaaagaaagtcgaagagggcgaggaggtcgataagacccttattaaaatccaccgcatcaacggaggcagcgtggaggattccaagatcgtggacgggatcttcatcgaccagggaagggccaacgaaaccatgcccaaggagatccatgacgcaaagatagctcttatgaaatatcctctggagctaaaggacctcgagaacgctaaagtggactttaccgacccactccaaatgcagatatttcttgacaatgagcaagagatgctgaaggaaatcgcggataagatcatagactccgggtgtaatgtcctgttctgccaaaagggaatcgacgatgtcgtgcagcactacttgtccaaagaaggcatcatggccttcaagagagtcaagaacacggatgtgaaacgcatcatgaaggccaccggtgccgagctgatcacaaacattgaagacttaacgccagatgtgctgggaaaagccgattacatccaccaggaacgggtctttgaccagattctcacgttcatcgagggctgcgatgagcctaaagcaagctccatcctgataagggggagcacaaggcatatctcttcggaaatagaacgagctatggaggacgccctgggtgtggtcgcagcgacaatcgaagaaggaaaggtggtgagcggtggaggcagccctgagattgaaatagcccgacagttaagactgtacgctaattcaattggcggcagggagcaactggcgatcattgcctttgctgacgcgctggagattgttccacggaccttgtctgaaaatgccggtctgaacacaatcgatctgctagtggagcttagggccgcccacgaggacaatccgtatatgggcctggatgttttcgaggggaaagtggtggacatgaaggaggcgggggtaattgaaccgcagaaggtcaagaaacaagcaatccaaagtgctcaggaggcctgcgaaatgattctgcgcattgatgacctggtagcagccgccggagccctccagaagccagaccccgatgagaacctggataatagtggcatgccccctgcacccggaatgggggggatgggcggtatgccgcccatgatgtga

SEQ ID NO: 3717 - DNA, 780 bp, synthetic construct
  source 1..780: mol_type = other DNA
atgaatctcgagggggtagaaaaaacaatgctcctgaccctgtacacaaaggcaaaacatagccaaaagccaaaccacaaattctttgactacatggcgatagacataatcagcgaaatcgactacgacttttccatcgctgataaggacagatccatgcagatgggcgtaatctcaaggacaatcgtcctggacgatatggtgtctgaatacatccgcagtcacccaaagtgcacaatcgtgaatattgccagcggaatggacacgcgattcaaccggctggataacgggatcatcaagtggtacaatgtggacttggaaaactcggccaatttccgtctgaactacattaaggacacggagcgggtcaagaccctggcctattctgccatggacccctcatgggcagaggagatagaggcgagcggggatgttttgttcatcattgagggtctgaccatgtatcttactgaggtcgagaacaagcagattctggacatcattgatgaaaacttcaagagttgtactatctttaccgaaatcatgccgcctgtgagcgttgagaatgtcaaggagaaatccgtggaggaaatggatgccaaatttatttggggcgtgcaggacggctttgagctaaggcggctcaacccccgcttcaactgggtgaaggatgtgaatctttttgatggaatgaacgtctataagcccattaccaaactcttcacttggattcctttcataaggcgcagaatggatttcatcgctgtgttagaaaaatga

SEQ ID NO: 3718 - DNA, 438 bp, synthetic construct
  source 1..438: mol_type = other DNA
atgaaccgcaataaaatcattgtgttgctggtcctgcttatcgccgttgtgggctttaccatggggcccgcatgcgcagccagcactacaataaaagtgggcaactacaaggatgtggggaagggagatcgaatttcaacgttcaacgtgcctaaggacgcgcagtacctgaaaggagtgtacgctgtaatcttctatcacggcaagaacggtgacgacttccggccacatacctacgtactctccaagatcaaggtctattataagaacaaaaaaggcaaaatcgtcaccagatcctctacagccaagaatctcagcggactgagcatactatccaccaaacaggtttcggggtacacaccgtataagatggacgtcagttacaggaagatgactaatgctgagaagaagaaaatttgtggtagtctggtgtactga

SEQ ID NO: 3719 - DNA, 975 bp, synthetic construct
  source 1..975: mol_type = other DNA
atgatgcgaaagaatgatagaagttccatcaatcccttcaccggcaaggagcactatgacactgtcgacgatgacaaattcctggaaggctgctttcaagggtactatcaggagctgcagcgctcccagttgttagacaacacgccagaaggccagtttatcgtgcaagtggccgtcaaactgatcaataccgttaatgaatttcttacaaagataggacgtcaggactacgttgagggatattacgagtgggatgtgcatctggttgcaaacaacagcgtgaacgcctgctgcatgcctggggggaaaattatcgtctattcaggtatcttctcaattgcgaacacggaagagagaatggcgttcatcctggctcacgagatggctcatgccctccttgaccacggacggacccgcgccagcgcccagtccacaaagaacacagctgcttccgtggcgtgggtgggaagctttgcgctggacatggtcggtctcggcggtctggggtctctggccagggcagccaccaacattgccagtgtcgggtcccaatacttcctcctccagccgtggggaagggaccatgagttcgaggccgataaactcggcatgattatctgtcacctggcaggctacgacatccgggaagtgcccaaattctggaaggaatttgcaggcgacaaggcaagcaactttgatttcttttcaacacaccccagcgacgccaagaggatagaggtgatggaagcctctgaaatagagattctaaacaccactgacttctacagcaagccagtattgccggagacacctaaggccacgggggaacggaagaacactaatgccaagccccaggagcctcaggctaaagccgtggctgataacaaatcgactcacttctgtaccaattgcggcagtgaggtagctccagatgataatttctgtaccaattgcggcgcaaagatcggaaaatga

SEQ ID NO: 3720 - DNA, 201 bp, synthetic construct
  source 1..201: mol_type = other DNA
atgatcgaggagcacaaccagaaatccgtcgaagagctggtggaaaacttcagctacgtatacgtgtattttgccgacggccggagtatcaggatcagcaaggaaaaaaagttcgaatttaaagacaataagttctacatttatgataaggacatcgaggtcaacatagtggatatagagctcattgagttcaccgactga

SEQ ID NO: 3721 - DNA, 858 bp, synthetic construct
  source 1..858: mol_type = other DNA
atgaaaaaaagcgtttttaaaattctaatcgccctggccctaatccttctggctgtaagcatcgttagcagcaatgacctctctgattccaacgtgagtagtgacctgactgtggactcagactcgataagctctgacgacaccgggagcagcgataccagttcagatgactcaaaccaggacgacgtctcccaggataagacgaacgacaaaaagctgtccgattcccagtcagatagtagtaaagatactcaagacaccgacgataataacactgataatggttcggacaagtgcaacctgattatcacaaaaaagggcaatgaaaaagtcaaggtgggcgacacggtggagtggacaattgaggtcaagaacagcctgaacactgccgaaaacatctcagtggatgagttcctcccgcagaacttcgagtttaagtctgctaaggcaagcaaaggcaactacgcagtggagatcgccaactgggacattgggaatttgaaggaaaacgaatctgcaaccctggtgatcaaggcgcaagccctgaaggctggcaacttcaccaacgtggccaacctcaccaccgattccgacaatatcaatggaaaggtccttagcgctaaggcagatgtggaagtgctgtccgagaataaaaagaatgagacgcctgtaggtcccaagaagaacaaggacaacaattctacagtcaaaaagattcacaaattaattaagaaccagacaaacaatacaaatatgaccccaatcgacttcaagaaatccggaaattccctcttcgcggtgataatcgccgccttggcggttctcgggatatttctgggacggcgcaggatcaactga

SEQ ID NO: 3722 - DNA, 1221 bp, synthetic construct
  source 1..1221: mol_type = other DNA
atgaaagctgatgcctacaaaatagttgacaatgtgtactgggtcggtgttctggactgggatattcgggactaccacggctacaccctggatggcacgacctataactgctacctggtgtttggtgaggacaaagtggctttgattgacaatgtctatcccggaaagtccgaacagttctggggccgaatcaaggatgcctttgagaaagagggacgcgaatttaaaatcgacgtagtcgtgcagaaccacatagaaaacgaccacagcggctctctgggagaagtggtggccaagttcccagatgtggaggtgtactgctcgaaaaaggcagagccggggcttaaaaaccacctgcccgagttagaggacttcgagtttaacactgtaaaaaccggcgacacactcgacatcggaggcaagaccttccagtttgtaaacgctcctatgctgcactggcccgacagtatgttcacaatgttgatggaagacgggatactgttctccaatgatgcattcggtcagcatatctgtgttagcgagcggttggacactgatgtggaccctgtgatcctaaccgatgcagccagaaaatattatgcgaacctcattactctcgcgagtcccatggtgggcaggaagatcgatgagttagccgaactcggcattgtagataatctcaagatgattgccccatgccacggtcagatctttacaaacccagagtttatcattgacctttaccaaaagtggtccacgggaagctatgaaggaaataagatcacgttcatctatgatacaatgcaccattcaacccagaggatggcccatgccatggccgagggggtcatgagcgaaggggtgaaggtcaagatgtacttcatgcatgatgatgacaagtccgacgccgtgacagatgtcctcgactcaaaggcaatcttcgtgggggcccccaccatgatgaacaatccattcccgggaataggagacgtcatgtactacctgaactgcctgagctttggtaatattgagaagaaaaaggcagttgtgttcggcagtaaagggtgggctgggggctctgcacgcatcctagcggctaaccttgagggcgccggctttgaggtggtcgagcagatggaaatcgacttcaagcctaatgaagagatcctggaggaatgttatgagctggggaagaaagttgctcaactgattaaggaatga

SEQ ID NO: 3723 - DNA, 843 bp, synthetic construct
  source 1..843: mol_type = other DNA
atgagtctgaagtacttcaacaatctgacttatgaagagatcggggaatacaatgacaaaatcgtcctgttcctgcacccgaagctgttatcgcattggatctggaagaaacagattgaagagtatgataagtactttaataattaccactgcatctttatcgacctgccccaccatggtgagagcaaatttgatgggaaattctccatcgaagagtccagcgacattctcatcgaatttataaagcacctgctcaacaataaaaagagtgagtcaattaacattgtagccatcggcctgggagcttcaatagccattgaaatcctcaacaaagagacacacctaatcaatcacatcattctaagcggccttgagatcgcccagattcgggagaaggaagaagagacaatcataaagagactggctaagacgaaagcagaatacctgaacatgaagcctgatcagtttatcatcaaggcgtatttgcggtactacggaatcaggaaagagtactacgatgatctcgagaaaagcctcgacattccaatccgaaaagaagaggagatagcatataagtccttgaattatatcatccccgatttctctaaagagaccattgagaaggacaatatattactggtgtatggcaacaaggacaacttcaacagcaccaagtctgccataaagcttaagaaattgttcttcaacgccaagctgattgagatcgaaaaggggaaccatctttggaacataattgactacgaactcttcaatcaggtgattattaactttatccaaaaggagattatcttcaacgacgagcgcatcaaagagatcgactga

SEQ ID NO: 3724 - DNA, 915 bp, synthetic construct
  source 1..915: mol_type = other DNA
atgaaaatcggcgttattggttacggaaacatgggttccatgatcgcaaataacatcctcgaactcaacttgctcctagccgatgaggagctgatcgtgtcaaacaggcacatcgaaaaaatcgaggaattaattgaacggtaccccgatgggaaggtgcagattactgacgataacacggaattggccaagtcctgtgagaagatcattatttccgtaaccaccccgaatttcaaggaagtgctcgacgagataacaccatttattaacgagaagacacatatcatctatacatgcgccgggctggactttgaacacatcagcagcttttacgacggcaagctgtcgctggtcattcccagcctggcatcaactgtgacgtccaacaatgccatcagcagtatcggacgccggaagggcattaccctgatcaagcataatgagaaggttgacatccaggacagctacttcctggaggatctctttaatgagttcagttacgtgcgaacacttaaggaccacaacttcttcttcgaggaaaatggcaacctggcttcaaacaatccaaaacttgaaatatgcaccatcctgacaagttgcagccctgcattcatagccctgatgattgacaattttgcggagaggataagcaatatcagcgacttgagcaaggatgaggcggaggatatgatcctgaaaaccgtcattggaaccgctatcctaaaggaggataaaaaaatatccaattcggagattatcgagaaggtcgctacggaaggcgggataactgccgaggggattgacctcttggacaaaagattaaactccatttacaagaaactcatcaacaccctgcttaaccgctatgaagaagtgagtaaggagatggacgagctgtatctgaaagataactga

SEQ ID NO: 3725 - DNA, 1941 bp, synthetic construct
  source 1..1941: mol_type = other DNA
atggcgaagcggaattttagtgaaagcttaggcaaaatagtcacacttctcaaaaaggacttcaccgacgtgtttaccaaaaacccagtggtgcctattgtgttgctggccatcataattctgccttctctttatgctctgataaacatccaggcatgttgggacccctacgataacacaggaaacattgagattgccgttgcaaacctggataacggaaccacttttgaaggagaatccctgaatgtggggaacgagatcgaggacgagctgaagggaaatgatgatttctattgggtctttgtgaatgaaacggaactgagggagggggttaaaaatggaacctactattccggaataatcattccaaagaatttcagtaaaagcattaagagcatcacgactgacgacccacattccgccgagctagaatacattgtcaatcggaaatccaatcccatggcaagcaagctcagcgactccgccgcaaaggcggtctataataagatcaacgccaagatcgtgcagttcattaatgtggtggcctactctaagcttggcgagctgcagtccgcactgtctcaaggggcagggcagatgtcctctggtgcggtccaactgagctccggatcagcccaggtcaactcgggcgcctctcaggtgaagagcggcagcaatcaggtgaaatccgctgccaaccaggtgcagtcaggtggtgcggaagtgcagtcaggcagtgaggagatcaagtcccatgcctctgaggtcaagtcaggggccaatcaggtctctcaaggctcgtcccagatccagagttcatcccagcagatccaagccggttccagccaagtgcagagttctgctaagcagctggattcctctgttgatgtggacaaactgccgagtgacgacttgaagcacgttgtaaacagttccaagcagttggctaacgcaagttccaacctggcgggaagcagtagtcagctggcaaacgggagcgtccagttggccaatggcagcgtccagctcgctgacggtagcgtgcaattggctgatggttccgttcgactcgctgacgggagcgtgaggctggccaacgggtctgtacaactcgcggatggcagcgtccagttagctgaggggtccctcagcctcgctgccggctcgcagctgcttgccaatagcgccgcttacgccctattcgccgcgtccagctcacttagcggtgctgcaagttcgctgtcaagcataactggcgtggacgagaaccaaatcggaagttacatctatagccccgtgacgctgaacgagatagaactgaaccccgtagacaactatggttctgaggtggcgcccttctatctagtgctctcaatgtgggttggcgccttgattacctgcgtgatgcttcgcacaggccagtccaccggcaccgaatacagcccttcagagatgtacttcggcaaactgctcatattcatggtaatggctgttttggaaactacagtgactctcatcggcgcatcaatcctgggcattgaaatgtcgaatccggtcctctttgttctatcggcctacttcattgccctggtgtttatgctgatttgctacagcctcacctctgctttagggcagctgggaaaaggaatcgccgtcatttggcttgtgttccagatcagcggaaccggcggcatctaccccatccagttgatggggcctattcttcaggcagtgagtccatatatgccaatgacacacgggatcaccctgctgcgcgaagctgccctgggcctcgtatggagcaactacatccactcattcctgatcctgatcgccatggggctcatcacactcattttagccctgatcatcaaggtatttgcagataagagagctcactggtttgaggagaaactaaacgagacggatctgttccactga

SEQ ID NO: 3726 - DNA, 339 bp, synthetic construct
  source 1..339: mol_type = other DNA
atgaacccaaagcagctgaaaaagatggagcggcaaatgaaaaagatgggcatggacatgaaatccatcgatgacgtggaagaggtcataatcaggtgcgctgataaggaaatcatcattactaacgccgacgtgagcgcgatgaacgtcatgggccaggaaacgtaccaggtgacaggaaccgctgtagaggtggagagagaggttgagctggtcattcccgatgaggacattgaaatggtggcaagcaccgccggggtgagtgttgaagccgcggaggaggccctgcgcgaatgtggtggggacctcgcagaggccatcatgaagctatcaaattga

SEQ ID NO: 3727 - DNA, 2001 bp, synthetic construct
  source 1..2001: mol_type = other DNA
atgttcgaaattaaagccaaagatatgagaggacgggtaggggtgctgaaaaccaatcatggcgagattaagactcccaacctcatgcccgttatccacccacgcaaacagacagttgatgtcaaggagtatggggctgacatcgtaattacaaatgcgtatttaatttataaggatgaagagctgagtaaaaaggccttggatgtgggcttgcatgagctaatcaactttgatggtcccatcatgacagactccggctcattccagctgtctgtctatggggatgtggacattacaaacaaggaggtcattgagttccaggaagctatcggaaccgacatcggaacttccctagatattccaaccggcccatacgtggatagagaaaaggctgaagaagacctcgagatcaccattgaacgagcaaaagaggccatcagttatgtgaaggacaatgattacgagatgaagatcaattctgtggttcaaggttccacttatcctgacctgagagaatactgtgccacggagctgaccaagctcgatgccgacctgtaccctatcggcgccgtggtgccccttatggagatgtatcactaccgagatcttgtggacgccgtgatgcactcagtcaaatgcctgcccgactcgaaggcccgccacctgatgggggcgggacatccgatgatctttgcactgtgcgtggctatgggctgcgacttgtttgattcagccgcgtatattctctatgcggaagcagaccgtctattgacgacccgaggaaccgtaaagctggaaaacctcaacgagatgccttgctcctgtgaggtgtgctgtaagtacacgcccgatgacttaagggccatggacaaggaggaaagggtgcagctgatagcccagcacaacctccacgtcagcttcgcagagcttcggctcatccgccaagccatctacgaaggaagtcttatggagctggtcgaggagcgctgcagggctcatcccatgttgcttgacgggcttcggcacctgggagagtacagcttcgacctggaaaaatacgacccccgctccaagaagagtgcatttttctacacaggtcctgagtccctgaaaagagctgaagtgaccaggcacttaaacaaactgaacgaaatggacaagcggaaaaacctggttgtcctgccaacttacaccaagccctacacaaaacacctgacaaacagcttcaacgagctcttcgtgtacgccaaggatgaatccctgtctgaagatgccgagtgtaagatcgagaatggggagaccgacttcatggtgctcgacactccattctgcctcatcccacttgagttggatgaggtttatccgctgagccagtcagatgcgcctagaatccgtgataagatggctatcgaatttgccagggacttcctgatcgactttgctgaggactatgacaatgtcctcatacatcctaacgtgctggaggagctggagctcgactatatagaagaatacaactacccggaggagatcaagttcgaaaaagatgacattaagaagctcaaggcaattgccgattaccagttcggcaatggcgcaggcgacgctttattcactggcaaaatcaagatagagaaaagcaaaaagacggggaagatacgccacgtctacgacaagaatcagattatcgtaaatatgcgggcctcggacagctttctgattctatctaaactgggggcaaaaaggcttgctgcaatcgagggtatgcgaaataaggtcatgatcgacaacagcgtggagagctttgcccgggatggcaaaagcgtttttgccaagtttataaaagactgtgatgaaaacatcagaagcaatgatgaagtgctgattgtgaacgagcagggggagctcctggccttcggcaaggctttgttgaattacagtgaaatgctggacttcaacaccggtcaagcgataaagacccggaaaggatttaaggactga

SEQ ID NO: 3728 - DNA, 1854 bp, synthetic construct
  source 1..1854: mol_type = other DNA
ctgaagattaactcattcagagtcttactgtttattataataatcagtttatctttcatcggtttttctaccatctccgctgtggatttgagcgattcttgttgtgacaccctgattagcgatggctccgacggtatcatcctcgggggcagcgatgatatcagtcttagcgatgagaataataacctcaattttgacctgaatgacaatccggactttaacctggattacgacagtaactcgtatcctaatctgaatctctcttctaattcaaattccaagtccagttccaatacatatgggaatgatttcacgctctcccggttcaaatccgtgcttacttcctcctataacttgaatggaggcagctttgaagacattcagtcggccattaaccatgctgctgatggggacgacataatcctcaacggcactttcacaactactggctcagtgatcgtaatcaacaagacccttacgatcattggaagtccaaatgccgttctggacgcgaagaacatatcaaagatttttctggttgaagcagatggggtgaacctgaagaacctaaccttcatcaatgggaagtcacgcaacgagagtgacaatgggccctatcagggaacagtgaactggcaggggagcaacggaactatcgtaaattgtagttttatcaacaacagcggtgatgagaaaagttacggcgcctctattctatggaaaggatcatatgggaaaataagcgattccatctttaaaaacagttacagcggcgccaacgggggagctatattcgccttgggagagaatctcaccatcaacaattccgagttcatcaacaaccacggcaaggaaggtggcgcaatctacttcggcggttcgagcgccatgtggatcatcaactccatcttcatcaacaactccgccgattcgggtggcgcccttgcagcgtgcgctatgaacaggcaggtgatcaactctaagttcattggcaactcggcaaacaacggagggtccattagctggtgcgggtctaatggactgattagcaattccacgttcattaataattccgctgaccaaaaaggaggaagcatcctctttacagggaccaataacctggtcaagggctccgtgtttatcaatagctcagcgaacattggaggggccattaatagcctcaatcggctgaactacattaacgaccttcgatttgagaacaacaatgccagcctgggagaggattgctacggcgacctggaatttaagagattcagcacctccattgcttccgaggatatggtgacctctgccatcgacgcgaacctcgacggccggaacggcgaatactttaacgtaagcctcaaggacgagtatggcaaccccttgatcaacaaggacattaaaataggcttcaacggccgcatatacaataggacaacagactccaacggccaggcaagcctacagatcaatctgaagtactctatggtgtacacctttgccatctgcttcctgggtaatgacgacttctatggaagtttcaccgtgtcaaaaatcacggttaagacgcaaaagcccaacttggaagtcaacaacttcaagtacaaatctagtacaaagagcaaagtcattaaagcaacactgaaatcatcacgtaacaatccaatacagggcaagacaattagtttcaccgtgaataacaaggtctacaccgcaaaaaccgattcaaaaggtatcgccagtgtgaacgtgagcctgtctagcaagaagacctacgccttcactgtcaagtatgccggggacgacacttattctagcgtctctaaatcggctaatatcctggtttactga

SEQ ID NO: 3729 - DNA, 1224 bp, synthetic construct
  source 1..1224: mol_type = other DNA
atgacgtatatcgaagaggctacagtgatcgatgacacaatctatgacctgatcaacgaagctttcgagaacgagcggaaatacaatgacccggtgtacagaaactccatattcaaaggtcacaaggaatactttgtgaagaccgacgacgggtcatacagcatcaaatcaaaagaaatcaacaacaaggtggaaacactccacaccagcaccggagccataagcgaaagttttgaaaagttcataaagcccctgaaactggattacagccaggacattgctatcctcgacatctgtgcagggctcggatacaatacttctgcagccattgacgattttatgaaaaatagcaccgaagatgccaacctccagattgacctcctggaaatatccaagcccacccttgcagccggcttgatggttccaagcccgatcaaggcacatgacattacgaagaaggccattgaggatgcccttattgccgaggattacgcttcactctccctggaggaggagagcataccagacaacataaatctgaatatcttcatcgacgatgctcgcaaggtcattcagaaactggaggacaatgtctacgatgccatcttcttggacccttttagtcagaatatggcccccgagctggtgtccgtggacttctttagggaatttagaagggtgattaaagacaatggaatcgtctgcacatatactagcagcgcgcccgtcaggatggcatttatcgaagccgatttctacgtaagcctgggccctatcttcggtcggttccaaggcggcaccttggcgagcccctcgcccaaaaatctgaccaagtcccttccaaagaatgatgagatcaagatggccctgtcggatgtgggcatccctttccgcgacccaaatctaaacctaagctcaaaggaaattttagacaaccggactgaggagcgccacaacgcgcggcataacacgaagatctccagtgcggtaaagacacctatcttcctcgcacaggagatggacgatgagccactgaagagaagggttgagcgaaaccttagaaaaatgaacattcccggggtgttatccgaggaagctttttatctggtggggcctgaggagaactatagtgaggattatgccgaggataacaacagtcgcactcgtgttattgaaatggctaaacgactggacgagattaagaacaataaagtcatcttctga

SEQ ID NO: 3730 - DNA, 474 bp, synthetic construct
  source 1..474: mol_type = other DNA
atggacgtaaagatcaaagagaaactggacaatcttttcaactacatctcaaacgcactgagtagcatctacagcagaaaagacgaaaaggattatcacgacttcattagttccatcaatggccgcctcatttgcatggccgatattctagacgagtccgaggaatttgaacgagagtactacacgtttctgaagatcaagaagatgatttactacgtcctggagaacatcgaatcaataaacagggaggattgtctgcgggtgttcgactccttctcgaaatttaacctgctcatcctcttaaagttcaattacctggacgggggaataagccaggaggagtatcagaccaagtttgatgatttcacactttacttgagggaatttcgcgagtacttctatctcaacgtctatgagaaagacggccggttcgatgcgttgatcaatgaagtgagctatatttttgtgaactga

SEQ ID NO: 3731 - DNA, 378 bp, synthetic construct
  source 1..378: mol_type = other DNA
atggacaagaagattaacctcattaactttttctgggaagaaatcctgttcgggctgttcaaggaaaagagcgagttcctttcatgcttcgtcaagtgcagcaatgaggtgccctctaaattcgagataaacaaggactatctgctgaacaaactccagctgtacaattgcggactaaacaactttcggaagtattgtgatttatggcatagtcttgagaatctgggcattcacgaggaggaccgcaaaatcatcttggatgcgcacgatttcgcaaaagatcagttcaccatctttgtgacagtggacgaggaattttacaatgccgtaaagtccttttccaaactgaacatcgacaagtacaaactcttgaattga

SEQ ID NO: 3732 - DNA, 291 bp, synthetic construct
  source 1..291: mol_type = other DNA
atggacttcattgacacaaatatcgcgattgcatacaccttcttccccgataagtattttaagaccgtagacgatttcatcgtcaactccactgagttttactgcagcaacaacgtgtgcgaggagtacaagcggaaatacaaatctatcttcacatcatttgaatatttctttgatgaaatcatcctggccctcgaaaacaataaccgcattttcctaaataaatgttcctttgagcagttcgtgctgagccagacgagtgacataatctggatatggattaagaagtga

SEQ ID NO: 3733 - DNA, 522 bp, synthetic construct
  source 1..522: mol_type = other DNA
atgtacaacatcaatgaaaagatcactctgcccaggatcgagatcaaaatggacgtcaaaatcaaggagatactgaagaacttcctcaacaatattagtaacacacttacctcactgaataacaagaatgatgaggagaaatctcttgagctcattagcagcatgaaagagtacctgttggactttgccatgttcctcaaggaactgaaagaatttcaaaaggagtttagctttttcctagtaattagacgaatgctgaactacgtgctcgacaattacgggagcctatgctcttccaagcggtccgtcattttcgattccttgttcaagttctttgagctgctgcggatcaaacttagcttcctcgagggaatctattccaagtcaagttatctgagttacttcaacaaattcgatacgtatttggacgaagtgaagaccgaatactatttaaacatctaccagcgcacaggcgaatttgatgacgtgataccaaggatatcgcagattatcctggactga

SEQ ID NO: 3734 - DNA, 2034 bp, synthetic construct
  source 1..2034: mol_type = other DNA
atgggtttatttgataacattaaaaagattcgaaataaagaaagtgcaaacagctcttctgccatattggcttccacctacaataagataaaccgcaggtttggggtgggaactgatgccagcagctacattgccaaaaacatgcacaagttctatattacaagctccaagttttcaaaaggggtgcagatcaagaaccttctacgaaaactagacatcacaatccatcctgaagggttcatctacttcctcgacgaatttagaaatctggactatcatggccagattattaacagtcctatcgactacagccttattctggactattccatctacgacctcaacgagttttacttcaatcccaaggaaggtccaggcttccggaaccagtcctccgactacaatagggagatgctcgctatcctggatggaattgagctcctcatttatgaaatcaataaggccttggcaaagtcctcccgggatgacaagagcaagtacatccgcatctttgaggacatcatcgacaaaaaggctagtcattttgaggaggcccttcagcgcatcctgttccttaatcaactcctatatcagacaggccacagcctaaacagtctgggccgtcttgaccgaatcctggaagactattactacaacgacctgaatgatggatacatcactaacaaagaggcgttggaactgattaaggatttcctaaaggccctcgatagctactcctggtataagaccgatgacgagtcgggactggctagccagctgatcaccttgggaggcaagtacatcgatgagttcggcgaatactatttctacaatgatctcacctatatctttttggaggcgatcggccaggtcaatcccaaggatgttaagatagccctccgcctctcttacaagactcccgacgatctgatccacctggcgttagattgtctgaacgaaaacacgatttacattgaggagggtgtggctgtaagttttatcattgacaatcggatttttacagctgacggagccaccattgaggccaatatagattcgaacatagtcttctcaaatgatgaggcgatcatccccaggcttctcgacttcgggtacagtagcgatgatgcctataattatattctgtcagcccacctggaacctacgttcatctcctgcctggatgaaggcaacctgtcatctatctctcttttaaagccattgaatgacatctttgaagacaagaatgagctgagatttatcattaacctggactacttgatggagctttataagaacaatctgaaaaaggagatcgaggaaaaaataagcgccctggatcagattcagtggaaccaggaccctttcctgtcgctgttctcagctgagagttatgagaaccagctggacatttcccagggcggctcccggaacaatcactttggaattagattctatgggctccaaaacactgtgaacagcctgtataacctgaagaaaatagtgtttgaggacaagaccattgacctgattgagttggataagatgcggaaaaacaacttcaaaaggggcaaataccaggaaacattcctcctcctgaagaacaatcccgtgagattcccacaaaacaacccggagatagcaaacatctccaatgagatcatcgcattcattggcgactccataaaagactacaaaaacagtctcgacgggaagctcaagtttgggttaagcgcccccaggtacatgataaagaatgataagcgcgcatcttttgacgccacattaaaggacatcccgccagctcggcttctgatctcgagccagaaaaccaactcagatatattcatcttcaattcaagcctggactacaaaagcagcgcaattaacgggaacctgatagagttgaatatcaacacgaacgacaaacaactgaccaatatcctggtcgaagcaatcggatacggtttcgaccagctccaaatcaacctgatcagagaagagattatcaccaaagaggatactgaagaatga

SEQ ID NO: 3735 - DNA, 636 bp, synthetic construct
  source 1..636: mol_type = other DNA
ttgaatagtgacaagaagatcacaaaggagtcctcaatcctagatattggatgcggtaacgggaacttcctgagccagctcaagcgcggtggctacaaaaacctcacaggcatagacctgttcatcgaggaggagaacattctggaggggatcaacttgattcagacgagcctggaggactacaagccttcagaaaaatttgacctgattgtgagcaatcacgcgttcgaacacatggataaccaattggctaacctaaagtgcttcgagaaccttatcaaggacgacgggctcatcctcctgcgaatccccattaaatcggagccaatatggaaacggtatggcgtaaattggtttcagattgacgcaccgagacactttttcctgcataccctcaaaagttttgaaatactgtgtgataaaaccgaccttaagatcctggatgtgatctttgatagcggatacgcccagttcgtgttctccgaaaattaccagaacgacatcgcctggggcgaagatgggtggactgatttcaggtctaataaaaaacttatcaagaagtataaaaaggagaccaatttcttaaactcccagggacaaggcgaccagtgcatgtttgtcctgaagaagatttga

SEQ ID NO: 3736 - DNA, 327 bp, synthetic construct
  source 1..327: mol_type = other DNA
atgcggattttgaacggagagaatatgaagtgcccaatatgtgagaatgaggagaacaatctcaccttcataatcaaggaaatgcagatcggccttagggaagaatttgagtacattgaatgcagcaactgcggctgtctgttcatcaaggagatccctaaggatattgacaaatactatgacacagattacgccccgcacctgaagcctaaaagtttcaacgaaatcatttttgacaaagggtctgcaataatcctgagcaattcaatcctctccaacctaatcccaaaggagtttgtgcccccccccttcaaaattaacaagtga

SEQ ID NO: 3737 - DNA, 201 bp, synthetic construct
  source 1..201: mol_type = other DNA
ttgaccgtgtccttcctatttgtcaacggcgctgcatctgtgctcctgaacgccattgataaggaaaaggccgtcacaaaaatctacatcatggccgttattttcaacgtgtgccttaatctggtgctgatccccatgttcagctacgacggggaggcgatatcaacggtactcagtgtgaaatatctgctgagcttttga

SEQ ID NO: 3738 - DNA, 114 bp, synthetic construct
  source 1..114: mol_type = other DNA
atgattattatccccctcagcataggcatcttcttctatgcccggctgatcatcgactttatatactccaaccagtacagcctggcaagtaccctaattcagatcatcgtgtga

SEQ ID NO: 3739 - DNA, 1428 bp, synthetic construct
  source 1..1428: mol_type = other DNA
atgaatcagattaaatccatttttaaaaatacgggttggttatcggtgtcacaagtgatcaccagcatttgcgcgttcctctggaccatcatcattgcccgctacctgggagtctcggattatggcattgtctcatttgcagtttccttcactggccttatggggatcgtgatggatttggggatcagcacatacatcacgcgtgaaatcgcgaagcataaggacctggtaaggaaatattttaacaacatcttcctgtttaagcttatcttggccatcatcctgttcattctgagtgggctcatcctgtatgtcatgggctacagccacctgaccatcatagtgacgctggtgtttacaatagaacttatcttcatgtctatgacgactttcctgaacggcgttttccaggcctttgagaaagtgaaatatcaggccattggcgctatactgaatagcagtttcctgttgataggcattctcataacactggggtttgacctgggcgtgatttccatcgccttcgcctacactgtggcctactccatatattttagttacatgttccttagctacgtcaaaactttcagccgacctcacctggaattggataccaatttcatacgggaagtcatcatcaagtccattccgtttggacttaccaacttcttctattccatttatttttcaattgacattgttatgctgtcctacctggctggggactatgcaacagggctgtacaagtctgcttacaacatcataaatgtgttcactaccttttttgttgtgtaccagagcgtgatattccccgtgatgagtaagttcttcaaggagagccagaacctcatcaaggtgtcttatgagctgtcggtcaaatatctcctcctgatcatcattcctatcagcattggcatcttcttctatgctagacccgtggtggatcttatctacagcaaccagtacagtctggcctcaaccccagtccaaatcctgatctggacagtgtcattcctatttgtcaatggagccgcggcagtgctcctaaacgccatcgataaggagaagactgtcacaaagatctacattatcgctgccatcttcaacgtgtgccttaacctgatcctgattccaaggttcagctatgacggtgcagcaatcgctaccgtactcagtgagatcttgatcaccattattacactgtaccacattttcaagaccgactacaaaccagacttaggtctcctcaagaatgtgattaaactcatcgtttgtggaatcatcctctttgtagccttatactacctgaatctctccctatggtttgcaattcccgtcggatttatcgtttatctaatatccttgtttatcaccaagtctattgacgataacgacagatacgtaattcgcgagttgataaaccggtga

SEQ ID NO: 3740 - DNA, 777 bp, synthetic construct
  source 1..777: mol_type = other DNA
atgctaatgagcatcatctgtgtgtacaacgacgaggaggtgcttgagaaatatctgttagaaagcctgaaaactcaaaacgaagagtatgagctgatcctgattgacaataggaaccatgagttcaattccgccgcttcagccctcaactacggtggcaaaaaggccaagggagaaatactcctgtttgtgcaccaggatgtggaattttatgagaacaacttaaaagatatcaagtattactttgaaaactgccagaatctcggcattgcgggagtgcagggggtgagcgaggagaactacgggagaattactacaaatatcgtctctgggattccaaagagcacggtgtcagactacagtatcacagacataaccgaaacccaaacccttgacgagctactgctgattatccccaaagaggtcttcggcaagtaccagttcgatgaggaaacctgctacgattggcacctgtatggcgcagactattgtttgaacattaagcagaagggctactccgtagttctgttccctatcacgctgtatcacgtcagcgagggaggttccatgagcctcgaatactttaagacactcaaaaaggttctcaacaaatataaatacgactataatcgcatctacaccaactgcctgttgagtcatgagccgaataatcagctgaagttggatatcctttactactcggaaattctgcacatccggaatcccataactaacttcctgtccaatttcaacttcctcaagaagatccttaagtga

SEQ ID NO: 3741 - DNA, 1002 bp, synthetic construct
  source 1..1002: mol_type = other DNA
atgcagacggtgggtatgattctgtgcggcgggtttggcaagagactccgacccgtcactgagaaagtgcccaagccgctggtggaaattaaagaggactatgccatcctggataagcagttatttgattttaagaatgcggggataaacgaggtttatctactggctggcttcctgcacgagaaaatccaggaacgctatggggacgaatacaaaggcatcaaaatcaattacgtcattgaagacgaacctctgggaaccctgaatgccatccggcttggtatggaggccctcggggaagacaagcaagtagtgatccggaatggcgacatagtggcggacattaacctcaaaaagatgatcgagtatggcgaaagaagcgattacttcgtgacaatgtttgtcaccaagatgactagcccatacgggattgtggacatcagcggagataaaatcacggcttttaaggagaagcccctcttggactactacataaacggcggcatttacttcaccaaagggctattggacttcggagagtttaaaaccggtgacatcgaaaagacactgttcccagtgctggccaaagaaaacaagctgggctactacagggaggacgatctcttttggatggcaatcgacacctcaaaagagttggagagcgttcagaaggagtatgagaacaagacagacaagccttggggatatgagaaggtcctcatttacactgacaagtacctgacaaaggagctgtaccttaaggaaggattccagactagtttccactatcacaatgataaggatgagaccatgtacataatgtccggggccggctacatcgagttcgaagacaggaaggaatacttcggaaagaacgattccattcgtattaaacccggtgtggtccatagcatcatcgcaaccgagaacaccacattacatgaggtttcgacaccattccttgatgataccatccgcgtaaaagattattatacgcggtga

SEQ ID NO: 3742 - DNA, 1008 bp, synthetic construct
  source 1..1008: mol_type = other DNA
atgagtgagaagaaaaaaattaaggtgaagtttgttgattttcaggatagtctcaaggagaatgataacttcttcatcgactccctaaagaagaacttcgacgtggaggtgtcggacgacccggactatctcttttttggcgcttacgggtacaaacaccttgactatgactgtatccggatcatgtggaccattgaaaactacgttcccgacttcaacatctgcgattatgcactggcgtacgatatcatcgagttcggggacagatacctgcgattcccattcttcctaaatcggcctgaaattgagaacgtccgcaaaacaatagagcgcaagccaattgacacaagcgtaaagacggatttttgcagctttgtggtgtccaatgaatggggagacgattatcgaatccggctgttccacgaacttagcaaatacaagaaggtggacagcggggggaggtcactcaataacattggtggacctatcggcatgggcctggataagaagtttgagtttgatgtcacccataaattttcattcgccctggaaaacgctcaaaacaggggctatactacagaaaagatattcgatgccttcgctgcgggctgcattccaatctactggggagatcctaacattgaagaggagttcaacccgaagtcctttataaattgtaatgatctgactgtagaggaggccgtggaaaaaatcaaagaagtcgaccagaacgacgaactttatcatgccatgctcaacgagcccaccttcctgggtgacctggacaagtatctccaggattttgatgacttcttgttcaatatctgcaatcagcccctggagaaggcctaccgtagggaccggataatgaaaggcaaaacccaagagcaccagtacaagttgatcaacagattctactataaaccctactttttcttaattaaggtcgcacagaaactgcacatcgagtttatcggacgcaagatttaccacttcatcagagactga

SEQ ID NO: 3743 - DNA, 801 bp, synthetic construct
  source 1..801: mol_type = other DNA
atgtcaagtcagaatatccagatctacgttgtgtcccattcggaagaggatatcaaaaatatcgacagcaacgacatttacacgccactttttgtggggcgagccggcaaggacaatttaggcttcgtgtctgacgacacaggggacaacatatccaataagaacagctcctactgcgaactcaccgggctttactggatgtggaaaaacagccctgccgacataattggtctggtccactaccggcggtactttgccaactggcgcctgggaaaaaggctggaacgagaagatatcgagaaaatcttcagcgagtatgatattatcctgccgaagaagaccactgctctgctgggctcagtgtatgaggactacgaccactggaactatgctaaagacctggacctctgtgaagaggttatcggcgagcagtgccccgagtacctggatagttacaagagggttgtggagggtaaggatctctactactacaacatgttcatagcccccaaggaggtcattgcaccctattgtgactgggtgttcccaattctcgcagaggtggaaaaacgggtggacatgaccggatatgatgattatcagaaaagaatctacggattcctgacagagcgtctctttgatgtgtggatggacaaacaaaacttgcgcgtaaaggagtgcgaactaaaggtcaatgggctaaggcttaacgtccacatgtggattgtaaagagaaagatcgtgagatgggcgtatgtccatatctatatgggcttgctgcacaaggatatgcgccggtga

SEQ ID NO: 3744 - DNA, 1098 bp, synthetic construct
  source 1..1098: mol_type = other DNA
atgaaatacgattatttgatcgtagggtccggcctgttcgggtcggtgttcgcctatgaaatgaaccgtcggggcaagagttgtctcgtgatagaaaagagaagccatattggtggcaatgtgtacacagaggaaaagcacaatataaatgtccacaagtatggtgcgcatatattccacaccaacaacaaagaggtctggaattatatcaatcagttcgcggagtttaaccgctacacgaactcacccgtggccaactacaagggcgaattatacaaccttcctttcaatatgaacaccttctaccagatgtggggtgtgaaaacgccagaggaggccaaggccaagatcaagcagcagaaagccgaggcaaacatcgatgagccccaaaacctggaggagcaggccatcagcctgattggccgagacatctacgaaaaattggttaaaggatacaccgaaaagcagtggggaagggattgcacagatctcccctccttcatcatcaaacgcctgccggtacggttcacctttgacaacaactatttcaacgacctctatcaaggaatcccaatgggggggtatactaaaataattgaaaagatgctggacggaattgacgtggaactcaacactgattttctagaggacaaggataaatggatggctatggcagatagggtcctgtttacagggatgatcgacgagtactacgactactgcttcggagagcttgaatacagaggccttgactttgagtttgagaccctggacatggaaaactaccagggaaacgctgtgatcaattatacagatagagaaaccccttacacacggatcattgagcacaagcacttcgagaatgcagtctctgacaagaccgtgattactcgagagtacccaaaggcttgggaaaagggccaagaggcatactatcccatgaatgacgagcgcaacacggagctatttaataggtataatgacttggctgataaagaaggcaatgtgatctttggcggtaggctcgggatgtatcggtacttcgacatgtggcaggtcattgatgaggccctgaagctggttaaaagcctggaatga

SEQ ID NO: 3745 - DNA, 183 bp, synthetic construct
  source 1..183: mol_type = other DNA
atggagatccagtacctactgaaccaggccctggaaaatgagaacatccgggaaatcgagattgtcgtgaaaattcttaaggagtttgagaaaatcacccaaattaaattcgaactgctccacaaagagttgatggaaaagcccaagaagggcctcaagcagagcaagttcagcatcatatga

SEQ ID NO: 3746 - DNA, 156 bp, synthetic construct
  source 1..156: mol_type = other DNA
atgaatcagaacagcaagaaagaatttgagaagcggtatgaggagttctccaacttcttcttcaaatgcgagatcgaataccacaccctaaagggcaaaacaaagcatctgatggccaagaaatacctgagcctctttgacatggaatacctgtga

SEQ ID NO: 3747 - DNA, 582 bp, synthetic construct
  source 1..582: mol_type = other DNA
atgtatatgaatacaccaagccagaagaacatcgatatcaaaaactacgagagaattttcaaggagaagattaatttcgtggtcgaaaaaatctcaaggtttttcaaagggacctcccaggaagacagtttcctgaacgaaaagctactcgatctgtctgacccctttattaaatccaggataaaggagatcaaagagaccacggaatcgattgcggaatatctcaaaatagaatacatcaactacgatgaatactacgacttccgcgagatccagagcatgatgaaccaaactcttgactatggaagtatcgaggagctgaagatcatattaaagattttcaatgagtttaagaacctgacagagttcaaattcgagctcctgagcaataaatcccactctaagagcatcagctttaaggacatcgatgaggagtcaaaagaaatcttcgagaagcggtacggcgagtttagtaagttcttcttcaaccggaagcgagagtactatgcaatttttgagggcgaatgcgaggaggacgtgtccgaattttttgaattgatgaaaaagcatgccctgaagtga

SEQ ID NO: 3748 - DNA, 684 bp, synthetic construct
  source 1..684: mol_type = other DNA
atgaagctgttcatagacagcaacgtgatcattggttactgcatcgagatagattattggcactactacgcggaaaacctcatgaaaaatgaaaatatctactggtccaccacagtcaagggagaatctgagtacaagctggaaaagcttattaaaacgtattcgaactttttcaaccagatcaaggaggatctggacaaggagatcattagtaagactgagtttatcaagctggtgaagtccatcgagtacattaacaacaagaaagtgcccttcgagcaggagaatctggcaaatctggtgtggacaaaggggggctggctggacgacgtaaacagcatagaacttaatgagaacctaaatttgatttcccaggggctcaagaaaaagatgtatcgcaactacaactactgcgatgaaatgctcaatctctacgagcggcagttcaaagccgagtatatccagctggtcaaacggctggaggagctaaaaagaggcaaccgagaaatccactcaccagatagtgaaatacttgttgactgtcacgacttgagcctgtcacaaaacctcgacatgggcttcattaccagcgatggagatatcgtctattttaagaaggaaatcaaaaaaatgaccaatatcaaggacatcatttatttaaaaaacgtgcataggtacacttga

SEQ ID NO: 3749 - DNA, 828 bp, synthetic construct
  source 1..828: mol_type = other DNA
atgaccatcagtcccaagcgcatcctgtatctggatgaggttcgctcactcgcaatcatgctcgtggtcattgggcatttggcaaggctgtttagttacaactacaatagttggctgttctgcagcggtgttttctccctaacacggatcggcgtgcccctcttttttaccgtaagcggctctcttctcctgactagaaaatatgaggtgaaaaagttcttagagaagcgattcaaacgggtatgtctgcctttcttctcctggataatcatatacatcgtggccggcgtgctgatttggcactatgacctgacattcgaatatgtggtgaacactgcttttggtgtgggggactactcggcgctgttctggtttatttggagccttattggagtttacctcctgattccagtcatcagcagctttatacgtgaagagggaaattggggcgccgaatacctgattctgattacaatcatcctgtccctattgtacacgttcggcttctttgactatccacagatgaagtacaactttagagtcatcttcaacttcttccccgtgctcggctacttcattatggggtcttacattcacaacaagaagtttaagtattcagataagaagatgtttgctatcggctgcgtcttgtttatagtcggaatctgcgggcactttgccaaaatctacttaaagggtctcggaggactgtcccttgctccgatcgacttcttcgacatatgtgtgatcatggagaccatcgggcttttcattgcgttcaagtatgccagcaccaaatgggataaaaggaaagatgcccggaattga

SEQ ID NO: 3750 - DNA, 258 bp, synthetic construct
  source 1..258: mol_type = other DNA
atgcaggagattgaatttagggaaaccaaactgggtgaggtgatcgtcctctttgcatcctgcagcttcggcatctatttctcacattacatcctcatgcggtatattatgtacaacggcttccttgctcccattagaaaaacacacgccctgttctggctgccggtcagctcgataatcatcatcggactatcctggctgttgatttacgtgatgagcaagatcccatacgtacgcatagccagtggggtgaagtga

SEQ ID NO: 3751 - DNA, 1785 bp, synthetic construct
  source 1..1785: mol_type = other DNA
atgtgcgggattgtcgggtgtgtgctaaaagaaggcaaagtagcccccatcttgtttgacagcatcagtaaactcgaataccgtggatatgattctatcggcatcgcctgcgcggacgaggacaaaataaacctgaaaaaggactcagggaaaattgcagaggtcgatgctaagctggacttatgtgatctggaaggcaaatatggcattgcccacgtccgctgggccacgcacggagatccaagtaaaatcaatagtcacccccacctcaacggcgacggcaccattgcagtggtgcacaacgggatcatcgaaaattatctcagcatcaaggaagagctggagggggaaggttaccagtttgtctcggacaccgacactgaagtgattcctcatcttattgacaaatacatgaaaacaggcttggatctgacccaatcggtgcgcaaggtcatcggtgtcattgagggggcctatgccctggccgcaatctcctccgctgagcctaaccgcatagtggctacaagaaaggacagtcccctaatcgttggaataggagatagcgagttctttgtggcatccgactatcctgcgatcttaaagtataccaacaacatcgcattccttgaaaagggagaaatcgtcattctggacgaggatggagtgaaattcctcgatgaaaatgaccaggagatgacaaaggagattgaggtcatcgagtggtcccccgaaatggcggaaaagggggggtacgaccacttcatgattaaggaaatcaatgagcagtccacagccattaaaaacaccctgaacgaaaaggacaaagtgaaggagatcgtggatgaggtcaagggcacaatcaatagggttgtctttgtggcttgcggcacctcctaccatgcgtccctcactggaaaatacctgatcgagtcactcgtgggcatcccaactgaggtactgctggcctctgagtttaagtactctgcaaaagccctgaacgacaagaccctcgtaatattcatatcacagagcggcgagactgcagacaccttaaaggcacttgacgttgccaatgaaacgagcaagaccttggctattgtgaatgtgaggggatcatcggctacacggagggctgactacgttattcagacgcaggccggtcctgaaattggggtggctgctactaaaacctatgtaagtcagttggtggcgatctacctgttcagcgcccttctgggtgaggatcatgagctacttaagcgactggaaaaggttccggattacattgaagaggtcctccagaagcgagatgagattaaggagatctctaaaaagtataagcgggacaaagacgccttctttattggacggggcttctcctacccgatcgcactggaaggcgcactgaaactgaaggagatctcatacatacacgccgaaggatacgctgccggggagctaaagcacggtcctatcgccctgatcgaccggaacatcccagtggttgtggtgatccccccgggccaagaccataagaagatcatgagcaatctccaagaggtcaaggccagaggcgctgatgtgttggggatcggtgccgtgggcgatgaggacctgatcagcgagtctgatgacacattcctgataaactgcgatgttgatgatataattgcgccacttgtgtacatagtgcccttgcagctgctgagctatcatgtgagcgtcattagagagctcgatcccgacaagccaaagaacctcgccaagtgtgtaacggtggagtga

SEQ ID NO: 3752 - DNA, 708 bp, synthetic construct
  source 1..708: mol_type = other DNA
atggaaaatgctcccaataaagaagacattaaaaagattgcgggagacgatctctccaaggctgagctgaagaagcgcataatagaattgtatgattcgggccagacaatgatggatattgcagactctgtaaatcggtccaaaatctatgttagcaatgtcatccacggcttttacgacgaggatgagatcaaggtccgtcaatatgacaaactgcgggggaaagcaaaactggacttctcaaggtatagaagtagcacaggtatctacagggtgagttacgtggagaacaaacgcagcggaaacgactactggtcctatcagtactacgacgacggcagattgaagagaatcgtctctgtgaacctttacaagcttaaaacggtggtaaccgaaaaagggctggactggttcgaatttaccgaggaagccaaagagatggtgctgaaagataaggagaacttcgatgagagctctctcaagcgaacaaacaagaccgggttctacagggtgaccaagcggaagaccaatactaagcagggatacacgtgggcctactcattcaaggagaacaaccatctgtattttgttagttccatcagcatctccaagctaaaggaaaaggtcctcagcaacggctgggagtgggaagagttaactgaggaggccactcgcctggtggaagaggattcaaaaaagcgaatttga

SEQ ID NO: 3753 - DNA, 750 bp, synthetic construct
  source 1..750: mol_type = other DNA
atgattgaaatggatagtaaaaagctgctttacgaaggaaaggccaaaagtgtgttccagggggaaaacgctgacgaagtcatcatcgacttcagagacgacatgactgcaggcgatggcgcaaggaaagaaagcatggggaagaaggggtatttcaactcaattatctgcgcaaagatcttcgagacgctggaggaggcaggcgtggagacacagctgatcgaactcaccgagccttgtgtgatgaaagctcgcaaattggatatgatccccatagaggtgattgtgagaaacatagctacaggctccatcatacgcaagttcccatttgaggataagagcccattcaatcctccgctcattcagatggactttaaggcggacgaatttcacgaccccatgctgaacgatgccatagcgatcgccctggggattgcctcgcaggaggacctggacaagctgagggagctggccctaaaggtgaacgaggtaatgtccaaaatgttcaaggagattggaatcatcctggttgactttaaaatcgaatttggtaaggattcccagggcaatatcatcctcggtgacgagatctctcccgacagctgccgactatgggacgccgaaaccttggacatgcttgataaggaactctttcggcaaggaaaagatgacgaggtcattgatgcctacgaggaagtcttcaaccggctcttaaccgaggaggataaggctaaatggaatattaagtga

SEQ ID NO: 3754 - DNA, 273 bp, synthetic construct
  source 1..273: mol_type = other DNA
atgatgtatgatatcgaagtgaaagtgagtctcaaggccggaatgctgaaccccgaagcaacgaccattcagcggtcactgtctctccttgggtacgaagtcaaaggcaccaagacaaaggagattatcagcttcgtaatggaggcggagtccgaggacgatgctagggccaaggtggacgacatgtgccagaagctactgtgcaatccaatcattcacaactacactataaaaatcatcaaaatggactttacatgtgccagctgcgagtga

SEQ ID NO: 3755 - DNA, 654 bp, synthetic construct
  source 1..654: mol_type = other DNA
atggccattggaatcatacggttccccggaacgaactgcgaccgcgacgtctataaggcgatagacctggctggcggcgaggcagagtatatctggtggaacaatgaggacctgaccgactacgatgggatcgtgattcctggtggtttctcctacggggactacctccgagccggggccatcgcttccaacacccctgtggtggaaggggttaaggctctggtcaaggaagagaaaccagtgctaggaatctgcaatggcgcccagatccttggagagattggcctggtgccaggactgttcattaccaatgaggtccccaagttcaattgtgaatggagcagactgaaagtggcaaacaataagacaccgttcacaaagaactttgatttgggccagatcatcgacatacccatcgcgcatgccgagggcaggttctacactaaggatattgatttactcaaagaccaggaccaaatcgtgcttcagtttgccgaggagaaccctaacgggagcatggaagctatcactggcgtaagcgatgagtcgggactggttgtcgcaatgatgccccacccagaacgggccacaaccaaattgctgggctcagatgacggtctcgaattttttaaagggatgctcgatagtatttga

SEQ ID NO: 3756 - DNA, 714 bp, synthetic construct
  source 1..714: mol_type = other DNA
atgccggtttacctgataggtgcaggtccgggggaccccgacttaatcactcttaaagctgtgaaggcattgaataaggccgacgtggtcctgtacgactatcttgccaatgatgagattctgaaacacgcccccgataccgccaagcgcatttacgtgggaaagaaggctggggagcattataagacccaggatgagatcaatcagttgattatcgaggaggctaaggaaaatgagaacgtggtgcggctcaaaggcggcgacccatttgttttcggcagaggtggggaggagctgctggccctggcggaagagggaatcgactttgaggtcattccaggcgtcaccagcgcaatcggagctcccacaagcatggccttccccataacccaccgggctgttgcaacgtcctttacagtggtgacagggcacgaggaccctacaaaagaaaacaagcaggtaaaatgggattatacggccgacaccctaatcatcctcatgggcattggaaacatcaaagaaaacactgccgagatcatgaaataccgagatccagacactcccgcctgcgccatcgaaagtgggaccctccctaacgaaagggtggtcttcggcacactcgcaacgatcgcggataaggaaatcaacacccctgcgatactggtgattggcaaggtcattgacgtattcaagcaaataaagggaatcgaatga

SEQ ID NO: 3757 - DNA, 720 bp, synthetic construct
  source 1..720: mol_type = other DNA
atggaaatcggcgagattattactgatagcttaaagtatccgattaacaacatcaaggctttaataatttacatagtcctcggtatcgtggccgggctcgtgctcgtactgaccggcgttggcgtcggagccggggccatcgccaacagcgcagccgccacgggaatcgtgggaatcattggaattattatcttcttcctaatatacctgctgatcctgggctacgaactggatgtgatcaactttgggattgaaagacgagatgacgctcctgagatcgacttcgcgcgccaaatcaccaatgggattaagtggtacattacgtgcttcatctatatgctcatcccaactatcatcatgatcattttgtcctacctcaatcagacactgggtctgatcgtggggataatactgtttatcatagcagccttcgctctgctgatggctcagtgtaggcttgcgcacacagacagcctgggggaggcactgaatattcccgaggcgattaaagatattaccaaggtgggcatcatcaaaataatcgccgtgttccttatccttgttatcctcggccttgtcgtgtcatttattttgggcttgttttcggtactcggcgacgtcggcacatatatcggagctattctgtctggtatcttcaccatctacctagcctttgttgtcttccgggccagtggactgttgtattccgacgcagtgtga

SEQ ID NO: 3758 - DNA, 1512 bp, synthetic construct
  source 1..1512: mol_type = other DNA
atgaaaatcctcttcctgaacttgccatacgaatttaacatcagcagggcgagcagatggcctgaaaagaccaagtcaggtaccttatattatccctactggctcgcatactgtgtcggggtctgcgaacgtgaggggtacgactgcaaattggttgattgcattacaaaggcctacacaaccgaagacacagtggaagaggtgaaaaactaccaacccgattacatcatggctgaaatcacaacccctacttgcgcttatgattacaccgttataaatgccattaaagaggcctaccccaaggctaaaatcctaattggcggaacgcacgcaaccatcctgcccgatgcagtcctgaaagagtgtctgggcatcgactatctccttcgccaggagtacgactatacggtaggggagctgatatcctctgacgatgtggcaagtgtgaagggagtctcctatcgggtaaactctgatggtgtggacatcgccagtctgggtatcaacctactgactgaacccgtggacttcgaagtaaggcataccgaagaccgagagccgcttgaggacctcgatagccttccatacgtgtcaaaggtgtaccagaagtacctaaacttcgacgactatgcatacgccttcgcccaaaagccaatgatccagattgtctcctcacgcggatgccctaaccagtgtaacttctgcagctacccttcgacaatgggcggaagaatttaccgcacacgaagcgtcacggaccttgccgatgagtttgaatacatcttgaaggagctgccagagatcaaggaaatcttcattgaggatgacaccttcactgttaatcagccaagggtgattgagttttgtgacgagatcataaaacggggcctcaagccgatctggtcctgtaacacaagggttgacctgacctacgagaccatgaaaaagatgaaggacgccgggtgcaggttgcttgtgtgtggctatgaaagcgggaatcaggacgtgctcaatgaaaccaaaaagggcatcaccctggaacagagccgcgcctttgccgagaatgccagaaagttagacattaaagtctttggctgctttatgatagggctcactggggacagcctggagaccatcgatgagacttataagtttgctcaatccgtttacccggacatgtgcttcttccagcaggcggtgcccttccccggtactggattctatgattgggctaaagagaatggctatctcattacagaggactactccaaatggctgaacgaggatcggtatctgaactgtctggtggactacccttacgccgatcacaaggagatagagaagctgcgggacagtctcatgagcaagtactatttcagttttgcatatattgtgaagactttcttggctaacctggattgggtggaatttaagagagtcatgcgaggaggcacgcagtatattacgttccggctgaaaaaagcgctgaataagtcggataatctggattga

SEQ ID NO: 3759 - DNA, 777 bp, synthetic construct
  source 1..777: mol_type = other DNA
atgaaaaagaagatagcaatcacaagacctcaggagcggtcgaaagccgccaaggagttcatcgagaactacggcagcgaagccatcatcgtcccaacactggaactcaaactggagaataccgaatcactcaagaacctgatggagaagtccaatgagctagactggttgatctttacatccgtgagctcaatcgaaagcatctttgagttttatccggacttcctggacaagctgaatcccgagtgtaagattgcgaccattggtactaaaactgccgagctgggtataaaaaagggcctccccatcgacatcatccctaaggattacacggctgaaggactgcttgaagagtttgagcgcatcgacctcaacaacaaaaatgttggcgtgcctcgaacattctctgctcggactattttaccggagggacttaagaatatgggggcaaacgtgatcctggccgaaagttacaaaagcgtcattccagaggacacaagcaagatagaaaaactgattcagtgcatcctggatgagaagattgacggaatcaccttcaccagtcccttaaccgtgtccaacctattcgaaatagctaaagatgaagataaggataacctcgtcgagaagttgtctacgaccacccttactgtggcgattggcccaattaccgggaatatactgaaccaactgggggtgaaccacatctaccccaaacgctatacggtaaaggacatgattgatttgatgttcagggagctcaacaatagggaatga

SEQ ID NO: 3760 - DNA, 906 bp, synthetic construct
  source 1..906: mol_type = other DNA
gtgaacggagaatatctgatgtttattgattccgatgacacttacccaaaagacgcctgcgagattctcctgaataagatcgaggaatatggctgcgacatcgccttcgggcgctatctgaggcattacccggaggagaatttcatccgcaaatcctacaccccctacatcgacacccttgatgaaccctacctcagctacctggatgacctcgtaaagggctcaaactttaagggaatcgtggggagcctgtggaagaacatattcagtaagttcttctacgggagctccatcgacatgaataagttcaattcaaaggaatctgacaactcccacccaaaggagctggataaaaactacaaaaacaacaaagagattttcataagaaatattaaggatgaaaataaagaggagattgctatcctcaagatccttccttcgttttggactaaaatctatagaagtgagcttatttccaagaacaacatcaacttccccgaatgtgtctctgccgaggatctgaacttcctcctcgaagcgtactttaaaagcgaaaacggcatcttgtttttgaacgacaagattgtctataactactttatgcggctggaggttgtggacaagtcagtgacaaaaaatatcaacttccggctggtgtacgatagcatcaaggcatataggctgtcttcggagctgtgcgacaatttcaatataaagaataaggacctgttcctaaacccttatctcctgaactggattagcctctggctaagccgaaaaaataccaaagaggagaataagatatttctggaggaatttgacaagttagataagacgaagaagtatggtttgaagtacaaactgattttaaagaccacaaaattgctgcttaaaatcaaaagttga

SEQ ID NO: 3761 - DNA, 324 bp, synthetic construct
  source 1..324: mol_type = other DNA
atgaaagaggtgatgatctggccgatttatctagacgcagacaagtcgctcaatgaaggcaggaagatcagtcaggaatacgctattagcgagccaagaataaaagagatcgaaaaggccgcgcagaagctgaagtacaaatataccgtcgaagaggataagtcctaccctggcgaatggtataacaaaagcggtcggatcataattgagacagacgactcaaagaaagagatcctgatgaacctgtccaatagcatcaaagatattcgcgaggcccgaaagaactacaagcccacgaagaaagggaagaagggaaaaaagtga

SEQ ID NO: 3762 - DNA, 1443 bp, synthetic construct
  source 1..1443: mol_type = other DNA
atgatcgagacattaccaccagacatgaagcagaagtacgaggaggcaaaggaactgatcgagtccagcgaagacattaagatttactctcacacagattgtgacggcatctcttccggcgccatcctctccacgattctgaaacgaatcggcaaagactatgagatagagattgtcaacctggatgtcctggaggatttggagattgaacatgagctaaccatcttctccgacctcgggtcaggccagcctgtagacaagcacgccaagaaggactcgaaaatcctgattctggaccaccacccgccacttagggagatggactatcccgacagtgtggaatatacttatctcgagataaatccaatgttccacgatatagacggttcacaggagatctgcgggggggggctctgctatctcctggccaaggagtttggctacagggacctcagttggatcggagtgcttgctgccatcggggatatgcagaacacgaagaccggcaagcttcaggggatgaacaaaacaatcctgcaagatgccaaggaagaggggctagtcagctccgatacggacctgtcgctgtacggcagacagacccgccccctcttcgtggcactgtcctacttcagtgatgtgaagttgcctatcaccaacaataagaacgaaacaatcgcgcttctgcaaagactgggaataccccgaagaattaaggacgagagcgttccttccggagaaagggcgaccaccctcagtgacctgaatgacgctcagaaacgcgcactgactagcgagctgatacggatgatcagcaacgagattcctccccgttacagcatttacgttcccaagctggtaatagctgacacctacgaatttttagccgaagaagacggcacattcctcagggatgcttctgaattttccactgccatgaatgcctgcgtgcgaaacaacgaggaggtcgtggcgctgaaaatcctagaagggaatcgggcggaggctctcgatgctcttgaaatcatttctaaagaccatcggggttacttggccgagaacattcagagcatcgaggatgagcataagattatccagatgaagaacctgcaatacttcgacggctcaggcatccggagcaatgtcgtgggtaccattgccggcatggtgctaagctacggagactggcgcaagcccatgattgcatttactcaggtgagtgatgagaaccaggatctgaaaatctctctgcgctgctcacggcttttggcctatgatggaatccacttcgggaacatcataagagaggtggcacagagcctgggcggaaatggaggaggccataatgttgcctgtggtgcatatatcccgaaggataaaaaagatgaatttttaaatttgatgaacgagaaactcgaaggtaaactggctttggaagactga

SEQ ID NO: 3763 - DNA, 828 bp, synthetic construct
  source 1..828: mol_type = other DNA
atggagattttgcaaaaacgcggcgcgttgactcatttccagatactcggtgagataagcaagcaggagccaaacctgaaacagaaggacctggctgaacggctcggaattacgatccaggccgtgtccgagaacattaagacactgaccgagctggaatacatcacaagcaaggacggccgagccccttataaaatcacgcagaaggggattgcaaaggttaagaaagatgcaatcatccttaggaagtataccgacagtgtgcttgagaccatgacatactataagtccacttggcccgccattgccaaggaggacctgaaagaaggtgacgaagtcggtctgtacatggaaaatggacggctgtacgcctcaataaacgcccagacttccgcctatgcagatgtgatcctggacaccaaaaagggcttcgatgttgctctaaccaacctcaaagggacaattgagatcaaagacagcaagatcttaatcgtcacactgcccccaatcaaagatggggggtcacgctctgctgacctagacctcgtgaaaggcatctacgaggggaactacgaaaactacggactcagttccattgataaggtggctgctatcggcaccacctcacacgcagtagccaacaatcttggcatcccgatagacattgaatttggcgtgagcgaggcgtcccagtcggcagtgagaaagggactgaatgtcatgatcctgagcatcggagacatgagcaagaatattagtaaagatttggaggatgcgaatatccagtatcaagtcatagatgccaagaagtctgtaaagacggcctga

SEQ ID NO: 3764 - DNA, 696 bp, synthetic construct
  source 1..696: mol_type = other DNA
atggaaaacaagcttatcagacaagacactagcgacctggacatcgtcaatcacccagagatcaagggtctccagattattgagggaaaaataaattttcccatctcctggctgaaccagcaagggtactgcgaatacacactttacctgcagtacctcaaaggcattaagacaatgcccacgcaggccatgaccacaggcaccaaggaacatctgaagctagaggaagagtttaagcagactgcaaccccatcaagtttcgacgatgcattcaaggaatccaaggagaaggaaatcctgtcgcgggagatgtttgtaatagatagtgaagagggggtgcgaggttttattgatgagatctggatgactccagatgagatcgtgatcattgacgacaaaccgggaaacagggcttatcccagctctatgaaccaggtccgcgcgtattgcttggccttcaaaaacatgattggggacgacaatcggatcatcaggggcgctctgcgccagagaggcacggacaacatattctggagcgaaatcttcgatgagaaggttgaggagaacatcttatacctgattcaccgtatgcatgggctcttcgaaggcaccaagcctttcatacctaccaaaaatggaaataaatgtcgggcctgccgctatcagtcctactgtgagcacaaagtggatatctga

SEQ ID NO: 3765 - DNA, 441 bp, synthetic construct
  source 1..441: mol_type = other DNA
atggatctgtttgtcaaacgcatcattgcttacatcctggacttctttgtggtgtcagccttcatgtggattttcagctatttagcgtacttctttattaactatcttaacatgttccagatctaccactacttcatcttcatactcccaatactgattcttgtgtactttacattcttggaaaagaatatcggggccacggtgggcaagaaactgatgtttatagaggtgaagagcacagtcgccaagcggagtcgaaacggcaggaactataatctgacttacgggcaggcatttattcgctccctatccaagatctactggttccccatcatcatcgacgtgatcctgggcaagattgcaggaaaaaccagactgctcgatggattctctaaaaccaccgtagttgaggaaagggtcgaccggtacctctattattga

SEQ ID NO: 3766 - DNA, 1011 bp, synthetic construct
  source 1..1011: mol_type = other DNA
atgaaaataggtatgtcacacggagcggggggagaagtgatggggaacctcatctcggagaccatccttaacaacctgagtaaaaaagccgtggagggcggtctgggcctcgatgctctagacgacggggcgacgatacctctgggcgattacgaaattgtatttaccacagacgggcacaccgtcaaccccctgttcttcccgggaggagatatcggcagaatttcagctgctggtaccatcaacgacgtgagtgttatgggcgcaaagcccttggcaatttccaatgcaatgatcttgcaggagggcttcccaatagaggatctggataaaatcatcaagagcatgagcgccacttgcgaggaggccgacgtggcagtgatcacaggcgacaccaaggtcatggaacaggataagctcgaaggcatcgtcattgtgaccacagggattggcatagccaaaaaaggggaggtcatcaaggactccacactgagcgtgggcgataagatcattatcagcggtagtgtgggggaccatggcatgagcttgatgtcctttagggagggcttcggatttgaaacagagctcaaaagcgacgtggcccccatgtggggaattatctccaaggcgcttgaagtgggcggggtcacggccatgaaagaccccacccgaggaggtcttgcaaattgcataaacgagatggcccgcaaatctggggtgggagtcctgctgcaagacgaggccattccagtgaagcaggaagtccgggcggcttctgaaatgttaggcattgacccttatgaagttgccaatgaagggaaggttctgatgggcgtgaaggctgagaaggctgaggagattctagaggccatcaagactgacaagtacggtgccgacgccgctatcatcggggaggtaatcgacgatgataaggtgctgatcgaaacgggaattggaggcataaggattctcgagactcctatcgcagatccggttccacgggtatgttga

SEQ ID NO: 3767 - DNA, 378 bp, synthetic construct
  source 1..378: mol_type = other DNA
atggccatttgccagggcaagtccactcgcacaccgtcaggtgcgagacgcgtggcaaatcggggaaagcgcaagagcgaactcgggagggagagcgccgagacgaagctaggggacaaaaatctgagaaaaatcaggacccggggcggaaacgtaaaaaaccggctggccagagacaataagattaatgtggtggacgccgagggtaaggcgcaaaccgtcgagatattcggcgtcatcgaaaacaccgctaacccaaactacgtgcgaaggaacatcattactaaaggggccatcgtcgagacagcagctggaaaggctaaagttaccagtcgacccggccaggatggggtgataaacggcgtgctgatcgaatga

SEQ ID NO: 3768 - DNA, 681 bp, synthetic construct
  source 1..681: mol_type = other DNA
atgcccgagtccccagagcaactggctattgagaaagaaattcagatccagaaggacaagtttctgaacttcttcaatggcgagcttccagatacaatggaactggaatttgagggattctaccgaagagggtttttcgtgagcaagaaacggtatgccgtcattgagaacgagaaaatcatcgccaagggtttagagcttgtgcgccgcgactgggcacccatagctaagaaaacccaggaggaaatattgatggccatcctcaaggagggggacgtgaaaaaggcggaaaagatcattagcaaggtcctgaggaaaatcaaatccggcgacattgcaacgaaagatctaatcatacatacccagatcactaagaacctggatgactataagcaaatcggcccgcacgtgatcgctgcgcgtgaaatcgaggcccacggcattaaggtggggaaagggacaattgtacagtacataatctcgaagggcaagggttctattagccagagggccgtcccttatgagtatagtgaaggagtggaatacgataaggagtactacatcgaaaatcaactgatccccgcagtttccaggatgatggagcctctcggatacgacaaaaaccggctcagagaactggcctcaaccgagcggcagcagagtttggacgccttcttttga

SEQ ID NO: 3769 - DNA, 681 bp, synthetic construct
  source 1..681: mol_type = other DNA
atgaccaaagctgtgttcttcgacatagatgacactctgctggacacgtctagctttgcagatcttgcccgccacgcggctattgagtcgatgtgcaacaacggcctgccattggagcctgatgaagcctacgacctcctgaaagacattatcaaggagaagggtagcaactattccaagcactttaacatcttgaccaaagaagtgctggggaaggaagatccccttttggtggccatcggcatgaccacctaccataacgtgaagtttgcacttctacggcccttccccagaacaagtgccatcctcatctacctgaaaagtaacggctataagttaggggccatcacaaatggaatcacaatcaagcagtgggagaagctggtccggctgaatctctaccacttcttcgacattgtaattacctcagaggaggtgggagtggagaagccagacccggaaatctatctggaggcctgcaggcgaatggcctgcgacgtcaaaaaaagcgttatggtagggaataagctagatattgattgtatgggagcagtgaacgctggcatgtcagcgatcctggtcaattccactctcgatgaagaggaaaaagagagggtgaacaatgaagacattgacataatagtcctcgacagcatctccgacgtggatacggttctgtga

SEQ ID NO: 3770 - DNA, 789 bp, synthetic construct
  source 1..789: mol_type = other DNA
atggcgcagatcaagtgcccagactgtggcaaagaacaggaggatacaaataagttttgtaaaaattgcggagccaacctatccaacgtaaaagccgaggaagttaagctggacctcgacgcggcccccacggaagagaaaatcgacttaaacactgccccaacggaggaaaaactggatacagatgccagcgaagtgaaggagacccctaaagcccctgtggaaaacaagaagatatgcagcaagtgcggacatgagttgaacaatgagaagttctgtcccaggtgcgggcagagtacagcatcgatagtgccatacgaggccaagacggaaagccagggtgagaataacgacaagacctgcccctcctgcggcacaaaagtcactacagaaaagttctgtcccaactgcggcagtaaaatagaggagaagaaaccggtccaaacccagaacgctccccagaagtactgtcgcaattgtggaaatccgattgatcctaaggctgagatctgtccaaaatgcggcgtgcggcagttgactgttgtgaagaaagagcctctgttttcactgattctctcactgatcttccccggcctggggcaattctataacaaccagacccacaagggcatctttctcatcatcggggcaatcgtgtccatcgtgcttaccatttttgtcattggagtccttctgtacatgctggtatggctgtacggtatgtacgacgcatatagcaccaccattgctctcaacaatggggagtatgtggaagacaagctcttctga

SEQ ID NO: 3771 - DNA, 273 bp, synthetic construct
  source 1..273: mol_type = other DNA
atgagcgatttcgaggaggtaatgactgaatacatcaagatctcaaagcaccgggaaaaggtcttcaaaacactaaaggatggctccaaaaagccatccgacattgccagggaaacgaacctgaacatcaacagtgtgagcctgtctcttaaacagctcaccgaaaaggagctggtgtatctgttgaatcccgacgacaagaaagggcgcctctacaaactgaccgaaattggcgagacaataatcaaggagtttgacgagaagaccgagtga

SEQ ID NO: 3772 - DNA, 777 bp, synthetic construct
  source 1..777: mol_type = other DNA
atgacaaagattagacttatctcctggaatgtgaacggcattagagccattcacaaaaagggcttcctcgactggttcaatgaggagaaagccgatatcgtgaacctgcaggagaccaaggctaagatcgagcagctgccaaagaagctcatcaatgtgcccggctacaccagctacttccacagtgctgagaggggaggctatagcggagtggccacgtacacatccatagagccaaacgaggttatcaacggaatggggattgagaaatttgatattgaaggccggctgatcaggttggactttgatgactttaccctcctgaacatctactacccgaacgggggtcgcgacgaggagaggttgcagtataaattagacttctacgacgccttcctggactacgctaacgatctgcgcgaccaaggaaagaatctggttatctgcggtgacctcaacactgcgcataaggaaatcgatcttgcacggcccaagcagaacgaggatgtgtcagggtttctgcctatagaacgagaatgggtcagcaagttcctagacaatggctatgtcgacacctttcggatgctccatgaaaatgaaaaagaaaaatatacatggtggagttataggactcgggcgcgagagcgcaacgtggggtggcgtctagattacttcttcgtaaacgaagaatttaaagacaatgtcagagcatcgtacattatctccgaggtgatggggtctgatcactgtcccatagccctggagattgagatctga

SEQ ID NO: 3773 - DNA, 1548 bp, synthetic construct
  source 1..1548: mol_type = other DNA
atgagcgaggttatagataagatcatcaatgagctgcacatttatgaaaagaaactgctaaaagagctggaaaagaacgaagatctgagtcctgacgagatagcgcaggacacaggcctcaacattaagagcgtcatgagcgccgccggaattttagcgtccaaaggaatcatcacggtgaagaaagatgtggaagagaagttcagcttaactaaatatggtaagaagtatgctgagatcggtctgcctgagcggcgaatccttaatgagctgcaggagaaaaaggaactccacatgaaagacttggccaagatagacagtttggaaaagaaggagatcaatatcgcaattggctggctggttcgtaagggctgggctaagataaacaagggagtcgtgacgatcaccgaggtgggagaatcctccaaggacaaattaggggatgatgaagtgttgctgaacctgctcaatgagaagggcagcctgtctcaggacgaacttgacgaggatatggctaacggtctggccgcactcaaagatcgcaaaaaactgatcgccagtgagaagaccacttcccatagcttccagctaaacgacctggcttacgagattctggacaagggctttgacctgaccgaagaggccacccaactgactcatgagcagttgaaagacggcagttgggccaagctaaaataccgaccgtacgatattaacgctgagtaccccattttcttccccggtaaggagcatccactgcggcggatcattcaggaaattagggaaatcttcctgaacctgggcttcacagaagccaaaggagagtacctcgagtctgccttttggaatttcgactcattgttccagccccaggaccacgccgccagggagatgcaggatacattctacgtcaagaacccactcacttgcgacctgccagatgacgaccttgtggagagggtagccaaaacccacgaagatgggggaaataccaattctgaaggctggcattatgactgggatgcagacatcgcccgccaatcggtgcttagaacccacaccacggggatctctacacaggcactagctaactgggagcttccaatcaaaatgttttcagtcggccgggtatttagaagagagacctttgactacaagcacctgcctgagttccaccaagtggaggggctggtcgcagcgcccgggatcaattaccagaacctcctcggaacattgaaggagttttataagaaactcggctttgaggtgaggttccgccctgcatatttcccgtacacatacctctcaactgagtgtgaaatctatctcgaagagaaggaaagctggatagagcttggcgggtgcggaatgtttcgacccgaagtgttggaacctctcggggtgaaagtcccagccctggcgttcgggctcggtatcgaacggctggctatgattagatacgacctgtccgatatacgcatgctttacaagtccgatatctcgtggctgagggaagttcccctggaggagggcattaactttgagtga

SEQ ID NO: 3774 - DNA, 900 bp, synthetic construct
  source 1..900: mol_type = other DNA
atggaagccaaccagatcgccaagctggcacagattgcttcagcgctcgaggtcagcgggtatccaaagcccggaaacgtgcataggacgcggaattatgatgacatggtcttcgaggacttcataatcagtggcgtggtgattggagataccatccgagaactggccaaccacacccagtccatcgatgatctgtcggacgcaaatctgggcaaatatattctggaggcagtggccgaaacaaacaaatggatcgccaataacaccaatctgggcattatgatgatgtgcgtccctattgcagccgcggctagtataagtgacgatttcagccagatccaagaaaatgtgggtaaattgatggatgcaacgacagttgaggatgccgtagatctatacgacgcaattaacctcgccgacgctggaggcatgggggaccaggatgagtttgacgtgaccagcgagaaggctaaggacgagctgcgggccaacaatcaaaccatgtttgacgtgttgaagataagcgcgccttgggatagactcgcttctgagcttacttccaagatgcccgtgtcctttgaaatcggttatccgacattcactgggttctgcaacagctgtgaggacgtcgataaaatcaacaaggccacagtcctcaccttcatgacacttctgtccgagatcccagacactctcatttcacgcaagtacggggatgaggttgctaaagacgtgtctctaaaggcgaaagagcttctggaatttaaggatgacgacgacttcgtagaaaagctgctggaatttgacgactacctctacgagaacaaatacaatcccggcaccactgccgatttaacggctgcctctatcttcatcagctacttggacaaggaattttga

SEQ ID NO: 3775 - DNA, 996 bp, synthetic construct
  source 1..996: mol_type = other DNA
atggacttcccaaacaccaggatgcggcggtatagaaaaaactctaagatacgggacatagtccgtgaaaccaagctgaataaagaggacctgatttacccaatcttcgtgaaagaggatctgaaggacgatgagaaggaagagattagcacaatgccgggagaatttcgattcagcatcaacggtgctgtggagtacgccaaaaccttggaggctaagggactaagatcaatcatcatcttcggcatccccagtgacagcgagaaagatgaaatcgcaagccctgcttactcccccacagggatcgttcagaagaccgtgcgcaaactcaaggccgagactgacctggtggtgatcaccgatgtatgtctttgcgaatacacctcccatgggcactgtggcatcttgaaggaaaacgaagacactgattttggatatgagatactgaacgacgagtccctgaagttcctggcaaagacggcggtcagtcacgcagaggcgggggctgacattgtagctcccagcgacatgatggatggtcgcgtggcagccatcagagaggctcttgatgaggcaggctactataatacaatgatcatgagttattcagtgaagttcgccagctcgttttacgccccatttagggaagcggcgtgcagctccccttcggtcggcaacaggaaatcctaccagatggaccccgccaatgcccgggaggccattcgagaggccgagcttgatgtgacggaagggaccgacttcctcatggttaagcccgccttgccttatctagacattattaagacagtgaaagatgaatttaacctgccgctcgtcacgtataatgtcagtggcgaattttcaatgattatggccggaatagagaacggctacctcactgaggacagcatcatggaatccctcttatgcattaaacgcgccggggcagacctgattatcagcaatttcgctccatacgccctggatcacctgtga

SEQ ID NO: 3776 - DNA, 1101 bp, synthetic construct
  source 1..1101: mol_type = other DNA
atgacaaacaccattggcaaaatcttcagaattacatcgtttggtagcagtcacggcaaggccctcggagcgattgttgacggctgtccagccaatctagaactgagtgaggaagacatacagattgaactgaataaacgcaggcccggaaccagtgccctgaccactgcacgtaaggagcaggaccaggtggagatattatccggcgtctttgaaggcaagacagatgggactcctataacgggcgttgtatacaataccaaccagaagagcaaagactattcaagcctgaagaacactccccgcccaggacatggtgactactgctggatcgagcggtacggaaactacgactataacgggggcggtcgggggagcggtaggattaccatcggccacgtaatcggcggggccatagccaagaagctgctgtccgccaaagggataaagatcatctcccacgtcgtgcaaatcggagatatccgcgctaaggaggcaaatattgaaagccttgaggaaaacatcacaaagaataatgtacggtgcggcgaccttgaggtggccaagctcatggaggatttgattctgtctaaaaaggaggagggaaacagcgtcgggggggtggtggaaaccatcgccctaggggtgccagcaggcctcggcgaacctgttttcggcaagatcgatggggatcttgccaaagtcctcatgaacatcaacgctgttaagggagtggagatcgggctgggattcggtgtggcgaccaaaacagcaaaggagatcaacgacgagttttattacgagagggacgacgtgaaaacgaagaccaacaattccggcggaattttgggaggcatgacaaacggcatgccgattgtctcccgaatagcaattaagcccacgcccagcattagccaaattcaggaaaccatcgatctgaataaaaaggagaacactaccatcgagattaaaggtcggcacgatccctgcatctgtcctagagtcacggctgtggccgaatcagctactgctatcgtgctggcggaccatatgatccgatcagggttcatccacccgacaaatctcgaaaaaagagtgtga

SEQ ID NO: 3777 - DNA, 942 bp, synthetic construct
  source 1..942: mol_type = other DNA
atgaaaatcacattcctgggttcaggcggaggacgcttcaccaccattagtcagaaacggatgactgggggcttcaggctagataacttcgggggaaagaattatcatatcgacccaggtccaggggccctggtcaggtcttaccaattcggcgtaaaccccaccaaaattgatggcatttatatctcccatagtcacaccgaccactacggtgacgcggagattcttatcgaagcgatgacacggggaatgacaaagaataacgggattatcatggggagcaggtctgtgttcgagaagtacaagcggtgggggcctgcaatctcgaactaccacagaagcaactccaagaacctgattctggtgcccaataaaatcaagcgcttccccgacttcagcataaagggcacggacaccatccacggcgatcccaccggtgtgggctttcagatggaggcaaacaacctcaaggtatcctacacgtccgatacaagatattttgaggagttgaagaaatatcacaagggcgccgacatactgatcggaagcgtcctcagacatgatgacgatgccatcaagggccatatgtgcactgatgactttatcaatttggtcggggacgtgaagccaaaattagctataatgactcacttcggatttaagatgattgctgccaatccggtcgaacaggccatcaaggtttcaaagaacacaggcgtgcgaacgctcgccgcctttgatggaatgctggtggacgtgaacgaaaaatatcctcagaagtcgcgtatgcttcgactgaaggaccggtttgcagctcacatgaaacaggaagacgtgtacagtaccaattttaaagttaaatcaaacaaacgcaataaaatgcgcaataagaagaagtactacaataacaacgattccaacaatagcttcagctctaaatga

SEQ ID NO: 3778 - DNA, 927 bp, synthetic construct
  source 1..927: mol_type = other DNA
atgagtctgatcatcgcttacgtaggaaaaaagggatgtgtgatggcggcggataagcgccgcatcgcctatttcgggctgaaggagcaacgggagatcctggaacaggaaatttactctggagaaattcacaatgatgaggaattatacgccagggcagaagagctagacgtcaatctcaaggttacagacaacgcctgtaaagtaaagagcattgagaatgtggccatcggtgaggtgagctcgcgtggcacaatggagactaaacggaaaagaatctatgggaccagcaatgggtttaaaatcatcgagctttccggtagccacgtgctgaactctaaacggggagtctcttcaataatcgtcttcggcaacaaagtgacgaaaagtctggccaataaaatgattcaggagagatggaagccgagtttctccttgaaatacatgggagagatctttggcgagattctaaaggacatcgccgagatcactcccagcgtcggcaaggattacgatgtgataattgagaagaacaatctggcaaagagccaagtacaggactatatcgacgaagtcgctgagcgcgacgttaaggtgttggccaagttccgagcacagcttagggagcagctgatggaacagaacgagaacataaaattggcttccaccattatcgaagagggctcagttggcgaaatcgtgataatcgatgataccctcattgaggtgaagctcaacccagacgtgagggcctttgatgtgaactggaaggtcctcgcagggcctggtgaaaacgttctcatggtggtggacgactccgaagggcttgacaagggcgatgagatcgtcattgaggacgaagtcctgtgcgtgaagaagaataaggctaacctgaaatgcgacataattctgtgccatctggaatga

SEQ ID NO: 3779 - DNA, 381 bp, synthetic construct
  source 1..381: mol_type = other DNA
atggtcaagatcaatgagatttacaggtgcaaccactgcggaaatataatcgagggcatcgtggagggtgccggggagctggtgtgctgtggtgaacccatggaactcctcgaaccccggcaactggaggaggggggagtgaagcacatccctgtagtgacaaaggaagatgggaaaatcgtggttaagatgggcgaagtggaacatccgatgcttgaggaacactacattaactttgtccagctgaccattggcgaccaggtcttccgcgctaacctaaaaccaggagaggagccaaaggcagttttcgacatcaatgccgagattgaggacataaaagcgatcgagtattgtaacatccacggcttgtggcatgcctga

SEQ ID NO: 3780 - DNA, 510 bp, synthetic construct
  source 1..510: mol_type = other DNA
atgaagaagaacattttcctgattgccataatactcatcgcagtcgtggcagtgagtgggtgcatcaacagccccatggataatatcaacaacaacatgaaggaactgaacacggatatcaccgaaggagacaccgactacaattctgccatcaattatatcaataataaggactttatcagtggcactgacaacatccagattgcgaaagacaagtttaatgatgcggacgagaagctctccaacattgagcagtacaaatcgagcctaaacgagagcatttatcttgactacttatatctgatcaaggaggaagtctccattaaaaggcaggccagcgatgaactgtacctggctttgcaatattacacaaacaatgacttcagctctggtaactcatacgcccagtcagctaattccctcatgaaccaggctaaggtactgcaagatgagcggaaccagatcgtggagaacaatccagatcttttcaaaaaagccggcataatctga

SEQ ID NO: 3781 - DNA, 2343 bp, synthetic construct
  source 1..2343: mol_type = other DNA
atgaaggaggcttgccctaaatgcaacggaactggtttagtggcggtggatacaaagatatgcgatgcatgtgatggaacaggatatgaggacacgtttgaaatgaaaaaccacttcaaaggagtgaccagcaatgccagggccaaattcgacctggatgccgaccaagacatcccctgcgaagtatgcaacggaaaaggtgtggtggatgttttcgaagactgtccctactgtaaggggacaggccagatcaacgtgtgcaacagctgtggcaaggccattcccgatgataaggattactgtgacgagtgcaacgaaaagcagcttgaagagaagatgaataaagtaaaggaaagactggaaaatcctaaaaagcttaaggtcgagtcagacattgagggcaaggaaatcgtatacgagctcgacggactatgtgatatgagtgacttggaaatcaattcgctttacaagggcaaagtcacccgggtggaacgatacggtgtgtttgtaagcctcaacaaccaggtttggggcttgatgcgaaccagcaaccctcacaataaggtcggagacaccatctttgtcaggatttcgcagatcaaggagcggaaacgggaagttgatatggttccggcccacgtcttcaagggcgagtacgtggtcaagaaactatccaagaacattgggagaaccaaaatcgagacccttgatgagagcagtctcaaaagcattgtgaaggtctacggggaggtcatacaaatccagcagacctccgggcctaccatctttacaatcactgacgagacttcaatcacgtgggctgctgcctttaacgagcctggagttcgtatgtaccccgaaattgaagtgggcgacattgttgaggtcattggcgaagtcaatcagcacaatggagagatacagatcgagtccgagtccatctccaagctggatagcgacgaggctgaagctatgaaggaactgatcgacattgctctggataaaaaagcagagccggatgatgtggatttcctcatcgagagccccgtgctggaacgcctcaagcccaaaatgcgcgaggctgccaaagtcattcgacgtgcggtgctggatgggcgctccatactcgtaaggcaccataacgatgccgacgggatctgtagcggtgtggcaatagagaaggcggtgattccatatctgaaggaaaacaatcccgacaatgatgccgagtaccactactttaaaaggtctccgagcaaagccccattctatgaactggaggacgtggtgaaggacctgtcctttgcgctcgaggacctggacaggcatgggcaaaagctgccactcattgttctgctagataacgggtctaccgaagaggatatagtggccctgatgcaggctaaaatatacgacatcgagatcgtggtgattgaccaccactcccccgggaacctaattacaaaaaccctgaggaacggggagacggtctcaggagatgtggaatctgctccagaggacattatgggaggaactgtcgcagtggacgagtatgtggacacacacgttaacccctatctggtcggcggggactcgcagatcacagcaggcgccctggccactgaggtggctcatttcatcaatccagagatcgaggacctgatcaagcacctgcccggcattgcggcacttggtgaccatgccgagtccgacgaggccgaacagtatgtggaactggccgccagtaagggctactcacgcgaccggctgaagcagattgctgagtgcatcgacttcgaggcttacttcttgagattcatgaacggaagaggcataatcgataccatcttgggtgttgacaacattgacaagcaccctaagatggtggatgccttgtataaagagtatctcagacgggtggacacgcaaatgaaagcagcgctcccgaatataaagcgggtgaagttggacaacggcatctacttcaatgttttagatgtggagaaatacgcccataagtttactttcccagcaccagggaagacctgcgggtttgtccatgacaagattgtcaaggaaatcggcgatgacaagcctatcatcacattaggacatggcccagacttcggtgtgttgcgcgccacagacaccgtgcaccagctctttgggttcaacgtgaataatatcgtaatcagtctggcagataagataccccaggccggtatcgatggcggcggccacgaatgcgcaggctcaatcaaatatattgagggtctgggcaaacaggtactgacggaacttctcaatgaagtcagtgagatgactgacagttctaagaactga

SEQ ID NO: 3782 - DNA, 375 bp, synthetic construct
  source 1..375: mol_type = other DNA
atgtacagcgataaagtcatggatcattttgccaacccaaggaactctggcgaaatagagaatgcaagtggtgaagggactgtgggcaatcctacctgcggagatctaatgacaatctatatagacgtggatgatgacgaggtcattcaggacattaagttcaaaacattcggctgcggggcggcaattgcaaccagctcaatgatcacggaaatcgccaaaggaatggccgtagacgaagcgctcaaaatcacccggaacgacgtggccgatgctctcgacgggctgccgcccatcaagatgcactgttccaacctggccgctgacgctctggccgaggccatcaaggactacaaggagaagcaggaggagtga

SEQ ID NO: 3783 - DNA, 1209 bp, synthetic construct
  source 1..1209: mol_type = other DNA
atgatttatatggacaatagcgctacctctcccgtgaaggaggaagttttcaacgcaatggtgccgtacctaaaggaagagtttggaaaccctagcgccttttacagcttagggagaagtgccaagaaagctgtggaaactgcacgtgaaaacgtggccaaactgatcaatgccgagacacgcgaaatcatctttaccagtggggggacggaatccgacaacatggctataaagggcatagcctttaagctggaagacaagggcaagcatatcatcacaacagtaatcgagcaccctgccgtgcttaggacctgcgagtacctcgagaccaaaggcttcgaggtgacttacctgccagtgaaggaaaacgggattcttgatattgaagacctgaaggaggcaatccgcgacgacaccatcctcattagcgtaatgcatgccaataatgaaatcggcactatccagccgattgaggaggtcggtggaatagccaaggagaagggcatcacgttccacgtggatgctgtgcaatcggttggaaaaatccccgttgatgtcaaaaaagcaaatattgacctgctttccatctcatcccacaagctctacggcccaaagggcgtcggggcgctcttcattcggaaaggagtcaggatcgaaaccttgatacatgggggaggccaggaaaacaacctccgatcaggtacggagaacgtgccaggaattgtgggattcggtaaggccgccgagatcgcttataataatctggatgccaatatcgaaaagctgcaggaaatccgggacctccttataggcgaggtcctggacaaggtccctgaggcatatttgaacggtgacagggaggagcgactccccaacaacgcaagcttccggtttgcagcgattgagggcgaggggctaatcctcagactggacgcgaaaggcataaatggggctacagggagcgcttgtagcagtaaaaacctaaaggccagctacgtgctgagcgcgctgggactggaggacgctgagattcacggctcactgcgcctgtccttgggtgtagagaacagtatcgaagacgtcgaggtggtctcagatgccattgccgatgtggttggcagcctgagacagatgtcgcccttatgggacaatgagaaaaacgagtccctggagttggatgaatccaaattcaccgatgtggatcactga

SEQ ID NO: 3784 - DNA, 1320 bp, synthetic construct
  source 1..1320: mol_type = other DNA
atgacaaataaaaattatggcctgagtacactgggcttacacgcaggacaggaggaacccgacccagctaccggggccagagccgtgccgatctatcagacgtcgtcttatgtgttcagcaacacggacgaggccgctaaccgctttgcactccaggagtttgggcaaatctacagcagattgaccaaccccacatcagatgcctttgaggcacgaatcgccgctatcgaaggcggaaattccgcgatctctgctgccagtggcctggctgcaatcagttacgccttgcttaacatcacaccgcccggcgatgagatcgtctcggccaacaacctttatggtggaacataccagctgtttgactacactttcaaggatctggcacggaacgttatctttgtagactcccaggattacgatgcctttgaggctgccatcaccgataagaccaaggctatttacgccgagtcactcggcaaccctaagctggacgtgcctgactttgagcggctggcggaaatcgcacactcccatgacattcccctcatcatcgataacaccgctgcagtggggcttgtgaggcctttggaacacggggcggatgtcatcgccgcctctgccaccaagtttgtgggcggacacgggacggcagtcggcggatatattgtggacagcggaaagttcaattggggcaacggcaagttccctacaatatcagagcccgacccaagctaccatggcataaactactgggaaatattcggcgatttcccaggtctcggaaacattgcatataccctccgcatcagggcccgcctgctgagggatctgggtgccaccctggcgcccgttcacagcttcatattcttgcagggactcgagaccctcacaatccgtatggaaaagcactcagagaatgcgctgaaagtcgcgcagttcttggacaatcaccccgccgtcagctgggtaaactacccaggtctggaacatcatccaagccatgagacggccaagaaatacctcggcgacaaattcggggccctcattgctttcggtattaaaggcggtctagaggctgggaaggagtttattgataatgtggaactgctgtccctacttgctaatattggagacgccaaaagtctggtgatccacccggcttccaccactcaccagcaactgactcctgaagaacaggaaagcactggggtgactcaagacttaatccggctatccattgggctggaggacgttgacgacattattgccgatatagaccaggcacttgccaaggtgagcgagaaattcggggacgattga

SEQ ID NO: 3785 - DNA, 2100 bp, synthetic construct
  source 1..2100: mol_type = other DNA
atgactgaccttaataagatgttcaatccagacagcgttgctattgtgggagcctccaactcggagggcaaagtgggttacattattgtgaataatatgatcaatgatggttttaaaggcaacatatacccaattaaccctaaggatgacgagattcagggcctgaaggcatacaaaaatgtgtcggacctcccagaggtccccgacctggtcatcgtgtccatccccagtgtgttagtgaaccccgtcgtggaagagtgtggggaatttggcgtgaagaacatggtagtcatcactgccggcttcaaggaaatcggcggcgacggcgtggagagagaaaaccagctggtagccttgggagaaaaatatggcataaatatcattgggcctaacagtttggggatcaccgactcacacactccactcaatgcttcatttagccagatcatgccccctgaaggaaatattgcattcatttcccaaagtggagctatgatggtagctatcatcgactggagcgtcacctccggaattgggttcagcaagatcatcagtctgggaaacaaggctggcacaaccgaaatcgagcttatcgaatacctctcatatgacgacgagacggcggtggttatctgctacctcgaatcaatcactgaagacgacgacttcgtgagaaccctgagaaaggtgtcctacaagaaaccggtcatcatcctaaagtccgggagcagcagcgccggggcggaggccgccagctcgcataccggggccctggccggtagtgacattgcgtttgacacagccttcaagcagagcggtgtgttccgggtgacaaccatggacgaattgttcgatgtcgggctggcattctccaaatgcccactaccaaccggccgtaacctggccatcattacaaacgcagggggaggaggcgtcctgtctgtcgacgccatggagaggtataatctggatctggttaaatttgatgagaagaccaacgcacgcctcaaagaggcagtgcccgaggaggggagtattaaaaaccctattgatgttctgggtgacgcgcctgtgatacggtataaggagtctctcgaggctgtgttagattctgacgatgtggacggactggtggtcatggtatgccccacagcctctgcagatgccgatggcattgccgatgcactggtggaaggggccagcggatttgacaagccggtcattgcggtgaacatggggggcccgatatttgagaatgctaacgatgtcttaagggacaacggcatccctacctacgtgttccccgaaactgcggtcaaggtatttgactacctcgcacgatttgctgccgttcaggatcgaaattatgatgatcccgtaggcgagctggatgacgtggacaaggaagccgtggaggaaatattcgccaaagtgaaagccgaagagcgcgacacgttgctcgggagtgaggcctacgctgtcgctgaggcctacggcatcgaggcagctcccataaagcttgccacatccgctgaagaggccgggcaactggccgaggagatggaatttccggtggtgctgaagattgcatctgataagatcctgcacaaatccgacattggcggtgtgaaggtgggcatccagagcaaagaggaagccgaggaagtcttcgaagagatcatggctaacgcgaagaaagcccacccagatattgttccaaacggtgtggaagtgcaaaagatgatggattccggtatagaggttcttgttggaatggttagggactcacagtttgggcctatgatcgccttcgggatgggtggagtgctggtcaacctcttggaggatgtaagctttaagctagctaaaggcctgaccacggacgagatcgccgagcagatggagagcacaaaagttatgggccttcttaagggcttccggggagaggctcccggagatatagaggccgttaaatccgcaatcatccgcatcgcaaaactcacgctggacttccccgagatctctgaactcgatataaaccctatcttcgtctatgagaagggatcaagcgcgttggacattaagattaagctggcttga

SEQ ID NO: 3786 - DNA, 1443 bp, synthetic construct
  source 1..1443: mol_type = other DNA
atgacaagggagaaaggggagctgaacacactcttcgcagacaagatcaaactctttgtgtgcggccctaccgtgtatgacgacgctcatataggtcatggacgaacctacatctccttcgacacaatcaagaggtacttggagtttaaggggtattccgtgttctacctgcaaaacattaccgatattgatgataagattatcaatcgtgccaaagagagcggcattgacagcaaatacctcgctgagaagtttgagaagagatttatcgaagatatggctgcactcaacgtgaccagcgttaactactttgcacgcgccactgaccacatagaggagatcttggaccagatccagcgccttatcgacaagggatatgcgtatgtcacggaaaccggggtctactttgaagttgccaagttcgaagactacggcaaactgtccaaccggaaactggaagatttagaaacccaccgcatagatattgacagttccaagaaaagtccacacgacttcgccttatggaaaaatcgggaggcacccgaatacgcaggggagcctgtgtgggattccccgtggggtaaaggcagaccgggctggcacattgaggatactgcaatcactgagaagtacttcggcccccagtatgacattcacggcggcgggctggaccttattttcccccaccatgactccgagattgctcagatggaggccgtctctggcaaggagcccctggtgcaatattggatgcacacgggattcctcaatgtgtcaggggaaaagatgtctaagtcgttgggtaatttcattacaatccgagagttgctgaaggaatactctggagacacgtttaggctattcgtgcttctgacccattaccggagcccaattgacttcagcgaggtaagcctgcatcaggctgaaaggaatgtcagccgcatcaagaactatctggaaaaccttgatgagaaaatcaacgacatatttgagaaggggaatctcagtgaagacctcctcaaactagccgagctagaggagaatgagtttgatgaggaactgatcaactttgattacttcaaatcaaactaccctgccctgaaagaaggagtcaacgagttcttcacaagtatggacgatgatttcagcactccaaaggccatcgctgccattttctcatttataaagcagtcaaataaggacctcgaagaagatgatctgatcatcgatgaccttctggccatcaaacactggtttaaggacattagccagatcctgggtatcgacttcttcgtttataaggacgagaccagtggaaacgaggcggagctgctggacatcatcgccgacgtgcggctgaaactgagagcggagaagaagtatgatctgtcggatgaaatcagagataagttgataagcctcggcattgaagtatccgactga

SEQ ID NO: 3787 - DNA, 381 bp, synthetic construct
  source 1..381: mol_type = other DNA
atgaagcccccttgtgagatggtggtctggtacatcataccggccatccggagtgaactagctaaagacctcctgaagctgggcatgaagcagaagaagatctcagagctgatggacattacacagccagctgtatcccagtacctcactgataaacgcggcagcggaattgggttcaatgacgatgtgaaggcattgattcaggagtttgcgaacgacctgaacgatggcaccgccaccaaattcgatatcattccaagaacgtgctatatatgtaaaaggatcaaaacagaagacgtgatctgccagatccacaaggaaaaggggcatatgcccgcagactgccaagcctgcctcggaagcgaggcccaccttctgtga

SEQ ID NO: 3788 - DNA, 741 bp, synthetic construct
  source 1..741: mol_type = other DNA
atgttcgacgacctcaaagacgatctgcaggccgccaaggcacgtgacccggccgccaggagtagcctggagattctctgctgttaccccggaatatgggctatcctgttgcacaggtggaaccattggctttggacgcacaacttgccattttgggggcgcttcttctcccagattagccggttcctcaccggaatcgagatccaccccggtgctcaaataggaaagcgcgtgtttattgatcacggaatgggcattgtcatcggtgagaccactattgtgggggatgacgtgctgatataccagggggtcgtgctgggtgggaccagtctgagcaaagggaagagacaccctactgtggaagatgctgtggtcataggctccggagccaaggtgctaggcaacatcacattaggctgctcctctaaaatcggcgcgggcgcagtcgtacttcaggatgtgccaaggggcgcgacagcagttggggttccaagcagaatcattcatgaggaccggaaatgcgtgctggacctggagcacgagtttcccgaccccgtctcatcagccatcgacctcctgttcgaacggcaggaagagctcgaaaaacgaatcaacatcctaagccacttccacgatatcgatcatgtggagttctcgcatgaccctaaggttgaagaggtatttaagggcgccgacgaaaagtctttttataagctgaataatattatcgaggatgaatga

SEQ ID NO: 3789 - DNA, 957 bp, synthetic construct
  source 1..957: mol_type = other DNA
atggtgaatatcccagagctaaagagaggcatagccaacgatatgactgaggcgatcggaaatacgccgctggtcaggttaaacaggctcacagagggactggaagccgaagtgctggtgaaagttgagtccttcaatcccgtgagtagcataaaagatcggatagccgtgaatctgatcgagaccgccgagaaggacggactcctgaaggaggactcagtcattattgaacctaccagcggtaacactggcattgggctgtccttcgtggcagctgcaaaaggctataagctcattctgaccatgcctgagaccatgtcgatcgagcggcgaaagcttttagcagtcttcggggctgaaattgtcctcacgcccggtagtgaagggatgggcggagctattgctaaggcgaaagagttggcggaaagcactccaaattccttcatgccacagcagtttgagaacaaggccaactctgagatacaccgcctgactacagggcctgaaatctggagggacacggatggtgaagtggatattgtcgtatccgcagccggaaccggcggcaccgtgacagggatcgctcaatacatcaagccgctgaaggctgagtttaaggccgtggctgtggagcccgcaagctctcagactctgggaaaaggagaaaaaggccctcataagatccaggggatcggccccggcttcgttccagacgtactggacgtggacctaatcgatgaggtcgttcccgtgaaggatgaagacgccggcaacacactcctcagacttgcacgtgaggaagggatctttacaggtatcagctcaggtgccgccacatgggccggattggagcttgccaaacggcccgagaacaagggcaaaaccattgtagtgatcttgccagacaccggggagcgctacctgagtaccgaatgggtctttggcgacctgttctga

SEQ ID NO: 3790 - DNA, 606 bp, synthetic construct
  source 1..606: mol_type = other DNA
atgactctcttcaaatacattataacgtcaagccctatcggcgagatcacaatcatctggcggaagaaaccacaattccaaattgaagagatcattatttccaatccaaatcagacatccagccagatagctaaagaaaaatacgaaaaggagggggagttagccatcaacaagaagtcgaagcagttgaacaaggtcctccgcgagatggagaactactttaatgaaaaggactataagttctccctgaaatatctgaacctagataagctgaaaccattccagcgggcggtgcttgaggctgagtttaagaccgagaaagggactgtgaacacctataaagacctcgccaaggaaattggcagcccgaaagcctaccgagccgttgggagtgcactggccaagaacccctttcccatcatcattccctgccacagaaccgtaaagggcgataggaccattggagggttcagcggatttgcaggaggtctggaaagcaagaagacacttctcgagttggatggtctgatgatccagggcaaaaagatagtgggcgacagtcctatcatctcactggacaagacgtctcagaccaaactggtctga

SEQ ID NO: 3791 - DNA, 648 bp, synthetic construct
  source 1..648: mol_type = other DNA
atgagaggattcaaaatgaacgacgaagagaaaatccgggagatctttaggcgactgaatgaagtttacaccatccgtaccttccatgaccacgacccatacaaggtcttgattagaactatcctgtcacagaggacacgcgatgaaaataccgaccaagctgcaaacgctctgtttgaagtgtaccccgatatttacgccgtggcagacgcgcctgtagagcacgttcaggagctcatcaagccggccggattctatcgagtcaaggccgcccggattctggaggtcagtcgcatactgatagaccagtatggcggggaggtgccacgggaaatggatgagatgctcaagctccccggtgtagggcggaaaacagctaactgcgtgatagtctttgcattccaggatgccgcgattcctgtggacactcacgtgcatagaatctccaacaggtgggggatcgccgatacaaaggaccccgaggaaaccgagcaggttctaatggagaaggtcccaaaggacctgtgggtggacttgaatgatctgatggtgcagttcggccagacgatctgccgccctatcggcccgcaatgtgataaatgccccattagcgacctttgtgactatgatgtgagcaaattagaatga

SEQ ID NO: 3792 - DNA, 1368 bp, synthetic construct
  source 1..1368: mol_type = other DNA
atgaacctgaaaataaagaactttagtaagatcaacggaactgtcaaggcgccctcctctaaaagctacagtcacagggccgtgattctcgcctccctcagcgaaggcaaatccaagctctttgatgtcctgtactcggaagacgtcctatcaaccatccgtgcctgtgaagccctgggggcccgaatcgacaaaaagaaagaaatcatcctgaagggggataaaagtcagaccgttgactatcttgaggtctatggtactgggggtaagttgcacaatgtgagtgacgacccgagcagcgacatgatcgacctggcgaactctggaaccacactgagaatcatgacaagcgtcgcagccctgagcgacaatgaggtgatattcaccggtgacgacagtctgaagacaaggcctatgggggccctgattgatgcattggagactttaggggtgaagatagagtcattaaacgagaacaataaggctcctctgaagatttacccaggatacgaaggaggccagacagacatcttgggcagcatcagctcgcaattcatctcttccatccttatttctgctcccctctcggagaacggggtggagctggaggtgtatcccgagtttgtaagcaagccctacgttgacatgaccatctccattcttgagaaattcggcatctccgtggaggaggaagagtatcagttccacgaaacctgcaagaaagagcatacggattgtctgggggtgaaattcatcgtaaagccacagaaatacattgcaagtgattatattgttgaaggagacttctcaagcgcctcctatttgcttgccgcaaccgctatcgcaggggggtacatcagagtgcaaaacctgttcgctgattccaagcagggagacaagctcattctggacattctggaggagatgggtgccaatgtcacggtgttcgatgattacgtgtccctgcggtctgatggcaacctgaagggaattgatgtgaacctatcaaatgctccagacttactcctcactgtcgcggttctcggcgccctggcagaaggcaaaaccaccatatctggagtaaagcacggccgcctcaaggaaaccgaccgcatagatacgacatgccgggaactagagaaactgggctgcaaacttgaggaatttgaagatggtatgactatctacggaaatacaatcagcgacggtatcgtcgagtcccacggcgaccatcggctggctatggcgttcagcttgattggcttgaagcatgacgtggaagtggaaaacggcgagtgctttgatgtgtcattccctaattttatagaggctatggccgagattggcatcgatctcgagctgaagtga

SEQ ID NO: 3793 - DNA, 1620 bp, synthetic construct
  source 1..1620: mol_type = other DNA
atgcaacgcaagacactatcacggtttgacgagatcgtaaaaattctcaggaaatatgatatggacaaggtgctgggccaaaccacccggaatcgaatcagcccattccggagtggcagcgagaacaaagaactgctgaaggaagacttcccagaacgcctcagactgacattgcaagagctgggaaccacatttatcaaattcggccagctgctgagcaccaggcctgatttggtgggcgagagaatcagcgaagagctttcccagctccacgatgataatccgcctattgactttgaggagatcaaggtcattatcgaagaggatcttggcggaaacctaaaagattttttcacggagttctccgacacagccctggctacagcttcaatcgctcaggtccatgaggcaaaactgcatagtggcgaaagggtagcggttaaggtacagaaaaccaatgtgcaggaaatcgtggaaactgacctgaatataatgaagttcctggccaacgaaagcgaccgattcaacaccacctttaagcaccttaatctgcccgccgtcgttaaggaatttgaccgctccatccacaaggagatggatttcgacaatgaactgatgaacatccggcatcttcgcgacaatttcattcacaacgacaagatcattgtgccaactatctaccccgactattcctctgagagagtccttacgatggagtacgtggacggggtcaaactgtctgaagttatcgcaggggatgacccaaaatacaataagatcctcattgcagataggatggtgcgtgcctacttcaaacagattttcctggacggcttcttccacgcagacccgcaccctggaaacattttcataacggatgacaattccatatgtttcattgattttggaatgatgggagtgctggatgaaaacttccggcaggatctggctgagctgatgatctgcttctcgaaccgggacatcgacgggctcatcaaccagttaatctatatgaacatcctaaacgtgaaaacagacattagcattttaaagggcgaccttaacgacttatttgccaagtactacggggtcgagctcagtcgtttcaacggtgtgattgaggatctgctctttctcatgcagaagtacgacgtgatgttgccaaacgagtttgtgctaatggcaagagggctgtcaatggtggagaatatcggcttgtcgctcgatcccgacattgacattgtggaaatcatcaagcccttcgcccgcaagctcatgattcagaagtataatcccaagaaaatggttcataacgcccgaaacacctttttcactgttgagcacatgctcagagccctgcctagcctggtgtcaaaaaccttctacaaggtggatgagggggagctgaccataaatatcgaagtcaagcagataagcgagataactaaccagatctccctggccatcattatcgctgctctcgtaataggttctagcttggcgatgatggttgaggccgggcctaagctctttggtctgcccttgcttggttttgtcggatttactataagtttggcgctgggcgtctttacggtggtgaggtatttcatggatttttga

SEQ ID NO: 3794 - DNA, 411 bp, synthetic construct
  source 1..411: mol_type = other DNA
atgagtcttgatcgctttatagaagcccaaaaagaagactacgacatggctttcagggaaatcaacaacggacggaagagaaatcactacatgtggtacatctttccccagatcaaaggcctgggccatagttccacatcccggtactatgggattgacggccttgaggaggccaaggagtacatggaaaatgagtatctgagcaacaatctcattaagatttcacagaaactgctagacttggagactgatgacccaatcgagatcttcgggtccaccgacagcaagaagctcaagagctcgatgaccctcttcgaactggtcagcgataacgaggtgttttcactggtgctggagaagtatttcgacggaaacagggatgagcgaacgctggatttagcaaacaaatga

SEQ ID NO: 3795 - DNA, 786 bp, synthetic construct
  source 1..786: mol_type = other DNA
atgaaaggaatcatcggggccattgccggagacataatcgggtcgacccacgagttccacccaatcaaaactaaagacttctccctttttaacaagaagtctcacttcacagacgacacggtcatgacactggcgatcgcggattggttaatcgaagataagaatagtcgggacgtcctgatacagaagttgaagttctacggtcagaagtatcccaatgccggatacggacgcatgttcatgcagtgggtgctgagcgagaatcccctgccttacgggagctgggggaacggctccgccatgagagtaagcccggtggcgtgggctggcgagagcctggaggaggtccaacagctcgctcggctgtcttccgaggtgacccacaaccatcctgagggcatcaaaggcgctctggccacggcagatgccatttatctagcccggataggtagtagtaaggaagaaatcaaggagcacattgaaatcagatatgattacgacctggataggacagtggatgagatacgtccaggctacaagtttgatgtgtcctgcgcagggtgtgtgcccgaatcaatcatctgctttctcgaggccgacgacttcgaggacaccatccgaaacactgttagcctcggcggcgatgcagacaccatggctgctattgccggacccattgccgctgcatactgggaagttccaaggaacatcgcatacaaatcaattcataggctcgactatcgcctgttgaacgtgctcattaaattcgaagacaagtttctttga

SEQ ID NO: 3796 - DNA, 729 bp, synthetic construct
  source 1..729: mol_type = other DNA
atgagcaaaagaatcattttcattctgatgctcattgccctcttgggcctgagcgccgtggccgccgttgacgcggaccccttaactgataaccagctgaatccaaccatcttctaccttgattttaatcacggcgctctgaatgatggtttcaaaaaagaatttgacctcttcgagtacgtaccaacctttgatagcgtagacctgtacaacgatggggaaaacgtctctgtcagcttctattccctgaaccctaccatcgacgtggataacctgaacgacgagatcatagattacacattcgaggtcatggaggaccccaaggccaacataacgaccctgaaggatggaatacggaacatctgctcggagtatggggcagacgacgtcaagattaatgtggatagcgtaatcggcgaggatgaaattcccgtgatctttacaactgaaggagattccatgcttccgaccataaaaagtggcgacaaggtcttggtgaataagtcccataatatccacgtgggaaacctagtgtcagcaaactccagcgagtatggccctatctgtaaaagggttgctgatatcgacggggattcagtttatctcgtcagtgacaataagaaggtgactcgcgagtactatgacgactactacgtggaatacaaggggatcacgacatgggtgaatattgacgacatcgacggtgtgattatcgacattatgaactga

SEQ ID NO: 3797 - DNA, 222 bp, synthetic construct
  source 1..222: mol_type = other DNA
atggtggaaatcaccagcaaaacaaagtacatggatctcctgaacgagtatcccctgctgaaaacggacctcgttaagaagaatccgaagttcggctttctggtcactccaatggggaaaatcagcctgtgggagtcagacctttccgaggtcagtgagcgggccgaaatgaccgtggaggacacagtaaacctattcattgaattggtgaactcttactga

SEQ ID NO: 3798 - DNA, 1059 bp, synthetic construct
  source 1..1059: mol_type = other DNA
atgaagcataggcttaatctggataataaagaccccaactatattctgttgaaggagatcttcaaaatcatggacagccggaaatccaaaagtatactggcttcctatggttttaagaacctgaatagaacaatttttacatttaaaatcatatttatcagcatgttcttcggaattgacattcccttcattttgaacgagctgaaatccaagaaggagcttcgcaaatactttaatattagtgaggtgctcacggcagaccaggtctataagattttctcggaaataaactccgaaaagctgataaagtgccttaacaggatcttgaactcaaggaatatggtgaagcggatcggcaagaagactttcattgtggatgccaccccagtggacgttgatatcaatttccaccgaaataagaagacgaaagagcatctggaaaaaattaacctcaagtggagttacagctccagcaagggttattacatcgggtttaaggcaactgtggtactcgattatgattcgatgaaccctgtgtgtattcttgtccactctggcgctcccaacgacgcgaaactgttcgaggagattttagagaacctgcagaaacggcgcatcatccggaaaggcgacacactcatcttcgataagggatactacacctacaagaactaccagatcgggatcagcaagtacaagatcattcctttcatcttcccaaaagagaagttcagcagaacccgattggacgacatcctcacctatccactagccgtctttaacaagacaaagagaatcatgaaggaaaagcgtctgtacaacagtctgaagatggaattaatgaaaaagatcgactcatgggaaaaatttaaacccataaggggcaaaatagaggattttttcaaactgctcaagcaaggcctgaatatgcgcgagatccacaagtacactccgaaaagcgtcgaaaaaaccgtttatctaaatgtgttcctgggggccctgatcatttcccagggattttactcaaagacgaccatccaacagctctctgagaactga

SEQ ID NO: 3799 - DNA, 2820 bp, synthetic construct
  source 1..2820: mol_type = other DNA
atgaacgcctttttaacgcttattatcttcatcatccacttcatttggcgaaatattctcacaaacaaagaaatccctaaagactatgaccataagagcgaagagaaatggcagaaaaaatgggagggagatgagatttacaaattcataggtgatggcacgagaccacgatacattatagacaccccgccgccttatccaactggactacttcatatgggccacatcctgaactgggcctatatggatttcaacgcccggtaccgtcgcgagaaaggcatggatgtgttattcccgcaggggtgggactgccacggtctgcccactgaggtgaaagtggaggagacacataatatcaagaaaaatgatgttacaagggcagagtttagggacatgtgcacagaactgacctcacataacatagagctgatgcgcggacagatgcgcagcgtagggttctcacaggactggagcagggaatacattaccatgactcccgagtacagaaaaagaacccagttgtcctttctcaagatgtatgaccagggactgatctatcagggcatccaccccgtaaactggtgtcctcggtgtgagacagcgatcgcttttgcggaggtggaatacagcgaaaacaccaccttcctaaactatgtcaacttcccgccagcagacgttcccgaggaggtcttggccaatgtggagggcaacagctatgttagatatgcagattgtcccgacaatgccgatgccagcgttcctggggtactcattgctaccacccggcctgagcttatgtctgcttgtgtggcggtggtggtgcaccctgatgatgagaggtacaaccagctcctcggaaaatacgtggaagttcccctgtccggccagaaggtgaaaatcattgccgacgaagaggtggacatggagtacggtaccggggcggtgatgatctgtacatttggggacaagactgacgtcgcctgggtgaataagtacgatctggacgtcatcgaagcaatctcggagcaaggtatccttactgctgctgccggccgctacgaaggaatggaactgcaggatgcaaagaaacagaccatcgaagacctgaaatctgagggatacctgaccaagcaggaggaggtggaccagaatgtaggccagtgctggcgctgcaagacccctatcgagatcctcgtcaaaaagcaatggtttgttggcgtcaccaaactgattgaggaaagcaaaaaggctagcaacgaaatgcggtgggtgccagaacacatggaaagccgtctgctgaactgggccgatgctatggaatgggactggtgcatcagtaggcaaaggctttttgccacccccatccccgtctggtattgtaaggactgtggcaaggtgatactgccaaaggaggagcagctccctattgatcccacaatagacaagcccctggagccctgccagtgcggctgcaacgagtttatccccgaggaagacgtgctggatacatggatggacagttccatatcccccctgtctgtggctgactggcctaatcctggctgggaggagattttcccatcaagcatccggccgcaggggcacgatatcatccggacttgggccttctacacaaccctgcgatgcttggccctcaccggccagaagccatttgatgacattgtcatcaatgggatggtgttcggtgaggacggatataagatgagcaaatcccgggggaacgttacagggcccgaagaggtgatcgcggagtacggtgcagatcctcttagattgtgggctgccaacagtgtcccaggctcggacgttgcctttgactggaaaaacatcaagcacggatacaagttcatcagaaaattctggaatgccttccggttcatctccatgcacatctttgatgaagagtctgagaaggccctgagcggagacatcgagtccatcaaggcaaagctcaacccaatggacacatggatctttgcaaaattgaacaaggtaaataagatagttgatacagcattctatgactataactatgctactgcaataaataccatcgagcagttcatttggcatgatttctgcgatgaatacatcgaagccgtcaagtacagactgtacaacgacgacattagtgaggagtcaaggattgccgccaaatacactctccgcactgttattgaagattcactgaagcttctggctcccattgccccattctttgccgaagaggtgtatcaatactttgatgaggataaaagcatccacagcacgctctggcctgagatcgaccctaacttagactccacgcaagtggaagaagacggggatttggccattgagctaattggggaggtgcgacgcttcaagtccgcttccaagatcccactgaatgcagatgtggaaagcacgacggtctacatcaatgagaagacagagaacctcaaggatgtctttgagtacttcgccgacgacattaaaggcacgttgaagattcaggactttaaggtcaccagtggaaagcccgaagtgcatgaaaaggtgattgaaattgagccagacatgagtaagataggccccacctttaagaagaatgcggggcaggtcattggattcataaaatcaaccgatccgaatgagatagcgaagcagctagaggaagacggcgagatagctatcgccgacggcgtcatcactgaggatttcctcaagatgaaaaaggaaatcgtgggggctagtggtaagaaggtggacattctgcaatcggaaaaactgggcgtgattgtagaagtcgtgcgttga

SEQ ID NO: 3800 - DNA, 357 bp, synthetic construct
  source 1..357: mol_type = other DNA
atgcacctgctgtggttctacgtggccatcgtacttgccattagtgacgagatccacagcaggatagtgtggggctatgtgcgggacttttacattgttttcggcgggatcataagcagttctctcgactcggtgatggagacctggattgtccatgaaggactcgaggcactgttccacatgatcttcgtgagcatcgtcttcttttcacttaagattgggtttctggcggctctgatccatttcctcctggatgtgtcccactccatcgtcatccgccacatgccctggctgccacatagagcattgcacttcgttattgaatgcctattctttatagccgtgtttggtttatga

SEQ ID NO: 3801 - DNA, 1656 bp, synthetic construct
  source 1..1656: mol_type = other DNA
atgcccgtgattaccttcaaatatcaggacttgaaagaccttgggattgacatggagaaggacgaactgatcaacactctgcccatgatggccagcgatatcgaggattacgatgatgaggagataaaagtggaatttttccccaaccggccggacaacctgtctgttgaaggggtggccaggtcatttaaaggttttctgggactggagaccggaatcccaaaatatgaaatagtgccatcaggggagaaagtcacagtcagtccggaggttgcagagatccgccctttcatcaagttcgccaagattgagaacgtggacttctctggcgataagatcaaatacatcatggacttccaggagaaccttcactgggtgatcggcagggacaggaagaaagtcgctatcggcgttcacaatgccgatgtcattagcggaccttacaaatacatagccactcccaaggacgaaaatgccttcgtggccctcgaaatggaggaggagatgactccaggcgagatattgacccaacataagaagggggaaaagtacgctcacttgattgataagtttgacaaataccctcttattctcgacaaggacaatcaagtattatcaatgccccctatcatcaatggagaactgacaaagctcacagaggacacgaagaacatcattgtggacgtgactggcaccgatgagattgccgttacccaggctctggatattttatgcgcatccttcgctgaagtgggcggccaggtcaaatccatggaggtggaatatgaagatagaaccgtcatcagccctgactttacgccaaaagtcaagaccgtgcacgtggacttgaccaacgagctgatcggcggcactgacctgagccccgaggatattaagaagctcctggagaaggccagatttgatgcgaatatcctgaatgagaatgaactagaagtcttcatcccaccgtaccgcgtggatatcctccatgaagtggacattgtagagaacattaccatccagtatcacatcaacgcagtggaggccaagttgcccgacataaccactgtagcaaacgagcataattggtttaaatctgagaagaccatccgtgagcttatggtaggacttggattccaggaaatcatgagcctaatgctgaccagcgaagaaagccaatatgagaaaatgaatgctgaggagatcgaccatgtgcaggtctccaagcccatcaccatcagtggcacaatgattcgaacaagtctgctcaactccctcatggaatttctggaagacaacaagcaccaggacctgcctcagaagatattcgagatcggagatgtcctctatatggatgagagcaaggaaaacaagacaaagtccgcgaagaaactagcgggtatgatttgtcacagctctgccaacttcacagaaataaaatcaactgtttccagcgtgctgtccaatctgggttacacgatggaaatatccaactcgacaaatgggagttttattccaggccgggcagctgatgtgattggggagtcgaaaagtgggaaagtggtcggtttctttggggaaatcagccccgaggtgattcggaacttcgagctcgagtacccagttacggcatttgagatcgagttcaagctgtga

SEQ ID NO: 3802 - DNA, 699 bp, synthetic construct
  source 1..699: mol_type = other DNA
atggcacaggtgtttaactaccactgcagaagctgtgatttctatttcacaattcacaactaccgattctgctttgatgacaaaatggactgcatcgaagagtacatggccttattcactgatagcgactacggcaacgattccctgatcaagggccgggtgatcgaaaagtactgttcaagctgccagaagaccgtacgcatctatcagttcaccccggactccagcatttacaccacagacgcttcttttgacttcctgaaattctacatccctaaaaagcatgactttcttctggaatccattgattttcataaggaactgattgaattgatagagaataatgagaacctcaaaaagatcagcagcttcatagaggataatcacgtgtataacatctatgaattgaacctcaaccactacctgaacaccaaaaggtccggattcaattcaaatcaactgataaaggacattgggctttatctggacgccattaacgataatctcgaccgcttcgacgacttcatcatctgcatgaatagtactgaggataattacaacctcgacctggaggggaagatgtttgatatggatgtctgccccgagtgcggagaggagttttatccaatcagtctaaagaacccctgtccaatctgtggcaaaaacacgatggagaggtcgcgggaaatgattgactga

SEQ ID NO: 3803 - DNA, 1668 bp, synthetic construct
  source 1..1668: mol_type = other DNA
atgctgttgaacgacaaatcggaactcctgaaatccctatccattttatttctgctaatagtgctcattaccagttttaattcagtttatgcaaactccgataactttgacagtgccaaaagttcagaccttatcttcagtgactctaacaacgtgtacatcgaaaatatcgattgctcggattctattctgattaacgtctacagcaacaaaaaggattctaatctggggtcctacttcgtaggtagcagtagcgattcctacctgaaggactctaattccgattccgcctttgtcgtgtcgaactcagaggactcctacctggaggactctaatctgaaccactctaagaactacctcagcagccagtcactgagtgcctctagcaagtcaaaggtgattctgaccacaagcaacctcagtgctagctataagaccaagaacttcaccgctaaactcactgacttgaacaaaaatccaatcgcaggggccaaactgagcttcgtcattctgtccaagacctactaccggaccaccgacaaggacggcctagcgagtctaatgattaacctggccccggggaaatataatatcagcacgaaattcgaaggggatagcaattactcatctgctgtggtgaaaaactccattacaatcagcaaaaagaagctttcaatatccagcagcgacctgtcaaagaaatacggggactcaaacagcttccaggtcaagatcacagataacggcaaccccatctctgacatcaaggtggctttaaagctgtcagcaaagacctattacaggaccagcgacaagaacggcttggtgagcctgcccataaatcttataatcgggaaatacattataaactcctccgtctacgataataagttctattatagcaatacaaattccaacaacattatcgtaagctctcaaaatccctataatctctccgtcttgaagtggggaaccaagggcaacatcaaaaagaacagtgtgcttatgaataacattccaaaaagcagcttaaccaacgccatcatctctgcttgtaataacggaacgcctctgatccagtttggcaatggcagcggcaagaaggtctttatcaatgcgggcgtgcatggacacgagctttccagccaggcggccgcattcaagctcatcaataatatttacaacagcaagaaaaagataaatggtactgtctatatcgtgcctgtcttgtgcccgaagatgactgaacagaatgcaagatatttcaacaacgtaaacctgaacagtgttgccaataagaatgggacagtttcaaacaaactggttaacctggccctgtcgctgaaggtggatgttctcggcgatttccattgtacacgcccaaatggagacccaggaaaaaacgtggctatgggaacctcgtctcccatggcaagcagtgccactcttgccaaatatatctccaagacgacaggatactcctccctcatttacaaaaaggccggtgaggagtaccccggcgctgtggaggacgtgtgcaacctcaaaggaatcacgtccgtgacttgcgaggcgctcactcctcacggtaagattgccagtggcagtgtgggcaagtcgtataacatgatgatagccctgttgaagtattacgggatcacaatctga

SEQ ID NO: 3804 - DNA, 429 bp, synthetic construct
  source 1..429: mol_type = other DNA
atgataataaacaaaagcttaaaaattaacagcaactctaatttccagataatcgacatcacaaacgagatcagtagaatcctggatgaaattaagttcaatgagccgaactcgatctccaacggcattctcaccatcttcactaaacactccacgagtgcaattgtcgtaaacgagaatgagcggggactccttagcgactttgagtttatcctggatgaactggtcgccgacaagaacaattacgctcatgatcggattgacaacaatgcctctagccacctgaagtcatttctactcgggtcatccgagacaatcccaattgtggacgggaagatcgacctgggaacctggcagagcatcttcttcgtggaattggacggcccccgacgcaataggaccattgatctggtgtttatcggcgaatga

SEQ ID NO: 3805 - DNA, 123 bp, synthetic construct
  source 1..123: mol_type = other DNA
atgatcacctgcaacgtctgcggtcacctgaatcccccaagcgccctagtgtgtgagaactgcgggtccgatctcagtgacagcccggacctgggcggcggattcgatgatgacgaccggtga

SEQ ID NO: 3806 - DNA, 519 bp, synthetic construct
  source 1..519: mol_type = other DNA
atgagtgagaatcaggaggacgaaacacgaaaaaccaataactatgaatttgacaacagcgggttcaaggccaaggactacgatgatgcagaggagttcgaaatttgggacctggagcaaatcttcaaggaccgcgtcaagatactgcaggatctgaacaacgagttctgggaggcctacgaaggatcaaaaacggaggcctccggcagacgtaaagacaaaaaagagcgcctcgaacccctgagcgtgagggtgaagccacacaccaaacggttcctcaaggaagactctatacttagcgcacgggaaatcctagaaatctatgaggaattttacaacggccgggacgattacatcaaatccttaaaaagggatgaaattcagttgaaggaggagctgtcggagatcgaggagaaactgaagaacgcgcaggagtttactgaaaagctcaatgagatcaagatccaaaaggatcaggagaaggagagagctaagaagatcaagattaatattgaatga

SEQ ID NO: 3807 - DNA, 144 bp, synthetic construct
  source 1..144: mol_type = other DNA
atgtaccggtacgagaacgacaggctagccagccacgagatcgaccccacaacgccaagcaagtatgtgtactggaacgcgaaacgcctcctggaggtcctgaaggaagtggaagcaaccaagaagcagaatcaggataaatga

SEQ ID NO: 3808 - DNA, 633 bp, synthetic construct
  source 1..633: mol_type = other DNA
atgtcagacaaagtgaaagccgaggaggttaaaagtgaagaaacacaggtcaaggatgtagacttagtcttcctgctcgataagagcggaagcatgtatggggtggtgcgggacaccatcggcggcttcaattcgttcattgaaagagagcgagagaagaaccccaacactcacgtgaccctggtgctgtttgacaccgagtacaatgtactgtacacccgcaagccaatagctgaggtggaggaactcactaagaatgaatactatgcagatggatgcactgcactgctggacgccattggcacaacaatcaaccgcctcgataggcaggtcaacaatgatgtcctgtttgtgatcacaacggatggcttggaaaacagctcaagggaattttccaagtccgacattaaaaacatgatcgcgaatcataactgggagttccttttcatcggggccgacatagacagctatggtgaggcactaaccctcggaattgacgaatcccacgccgcgaactacgagaaaacgtccgccggcctgggtgctttgtttgattctgttggcgacgcccacgaggagatcagtcgtgggggaagccttgatgacatgagctggaagagacggctggggtga

SEQ ID NO: 3809 - DNA, 1614 bp, synthetic construct
  source 1..1614: mol_type = other DNA
atgaccctggactaccagctatcggaaatcaaggaactcgaaaaccaggaggaactcatcagcatcatccaaaatcctaatctggatgatcttaggcgcagtgctgctgctagcaactataacttaaataataaggattttctgaaggaactggcgagcaacattaacctcaactacaagatacggcgtggggccatcaaaaatctcaatttggacgaccagtcactgttcatcgacatcggcctgaatgacgagaatatccagattcgccgcgcagccattaaaagaatcaccgaccaggatactctcacaattatcgctagggagagcctggactttgccagccgcttgattgccgtggaaaagatctccgacattgctgtacggttggatattgcagtgaaggactcaaatgacctggtgtcattcaaggcagttgatttgtacccgttcctgagcacgctgaactcgctgttttacaacttcaactgcagtgggcgctacgtagacaatgcactgaagctgattgactttattgacctgtgtctatcaaaagactttaacaaggagagccacgatgctctcaataaatttaaagactacctgaacgatctcatcaatattaagctgtcagacttgaaggaggtgccctaccacttagagaaaagcttctctaggcgcgtccttacgaacatggccatcctgacatgggatctggcctttgccataattgactatacagaagatgactacgaactgttaaagatcttcaatgttcaaaacgatataagaattaggctagcggcgctcaaaaagataaaatccgagcatttcctgatcgacattgtctccaacttccgaaccggacactccttgtatgacgataccctaggtagtctgcagaggagattctcgtacgatctggatgaatgcctgagcatccacaagttcactcaagaggagcttatcgacctggcagtctattccggattcaaaaagacccgtcgaatcgtggtgaagtacatcggggatatggagctgctcgagtactgggccctgaacgactcctatacgggctttcgaagggaaatagtcagtttgccaaactttaacaataaggagctcctgtctaagctggtgttcgaagacgattgcgacagagtgcggctctatgccgttcgaaagataaatgaccaggagatccttagcaaacttgccgtcgatgattcctattgggctgtaagagaggaggcggtgtctaaaattagagacgagtccattttgatcgatagggcccttaacgacccaaacgtcatgattatcatagccgctctcaagaaccctaacctcaatgaccggcagaccataaataagatcggcagttatcccaacttctgggtgaccaaaatcatcgccgagcatcccctcacagatgacgagactcttatcgacattgcactcaacaacccatggaactaccctcgggagaaggcaatcgagcgcatctacgataaagatgtgttaaaatatattgccgagaacgataaggacccctggataagtcttatcagcgaatcccggctgcggaaactggacgaaaatgaaaacgtgtga

SEQ ID NO: 3810 - DNA, 306 bp, synthetic construct
  source 1..306: mol_type = other DNA
atgacaaatcaggtgatcgaggacatggccgaggtgtgccatgatgagtgggtaaaatggagcaagaacattagtgaggaattggctctcgcaatagatgtcctgaagaaggacatcgagttcgcccacgagaagggcgtcgaaaacaaggaggccatcgaactggtggagaaatttgaatcccggctggaacgctggggggcactctggataccctatgaggatcttaccgaagaaatgaaggacagcgacaggaaatacgccattaagatgttcgacatcgctgaggaggcgctaaaagagtga

SEQ ID NO: 3811 - DNA, 240 bp, synthetic construct
  source 1..240: mol_type = other DNA
atgatcgtggagaaagtatctaaaaatgaccagtgggaagattacttcataaaaagcaagtcatccaacaaggaatacattatcacaatagatctgctggaaggcaccgtgagctgtgactgcgaggacttcaagtatcggaaggagaacctcaggtttggaggggtcagactaagtgataaggccaaccattgcaagcacatcaaaaagatcctcgagattcgcgacgatctggactga

SEQ ID NO: 3812 - DNA, 891 bp, synthetic construct
  source 1..891: mol_type = other DNA
atgaaaaagatttatctcatcttcccaatcttggcgggaatcatgtttggatcaaccgggatcttcgttagaaccctgactgaaaacgggatcgactcgaccacactccttttcctgcgattttcaatcgctatcatttacatgctaattgcaatcgtcctgactgacaaaagcctcataaaggtgtctaaggaagatattcccctctttctgatctgtggcctttgcatccttggactgaacctctgctacaataacagtataaatacggtgccactgtcccttgctgccgttctcttaagcactgcccctgtctttgtagtgatctttgcctacttcattttcaatgagaagattagctccgcgaaggtgatctccattattctagtgattatcgggtgcatcctgacaaccggactgctcgaggagagcatgatccccatcacatcgattggtctgattagtggcatcggctctgccatattctgggcaatctatacaatagcctctcgcaaaagcatcgacaggggcaagcacacgtttacaatattattctactcattgatcataattaccatcgtgacgatcccttttaccaactttgggcagatcgaaagcttcgtcctggccaatccggccaataacattatcttcctgctgttgcattcactgatttccttcgctctgccctatatccttatcaccatatccctgaaccacctggatgcagggactgtggtgatcctatcctctggcgagcctgtagctgccctcgtcttcggtgcaatagtgtacaacgagattcccagcccattgatgttctgtggcatcattataaccatcatcgcgctgattagcctcagtcggaagattgagatgaaaagtgaatga

SEQ ID NO: 3813 - DNA, 513 bp, synthetic construct
  source 1..513: mol_type = other DNA
atgaacaataaatactttctgggaataattatcattattattgctgtgctggccgtgattttcgccttttccctggattaccagactaactatttgaatgggagttccaacgggtcagtaaatactaacgagaatagtagcttcaaccagtcgaacaacggccttcaaacaaacgtccagctcaccatatctgccgagcagtcattcccaatggagaagatcgcggaggagatcaagacccaccctgcttatgagggctacgacgaggacacactcaaatggctcgaaaccttcaatggcagcatcatgttcacaagcaaggattactttgtggtcatggataaaaatgacgcagaaaacctgccgaccagcttcgtcaacgacgcatttatctacgatgacttcacgtgcgacatcattgaaaagcggtccctaggaaaggatctgaaggacatcatatatgtgaaaaacgttaagttcgaaaatcagaggatcgtgcccatgatcttttga

SEQ ID NO: 3814 - DNA, 216 bp, synthetic construct
  source 1..216: mol_type = other DNA
atgttcgagaaacagggatttatcgagcggaggatctttaaaaacaaggagagcttcatgtataaggggttcttctcccacaaggaagatttcatcaacaagggggatttcatcgagaaggaaaagagcctcaagaagcagaattttataaagggcaaatacgccaacctgatttttaaaatggacgacgactgcattatactgaaaggtggctga

SEQ ID NO: 3815 - DNA, 1032 bp, synthetic construct
  source 1..1032: mol_type = other DNA
atgaagaccacgctggacaataagagcgtcaaaaacaattcaagaaacagcaaaaacgtaaggagcaaccttcgggacaaccggagcatgcgcaccaatctgagagccagtcgcaacatgaaaacgggcctgggggacgttaacatccagagcaatgatgaggcgacaaagaaatgtccctcctgtggatctgtggatttcgagatcgactacgcccggtctgaggtctcttgtaagagttgcggtctcgtgctggaagaaaacatcattgattttagccccagcggaaccgcaataaacagggacgggcagaacctcactcagaacggagccccctgcagtattacgaagcacgataaggggcttgccacagatttcaagctggaaaacctgaagcatgacagggctcggtgggcacgtattcgcagattacagaaacaatctcgggtcagtggcagtcgtgaaagaaatttagccagggcattcagtgaattgtccttgctgatctccaatctgtccctgccgcgcgacgttaacaaggaggcggcttcaatctaccggcgcgctctcgagaaggacttggtccggggccgaagcatcagcctgctgatctccgcctcgctctacgctgcatgccgagtgtgccgggtgcccagaaccttcgacgagatcgcagaagtgtcaacaggcagcaaaaaatccatagccaaaaactataggtttctcaatcgagaattggcgctcaaaataaggcctgcctctccagtggattacatccctagatttgcctccatgctagagctctcgtccccagtggtggttaagtccattgagattattaacgagctaaatgagaagggactgatcgccggtaagaccccagccggggtcgctgcagctgccctttactattcatcgcgcgtgcttggcgaacgcagaactcagaaggagattgcttcagtggtaggggtgactgaggtcacaatcaggacccgatataaggagatgaccaaaggcctgaatctgaattga

SEQ ID NO: 3816 - DNA, 285 bp, synthetic construct
  source 1..285: mol_type = other DNA
atgagtcaggcaaggaacctggaaaaggacgtctccagtagcaaagcctattttaagggggagaatgagctcagcattaactccaatattaacgagaccaagttcaacgaaatgactgatagcgactcaaatttcttcggcacgcggttcattctgaatctgtcccttatcctgaagctaatattgaaaaaacagatgaaggtgatctcgcagatcgagatcatcagcaacaaccagaagacctcaaaacagtttcaatacaaaatcatacaaaagacactctga

SEQ ID NO: 3817 - DNA, 528 bp, synthetic construct
  source 1..528: mol_type = other DNA
gtgacaatcctggatggtatcctggaagacaataagaaattcgtcgagagctttgagggagaggagatgagtcaccatgcccagaaaaaattagctatactgacctgcatggactgcaggttgatcgacttcttcgaaccggctctggggctcgagcgcggagatgccaagattgttagaaatgcgggaaactccattgtaggggaagacgcaatccgaagcataggcgcagccctttacaatctcggcgctgaggaggtgttggtggtcggccacacggagtgtggcatggccggggctgacgcggaggcactcaaggaaaaaatgctggcccggggcatcaaggaagaggacatcgccaagtacgatatcgccgagtggattgggggctttgacgacgaggaagagaacgtcctcaacgtggttgaaaagattaagaaccacccactaatccctgaagtgcccgtgcatggtctgataatcgatattgtgaccggagagctgaaggtccttaaagaagattattga

SEQ ID NO: 3818 - DNA, 837 bp, synthetic construct
  source 1..837: mol_type = other DNA
atggcgaacaatggccatggccaccatggagccgctaacttaactccagaacaacagaaaaagatgatagagcaagagatgaagctctttgaacacatgaagaacatcaaatacaaaattgctgtgatgagcggtaagggcggtgtcggaaagagtaccgtggccgcgaacctagccgaggcattccagaaaaaagggttgctgacaggtattcttgacgctgacattcacggaccgaatattcctaaaatgcttgacgtcgaaggcgaggatgtaatcatctcaaacggggaaatgattcccgtcatgagccgcaacgggatcaaggtgatgtcgatgggcttcctcatcgacagccaggacactcccatcatctggcgggggccacagaagtcaggttccatcaagcagttcatggcagataccgcttggggcgatctggatgttctcatcatagacaaccctcctggcacgggagacgagccactgaccgtgctgcagtccttgcccgaagtcgatgcagtaatcatggtcacaacaccgaacagcctctcccacgaggacgtgctgaaatgtgtgggaatggttaagatgctccatatcgataagattgggctgattgagaatatgtcttactatgtgtgcccccactgcggggaaaagaccaatatattcggcgaaagtcagggggaggactttgcaaatgagatgggagttaaatacctgggcaacctgccactgacggagcaggtgcccgaaagcgccaataaggacagcactatggtgaatgcctatgccgagtccgaggtggccaccaagttctttaggaacgattga

SEQ ID NO: 3819 - DNA, 2997 bp, synthetic construct
  source 1..2997: mol_type = other DNA
ttgctgctggttctaatggctctcctgatcctcgcaatgtcatgcgtgtcggctagcaatgcaagtgataatctggacgatcttaccatttcagacagtaatagcctagacctggtatctacaagtaactcagatatcctatcttctgatagtggtgtgagttctgacgacagttccaatgatgcctcgggtgacgtgctggggtctgatgtctccagcaacgaaagtaataatcagtctcagtctactttggactcgaacaatcagtctcagtcggggctggactccgataattcaacactgttagactcacagtccaataaccaatccaatagtgaatcaagtgattcctcggacagttcagaaacagtgatcaaaaatgcaaccagcataagtgtgtcatctaaaaccgtggtgagaggcaattctctcaacattaccttgaaggacaacgcgagcacccttctctcgaacaagacagtcacatttaccttcaacggtaaaacgtataacaaaaccacaaacgctaaaggcattgctagcttaactctcacagcgactcctaaaaagtacttggtgaaaattgcctttgtgggtgacgagctttatgaggccagctcaaaaagtgtgaatgtcacgctcagcaagactccaaccagcatctcaaactccggcaagagtatcgtccggggcaaactttacaagctgacactgaaggatgcgaaaggaaaggccctgtccggcaagaaaatcagcatcagcttcaatggcaagaaatacaccaagacgacaaacagtaacggccaggtcaacctcaccataaacgtgaatgtaggtaaaacttataaaatgacctacaagtttgcaggagactccaactacctctccagttccggctctgtgagcattaaggtcaagatgggcacatccataatcggttccggctcaagcatcgtcaagggaaagtcctacacagtgaccctaaagaacgccaacggtgctgttctgtctaatcagaagattgcctttactctgagcggcaagacgtacaaccggacgacaaatgccaaaggtcaagctagcctcaagatagggttaagctcgggaaagacctacaatctgacgtacaagtatgccggcaatagttattacggaggatcttccggcaaggtgtccctctttgtcaagacgccgaccaccatgaagaacagtggcaagaccatcgtgagcggagagacttataaggtcacgctgaaggatgcggacggaaaatctctggctaataagaaagtgtccataaccttcaacaacaagacctacgccaaaacaaccaattccaacggtcaggccagcctgacaatcaaagggacctttggaaggtcataccccctcagctataagtttgcaggagacagcaaatacggacccagctccgggtccttatgcctgagggtcaagaaggcaacaagcctgaaggggtccgcctcgagcattgtgcagggaaaatcctatactgtgactctgaaggattccaacagcactccgctggctaatcagaccatcgtgttcaccctggacactaagaaatacaacaggacgacaaatgctaaagggcaagctagcctcaaaatcgggctggctgcaggaaagacttataacctggcttacaagtactcagggacttcatattataacggctctagtggctcggtgaaacttaaagtgaagttccccacaagtcttacaaactctggtaagtctgtgatgaatggaacgggctataatatcgtcctgaaggattctaaatccaatctggtctccaataagaccatctccatcggattcaacggcaagacctacgacgaaatcactgacgccaacggaaccgtcaccctattgattgatgccaacgtgcccaaaacctacaagatgacctacaagttcgctggggacagcgattacggcgcctcctctgggactgtcaacctaaccgttaaattcaagaacgccttcaccatctctcagattatctcagcgtcttccagcttgaagtcatatgtactgaagaataagaaagtgccagcgacagtgagtgtgaatggcgtctcccttaacctgacaagctttacatatcttatggccaaggccacaataagcattaactcaaataagacctcggggagcatcttgctggttcctgttgattctaactacacaaataacggcagccgtatcaacgccaatctctacaaggcaaactatattgatttggccaaaaaggtgatcagctcggctgaggcaaataaactcgtgcccaacagcgtttccacgaacatagggctggtgtcccatgacctctacagctttggccttgccaaggccttggtcttctttaacagcgatcactacctgccaaactacctgattcttagcagtgacgatgttggcgagaaacatagcactgtgatccctagcaacgcccgcggaaacgcctcccaattcaaggccggactcaacgaggccgagaccctgactgcggctcagatcgccaaatacctggttgcttcaggccacgacgccaccaactctgaaattaaagcactggcagcgaagctggtgtcagggaagacttccctgtgggacaaggccaatgcaatattcacctttgctcgcgacaacatcacctatagttattatgcggactccaaaaaaggcgcagccgggactctgagttcaaagagcggcaactgctgtgaccactccaacctcattgtatccctctgcagagcagccaatattaccgcacgcttcagtcatgctcagggctgtacgttctcaagcgggctcgttgccgggcacgtatgggcccagatctacattgatggggtttggtacactgccgacgctacaagccgacggaacagcttggggaatatcgtaaattggaacaccaaccactacaacacgttaaaacagtatgaccacctgtctttctga

SEQ ID NO: 3820 - DNA, 2478 bp, synthetic construct
  source 1..2478: mol_type = other DNA
atgatcaatcggctccggaaagacttcggccggattatcaagctcatcatcttccttatattggaggtgattcttttctttgcgatcacccagacattcggcgggatcataatccccgacctgaagactgcatttgctattatcatcgctctgagtatactaaacgccctcttgtggcccactatcacttacctatccctacggttcatagtcttgaccttaggatttggaaccttcctgatagacggggtccttctgtatatcatatccctgttcatccctggcgtgtccattaacggaattgccttattcagcattcccctgcttatcggactcatttccagcatgctgtcaataatcctgaacattgatgacgactacacctactatcgatacatcctggaaaaggagatgaaggtgattcataggaacatccccaaaaaggagggcttcctattcctggagattgatgggttatcttatagaatcataaaggaagccctagacaacggagatatgcccaccctcaaaagttggattgacaagggctctcacagactgatctcttgggaaaccgatcttagcagccagacaagctcatcccaggccggcattctgcacggtaacaataacaacattcctgccttccgatgggttgaaaaggatcacgagaaccggatcatctcctccaacggcaggacagattcgaaactgattgaaaaaagaatctccaacgggaaaggcttattgagtttgaacggggccagcagaagcaatctgttctccggggatgccaaggaccatcttctcacgttcagccgattcagcgattcggagagcatcaatagcaacagctggttctatctttactcaactccctacgtcattgcccgcatactggttctcttcatcttcgacatgattatggaactgctgtcacgcgtcaggcatctgttcaagaacattcagcctcgcctcaaatggcgcgggctgaagtattttgtagcccgtgcaggcaccaatgtagtgctcagggaagccacaaccttcacgttgatcggcgacgtctttgcaggagagcacaacgtgatctacgcaacatatatgggctacgatgagattgcacatcactcagggattgaggactttgactcgttctatagcttgaggcagatcgacaagcaattcaagcacatcgagaacgcgatcaacaattcaaacagggactacaagatcattgtgctcagtgatcatggtcaatcgaatggtccaagctttaagcagaagtttgatattagcctgaatgacctgctgagtgaatttctccctgaaaacattacggtccatagtattctgcacagtaatgatgaccacttcagcaaggagttttccatcaatcacctgggcagcgagaacctggagaaactggataaacgcgtggaaaacactaaggagaagctggatatcaagattgacaataccaaggaaaaactcgaccaccgtatcgacaacacaaaggaaaagctcgaccaccggatcgacaacaccaaagaaaaactcgaccacagaatcgacaacaccaaagaaaaaatcgacaccacaaaggaaaaactcgaccacagaatcgacaacacgaaagagaaaatcgataccacaaaggaaaaactcgaccaccggatcgacaacaccaaggagcgcatcgattccaacctggactacactaaggagaagatcaacaccagtttcgatggagaactgatcaacacatgggataagctgatcaaatttaaaaacaaatcctccaataaggcctttctggacaaactgagaaagaaacgaactctgatcaataacgatgagccaataatagataggataaacaatgtgtcagaggacctctctgaggatttggaggtcaatatagagttgtccaaggagaagatcacaagtgacaaggcggctcagacgattgttctatctagtgggaatctgggactgatttactttacggactggtccaatcgcatgagctacgagcagatcgaggatgcctttccggggctcatcaatcagcttgcttcacatgatggaatcggttttgtgatggtgaagagcgatatatatggcactctggttttctccaatgacaacttattttatcttgaaagcgaggagtatgtgggggagaacttcctggacaagtttggtaagaataccgtgcagaaacttaagcggactgataagttcgctcatgtgccggacattttggtgaacagcgaatacaatatggagaccaatgaggtctacgcatttgaagaactgattggctctcacggaggcattggcggaacacagcaatacccattcatcctctgcccaagcaattgggagtcggaagagatctttggtgctgagaacgtatacaaattctttatgaaagagattaacaagtcatggaatcagagcaagaataaatga

SEQ ID NO: 3821 - DNA, 489 bp, synthetic construct
  source 1..489: mol_type = other DNA
ctcgagaccaaaaagatgttcctggtgatactactttttgcatttattgtgatcggagggtcgtattcggtcttcgctatcgtatcaaatggcggaggcaacaattctctgtcttgggacaacattacaatcgccgggcccagcgggaacgtgagcgacgatggcaacaacagtgatgatggtttgctgggcatcttcaattccggcgactcttcagactcatcctcaagcaattcaaacacgggttccagttccagtcagagcagctcgtccccagcccggagtagcagctcttccagctctagcagctcccagtcgagttcaagccaatccagttccagtcagagcagttcctctagctcatccagctcctctagttctagccagtccagttctggatcgagctacgattcaggctccggaggcagcgtggttgaatccgggggacactactacgacgtcaactctggggacgagctcgactggtga

SEQ ID NO: 3822 - DNA, 507 bp, synthetic construct
  source 1..507: mol_type = other DNA
atggagaccgaaaacctgattattgtaatccttctggttctgatcgccatggccggaatcttctgcgcatttctatacacattcggcaccggaggcaacgacctcgccccggtggagccaaacctcacggcgaaccagaccaacgtgacaaacatgactaacgatacggccaacgcgacaactgtggacgctccactgaataatggggcctatggatcaagttccatagacagttctagtagcaatggcttgagtggaagcaacagctacaatggaggctccaacacctacaacggcggcagcaacactaataatggcgggtcgaacaccaataatgggggatcttccagctccgactctggcaacggcgggtctgtcgcacccgactctggaaatggaggttcatcagattccggtaatgggggttcggtcgctcctgatagcggcgggggcgggagctccagtgggggtagcgaacccgcagcctccggcgagagctcaaactga

SEQ ID NO: 3823 - DNA, 1497 bp, synthetic construct; identical to SEQ ID NO: 3377
  source 1..1497: mol_type = other DNA

SEQ ID NO: 3824 - DNA, 612 bp, synthetic construct
  source 1..612: mol_type = other DNA
atgaaagtcttactcattaacggatcgccccacaaggaaggctgcacctttactgccctgagcgaaatcaaaaaccaactagagaaggaggatatcgatagtgagattttctggatcggcacaaagcccgtccgagggtgcatcgcttgtaagaaatgcggacataaggagggaaaatgtgcctttgatgatgacccggccaatgagataatcgacaaactcattgaggcggacggggttatcgtcggatctccagtgtactatgcagggcctaacggggccctgtgcgctgtgctggacagggttttctacgcaagcggtggcaggttcgcatttaagcccgccgcttccgtggtaagcggccgccggggtggcgccagcgctagcttcgacagactcaataagtacttcacaatttcaaatatgccaatcatatcctcacagtattggaatatggtgcacggcaacactccagaggaagtgcgccaggacctggaagggctgcagaccatgagaaccctggcaaagaatatggcgtggatgttgaagtccattgagaacagtgacttgcctaaccttgaagataaaatcgccacgaactttgtgcggtga

SEQ ID NO: 3825 - DNA, 795 bp, synthetic construct
  source 1..795: mol_type = other DNA
atgaaggagcgcctggacaagtacttggtcaacaacaatctcatcgctagccggacaaaaagcaaggaaatgattaaatccaagaacgttaaggtgaacgataaaattatcaccaaggcaagctacaccgtccgagatggtgacaaggtggagatcatcaacgacgagtccctgagatatgtctcccggggcggcctgaagctggaaggggcgatagattcattcaacctcaacttcaatgagaagtccattatggacattggatcttcgacaggcgggttcaccgactgtgggctgcagcatggtgccaagagagtggtggctatagatgtagggactgacataatgacaaccagcctgagggatgatgatcgggtcgacctgtacgagcagatgaatttcaaaaatgccccaagtagtctctttaaggacattgacattatcgtgagcgatgtgtctttcatctcattaaagcacatcattgaccgtatcgcccaagaggacgatgactttgaattggtgtttctcatcaaaccccagttcgagtgcggaaaagagatcgccgaccagtttaagggaatcatcacggacaaggaggtccacaaggacgttattcttgagatcaaagaatacttcaaaactaaaggatactatctaattgacctggatgtgtctaagatcaaaggcaagagtggcaacatcgaatatcttggccactttaaggcaaatgagaaagtgcgcgagatagatatagaggaagtaatcgatagggccttcattgacgaagaaaactga

SEQ ID NO: 3826 - DNA, 393 bp, synthetic construct
  source 1..393: mol_type = other DNA
atggagctggactcggagcaggtggtaaaaaggatagaagagctccggaaggattacagttgttcccaagcaacgctaatgggaatctgcgaggttggcggcatgccaactgaggagttggccctgctggcaaagggattcagcggaggtatcggcggaacattctctgaagggacctgcggtgctgtgaccggcgccgtgatggctctgggctttctcggggccgacgaaaaacagattattagcgcgagcaaaaagctcttcaacgagtttaaagataagtatgagagtgtgacatgtggctacatctcaaaagatggggacgacaagtccccctgcgtggaagtctgtctgttcgccggggaaaaggtctgcgaataccttaaggagtga

SEQ ID NO: 3827 - DNA, 2094 bp, synthetic construct
  source 1..2094: mol_type = other DNA
atgataaagaaggtgaccaacgtgattgatgaaatcaccgacttcctattcggcctgaagatgaccatcatttcagggatatttctcttgattgcggttatttttatgatcttcggcatcgacaccccgatttatctaaatcctgcatggggtacagtcataattagcggcatccccatgctcctgctggccatgacacggctgattcgcgagaaatgggtgtcctcggctctgctcatcgccatagccatggtggcctcactcctgatcggcgaaatctttgctgccggtgaggtggcatggatcatggctctgggggctcttctagaggactggactgtcgagcgagctaagaaaggactgagaaatctgatcaacctgactccacagactggcagacggatcgttggagatagcgaggaagtgatttcggtggatgagataaggattggcgatgtcctgcgcatccttcctggggagagcgtgcccgtggatggtgaaatcatcaagggcagttcctccctggaccagtctatcatgacgggggaatcgctgcctatcgacaaggaggttggcgatgaagttttttgcggtaccatgaatatgtacggagccatcgacatcaaggccacaagcctcggggagaactcctctttgcaaaaattgatcgaccttgtcaaggccgcggatgagaagcaggccccgactcagcggattgcagacaaatgggccacttggcttgtgccagtggccttggccatcgccatcgtagcgtggctagtgaccgggaacattgaacgcggagtgacggtgctggtagtcttctgtccctgcgcactcatcctcgccacccccactgcgatcatggcagccatcggccaagcgacaaaatacggggtcttaatcaagagcggagaggcgctggaaaccctgggggccctcaacaccctagtctttgataagacggggacactcacctacgggaatctggcagtttcagatattatctccttaaaggacgatctggacgaaatggatgtactgcgaattgtggcctcttgtgagaaactcagcgagcacccattggctaaagctattgtaaactatgctaacgaagccaaagtggacatcgaggagcccgaagacttcaagatgtacccaggcaaaggggtctattgtaaaaacagttatggccacatatgtgcggggaactccaaattcttaaatgaaaataacattgattttaatattggtagcaaggacgacttggacgtggattccatactgaaccacctgaaacaggaaggcaaggctagtatcatagtggctttaaatggtgagatcatcgctcttatcggcttgagcgacgtcatgcgcgaggattctaaagccatgatcgagagcctgcacgacctgggaaccgagacagtcctgctgacaggagataatacggaaactgctaattacttcgctagccgtttgggaattggaaaggtatacggcaatctccttcctcaggaaaagcttgactggatcgaaaggtttaaggatgagggcaagaaggtctgcatgattggagatggggtgaacgacgcccctgccctgaaaaccgccgatgtcagcgtggcaatggggtcagttggcagtgacgttgccatcgaggccgcagacattgcactcctgggtgacgacattggcaaaatcccctatcttaagaagctgtcaaatagtacgctgttcaccattaaggcaaacataataatctccatgacaataaatgcggtggccattgtgtgctctgtgctgggactcctcaacccagtgaccggtgccatcgtccacaacgccggaagctgccttgttgtgctcaatgctgcactgctctacgataggaaattcgacgactcaatcaaaagaatcgacactgagaacgtggagcactcccactaccatttccacaacgacggcgagcattcccattctcatgaaggcattaggatcattgatgagatcaagacagacaacggaataaagcatatgcacattcataagcacgcactgaaccggcagagttgcgaggcttaccacaactga

SEQ ID NO: 3828 - DNA, 822 bp, synthetic construct
  source 1..822: mol_type = other DNA
atgagctgttacaaatactggggtaaaattgaggaaatcgccaacaaactcagtagctatggtgatctggataacgagggcctttccgcattggatgggactgatattgatgagattaccaagattcttgacgagattgaagtcatagcccacgataaggaaatcgacttcgactccgcaaagcacatcctagacgatgaaaagatgaacaaggccctgcagctgattcgtaaattctatgtgtacatcggagcgcgcctcgagcgggagaatgcactgacaatactggaggccgacgaccccaaggtcgctttggattcattccacttctacgatcgctacatcggcctcatagataacgagaggcaattagctaacttcaatgagaacaagacctttgtgttcctgggaagcgggccactgcccctaaccatcatcatgtttaatatggtgacaggctgcaagtgcataggcatcgaacaggaccccgacgttgccgacctgtcgcgcaaagtgctgaagcggcttgacctcgatgagggaattgaaatcgtgacagggaacgaaaagacgattgccgaactggattatgacatcctcatgatcgctgcatttgccgagcctaaagacagagtctttgcgaacgtctgggacattgtagacgaagacactccggtgctctacaggacttatacagggatgcgagctatcctgtactctcctgtaacggagaaggacaccaggggcttccataaggaggtgatgttgctgccaagaggaaaaaccaataatacctccgttttaatccggaaaatcagttga

SEQ ID NO: 3829 - DNA, 612 bp, synthetic construct
  source 1..612: mol_type = other DNA
atggaactgacaggaaaaaacatatcgtttaaatacagttccgggtcacgacagatcctcaaggacgtgaacataaccgtggacaacaagaagatcctcggattgtttggagacagcggcagcggcaaaagtagcctgtgcaagattcttgccggccacatcaaaaggtatgagggggaggtaaggctagatggccaggagattccaaagggcttcgaccccatccagcttatctaccagcaccccgaaaaggttatgaacccaaaatggaagatgcatgatgtgctgggagaatcctgggaagtgccggatgacctactggaggactttggcattcaaaagtcttggctgaaccgctggcccgcagagctgtccggtggggagttgcaacggttctctgtcctcagagcgctgaaccctaataccaagttcctcatcgctgatgagatgacgactatgctggacgccattacacaggtgcagatcttcgagtcagttctgaagatagtgaaagagcgcaatatggggctcttggtggtcagccacgatcgggacttaatggatatcatctgtgatgaagtcatctacctggacgacattaataatatttga

SEQ ID NO: 3830 - DNA, 1065 bp, synthetic construct
  source 1..1065: mol_type = other DNA
atgtccgacttaatcaatgtttcgaatatttccataagctttacacaatacgtaaaaggcctgaaccaacgagaactgaaggtgatcaccgacttgaccctggacattaaggaaggggaaatcgtcgctgtcttaggttcaagcgggagcgggaagagcctgctggcccacgccatcctgggaatactgccacacaacgcgaacctaagcgggacgatggtctacaagggcgaagtcctgactgaagagctaaaggaaaaactgcggggggatgagatcgcactgatcccccagtccgtcaatttcctcgaccccttgatgaaggtttcagatcaggtcatcggcgaatgcaaagacgaagccgaggagaaagaaaaacgtgccaagcaaagggctatctttgaaaagtacaatctctctgaggaagtggatgacatgtacccattccagctgtcgggtggaatggcacggcgcgtgcttgtatcaaccgctctcctaacaaacccgaagctggtgatcgcagatgagccaactcccgggcttgacgaggagtccgtagaggaaaccctgaaccatctgcgccagatggctgccgacaacgtgggagtgttgctcattacgcacgacatcgatgctgcactcaaggttgccaacaggatcgcgattttctatagcggctatgtcatcgaaattgccaatgccgaggatttcagtggcgaaggcgagaacttgctccacccatacaccaaatccctctttaaggccctccctcttaacggattcgaacttacaaagggacaccagcccctgcatggtgagattccggtgggctgtccctattatgacagatgccctcacaaaatggatgattgtgataagactcggcctcatctgatccctattgatgagaataaaagggtgagatgctttaagtacgagggagagataaaggacagtagcgaggagcaggtggtggacagttctgaggagcaggtggtggattcctcagaggagcaggtgatggacagttctgaggaccagataaaagacggcagcgaggagtga

SEQ ID NO: 3831 - DNA, 861 bp, synthetic construct
  source 1..861: mol_type = other DNA
atggatgagtcagccaacaagatgaataagtttgacgtgctgggcagcatgaacctgcggaccaagaccctgctggccataggcctctctgcctttatactgattgtagtggtgctggtcagttttttcatcgaccccactagcatcaccaccgattggtccattatgaaccagccaccttccctggagcacctattcgggacggactggatgggccgcgacatgttcacacgcaccatcaaggggcttggactgagtgtgcagataggcttcttcgcctccattttaagtagcatcattgctgtggcgctggctttcctgtcaagcttcaacaaatatctcgacagctttgtgtcgtggctgatagacgtgttcctctctattccccatattctccttatcatcctgatctcgatcgctctcgggggaggagcctttggtgtcctggttggcgtggcatttactcactggacttcacttgcccgggtcctcagggctgaaatcaaacgaatcaagacctcagagtttgtaacaatctctgaaaggttaggcaaatccaaattttggattgcgagaaagcaaatcttgccactggtcatcagccaggttatcgtggggacaatactcattttcccccatgcaatcatgcacgaggctagtgtcacattccttggattcggtctgagcccccacgaaccagccatcggtatcattctctccgaatccatgaaatacctggcgacgggcaattggtggttggccctgttccctgggctagccttgttgattcttgttctgctctttgacattgccggagagaacatcaagaagatgctagatccggcaagcgcaaatgattga

SEQ ID NO: 3832 - DNA, 993 bp, synthetic construct
  source 1..993: mol_type = other DNA
ttgctggacaaacagaaaatccttaagtttctggggtacaagctcgtgcggtttgctattctgttaatagttgtcatcctcttaagttttatactaatcgacatgagccctattaatccggtgaacgcttatatctccaatatggttgtgagccccgagaagattgctaaactcgaagcatattggggtgtcaatcagccgataactgagaaactgatcaattggctgggaaacattatcactggggactttggcacttccctgatataccggacgcctgtcttgcaagtaattgccgaaaagttcacagcctccctgatccttatgctcaccagttgggtgatttctggaatcctgggctttgctctgggcgtgctggctggatttaaacgcgacacctggattgatagggtggtcaaggtgtactgttacgttcttcaatctgcccctaccttctggattgcccttctggtggtcatggtgttcagcatctacctgggatggttcccagtgagcgggggcgttcccatcggggcgctgagtcaggatgtgtccttcttcgattggctgaagcacctgatcttgccagcatttacgctgagcatcttaggagtggcctcgatcgccctctatacacgtgacaagctgatcgaggtaatgacaacagactacttcctctttgccaaggcacggggggaatccggatggaccttgattaagaggcatggcatccgcaacattctactacccgcgatcaccttgcagttcctctcattctcagagctcttcggtggcaccgtgctcgtcgagcaggtcttcatgtatcccggcatcggtcaggcagccgtgtcagccgggcttagaagcgacgtacccctgctgctgggcatcgttatcttcagcgcgatattcgtgtattgcggcaacctgattgccgatattctctacaactttgtcgatccacgaataagagagggggaggaaaacggctga

SEQ ID NO: 3833 - DNA, 1614 bp, synthetic construct
  source 1..1614: mol_type = other DNA
atggacaagaagattattatcggagcagtggttgcacttcttgtgataatagtgggggccgccgtcctcatgggcggaggcacgactgaaagaggtccgggagagatcgtcgtggcagcctacagccacggaggagaaccagaagccgggttcgatcccattgccggctggaattattatgcggagccactcattcagagtaccctgttgaaaatgacccctaatggtacgtacgccaaagatttggcgacagactacgagatcagcgatgattataagacatacactgtggacctgcgaaaggatgtcaaattcactgacggttctgacttgactgctgaggatgtagcattcacatacaacgcagccaaggagtcgggcgcaagcctcgacctgtccgctctggataaggccgaggcccagggtgattacaaggtcaaattcaccctgaacaagtcagatagcactttcctagataagatggcctacatcgggattgtgccctccgattcgtataacaacgaatcatacggcgagaacccaatcggtagcggaccatacaagttcgtacagtgggacaaagggcagcaagttatcctggagaagaatccagattactatggcaagcagcctgaaatcgagaagataacaatcctctttgcgcagaacgaagctgcgttcaatctggccaaaaatggagaagccgacatcgtcgctgtgcctctcgaatatgggaaggagaaacttgacggctacacaatgtacttacaagacaccatcgacgtgcggggggtttctctgcccagtgtacccgataccggcgagctaagccccgatgacaactacacaatcgggaataatgttacctgcgatatagccatcaggaaggccttgaactatgggattaaccgcacggcccttgctgagggcgcactgaacggcctcggctatccttcctatgacggcattgctcatcagctgccatgggctaacaaagaggccgcaatagaagacggtgacgtggcctacgccaacaaaaccctggaagaggctggctgggttgacagcgacggcgatggaatccgcgagaagaatggaaccaaagcttcatttaagatctactacagcgcaagtgctcccgagcgtcaggctctggctgtcggggcggccgagcaagccaagcagtttggtattgagatcgaaccggtcggcgcggaatgggacgaaatctatcctaatgagttttcacagggcgtgctctggggctacgggtccacagatccctctgacatgtatggagagtactactcgtcctcagactttaatcccgcaagagtcaacaacagtgcggtggacaagcacatggatgacgcctttgctgagagccgggaggacagctacaaggattggagcgcagtgtcctgggacggctctacggggatttccccgaaaggggacgccaattggctgtggctgggggaaatcaaatatggttacttcgtgaacgacagggtggacatttccaatgacaccgccctcttacagcctcacggaggagacctgttcagtaacgtgtatgattggaccatgaccaacgctactgccgagaaatga

SEQ ID NO: 3834 - DNA, 966 bp, synthetic construct
  source 1..966: mol_type = other DNA
atggtgagtgtcaatctggaagccaaaaagactgtcgatgtgatgatcgagaaggcggacgatcttaacattgctgtgtccaaactcgagaacggcgcaactgtcattgactgtggtgttaatgtcgccggttcgttcaaagccggggagctctatactaaagtgtgcctcggaggactggcggatgtcggcatttccatccccggcgacctgagcgaaaagttcgccctgccgtctgtaaaaataaagacagacttccctgcgattagtaccctgggtgcccagaaagctggctggagcgtcagtgtaggagacttctttgccctggggagcgggccagctagggccttgagcttaaagcccgccgaaacctatgaggaaatcgactacaaggacgaagccgatctcgccatcctaacgctggaggctgacgtgttgcccggtgaagatgtagctcaatacatcgcagatgaatgcggcgtggatgtggcaaacgttttcctgcttgtggctccgaccgccagcctcgtgggatcaatacagatcgccggacgggtcgtggagaatgggacctacaagatgctggagtttctgaagttcgacgttaaaaaggtggtgcacgcagcagggattgcaccaatcgcccctatcgaccccgacggcctgaaggcgatggggaagacaaacgatgccgtgctctttggcggccgcacatactattatgtcaaaagcgaggagggcgatgacattgccgcagtggcagcgcagttgccttcctcagctgctgacggatacggcaagccattcttcgacgtgtttaaggatgctggatttgacttctaccagatcgacaagggcatgtttgctcccgccgaagttgttatcaacgatttaaccacgggtaaactatacaaggaggggttcgtgaacgccgagctgcttaaaaagtcctttgggatagagtga

SEQ ID NO: 3835 - DNA, 957 bp, synthetic construct
  source 1..957: mol_type = other DNA
ttgatcaccactgtggtaggtagttttgggattgacctgaaggagcctaagacgctaggcgaaaagataaagtccagcattggaatgtacgacccctataagatcgccatcgaagaggctgtcaaactgcagctggactgtggcatagacatcatcggggacggtcagcctaggggggatatggtaggcagctttgtgaagcacattccagggttctcttatgaaatgaacagctccgtcatcgtgtctaagattagggctcctcaggtggatatcatgatcaaggacttaaaatacgctaaaaaggttctcgaagcggagataaaagccagaaacatgagtggggacgaggccaatcggaaaggcgtgaaacttatgctgacaggacccagcaccattgtgcactcatcacggctggagtcgttctacaaggagcgtaatccggccatcattgactgcgcctacgcgctgcgacgcgaggtcgagagcgcagagaaggcaggagccagttatgtccaaatcgacgatccgttcctgtccaccggcatggtcgacctgaaggttgcaaaggagtccatcggaatcctaacagatggcatcgaaatgcccatggcaatgcatgtctgtggtaatctggatggctgcttcaaggagattgccaagtttccaattgatattttggactgtgagtttgccggcaacaacgtgaacatcgggattcttgaagaaaacgctagcttgctctcaggtaagaaactcggattcggctgcgtggattccgctatgaatgcagttgacgacaaggaagaggtaagagccctcgtgcagaggggaatcgacgcggtgggcaaagaaaacatgctgcttgatcccgactgcgggctgcgcaaagtggatatcccaatagctatggagaaactcaaaatactcagcgatctggcccgggagttcaattga

SEQ ID NO: 3836 - DNA, 309 bp, synthetic construct
  source 1..309: mol_type = other DNA
atgagcttctgtctcgaaacatatctgcagcaaaatgatgattacaaaatcctaatacagcggagcggggtcaagcagtgctacaagctcatcgaagacaatgcaaaagagatcatccatgtgaaccctggcgacaaggtacttggcgcccgcctgattggactgccccccataccagtgggcattaacgaggaggaagggaccatcttgattacgtacaccaagccgtgccacggaactgccgcgatcgagattccaatctcccaggaagagatccagaacgtgagggacatggacattggtgcttga

SEQ ID NO: 3837 - DNA, 462 bp, synthetic construct
  source 1..462: mol_type = other DNA
atgaaagctttagtgctgctcggctgccctgaagccccatcacagacgcccatcggactgtatgccagctacaagctaggccagatgggctacgacgttacagtcagcagcaaccccgcagcggggaagattttggacattagtgaccccgaaggggtgtacgtgaaaaagcgggtggatattgagaagtgcctggacgaaatcgaagagggagactacgacctcctggtcggttgtgtgcacaaggatgccgcggccaccttctttataacatattaccatatacttaaatgcaaggctctggcccttgtcttctccagagatgcagaggaggttgcagagtttgccgatatggtggagtcctcgaccgatgctgacatcatcgccgtgagggctttccacaacccgaatccaatcaaagtacgcttcgacaaatatctgaagactctcgaggaggaatga

SEQ ID NO: 3838 - DNA, 510 bp, synthetic construct
  source 1..510: mol_type = other DNA
atgggcctgatctccgacacgcacatcagtgaaaagcgggggaagctgtccaaccaaatattggaatctttcaaaggtgtcgatttgatcctccacgctggagatatatcctcacagactgtgctggacaagctcaacagtatcgccccgaccatcgcagtggaaggcaataacgaccgggctcgaaagaccctggacctcaacccctctgagattatagagatcgatgggatcagaatcctgctgattcatggcgataagctgccaagcagggattttgacaaatactgcaaattcgcactcaaggagaacgcggacattctaatatcgggacacagccacaggccacaccttgaacgccaggaggacattcttatgattaatcccgggagccctaaccgccccatcaagagcgacgcctcaatcgccattttaacaattgatgaagagaaagagcataaaaataagctggacaaggtgaaggtagagttcatcaaaatcgagaaatga

SEQ ID NO: 3839 - DNA, 117 bp, synthetic construct
  source 1..117: mol_type = other DNA
atgctgatctgtcctatatgcggctaccccctggacagcgacggtcggtgctggaactgcggatactgggtggagacccacccgctcgatccattccagcccgggagcggctattga

SEQ ID NO: 3840 - DNA, 129 bp, synthetic construct
  source 1..129: mol_type = other DNA
atgctggattgccctgtctgtggcagcgaactggacgagaaggggcagtgctgggtgtgcggatacaacatggccccatgtgaccaccccgacgattatgattacgacgacttcgagccgcagctctga

SEQ ID NO: 3841 - DNA, 504 bp, synthetic construct
  source 1..504: mol_type = other DNA
atgacttttaaaaaggagaagttcatcaagctcttaatgtttatcatcagcaggagctccgacaactataatgtaggcaaaacggtcctgtcgaacatgctctatttcattgacttcaactacttcgaaacctacggtgaatcactcacaaacgaaatctacattaaatcctatctgggagctgtccccagccactttgatgagatcgtgcgggagctaatttattacaacaagatatacagacggagggagccgtactattaccatcacatcaacaaatattacctgaccagcctgcacaatattgacttggactataaggaattgattgtggtgggcggggtcctggataatctgatggggttcagtgccgtggagatagttgattacatcagtggagacgccccattcaagatcgcaggctttgacgagcctctggactactccttcgtgttctaccgagactttgattactcagtgcgcaatcttgattattactggtga

SEQ ID NO: 3842 - DNA, 1809 bp, synthetic construct
  source 1..1809: mol_type = other DNA
atgaaaaacatacgccagaccctaagcactattggcaaaatgctcagtcccctaaaaaagagcattccttccatcttcctcatcttcattttcctgcttatagacgtgtactgtaacctgaccctcccgagctacactgccgacattgtggacgtgggaatccagaataccgacttcaactacataatcagcgtgggtacaatgatgatgaccatggtcttgataggagttctagctaccatcgcgttgtcctatttttccagcaaggtttcagccgcttatggaagggacttaagggaaatcagctatgaaaaaatccttaaattctccaacttcgaactgaacaagatcagcagatcctccctcattacacggaatacgaacgatgtttaccaaatccagatattcctgggcctgctttttactaccatcctctttgcacccattctggggattggcagcatcatcaaggcaatggagcttggcaccgacctcctctggattattgtggtgacattcgccagcgttgctattctcctcgggatcatattcataagaacggtgccctactttaaggtgatgcaggagctgattgacaagatcaaccagacatccagggaaatcctgatggggatgccagtcatcaaggccttcatccgacaggattacgaggaggaacgctttgaaaagactaatgaggagttcaaggaggtgaatctccatgtcttcaaaaccctcttcctgatgattcccgcaatgacgatgatattgaacgtgatgatagtcttgatcctatactttggggcctacgatgctatcaatggtaagattctgactggaaccatcatcgcattcatccagtactccacgcagattgtcatctcgttcctgatgctggggggctttacaatcatgattccacgcatcctggtatctgggcggcgagtgggcgaggtcctgaacactgagatcagcattagtgacggacctattgataagattgatgagaaccccaccatagaatttaaaaatgttggctacagctacccaggaagtgagaaggagaccctgaaagacattagctttaagttggaaaagggcaagaccacagccataatcggtggaaccgggagcggtaaatccacaatcctcaatcttattcctcgcctgcaggatgtgacggagggccaaatcttagtaaacgacaaaaacatcaaggagtataagctgagtacactgagagagcgaatctcatacactccgcagaaggctattctgttccagggtaccgtacggagtaacatgcaagtgggaaaggaagatgccaccgacgaggagatcgagaaagccctgaatatcgcccaggtggactttatagagagtttggatgacgaggtcacacaaggggccagcaacttcagcggaggccagaagcagcgtctgtccattgcaaggagcatcatggacaagcgggacttttacctgtttgatgactgcttctcggcgctggacatgaatacggaggcaaaggtgaaggaaaaccttaaggacttgaaggaaagctcttcaatcctgataatttcacagagaatctcgacaatcatggatgctgacgaaatcatcgtgctggatgaaggcaagattattgataaaggcggtcacgattatctttataaaaactgcgacatctataaagagattgtctcttcccaaatcgaacggtcagaggacttaatctatgataatgaagagactgccagctttaccatcgattctagttcaattaaaaaagccgcggggggcaaatga

SEQ ID NO: 3843 - DNA, 1788 bp, synthetic construct
  source 1..1788: mol_type = other DNA
atggccccacgaccacggagattgcccccggagaagcccactaatgtaaaagaagccatcaaaaacatttttgggctcctgatgggatacaagctaaagctaagcattacagtcatttgcggtatcctatccactgtattctctgtgataagccccctcctgattggccttgctacaactgccatcttcgatggcataaactctgggaacatgaatctggagtatatcattaaccttttaatcaccgttgtgattctctacatcattagtgcagtcttctcctatctccagagctatttcctcttggagatcaccacagacatcagctacaacctccggaaagagttgattgagaaaatcacccacctatccatgggggagatggataaaaacacacggggagacatcctgagtcgaataaccaacgatgtagactcgctccagaccggtcttaatcagacattcaaccagctgctctctggcgtgattaccatcgttggcgtcacaatcatgatgctgtccatcaatatctggctgaccctggccaccattgtgctgattccaattgccttcctgatcatcacatttgtgacaaagcattctcaagactattatacgaagcagctcacctatagggggagcctgaacggacagattgaggagtcatttacgggccacgaaatcattcgttcatacaatcaggaagagcagtccatggaaacctttcgggaagacaatgaaaactggtacgagcaggaatggaaatccaagttctattcgagcctctccgcccctctgatgaacttcatctcgaacttccagtatgtgataattgcagttctgggcgcggtcttcgtgctgcagaatgcgatagctgttggggacatactggcctttatccagtactctaaaaacttcacgactcctattcagcagataacccgcgttatgaacatggtgcagactgcaatggcagcaagtgagagaatatttggctttttagagatcgaaaacgaagagaacccttcaaaagagaagatcgagaagatcaatgactcaatcacctttgaaaatgtcactttcggctacacaaaagatgaaccggtgatcaagaacttgacctttacggctaaaaagggcgaaaagatcgccattgtgggtgagactggggctggaaagaccaccatcgtgaagctgctgatgagattctacgatgtggatgacggggagatcaaaatcgacggagtcaatataaacagctacgataagcacagcgtccgctccctggtaggtatggtgcttcaggacacttggctctttaatgacacgatctacaacaacatcaaatacggtaagcttgacgccactgaggaggaaatcattagcgctagcaaggaagctcatgccgaccacttcattaggcaaattcccgaaggataccagagcgagctgaatgaggacgtggacaatatctcccacggccaaaagcagcttttgacaattgcgcggacgatcatatcaaacaagcagatcctcatcctggatgaggcaacgtctagtgtggatacacgaaccgagaagatcattcagaaggccatggataaactgatggagaagcgcacaagtttcgtcatcgcccacaggctgagtaccgtcagggatgctgacaagatcattgtgattgaggatggacgcatcatagagcaaggcagccatgaagaattgctggaacaaaaagggtactactataataccttaaacactcaaagaagggagaatattgtgtga

SEQ ID NO: 3844 - DNA, 603 bp, synthetic construct
  source 1..603: mol_type = other DNA
atgaatggtgggaacaacctggataataactgtaaaaacctgggcaatatccttaaccccaccgaggtgaacaatcagctcttgttccataagttcatcatgatcaatgagatcctggataagcgaaacaagaagcagaatccagagatgaaaagcattacgaagggccagggacgcctcattgttctgttaaagagaaaggacaagctctcaaccaaagagctctctgaaatcctgaatgtcagcgtaagctccctgaatgaaactctaaacaagctggagcaaaagaacttcatcaaaaaggtcccgtccgagaaggacaagcggatacttctggtggaactgacagaagaggggaggcagctcgagtttaagaaccacgaggacattgacatctttgacttcttgagcaaagaggaaaaggaaaaccttaacgactacctgaatcagttgacactatcgctgcacgagaaattcaaaagggaggaccctgaaaagtatgccaagatagtgaaaaaccggaaggagatctttgataaatacttcaaagatgaaaacaacaatgaaacctgctttgagttcattgattgcagtaaaaaatga

SEQ ID NO: 3845 - DNA, 738 bp, synthetic construct
  source 1..738: mol_type = other DNA
atggccaatgcaatcatcacaggtggatcaaggggcatagggaaagctatggctctaaagctgggtgagctgggctacaatgtggtgatcaactatcgcagtgacagctccaagcagctgactgaagatgtcatcgccgaaatcaaggataagtatggtgtagaggccatagccgttcaggccgatgtgtccaaattcgaggattgtaaaaagctggtggaggccgccgttgatgccttcggcgaagagatcgacgccctcgtaaataatgcaggaattaccaacaactctaacttcattgacctcgagcccgaaaggtacgaggcggtcatcaacacaaaccttgtgagcatgatgcatatgtgccacctgtgcctcccatatatggtggaccgcgacaccgcgattgtgtgcacggctagcgtgggcgggctgaccggcgtgataaatcaggccgactactgtgctgccaagacgggcgtgattggcctgtgccgagcactcgcactggagtttgcacccagaaaagtccgggtcaatagtattgcgcccgggatgattatgaccgacatgctccggggcgtcaaccaggacgaattgaacgctctggcggcaacaatccctcttggacacatcggggaagttgaggagatcgctggggccctagaatacattttgactgctccatacttaaccggacaggtcatctcgccgaacgggggatttgtgctgcaatga

SEQ ID NO: 3846 - DNA, 1032 bp, synthetic construct
  source 1..1032: mol_type = other DNA
atgaaaatatggattgatatctcaaatgctccacacgtgagattcttcaaagatgtcataaagtatttcgaagatgaaggggacgatgtgctggttaccgcccggaagtttggcgacattcacaagctcatggatatgtacgacatagactttatctctgtaggaaagcacggagtcacattggaagagaagctaaaggaaagtgccgagcgggtcgtgaacctggcggatctcatttccggagaaggcttcgacgttgccctgtcaaagcattccattgagctgccaagggttgcatttggcctgggcatcccaagcctgtttgtgctggataatgagcatgccatggctgccaataagctgacccttccattatgcagcaaaatcattgtgccaaacattatagacatgtggaaactaatggagtacggggctaatcccaacgatataattcgctataacgggaccagtgagctgatgcacttcaataactttgtattcaacgagaacatcttcgaggacctgggattggatctacccctccaacgaaccatccttatgcggcctgagccctctctcgcgtcctacctgaatacagactgcagaaaaagcgttctctcccctgtggtagatgtcttaaaggagtacgcaaacattctcattctgcccaggttcaaggaacaggccgagatctttgaaggcatcaagaacgtgactatcctgaagccgccggtggacactagtagcatcatcaaggcatgtgacctggtcatcggagccggcgggacaatgaaccgtgaagctgccatccttcagacacccgtgatcagctgctaccctggggacactttgtctgtcgaccagttttatgtgaacaacggtcttatgtaccgcaccaccgatctggaggacatcacgaaacaggcactcagcttcattgtgaatccccacaagcctatcgacttcaaaacggatgacctcttcgacttgatcgtgaaaaatacgtatgagctgggcggttcgaagaaatga

SEQ ID NO: 3847 - DNA, 762 bp, synthetic construct
  source 1..762: mol_type = other DNA
atgcacaaggtggcggacgtggaagtcgccaagaacataatggatgccaatgccaaactggcacacaagaacctccacctcctggaagaccacgatatcttctgcgtcgactttgtgggagcaatcggctctggtaaaacagccctgatcgaagagattatcgagaatgtggatgaaaaaatcggtgttatcgccggggatgtaatcagcaagtttgacgctggcaggattgagtcccacaatgttcccgtggtcggactcaacaccggcaaggagtgtcacctggatgcccacctcgtggggcacgggttaggcgacctgccgcttgatgacattgactacctattcatcgaaaacgtgggaaacctcatctgtcctgtcgacttcgagctgggctcacatatgcgggtggtggtggtcagcgttactgagggggacgacaccgtagagaaacaccccctgatcttccagaactctgacctggtgataatcaataagattgacttggcagaggccgtgggagctagcgtggataagatggtatgcgatgcaaaacgccttaacccagatgtgaaggttattacgtcaagcctgaaagagggcaaggggttggatgaagtcatagcggccattgaagattgcaaggctcacgtcgctgaacatcaccaccatcatgaccatgagcatgagcacgaccacagtcacgaccatgagcactcgcacggccatgaccactcccacagtcatgagcattcccattga

SEQ ID NO: 3848 - DNA, 375 bp, synthetic construct
  source 1..375: mol_type = other DNA
atgcacgaacttgccatggcccagggcatcctgaatgccgtgctggaaacggcagaggctaacaatgcaatcgaggtaaccgaaatagttattgagatagggaagttggctatgctaaatcccgagcagctgaaatttatgctcggtgtcctgtgttccgagacaatcgcggagaacgccgaactcatcgtggaggatattgacgtggagatcaagtgccacaactgtgacttcgaaggagtcgccaacgtggatgacagcgatcattacgcgccgatgattctgtgcccaaaatgcgagagtcacagggtggaggtcaagaacggcaaggacgtgaccgttcggaacatcagcattgaaaaagaggacgaatga

SEQ ID NO: 3849 - DNA, 921 bp, synthetic construct
  source 1..921: mol_type = other DNA
atgatcatcgggggcagcgcatcacagaaactagcggctaatgttgccaaggagcttggggacgttctgtgccctatagaaaccaaaaaattccctgacggggagagatacatccgcattaagagtgaggtggataaggaagttacaatcatccagtccacgggatttccccaagacgaaaacctcgtggaactgttattcctgatcaggactgtcaaggacctgggtgcggagcatgttaaagtggtggtgccctatcttggatacggcagacaggaattgaggtttaaggatggggaggcgatttccgcccagctggtcgctaacctaattgaggagtcgggggccgatgagttcatttccatcaatctccatgaggacagcgtgcgagacttcttcaacattccaactgccaatcttagcgcaatgccccccatcgcagagtacattgctaacaccgtggagaacccaatcattattgccccggacaagggcgctttgggatttgcagaagagatcgccgaaatcctcggctgcaattgcacgtacatgagcaaagtccggctgggtcctgataaggtggaaactaccattgtagacatccacagcgactttgacagcgaggatctggctaaagtgaagaaagacagcaaggtcaacatagattctgtaaaggataaggaggcaatcatcattgacgacatcatagccaccggaggaacaatcgtcaatgccattggcatcctgaaggagcacggcgcgaaatcagtagatgtctattgtgtgcacccagtgctcgtgaacgatgccgtgctcaagatatctgcagctggcgcccgggaattggccagtacagataccctgaaatcagacgtcagttccatatccgtggctaagatcatagccgacgtcctgcgctga

SEQ ID NO: 3850 - DNA, 1104 bp, synthetic construct
  source 1..1104: mol_type = other DNA
atgcttctgatcgctcagaatcactttcagctgatacttgaggtagggttgattctgcttgctactatgatcttcgtcatcaatctggtgccgttaagcctgagtgtggttaccttcctctcattgttcctctctggcggatttaccatcctatttggagccgacctcgctttcctggtactatcattcgggcagcatgagtttactcaccctttcggtcctattgccctactggctattgtaaccgcacttgcctcgctgaaggtgatggaagggtcgggcgtggatataagtaggctcaaaaacatcgtctacgtgtttctgatagccatcaccgtcttcggcggagcaatgcacagatcattcctactgctctggttcatcgggctgttcatcggttacacgatcatttccaaatcctttcgccaaaagagcatcctcacaatccggagaatactgatgtttttcctggcagccctggtggcattcgggttgcttgagcttgtgtcccggattctgagcatggaagtgttctctcccctgctgaggattagcagactggcccagaactcactcgccagtctaaaattggtcatcggaaatacgcagctgatcgggcacgaccccgccagctcctattggtctgacagtacgggatttgccgatggctacattagcctccccatgcagttcatcttgatgtttggcctgccattcccattgttctttgggctgctcgttaccaagaaggataccatcgactatatgctcccaggcatcttcggctacgcctatgactttggctacttgacattcgtgatactcctgttattagtcctctttaccatcataattggcctgctggttcttcgcgaataccgacttaaacgggagaagaacaacaagaaatatctgggcaaggaagtgctcttgattggttcccttactggatttatcgcgcaagcgatcattggtctgttcctctttaacaggacaatcaacggaatggcgctgctcacattcctgttcctgggctccctggtcctggctcatgtggtgacaattcgccgagatagcaatgaggttttaagccagcagatttga

SEQ ID NO: 3851 - DNA, 480 bp, synthetic construct
  source 1..480: mol_type = other DNA
atggtaaacataaaaactgttgcactggccgtgatcgcaatcatagtcgtgctcctcgccatcttcgcggtgtccaacgtagtgattctagcgcaggatgataccgaggggggcatccctggggttgacatggctgccttatggagtcttaatggtggtttccaatggatttatcccggaagctcttttgacccagaaggccgcaccctgcacaatatctacatgctggacgacccctatggcgaggtgaagacaatcatgcagtacacatacaacgtggaccctcacattctggtgataattaacgaccaggctgctgcccatatctttggggacaacatcttggatacgatcaggcagcatgattgggtcgaaggccactcccggggcgatgccgtcggaatgagcatcacctcagtcaatcccctgccgataattccagacattctcatgggaaacattaagatcatgttcatctga

SEQ ID NO: 3852 - DNA, 2175 bp, synthetic construct
  source 1..2175: mol_type = other DNA
atggaggaaaagaaaatagaaagcacagatgttgaggtgaacgagtctaaagacctgaacttagattccactgtggagaacaatgaaattgacaagactgaggagttggacgcttcctctgaaattgatgagaacgaggaacttggcacgtcctccgaagtacgcgagaccatagtcattgacacagccagtgaggtggtggaggcggatgtggtaagcgaaaccatcgacagttctgaatcggtcaaggacgaggaggaggacagcaatccccttgatgtagaatacgttgaagaggatggcaaacgtaggataaagcccatgctggattacgagtcgctttcaaacacctcggagattgaagtgcctccactgctcatcgaccaggtcataggtcatgaggaatctgtggagacaattaaaaaagcagccaagcagcgccgcaatgtgctgctgataggtgatccgggcgtggggaagtcaatgctcgccaaaggaatggccgagctgttgcctcctgaggtcctcgaagacgtcttggtttatcccaacggggaagacagtaattatccactgattaggacagtccccgccggtcagggcaaaaagatcgtcaaggccaacaaggccaatgcaaaaagcggcgatgagaagaagatgatgatcaccatgtttgcaacggccgcgatcttcgtgctgggaatcctataccagagaatatttgaggcgatcattgctgccctgctcgtgatatttatttccatgcagatcaagcctaaggccaataacatgtctcccaaactgctggtgaacaacggagataaacgctttgcaccattcatggatgccactggcgctcatgccggcgctctcctcggtgacgtgaggcacgacccttaccagagcggagggctcggaaccccagctcacgagcgggtggaaagcggaatgatccacaaggcgcataagggagtgctgtacattgacgaaatcggcacaatgagcatgaaaacacaacaggagctcttgtcggccatgcaagagaagaaatatgccatcactggccagtccgagaacagcagtggcgccatggtccggtctcaggcagttccatgcgatttcgttctggtcgcttctggaaatatccaggttctagaaggcatgcacattgccatgcgctcaagaatccgtggatatggctatggggtcttcatgaaagattacatggaagacaccgaggagaaccggaaaaagctggtgcagttcgtggcccaagaagtcaagaacgacggccgcatcccccactttgcaacggacgcccttgacgaaatcattctggaagccaaacggagagccggcaggaagaacgctctgaccctccgactcagagagctgggtggtttagtgcggtcctcaggggacgttgcaattgaggagggagcagacctggtgacagccgaacatgtggtaaccgctaaaagattcgcccgaaccctggagcagcaaattgtagacagatccatcatccagaggaaagaatacagcgtattccattcctcagggggcaagatcggcatggtgaatgggctggctgtgatgggggatcgaagcggtattgtcatgcccatcgccgctgaaatggctccggctaacagcaaaaacgaaggtaagatcatcgttaccgggaagcttggagagatcgccctggattccgtgcagaatgtcagtgcaatcatcaagaaatacactcaggtggacatctccaatcacgacattcacgtccagttcctccagagttacgatggagtggagggggacagcgccagtgtgtcaataacggcagcggtgatctctgctgttgagggcatcccgatagaccaatcaattgctctgaccgggtccttaagcgtgcggggcgatgtcatgcctatcgggggggcaaccgcgaagattgaagcggctgccgaagcaggcattaagaaagtgctattgcccaagtccaacatggaggatgtcatgcttgagaagaagtatgaggacatgattgagatagttccaatcgagactatcgaggacgtgttggaaaatattctaatcaacggaagcaagaaggagaagctgatcaacaaaaatgagaggaatcagtggagcagtcacaagcaagggctctactga

SEQ ID NO: 3853 - DNA, 1641 bp, synthetic construct
  source 1..1641: mol_type = other DNA
atgactaaatgtctgatgatccaaggaaccgcatcaaatgccggaaaaagtctgatcgttgcagctctgtgcaggatttacacaaaacgcggctacaaggtggctcccttcaagtcccagaacatgtctctgaactcatacacgaccaaggagaacaaggaaattgccattgcccaggtcttgcaggctaaggcggccaatattgagcctaccgtagatatgaaccccatcctcctcaaaccaaagggcgaaagttgcagtcaggttatcatccaaggcgaagcagtgggaaacaaggacttcttcagaaaatatgataagacaaaggccacccaacgggacatcgacaataatctgatggatgatgaggactaccggatcattgcaaaggaggccgtgatagactcactgaacaatctcaaggaggattatgacatcatcatcatggagggtgcgggctctcctgctgaaatcaacctcagggaaggggacctggctaatatgggtgccgccgagattgctgatgccaacgtgctgcttgtgggggacattgacaaggggggcgtctttgcctcgatagcgggaaccttcctattgctggacgatgcagaccgcagccgcttcaagggagtcatcatcaacaagttccggggaaagcaggaacttctgtgttcgggcatcgagcggctcgaggaaatcattcaggtccccgtccttgggatcgtgccttatgccgaaaacctccagctacccgaagaggactctgcttccttaaaagagcacaactggacaaaggagtttaagaataacgatgatcacataattattggcgtggttaaactaccgaagattgccaacttcacagacatcgacccatttgacacagaagacgatgtggaagtgcgcatgattgaagtccacaattacaaagacaaaatcaaagacatcgacgccctgatcttgccggggacccgtaactccacggaagacattatggagctcgagaagaccggtctggcacaggagattaggaaactgtcaaatgagtccaagattccaatcatcggcatctgcgggggataccagatcttgggcaacaagatctatgataaaaaccataaggaatccaaactggatgaggttgagggattagggctgttagacattgagagtgagttcataagggagagcaaggtcgtaaagcagagcattgggagaatagaaataaacgataatatcacgggtctcaacaattccgatgagaacaacatcttttacgagatattcagcaagatcaacggggagactgtgagcggctatgagcttcacgagggcactacaaacctcataagcgccaagcccctgtttaaaatcgagaagggcattggaaataatgacaacgaccagttcgatggggcgtacagcaagaatgtatttggcacctacttccatggcatattcaataattataacctgcgacgagagtttcttaaccacctgagaaaaaataagggtttggacgagaaaactggtgaagacccatatgaaaccagcgtggaaaactctctggaaaaactggcaaatattgtggaggaagctctcgatatggactacatcgataaactggtgtttgatgagtga

SEQ ID NO: 3854 - DNA, 1161 bp, synthetic construct
  source 1..1161: mol_type = other DNA
atgagggacgtggcgattatcggcgcttcccagacaaaatttggagagttatgggatgtgagctttcgagaactcatcagtcaggctggacttggcgccattgaggacgccaacctaagcggggccgacctggaagccatgtttgtgggaaacatgtctgcaggtctcttcgtcgggcaggagcacattgcctcactgatcagcgacagcatgggcatgaaccccgtgccatgcacacgggtggaggcggcttgcgcttccggcggactggcacttcgccaaggaatcatggctgtggcttccggctaccacgacgttgtggtcgctgccggggtggagaagatgactgatgtggtggacgcaactccggccatcgccacagcgtccgatcaggagtgggaagcacagcagggcgccactttcccaagtctgtacgccatgattgcgcagcggcacatgtatgaatatggcaccacaagggaacagctggctatgatgtcggttgtgaatcacaagaacgcttcaaacaaccctaatgctcagttcccctttgaagtgacggtcgataaggtcctgaactcaagtcccgtggcagatcctttgacactccttgactgttcccctgtcagcgacggggcagcagcgatcgttatctgtgcagccgagaaggctaaggaatacaccgacacccccatctatgtaagggcctctgcacagtcgtccggaaccattgcgctccatagcagaaaggacatcactaccttggatgccaccatcgcagccagcagaaaagcctacgatatggcaggagtcaccgtaaaggatatagacgccacggaagtccacgactgcttcagcatcaatgggctgttggccattgaggacctgggattcgccaagaaaggagagggcggcaaagtcctggaggaaggtcagacgaatatagacggtgattgtccgattaacccaagtggtgggctgaaggcccgcggccatcccctcggcgccactgggatcgcccaagccgcggagatagtatggcagctacggggagaggccggcaaacgtcaagtggatggtgctgagatcgggatgacccataatgttgggggtaccggcgggacatgcgctgtgcacatattcggccgcgacctgaactga

SEQ ID NO: 3855 - DNA, 1041 bp, synthetic construct
  source 1..1041: mol_type = other DNA
atggctggcatcgttggatacggggccaatgtgcccagctacagaatcaaagtcgaggagattgcaaaggtgtggggagataacccagagtccatctccaacgggctgatcgttaatgaaaagtcagttccctcttcggatgaagacaccgcgactattgctgtgagcagcgcccgatatgccctgcgccgggcacaaatcgacccacaggacattggagcggtgtatgtaggtagcgaatcccacccctatgccgtcaagccaacagcaaccatcgtggctgaagccatcggggctactccggatatgacggccgctgaccttgagtttgcgtgcaaggcaggtacggcaggtattcaggcggtcatggggctcgtggatagcggcatgataaaatacggtctggctatcggtgccgatacctcccaaggcgccccgggcgatgctctggaatacactgcaagcgccgggggcgcggcctacatcatcggaaacaaggacacaatagccgactttggaaccacgtacagtttcaccaccgacacccctgatttctaccggcgcgaggggcagccttatccaagtcatggcggcagatttacaggggaccccgcttacttcaagcacgtcctgggcgctgccaaaggcttgctggaaaagacagacagcaaagtggaagattacgattatgccattttccaccagcctaacggaaagttctacctaagggctgccaagaaactcggcttcaccccagagcagtacaaggatgggctcctgactcctaatgtcggaaatacctactcgggcgcagtgcccctcgccctgtccaacgtactggacaaggccgagcccggagacaagatatttatcgtctcatatgggtcaggtgccggcagtgacggctttacattgactgtaaacgaccgtattgacgaggtgaggaacttagcccctacaacggaggagatcctctctaaaaagatttacgtggactatgcagtgtatgccaaattcaaaggaaaacttcggatggcatga

SEQ ID NO: 3856 - DNA, 267 bp, synthetic construct
  source 1..267: mol_type = other DNA
atgtcctcaggactgacgatcggccttctcagcctgatcattttcgggaatatagagaacttgattctggctagccagggtgtggtgaaagccgcgaaccccctgaagctggcaatcttcagtctaatctgcgtgtcttgttggctcattctcggcacagtctgcacccagcagttacaaaactatgggatttacatagaatttatcggcgggtttgccatcttcgtacttggactgcagtccatgatcgaggcagcccggggctga

SEQ ID NO: 3857 - DNA, 288 bp, synthetic construct
  source 1..288: mol_type = other DNA
atgagcttcgccgaaagcctcaaggagtataagccatttctgggcctcctcatcttcgggaatattgaaaacttagtgctggctgcccagggggttatcgagggagcggacccgttcctggtggcaggtgctagtgtctgctttgtaatcatctggcagttcataggagtcttcggcaccaaatcagccatgaaatactctcggcacattgagtttattggcgggtttgcaatattcgtgttgggaatccaatccatgcttcccctgatctaccagctgctaggctga

SEQ ID NO: 3858 - DNA, 669 bp, synthetic construct
  source 1..669: mol_type = other DNA
atgtctgacgagaagatggaaagagtggaagacaatgagctcctgattaatgcacggaagcctgagggagaactgggtgatcagctgttggatcgtatgaacaagtcccacgagtctcttgcccaatggggcgtgagtcatctggacatcagcaaggatgacatcatactggacattgggtgcggcgggggagtcaacgtggagagattcctaaaaatgaccgaaaacaaggtttatgggctggactactcagaggtcgcggtagagaagagcaaaaaattaaaccagaaggccatcgaagaaggccgctgcgaggtcatccagggctccgtatcggaattgccgttcgatgatgaaatcttcgacattgttacaggctttgagacggtgtacttctggccagattttgtgaatgacctgaaagaggtccgcagggtgctcaaggaagatggaataatctttatctgcaacgaggctatcccccgagacggggacgcccggcaggaggagctcaaagaacttctcgatatgaacatttacagtgacgatgagctggaccagtcactcaggcaagccggattctccgatctgatcatttttgacaagagcagcagcaaagtggagtccaaggacgtgagtggttggatttgtgcaatagctaaaaagtga

SEQ ID NO: 3859 - DNA, 468 bp, synthetic construct
  source 1..468: mol_type = other DNA
atgacgtttggaaacgataaggaaaacattttcgtaaaaaatgtggttgactatggcgatctaagtaaaagcgataggagttctaacctgggccgctttttccccaacagacagtcccctaaaagcgactttgatagtgtgccatcctcaattgacgagaagataatcaacatcctgaccttcaaggatgaaggggactcaaacggctctaacaacgacggaacatctgacgacagcgtggacggtgtggattattccctctttgacgaagaactggaatacatctgcagcctcggcttcaatccattcgaggaaggggggatcaatcgggactccttggaggagcatttcaatccctacctggaaaatcacccggaggagctcgccttcctttcggtctttgaggatttcaccctggtgcagatgaacttcagcgacatgataaaggaggtctactttgaggagtga

SEQ ID NO: 3860 - DNA, 1611 bp, synthetic construct
  source 1..1611: mol_type = other DNA
atggcccaggggcaacccatttttattctgccggaaggcaccaaccgtttactgggtagagatgcccagaggaccaatatcctggccggaaaggtgctggccgaaacggtcagaaccacactcggccccaaagggatggacaaaatgctggtggacggactcggcgacattgtcgtgaccaacgacggagtgacgatcctgaaggaaatggatattgaacatccagcagctaagatgctcgttgaagttgcaaaaacccaggaggacgaggtgggagacggaaccacaactgccgtcatcattgcaggcgaactccttaagaaatccgagaccctgttggatatggatattcacccaacaatcattgcgatgggttacagacaggctgccgagaaggcccaagaaatcctggatgacatagccatcgaagacattagccgggagatgttggttaaggtggccatgacggcaatgacagggaaaggaacggagaaagctcgagaacccctcgccaacctgatcgtggacgccgtacagcaagtggctgatgacggcgtggttgagaccgatcacatcaagatcgagaagaaagacggggcagtggtggaagagagcactctaatccagggggtcatcgtggataaggagaaggtccaccctggtatgccttctgagctcaaagacgccaaagtggtgctgatcaactccccactcgaggtcaaggagacagaagtggatgctgaaattcggataaccgaccctgcgcaaatgcaggccttcattgaacaggaggagcagatggtccgcgacatggtgaataaggtggccgacagcggcgccacagtgctgttcgcacaaaaaggtatcgatgacttggcacagcactacctagccaaggccggaatcatggccgtgaggcgcgtcaagaaatcggacatagagaagctggctaaggcaactggtgcgacggtggtcagtaacctggatgacttaactgaggctgaccttggcagcgctggcagcgtgatacagaagaagatttccggggatgacatgatcttcgtagaagaatgccaggaacccaaggccgttacactgctcgttcgcggaagtaccaaacacatagtagcggaaatcgaccgggccgtggatgacgcaataggtgtcgtggccgccactgtcgaagatgggcaggtggttgcggggggaggcgctcccgagatcgctatggccaaaaagcttaaggagtatgcccagtcaatcagcggaagggagcagctggctgtaacagcatttgcagagtcacttgagattgtgcccaagaccctcgctgagaatgccgggttggatagcatcgactcgcttgtggatctgcgagctgctcatgagaaatccccttacatgggcctaaacgtcttcactggcgatgttactgacatgaaagaggagggggtggtagagcctaagcgggtcaagaaacaggcgatccagtctgcgtcagaggctgcggagatgattctgaggatcgatgatgtcatcgcctccagcggcaccagtgcaggcgacatgccaatggacccagggatgggcggcatgccgcccatgatgtga

SEQ ID NO: 3861 - DNA, 1017 bp, synthetic construct
  source 1..1017: mol_type = other DNA
atggtagaacgcgccaatattaacccggccatgatgctctgggctcgcaagcgtgcgggctacatcaacggctttgaggaagacctgcccaaagacatcaaatcaaaatacaagagctgggaaagtggggaggaaaagcctacttggacccagctgcggaaggcaagcaagaagttttgccttcctagtgcattcttctttctggagaaggtccccgaagatgatgactttccaaaaatgattaattatcggaagctggacgctgatgatatcttcgaaaacaactccccaagcctgatcaaacagataagaaaatcccagagccgaagggagcattacctggatttgctgtatgagttggaggaaaacatcccctcattcgagatctatgagggctccttaaacaaaaagcacgtctcgaattacattagggagaagctggggatctctttagagacgcagaagacatggatacggaagaacaagtcaaaagacagcaggcactacaacttcctgaacaaatggaaggagatcataacacgaaagattggggttctcatctttgagagcgaaggggtggccctgaatgaaatgagaggactgtgcatcttccacaaggaggtgccgattatcctcctgaatggaaaggacagtgtcaacggccgcatattttcgctcttccatgagttgacccacctactccttggccaaagcgcgatctgtggggatgacgagaacattgacgaggagatcttctacaatgccgtggccggtgagttccttgtgccaaacgaagacctgtgcaaaaacaccaatgcagataacatggacaccatttccaatggcgccggtggaaattatctcaacaatcagattaaatacaacggagagccttactgtgccgtggtgctggaggcttacgaaaagggaatcatcaatggtggcgaattttcccggttcactaacctaaacaagaaattcattccctttatgtttaatagatatctcttctcttga

SEQ ID NO: 3862 - DNA, 276 bp, synthetic construct
  source 1..276: mol_type = other DNA
atggaggagtttcgccagcaactggtggacaaggtggtgttcagcttggtcaacacaaagcagatcagcaatgatgatctggacaaaaggaacaacagcatctcacttgatgttcgaaagctcatcatcggccgggtactagacaaggtcaattccaatattaactacgagggagaaaacctcagttatgcacagatcattgacaagcaggccaaaaaaattgtgaattacctgataaacggcgaaaaatacaccgggttctccctgagatggtga

SEQ ID NO: 3863 - DNA, 696 bp, synthetic construct
  source 1..696: mol_type = other DNA
atgaagatactgattgagggatacaacaagtccatccacaagcgtgacaaccagattctaatcatggagaaggagggggaattggagaagatcaacataaaaaagattgacgatataacgattatcggtaaaggatcaatcacattcgatgccttgcgactcatctccgagaataatgtccggctcatgtccattgactactttggaaagataaactatactctggagtatcccagcaatgaaaacatcttcctccgcaagcagcagtacaaaaccagtgaaaaccacaaaggcctgattatcgcccgggagatgattatgtctaagatgatcaatcaaaagtcgaccattaagaccctgaataagaacaaaaaactggaaaatgtgaagatctttgagagaaacatcaacgaggctattaaacagatcggcagtttacgcttcggcgaaaggacagacatcgagaaaagcaaaatgaagatgatgggtatcgagggcagcgccagcgtggactactggctcgctgtaaatgaactgctgccgaaagagatagggttcttctccagaaataacaggcatccaaatgatatcactaacgcaagcctgaactacgcctacgccattctggcgagcgaagtgaacaaggcgcttgtcatcaacgggcttgattcatattgcggctttcctgcattttga

SEQ ID NO: 3864 - DNA, 276 bp, synthetic construct
  source 1..276: mol_type = other DNA
atgaaggtactcgtgtcattcgaaatcaaattcaaaaccaacaaggagaagattatatccatcctaaagcacttcggcttcaggcggatgcaggagaacctttattttggggatgtcgagtacgacgaactctacgccatgcagagtgatataatggagaacattagagagtacgacagcatcctgacaattcccatctgcaaatcttgttatctgaagctgaatgtgtttggacgcaatttgagcttcaaggacgaactgtacaaaatcttttga

SEQ ID NO: 3865 - DNA, 9162 bp, synthetic construct
  source 1..9162: mol_type = other DNA
atgaataaaagcaaaaaaactatgattatgctgattatggccattctcgttttattgaccatggccagtgtgagtgccagtgagctcgaggacattcaagtcaccgcatccaatggcacaagcgatgccgttattgcctctgaggcgaatagtgcgtatcccgataatgccattatcacctccgagaaggaaaatggcgatgagaatattatcgctacggataatggtaaaatcggatatgagaatgacgataagactattatcgctactaatggaaatggggggaatatcgggtatgaagatgacgataatactctcatcacatcagataaagagctgaacgcgttggataaagggaaataccagtccctatctgtgggagactaccattcctttgaggagttgcagactattctcaatcaggcggatggcggggagacaatagagctgaactatgactattccttgggtgcagggggatcgaccctcaagcttacgaaggggctgaccatcaacggaaataaccatactctctatggcgtggggctggatcgcatactgtacattagttccctcaacacccagccaatcatcctgaacgacatcattttcaaagacggcggaaaaaaggacagttacactaacctggagaccaactggggaggggccatttactacaacccgacgactgagggcggtgccatcggcggcgagccggccgattttatcattaacaattgtacctttgagaacaatggagccgtcaacggtggaggagccatcttttggaacggatctctcaaaatcatagattcccgattcttcaacaatgagatcgagctgggtagcgggggcgccgtgtacgccaacggcaatttgactgctatcggttgctctttcagtaacaaccgcgtgcgtcatggactgataggcatggacatgttaaccacgacctttacggatgagggatattgggccaaggtgattcaatactacagtttctatagtgtcgatgtgattccccctaccgggggggcaattttctgtaacgggacctgtaagattaacgactcaagttttgacaacaaccaggccggagaggcgaatgagatggggaccggtgggggggctattcactccatgaacgatataaccgtctgcaactccactttcaccaacaacaaggcttacgatcagcatggtggcgccatcctctgtaacagatccggatttatttacaactccactttcagaaacaatgtggccaacgtgggtggtgccataagctgtttttattacttaaatgctgaaggttcaacgttctccaacaacggtggcgagataggcactacatggatggatgagcactcctttgatttcctgattgataattttataggcagcatacccatcataggggacatttacggcgccctgcaaaatttccttgatcttttaggcgtagagagtgtcgatgtgctgacgggccagtacttcagcgttgggggcgccctctacactggactcgactgcaatgtcgataaatgtacatttgaaagaaaccacgcagccgaaggcggtggcgcaatctacagcgaacgaaaggtgacagccaaaaacagcgcattctcaagtaacaaggttttccgtggagactcggccgtctctgaactcatgagcagtcaggggaaaaaccgcgacggcggggctatccatgccgaaaatgcgacgaccatccggaactcggaattttcaggcaactccgctccaagcaagggcggtgcagtctactgtgcccatcacctggagatgagcgattcctcatttttatacaacacagcttaccagaacggaggagccctatatgccgatactattgggacaatttccaatacgaagttctccggcaattcagtgaccaaaggcagcggtgacggaggggccgtgtacatcatcgcccagtccgatgctcgatttgagtcctgcgaatttagcgctaacactgcggaaagcgacggaggcgctatctatatagctaattcaaatagccttttaaggctgaacaaatgcacgttcattcaaaacattgcccatctggacggcggtgccttcaactgccgaggaaagactgaaatcaaaaattccgtgttcaagagaaattcagtcgatggagacggacagaccgaaaacagtcagggcggcgccgccttctcaaaaggtgatatgagcattagcgattccagcttcgagcagaacatggccaaacaccatggaggtgccgcctacaccgacgggaagatgacagtgaaaaacagcaattttacggtcaacagcgccaacaatggcggtgccatatatgcaagcgtgatgaatgatgaagtgacaaattcaatattcaagaagaacactggaaccaatggagacggcggtgccatctacatcaatgacaaatcttggcccaagtttgattcctgcgtgttctctgacaataagtgcgtggtcaaatccagtgttgaaaattcccaaggaggagcaatctatgttagaaacgatgactccgagctcaaggtgaccaactcgaacttcacgggcaatgctgctggccaggggggagccattttttccggcaaggttaacgaaatcaccaattcagtattcaagaagaacggtgcgagcaaaagcggtggtgcagtgtacatcgaaccaaactgcaatcccaagattcgccaaagtgtcttcgaggagaacgtgggcggcgacaaaggaggtgccgtctatcttaattcaaaatactcctacctagagctgaccggctgtaacttcaccaagaacactgctaaagagggggggggcgtatatgctcaacagatgagcgcaaaagtctcatccaaccggtttataagcaacaaggccaccgacggtaaagggggcggaatctacgttagaaactatcacattactgagactgtgaagagatatacaaccgaatttgtggactgtactttcacaagcaatacatgtacagacaatggaggaggactctgcatggacagtacatactccgtgctgaaaatcacctcctgtaattttacaagcaacactgctaagaataacgggggcggagtgtgggcccatatgattaactccatccaatggtcttctttcagcaaaaacaaggcgaccgagggcaaaggtgggggcgtccacattaaaaatgactacccgaaccgcattgccgataaccccaaaaccgaggtcaagaactgccagttcgattctaatacatgcaaggatgaagggggtgggctgcacgtggagtccgagcacgccaagctcacgctgacttctagtacattccggtttaattctgctggacgcggggggggagtgtacgcccacaaggtcattagcatcaacagctgtggattccacaacaacagcgcgaattatgtgaagaacaacggtgacgggggagccatctatattgaaaacgacaacgactttgaaatcaagagctgcagattcgaagggaatacagcaaagagccggggtggtgccatctatatggattcctatgaaatcaagaccaagatatcctactctacattcgtcgacaactatgccggccgcgatgaccattcctcgacattatacacatttatggctgggcacagcgtattcaccaaggggacctatactaacatctccctctgctggttcgggtcaaacaatcctagtttcactgaacagcttgttgaccagaacagggtgtcaagcgacaaagaaaagaaaccttcagacttcggtgcagagtacctgaagatcaatattaaaatcaataatacccggcccattgcggggaatccctataaggtgaccgtgtatttcactgggaatgtcaacaacaatgtggtgtcgttcagctcgaataccctctaccattccaccgggaaatttgggggggacggcacgtactccaatatcaaggcggacaagaatgatatgactgccgatgtggtgctcactccagaaagtcgccagatctgggggcagcttgaccaccagaaagtgtatctgaatgtgaatccgctaaccaagaatagtactatggtggagattagatcctgcgaggatatcaagtatcctgatgcgctggaggtcaactataccctagtgaactataccattagtaatgcggaggcggccacatacattatcaatgacagcgaaggtaacacagtaaagtcaggcaaccttacaagccccgagacgttatatgtagaaggattgaagcctggaacctattcaattactatcacgatccccgagacctactactatctaagttccaatgcgactgctagcttcgatgtctttaaaggggacatcgaggagctgcggatcgtggtaaacaacaggacctatcctgaggaggtgaaggccatcgtctatgccagcgtagacgaagactatgaagtgacaattggggaagagacgaagaccgttactgttattggaggaataggccaagtcaatttcggcagcctcgagaccgacacctatgaggctaccgtatcctttggaggttcggatctctatgagcccatcagtaacgctaccgaatttaccgtgtatcctgaagaggagggcaccaatttcgagattgatacaaatgccagcgaaatcacctacggcgcgagcatcaaagtgactcacaaattgccggaagatgctacaggaaccatcaaatattacctgaacaacggcactgtcctgggagaactgccggtcgaagagaaactgacactggacctggatgcagggtactatgtaatatttgccaactatagcggcgacgaaagcttcgagcctgactgggacagcgctgatgtcctcgtaaagcaagtggagacggaatttcacatcggcctccagcagcaggtcatatccggcaaccccgcctatgtcacccacagtatctccgagggcgctaccggcacgatcagctactatctgagcaacgggaccttcctcggggaagtgcaggtgggcgagacatatgtttcacccaaatggaaggtcgggatctataacataaccgccaactactccggggacaggaactttgttccggcatcggacagtatggagtttcgtatcaatcctgacttctcgttcgacatatacttagacgaggacgatgtcatttacggccagaccactacagtgcggccatcgctgccttatgacgctaccggcaccgtggaattttactataacgatacgtacctgggcaaggtgacgataggccagtatgaaatcataatggttgacggagaggaatactacgaaactccaggtgtggagcttcccgagtttgatgtgggcgtccatgaaatcgtggggaaatacctcggtgacaagaattacgatccagcaatcgcaaacgtgcggcttactgtgctaagtaccgaaacagtgttcgagatcaatgctagcccaagcgagatcaaatacggagaagctgcggctgtcatccataaactgccatccctggccgtgggtaccatcttatattacctgagcgacggaacgtccctcggcgagttgtactactacgaggaccttgctttgcccaaattggctgtgggaagctatgagattctcgccaactattccggggatgaaaatttcaacaatgctagcgcaagcacaaccttgaccatcaataaggcagaccctgatttcgaaatctatatcgcattcccttcctatgacttcggggattcgcccgtggtgttcgttaacttacctgacgacgctaccggtaatatctcttactacctgagcgacggaaccttcctgggagagctcccggtagacgagaggctgtccctccctatcctgaatgtaggaacccatacaattataggaaactattcaggagacggcaactacaacaatgctagtgcaagcatgacggtgactgtaaatgaggtgtccatggagtttaatctcgggatcagcgcagaggagatcagctacggcgagactgctacggtcacccaccgactgccaagccttgccaaaggaaatatcacttattatctgagcgacggtacactcctcggggagcttccggtcagcgaaaacctgaccctgcccaagctggatgttggaacttacattattatcggtaactactccggtgacgaaaacttcgacggagacagtgccaatgttaccttgaccgtcattcaggcagatcccgctttcgcgatcagtataagcgctgaggaagcggcctacggcgaaacggtgaccgtcagtccagcactgccagaagatgcaacgggtacagtcatatactacctatcgaacgggacaatactcggcgaacttgccgctgacgaaaacctgaccctgccaacctttgatgtggatgtctacgacattttggcaaactatagcggggacaagaactacctcaatgcaagcgcagagacagcactgattgttagtcaggccgacccggggttcgaaatcagcataagcgcggaggaggcagcctacggcgagaccgtcacagccagtcccgttctgccagaggatgccacgggaaccgtgatttactacctaagcaacgggaccatactgggcgagctgcccgtggacgagagtctgaccctgccaaccttcgatgttggcacgtacacgatcctcgcaaactactcgggtgatagcaactacctcgatgcaagtgcagaaaaagagctgaccctaattaaggccgactctacactggagatcaatgacatcgcctttgactacagcaagacgggctcggccgaagcaaagacttcaggcgccgaagggatcgtggcttcagtggcgggccatgacgaagccgtcgtcgaggtgaacgggaacgagattacagtatccggccttgatgccggcagctacaccttgagcgtttccactatcgtagacgacaaccacaatagcgccagcaagaacatcaccgttacggtgaaaaagatcgattcaagcctgtcggtcgaaggccttgagctggactatggcgaatcaggcaatgttgatgcagccgctgaaggagctaccggcatcagcgccaagatcgggtcgaagagcattggagttaacggctattccatccccatttccggactggatgcgggcaaatacaacctgacggtgactaccatccctgaccggaaccacaaccccgtgacaaaaacagcccagatcactgtaaacaagatcgattccacattggaagccaatgacatggcattcgattacgagggcaccggcaccagttcagtgacatacaccggcgctaccggcgtgaaggcttctgtgatcggacagccaaatgccaaggtgaatgtaaagggcaaggagatttccgtctcaggattggatgccgggaactatactctggagatcactacgatccccgataagaaccacaaggctgtgagccaaacagtgaatgtgacagtcaacaagatcgattcaaagctggactttaataaccttgtagactacggttctgcaatgaacgttaccgttaagaccgagggggcaagtgggataatggctgagatcgacggaaaggagctcggcgtggacaagtacacaatccctatctccgctttggatgccggggagtacgaccttacagtgacaacaatccccaacagcaaccacaatcctgtcagtaagaccgtcaaggttacgattaccaagctggactcagagctggctgtcgaggaccttgagtttgactacaacagcactggaactaccaatgcgaccttcgagggcgcgaccggcatcacagccaaagtggtgggccagccaaacgctacagtagagattaatggcaattccatttcagtttccgggttgaagcccggaagctacaccctggaggtgactacagtccctgacgaaaaccacaaccctgttacggccaaatctgccattagggtgaacaagctggagaccgccatttccgccaatgacatcagcacagtgcacggcgcagacaagaacctgaccgctatcatacgcgacatcaacggcaatcccgtagccaacgccactgtgtccgtcagcctcaacggcagcaaaaaatatgtgagcgattcaagcggacagatttcaattcctctcaagagcctggctgccggcaactacacagctacaatcagctttgcaggcacggagatatacggcaagtcaagtgcaagcatcaaagtggctgtggacaaggagccaacatcaatagctgcaacaaacgtgaatacccagtatggccttgaagactatattacagcagtgctgaaagatggccaaggcaatcctctgggcggagtgaagctgaatgtggatctggacggcaataggacaatcgttaccgactcgaacgggcagatcaagattgctaccaaagacctgacagcgggcaactacattgcgacaatcagctttgcagggaacggaaactacatggcctccgagtctaatgccatcgtcaacatcaaccgcacaggcacgaggttcaacttcaagaacatgacaaccaccgcctttgactaccggatcgaagggaggattggtaaatacttttacttccagctagtcgacgaggatgggaatccattggccaacaagaacgtgtgcatcggattcaatggggtcaagtacaaccggacaaccaatgaaaccggctggaccaagctgcagatcaacctgaggtgcgtgaatctgtacacctttgcagttacattcagcggggacgacaactacactggcgccttcaatgtggccatgatcaacgtgacgcaccagagccccaaattgactgccggcaacaagagttataaggccagcgccaatacaaagacgttgactgcgaaatttaagagcttcaaggggaccgctattgttggcaagaagattacctttactgtgaacggcaagaaatactcggccataaccgataaaaaaggaattgcaactgtgaacgtgagccttaacaagaaaggtacttacaaatacactgctgcctttgctggggacagcacatacaagaaggtgagtgttacttcaaagctgactattaagtga

SEQ ID NO: 3866 - DNA, 555 bp, synthetic construct
  source 1..555: mol_type = other DNA
atgacaaccactgcattcgacttcaagatagaggggcgcattgggaaatacttctacttccagctactcgacgaatacgggaaccccgtagccggcaaaaacgtttccatcggtttcagtggaaggatatataacagaacgagcaatgagaccggttgggccaagctgcaaatcaaccttaaatattccggctactacacgtttgccgtgaatttcggcggcgacgatgaatatgcggctgcattcgatgtggcggccatcaatgtgaccatccagacccctaagctgaccacaagctcaaagacgtacaaggcatcggccaagaccaagaagttgactgccacatttaaaagctataaaggaactccgattccaagtaagaaaattacctttaccatcaacggcaagaagtacactgcaaagacaaacaagaaaggagtcgctacggtgaaggtgagcctctccaagaaagggacctataagtttacagcctcatttgctggagaccggacatacaagaaagtcactaaatctgctaagctgaccatcaaatga

SEQ ID NO: 3867 - DNA, 165 bp, synthetic construct
  source 1..165: mol_type = other DNA
gtggaaattgatgactactttgacatcttcgggcctagcggccacgcctccatgatgtacccgggggacctggctggcggtgcagagaatgtcgccaactgccgctgttgggtgcggtacacaaacgagaggcccagcaacctcaagccatatggaaccatctga

SEQ ID NO: 3868 - DNA, 420 bp, synthetic construct
  source 1..420: mol_type = other DNA
atgtatctcactaagttttgtcctaaatgcggagaggaaaacgaagacgtggcccagttttgctccaactacggccatgacttcaaggacgtgaatcagcgaatgaaggaatccaaacgcgagaacagctcattccccctgtcgggaacaaagatcctgctgtgtattgtgctcctgattgtcctaatcattgcggcattcctctttactggcgggaacgccgacaagccgcaaaacattaccatgatcaaagagaacacctatggcttcacctttgtcaatagaggggttctgttctacaattaccaccttgatgaggtattaccaatctgccggatgatcagcagggctatgaccctgcggcaggatagcacgatgcagatgacacactggttgaggagtatcatgataacaatatga

SEQ ID NO: 3869 - DNA, 810 bp, synthetic construct
  source 1..810: mol_type = other DNA
ctgaatcagctgaaagaggaagtcgactctcgaatgaaatccattgaagacaatgctagcgagaagaccaagcagaagcttcaaaagaagcagaaaaagatcgatgacatctcagaggctgacatagacgagcagatagagacgctggaaaaggaaaacaagaagctgaagcggtaccagagaatcctggatgccctgcaagagaaaatggagatcgattccggccgggtcatgggcttgactgacggtatcttctcgattgtgatgactctcctcatctttggcatcaccctcccgagcaccgagatcctaactgatgccggcctctccagtttcattagttccatactgccaaacattggggtgacgctggtcagtttcatcctgcttgcctcattctggatctaccaccacgagtttattaagttaaaatgcctgaacctggtttacctctggctgagcatgttctacttagcgacagtgtgtttcattccctttacaacgacccttattggaacctaccccgaatttcgcctcagcaccaatatttttgggatcaacatcctgctagttatcatattcttcctcctgatgcttaactatgcatctaaaagggggtttctcgatgaagaggtaattgagaaggataagaaatatgtccatcacacactatatatcatcttgggattggcagtgattatcaacctgctggactttagcgtgaatgaaaacttcatttacttgtttttcctcgtgcctatcatctctacaataagggacgtgcgcttcaaactgaaaaataccgagtga

SEQ ID NO: 3870 - DNA, 2061 bp, synthetic construct
  source 1..2061: mol_type = other DNA
atggcgaacgacaatgagcgactccaacaattggtaagatcatccctgctggaaaacaacaaattgaaaatggaaattgtcaaactaaaggagaacgaaaacagcctcaagtcggataaggagtttgacgaactgaaaaaggaatacgaggcatccctcagtgagaaagaccaggagatcttggacttgaaggacagccaccaaagcgacctggacgaactgaagctgaaatatgatgatgatttgaaaacgaaagaaaacgaaatatcggccctgaagattcagcacaagcaggatctggagaataaaagcacagagatttccaatattaaagtgaagcacaatgatgaattgaagctgaaggatagcgaaatcgaccagctgaagcaaaaacatgatgaggagttgagactgaaggacaatgaaatcatcgacattgagtacgacttcgacaacaagctcaagctgaaagacagcgaaatcaacagcctgaaggagcagtttaaccaggacttgaagagcaagagcctcgagcttgcagatttcctggaaaaatttgatgaggacatcaagtccaaaaatgacgagattgatcagatcaaagaggattacaacaaggaaatcatcagcaaggacatggaaatcgaaagcctgaccaactcactgaacgccaatattgaagttctcaacaaatcaaaggacctccttagctcgaaagatgaaacaatcgacaagctcaatgacaaggtcaaggagctaagcgatatgaacgactccctgagcaacatgaaggaatcctttgatgctgaactcactaattttaaaaccctcgagttaggggagctgaacctaaagctccggaacgccttaaacgacataaccagcaaagacaacgagattcagtccatctcaaatgacctcaagattgccaacaacgacatcgtggacctgaagcgtcagcttaacgagagcaaaacaaatgcaaatgagttgaatctgaagctggctacggcgctgagttcactcgatgacaagaatattgaaatccaggccttaaacaatcgcatcgcttcccagaacgagaatatcattgaccttaagaacaaccttgtcaataaggacaatcttgttgccctgcagagggagctggacagtcgcgatgtggccattcgggaaaaggatgtgcagatacagttgctgaaggacaagagcgtaagcagggaggagtatgccaaggtcaagaatgagctctcgaaaaaggacctgcagatcaagcgcctcaacgaggtcaaggacctcttcttcgaactttcagacaacagcttcatggatagtcagtccagctcggtggtgaacaagacctcctcagatgataagagcctcatggagcttaataacatcaagaaagagctcgagctggcgaaagaaaacaaggtcaagttcaaaattgtggaggagaatctgctggatgacgagaaagcaagtgccgacttagataaaaaggtaaaactggacgagagcaaactgaataccgacttagaggagttggtcaattcagagatagataacttcgatgatcttgtgaagagtagggatgcaaaagctgaggagagcaaatccactgacgcctccagtagcaaaggtgattacacctcttctcagacgaatctggctggcctggaaagctccaaagctccacagagtgacaatgccgagattcaaaagctgaaggaagagctggaatcctataaaaaacaagaggccgagtacaaaaagcagcaggaggagctaaacaaatacaaggacgtgtatgaaaagcttacctcccctcagctcaagaacctcaacagcatccaatcccagatctactacctgctgcccgatgaggctatggacactctgtcaatcaaggattatctgaatgaggttgcattcaaaaacctgagttttggcaacacaaagaacatcctaaagagtctagagcggaagggatacgtggaagtggtgaaaaaggaaaacgacatattcttctggaaaaagcttcccataccggcggaatga

SEQ ID NO: 3871 - DNA, 156 bp, synthetic construct
  source 1..156: mol_type = other DNA
atgatctatatgatgaacctgcgggagagcctcacgcacatgaggagcaatggcctgcccctcctaaatcagatgaaggtcaacctgtcagtggactattacaacaagtacatacttacacataaaaaaacctacttctccaagtactatagttga

SEQ ID NO: 3872 - DNA, 366 bp, synthetic construct
  source 1..366: mol_type = other DNA
atgaacaacactaccaagatcctcattggagtgctgatgggtctgctgatcgtcggtgccgccgtaatgtttgtttccgcaacggcgattaatgatgtctcggacggaaacagctttatggggcaggtgcagaatacagctaatcacgtgaagaacgtggcctccaacgacattaaaagtggcagcaacatcatcgggggcggcagtgaatttaattctcaggagggaaatgggtacttctatcagataaactacaccgacggaaatttccggcaatacgacaccaaaacaggcaagcttatagggagcggcttcaacgaggatcagtcaatcctaggcaacgacgatgggttcaacctcgaatga

SEQ ID NO: 3873 - DNA, 1662 bp, synthetic construct
  source 1..1662: mol_type = other DNA
atgcaagagaaaattgacttggttagtctgcctaaaaaaagcttctggaagctgagcattcctatcatcgctttctgcatcttcgatgccatctacggcatcgttgatatgctatgggtatcaaggatcagtgtggaggctttttatgccattggcgtgtcaataccaatcacatccctcattttctcattcggcgacagcataggccagggaaccaattccatgatgtctcgtttcataggtacgggagactatgaaagcgcatacaatacactcatacatgggattctcatcgcaaatatcatctggctcatcctcgtgctgtgtctgatcttcgcccaggggattctgttcaaagtggacgacgccgattcatacatcctgatcttcgactatatggtccccatgataatttttgcgtatgtgttcatccttaacaatctgttctctgaaacctttcaggccgaggggaatagtcacactccaactatcctgattatcggtagcaacatcctaaacatcatcttggaccccatcttcatttttgacctgaacttgggaattaagggagccgcttacgccagcgtcctgtcctcccttatcacgttctccgtcctgatgttcctttacactcacgggaggaccaagattcccttaagccgaaagtacttcaagttccgcagctacatacttgttgagatctttaaggttacctttcccaacttcctggatgatgctatctggagctttacaatgagcttcattaatgtgatactgattgggaccatgggcgagatcggcccgatcttatactccgtgagtaacaagataaggagtctgctcaatgcccctaccaaaggctacggcaggggcttgatgagcgtaacagggcatctgtttggagcggagcagttcgataagctgaaggaaatgtataagtatgtgcttaagatcgcagtctgcacaagcctcgtgataatgattgtgttcttcttcgtgcggaactgggcctttggcctatttagcattacaggaatggacaacgaaatcttttggatagctgtcggcggaatcattatgatgaccatcctgccattttccaccatctcttcaaagatgctggacggatttggtaaaagtctctattccctgctcattacgatcatcaaggtggccattgaaattgcattgatctccctcctaacccaatacctgaaggatggctcgagcgtcttgattgggattatcctgtctgaaatcatctcgtcgatagtgtattataaattcttagggtacctcttcgaccacttcgataagaaatacgaatttaagtacactgtaaaggcatttactatcaagcgaaaagataaacgcgaaaaaagacgcgaacggatcagacaaaacattgaagagaaaaagctgcggaaggaagagaaaaaggaggagttccggcagaacattgaggagaaaaagctgcgcaaggaagagaagaaggaggagtttcgccagaatattgaagagaaaaagatgagaaaggaagagaaaaaggaggagtttcgacagaacattgaggagaaaaaggcgagaaaggaagagaaaaaggaggaatttaggcagggtcttgaagagagaaaggagaaacggaaagagaaaatcgactga

SEQ ID NO: 3874 - DNA, 1197 bp, synthetic construct
  source 1..1197: mol_type = other DNA
atgggctcgaaaaattttcagtacctggacgaactgattcacagcagtgcaaacgagattatcctcgattccgacattgtgctggatttcgatgaagaatctgagtacgacgatggaatcaaactggatgtggatgacttaacgattgacggaaatgggcacgtcatcgatgccaaggatgggctgtgcagattaaagaatcatgcgaaaaacatcacattcaagaatctctgcttcaaaaacttcaaatccaagtttccaatatcaaatcaatctggcgatcttatctttgagaactgccggttcatccacaaccagggtactatctacaattactttggcaacatatggctaaagaactgttgtttttaccgcaattacctgagcaggtcctcttcaggctatagcgtctgcatctataatgctaaggactcgaaggcattcgtgagcgacagtcacttctatcagaacgaggtgaactatccccattacgggctgatcctcaatgacgggcttatcgaggtcaagaactcgatcttccatgagaacaagggtgaggactgtgaaatttgtgtgatcttcaaccgaaagggggagttgcttgtggacaactgcaaattcaaagacaataagaacgtatattgtagttacgacttcgcggaattgattgtctccattctcaatgaggccggcaaggtgtccctgagcaattccacctttgaaaacgagaaccgtatcctggggagcattaaaaacatgggcatttgccggataatcgactgcaagttcaaagatagtctgatatacaatagtcagtggtactctagcgtttcccggcccgatgaactcgacttcggcccatacctggaggtagaggactcaagtttcgccaacaaatatgacgagggagtcattgccaacagcggactttgtaagatagcttcatgcaacattgatggacgctcatatctcaacaatgatgacgtgctattcatagacgaaaaggactttaatctcctgaaggataacatcatcaatagcggagagatcgtttttgactatgatagggacgtgcctatctacgaatcctttaagggtcacggcaaatctaacggcaccaactccaacctggaggacgacttggataatgacaagagcgatgacggttaccccccgctgggggccttgtttagatga

SEQ ID NO: 3875 - DNA, 642 bp, synthetic construct
  source 1..642: mol_type = other DNA
atggcgatggatttgacggatattggcattgaggaaggacagaagtacgaggggatttacactactatgtccaaggacggggtgaaaaatgcagcccccatagggatcgtgtgcaaaggcaaggacaagctcggctgcagactgttcgtcggcaccaagaccctcaaaaacatcatggaaaccaggaaatacgttgtgaatatcacctttgatcctataaatttcgtaaactcgaccatcggaaacttagacattgaagagtttacagatgatgaggacatcgccatcctaaaaaatgcggaagcatatgtgatttgtgaggtgacagacatccgcaagatggacccgattaaggaccacataacatccaacggggaggcttatatcatcagcagtgacgtggtcaagatcgtcaaaaacaatccatgtgccaaggctcttaaccggggagtgttcgccctgctggagtgcctgacaaactatactcgactcgacctggtcagcaaggagcagcaagactacttcatcggtaggttcaatgaaaacaaccgcatgatcaagcgggtttcaggccccgatacgataaaagccatggagattctgaaaaacagcatgatcgagaagggttttgatgtagaatga

SEQ ID NO: 3876 - DNA, 1071 bp, synthetic construct
  source 1..1071: mol_type = other DNA
atgagtcgtaacttcaaatacctggacgatctcattctacggaaggataaaaagatcgtgctggacttcgacatcgaactaacggaggacgaggagctggaatattgggacgggatcaagcttgataaagatgttctgattgatggtaagggccacaggattgatgcatgcgggaaagcgagaatcttcgactgttccggcaaacacatccgccttaaaaacattattttgaaaaatggaaaagccataaatggcggggctatcaagattagcaaggacagcaatctggaaatcatcgaatccaagtttatttacaacatcgcaaacggaacatgcaacgagggaaacggcggagcgatcttcaacaaaggaaatctgaagctcctgaagtccacctttgagaataacatggctaagggagagggtggcgccataagaaactacggtaagctcaacattgccgagagcattttcaataaaaacaaggcgaaacgcggcgccgcaataatcaatcggaacgacctgacaatctccaagaccatattcgacgataacactgccgaatggtatgggggagcaatctttcataattggggccaggcaagcatcttggagagcgaatttatcaacaactcagtaactgaggaccatggcaacgggggggccatctgcaattggatgcgatcgcagctgaacatcaccaagtcctctttcaagcagaacattagtggaagcgctggcgccatttacaatgctagtgattgtaagctcaatatcagccagtctgccttcaaggagaactcagctcggtatgctggcgcaatagtgaactacggcaaggccagcattcagaagtccgtctttggggccaataaatcaaataagtttgaggggggtgccatcttcaactacagcgaagggaacctcatcattagtcaatcggtgttcgaaagtaacatctccgagagggtcggcggcgccatatattcagagaatgacaatagcttaaaactgaataactgcaaattcaagcacaacaagcccgacaactttaatgtgggttctaagtga

SEQ ID NO: 3877 - DNA, 966 bp, synthetic construct
  source 1..966: mol_type = other DNA
atgaagcaccgactcaatctggacaataaggaccccaattacatcttgctgaaggaaatcttcaaaatcatggactctcgtaagagcaaaagtatcttagcatcctacggatttaaaaacctgaatcgcacaatatttacgtttaagatcatctttatcagtatgttctttggaattgacattcccttcattctcaacgagcttaaaagcaagaaggaactgcgcaaatacttcaatatttcagaagtcctgacggcagatcaggtttataagattttctcagaaataaacagcgaaaagctgatcaaatgtctgaacagaatccttaactcacggaatatggtcaaaaggcggggtaagaagaccttcattgtcgatgccactccagtggacctggacatcaatttccgccgcaacaagaagagcaaagagcatctccggaagttgaacctcaaatggagttatagctcctcgaaaggctattatattgggtttaaagcgactgtggtgatggattacgattccatgaatcctgtgtgcatcctgatccactctggtgctccaaatgatgccggcctcttcgaggagattttagagaacctgcagaaaagacgaataatcagaaaaggggacacattgatcttcgacaaagggtattacggctataagaactaccaaataggaattggcaagtacaagatcgtgcctttcattttcccgaaagaaaagttcaacagaacccggctcgatgatattctgacctatccacttgccgtatttaacaagaccaagaagatcatggaggagaaaaggctctacaacaaactaaagaaggaactgctggaaaagctggactcctgggagaaatttaagcccataaggggcaagatcgaggacttctttcagatcattgagacaaggctagagtacgagcggaacccccagatatactccaagatcagctga

SEQ ID NO: 3878 - DNA, 303 bp, synthetic construct
  source 1..303: mol_type = other DNA
atgtcacaggagcgctataaacacatacgggagagcctgttcgattacatcaacgcattcctgatcaacaagtatgacgagctgtactactttaatatgtacgaaagcgcggagaatatgaattgggatgtggagtacatattcaagctaaaatatagtctgaccttccacgaaaaaaagaacctcgagatcagaatcaggaaagacctcaagaagtttcttaaggagaaatttgaaatgaacatctacgaactggccattttaattatcctcgaggacaacgaattgcattccaagatttga

SEQ ID NO: 3879 - DNA, 240 bp, synthetic construct
  source 1..240: mol_type = other DNA
atgttttatattgaaggagagaatataaaatatgaaatactgccgtacaaaaaggggaaaaaggtcatcatctaccttaagaaaaccgagaacggctttgtgcggaagaacaagtgcttcggcacgcactacctggaacagatcttcgattataacaataagctcctcaaggagacaatctacgagaatccaaacttcgtggacctgaccaacttccccattgacctagactacgattga

SEQ ID NO: 3880 - DNA, 150 bp, synthetic construct
  source 1..150: mol_type = other DNA
atgaacctagaggtcttcaagatggcaaggatactgattccaaactacgagtttgtgaaaaattggagcgaggacgaactcaacgatttcctgaccacacccgccggcatcccgcacgaactgatgcatatcgtgcggaaggtagtgtga

SEQ ID NO: 3881 - DNA, 735 bp, synthetic construct
  source 1..735: mol_type = other DNA
atggagtgctaccatttgctgcggaaggagaattactctctggtcaggaagaaaatcgagaactttctggaaaaataccccctcaagatatccgaagagaattacttctacttcaacaacaagttcgaagaaaacttttattttatctttttcatccacagcaaatacgtgaatgtgtcccaaaaggaggatgtcttgaagaattataaaatcctgaaatatgactacccgttcattctggcggcctacggagagacactgatcgagttcgatgagtttagcaaggccaagtactttcttgagcttgccaacaagataagtccattcgacattggcattctcagacagctgctacgcatctactgcatagaactcgaccgggagaaaattgaggaaatcttcaattatgcactggacattgtttacgacgaatactacctgttctatatctatgagtttctcagtgagtattatctgcagataaaccagatcgagattggtaatctgcttagccagattgcaaaagaagagtcattcaacgtagctgaaaagcactacatcaaggatctcttcaacaagtacgatatcaacttgggctttaacgaagagttaatctcccacatggagtatatcgtgaatctgctaaacaaaaaaggggacttcaccgaatcgtacctgttaaatcaggactgtgctgatctcaagaggttcaaccgaaagtttaagtattattga

SEQ ID NO: 3882 - DNA, 405 bp, synthetic construct
  source 1..405: mol_type = other DNA
atgtccaatattgaaaagatcaatagcgagattaaagactacgtcaactatgtccagaaaggcggtaagttagaaccgttctttgaagacatttgcctggtaaccacggagctggtgggatttcggaaaatctccaacttcgaagacctcttctcacagtttaagaagggggattacctggcactattcagggatacccaaaacgagctggacgaactggcgattgttgtgaaatggaataaccttatgatcgggtacgtgccccgcaagcacatcccaatattgtctagtctgatggacagcggcaaggagatctatgccataatcgacgacctgatcttggatgagctcttcaaggatctcttctttgagacagtgaaaattaagatcttccttaaggagtga

SEQ ID NO: 3883 - DNA, 759 bp, synthetic construct
  source 1..759: mol_type = other DNA
atgagcatgattgtccactcggagtacaaaaagctgaaggaccacctgtatgatctggtgtacgaatacgaagacctcataaatcacatctgtccaaatatcgagatggagtacctccttaagttcggcatatatgaatacgagttgtacaagaaggagctggagctgaacaaacttaagtttaagctgaaactgctccagacggagattaaccaccagaacgaattggatctgaacgagatcgacaagaaggtaatagacaagtacacagagtatgccaacaatttgaagaactctatgaacgaactcgagaacatcatcaaacataaagataactatttccagttagacgaggaggatgaaaaagagctgaagcggatttacaagatccttataaaaaaactgcaccctgatctcaattttcatcaggaaaacttcaaaaaagaactgtttatcaaagtgaccaacgcctataagaacggagacttggaggagcttaaagcactgtatgctatgctaccggacgaagacattgaagagaagtccagcctcaatgaactgaaggagctcatccatagcttcgagattaagattgagaaaatcaagaacgagtacccctacaacaagttagacctactgtcaaatgaaaaagagatcggggagtataagatcaatatccaatacctgattgattcctgcaatgaggaaatcgaggaatacagtaacaagatcaatgaaattattgaaaatcagcactga

SEQ ID NO: 3884 - DNA, 1050 bp, synthetic construct
  source 1..1050: mol_type = other DNA
atggtgaaggttggggtccttggggcaacgggaatggtcgggcagaggttcatccagctcttggccgatcatcccgattttgagatagctgcgcttgccgcctccagtcgctctgccggcaagaaatacgaagacgccaccacttggtacatgaatgatgagatgccggaatctgtaagggacattaaggttatcgagacagaccctgcacacatggataaggatgtggagattgtattctccagcctgcccgctgactttgctgccaaggtcgagccagagtatgcaaaggattttgtcgtggcttcaaatgcgagtgcaatgcgtatgaaaaaggacatacctcttgtcattccagaggtcaacccacaattcctggacatgattgaagctcagcagaaaaacaacaactgggacggattcatcgtaacaaaccctaactgttcaaccatcgctctcactctgacattgaagccgatttatgacaacttcaacatcaatcgcatctatgtttcaaccatgcaggctgttagcggagccggctacaatggtgtgcccagcatggccatcctggacaacttggtgccatacatcggcggggaggaagagaaaatggagagtgagacgctgcacctgttagggtccctcgatggtgacgaagtggtgcctgcaaactttagcctaagcgcatcctgccacagagtgcccgtcatcgacggccacactgaggcggtctttgtggagctggatgaagaggcagacattgacaagatcaaaaagaccatggctgacttccgcggactgccccaggaactcggtctgcactccgcgcccgaacagcctgtgatcgtgaaagaggaagatgaccggccccaaccacggatggaccggatggcctacggcggcatggctgccaccgtgggcaggctcagaaaagatcaggccttcgataacagcttcaagtacgtgctggtgggacataatacaattcgaggcgccgccggggcctcgatactaaatgccgaactcatcaataagcaaatactgtga

SEQ ID NO: 3885 - DNA, 819 bp, synthetic construct
  source 1..819: mol_type = other DNA
atgataaaagtggctgtaactggagcctcgggacggatgggcagcggcattatacggaagatcagtgagcaggatgatatggaggtagtggcagctatcgaaatgcccaacacccccttggccggggttgacgcgggggaaaaagccggcatcggcaagatcggagtgccaatagtcgggtcagaggatctggagaaagccctggaagagagcggtgctgaagtgttagtggatttcactatcgctcctgcggccgtggagacgatcaaacgggctgccgattgcggagtcaacctggtggtgggcaccaccggatttacagaggagcaagcgcagggcaatgcagacgtaatcaaggaaaagaacatcaaggcagtgattagctctaacttctccattggagtcaatgtgttcttcaaggttctcaaggacctaacaccgattcttaatgactttgacatcgaaatcattgaggcccaccacaaccagaaggcagacgctcctagcggcacagcgatgactgcctttgaagtggttgcaggggctctcggtaggaacccagaagaggtgggcgtgtacgggagacaggggcaggtcggcaaacgcaccaaggaggagatcgggatgcatgccgtccgtggtggcgacattgtcggagaccacacggttctgtatgtcggcgacggtgaacgactggaggtaaaacacatggcccataccagggaggtgtttatagccggggtgatcagagccctgcgcttcgtcggttccgcagagcccggcaaggttaatgatatgacagacgtgctcggaatttga

SEQ ID NO: 3886 - DNA, 894 bp, synthetic construct
  source 1..894: mol_type = other DNA
atgcggtttgagggaacagcggtcgccatggtgactcccttccatgaggacggctcaatagacgaagagggatacagacagaatatcaactggctgatagacaacgatgtggacgggctggtggctgtgggcactacaggcgagtcggctaccctgacccacgatgagcaccgtaaggttctcgacatcctgatcgatgaggttgacggcagggtcacgacaatagccggaacgggcagcaatgccacaagtgaggccctggacctgactaaatatgccgacgatgcaggggcagacatggccctcctaatcactccctactataacaaaccacagcagcacggagtaattgagcattacacccaaattgcaaattctgtcgacatcgacctgattgcttacaatgtcccatcccggacgagcctcgacatggctccgcaaaccattgtcgagcttgcaaaggtggataacattgcggccctgaaggaggcctccagcgatgttgataaggcatcaaaaaccatgaagctcctgagggacgaggggttggaagatgaaatcgtgatcctctccggtagtgacgaattgacccttccccttatgagcatcggggcccgcggggtgatctccgcgagcgccaacatcgatccgcgcaccatggtgcagatggtaaacaacattctggatggcaactacgacaaggctatggaactccactaccagcagtatgacctcatcaaagccctgttcattgaaacaagccccgcccctgctaaggaagcactgaacatgatgggaatgcctgccggtccattacgactgcctcttgtgcccatgttagaggagaataaagccatcctaagaaaggcgttggaagatgctggcatactgtga

SEQ ID NO: 3887 - DNA, 1218 bp, synthetic construct
  source 1..1218: mol_type = other DNA
atgggcctgatcgtggccaaattcggcggcacatcgattggaaatggtaaacgcattcgcaaagctgcccagtctgtggtgaatgagtatatggatggcaagaaggtcgtcgttgtggtgtcagccatcaataagactacggacgagctggtggctattgccgacgagtccattgggaaggaagtgaccgagaagcagctggcggaaattctgtccctgggtgagcgtaccagcatacgggtattttccagtgtcctggagtccctcggggtgaaaagcgaatacattgacccaagccacgaattatggcccgtcataacggatgacaactatgggaaggcgcaaatcgactttgaaagaaccgaagagcaggcccagggtcttctctctctgttggagcagggtatcattcctgtggtatgcgggttcttaggacgaaccgagaacggggaagtgacaaccctcggacggggcgggagcgacgtcacggcattcctcctcggccactgtctcaaagccgataatgttatcattgtgaccgatgtggacggagtcatgagtactgacccaaggaagatagacgaggctgagaagctggactacatcagtgtggaagagatgcgggatctggctacacacggcgctcaggtattgcacccacatgcccttagattcaaagacccggagataaaagcaaagattatcagtttcgagaaaggggacctgtcagaccctggcacagagattgtcggcccctttgaagattcaatgggcaagaaagtttgcctacaccatgagcccatctctgttgtggctgtcgtgggagaggacttgcttaaccaaatagggctccttgcaaagatgaccagcctggtggccgatgcaaacatcaacatctacggcatcagcgccggccagaacagcatcacactgttcctcgataaggaggaagcggatgacgcttaccacctgttgcatgatctggtcattgcagaggataacctaagcagcatctccctgggaagggacatcgcaatgctcaccatgatcaatcccgattttatcgaaactcctggagtaatcactgaaatcaccaacccgctaaaggaaaaccatatcaatattgtggagatctcgtcatcccagacagccattgtgctgttcatcaactgggaggacggaaaggccgcctatgaccttataaaggaagttctgtga

SEQ ID NO: 3888 - DNA, 198 bp, synthetic construct
  source 1..198: mol_type = other DNA
atgggaaatattcgcacttccttcgtaaaacggataagcaaggagctgatcgagacccacaaggggaagttcaccacggactttgaagagaacaagattctagtggccgaatacagtaccgtgagcacaaagcatctcagaaacaaaatcgcaggctatatcacacgactggtcaggcaggaggccaacaaagcttga

SEQ ID NO: 3889 - DNA, 324 bp, synthetic construct
  source 1..324: mol_type = other DNA
gtggacgaaaaggaattgatgtcgatttacgagacggaggaagaggcccgcaatgttctgctcaagtctcggaagaggatcgacgagatcgataatgacctggtgaacctcatcagtgagcggacatccctcgctaaggatatagtgtcagcaaaggtcttcctgggcatggagatttatgacaaatccagagaagacgaggtccacgccaaggtaagcaaattagcgcaggaaaaaaacatagatgacgacatccttagcgatattatgaacatgctaaccatcctgagcaaaaacaagcagcgagaatttctggaggagtga

SEQ ID NO: 3890 - DNA, 870 bp, synthetic construct
  source 1..870: mol_type = other DNA
atgcactacattaacgccaagaccatcctgagcagcaaaaacggaatgaacctttataggggatgctcccacggctgtatctactgcgattcacggtccaagatatacaatatgaaccatgacttcgaggacattgaggtaaaggagaacggaatcagactcctgaagaacgcccttaagcggaaacgagaaaaggtgatgattgggacaggatcaatgaccgacccctacattcccctggagagtaatctaaagtttatgcgtgaatccttggaactcatttacaaatacggccacggctttacctgcatcaccaaaagcgacctcatcctgagagacctggacctaatcaagaaaatcaatgaaaacacaaaggcggtggtgcagatgaccctgacgacagctgatgatgagctgtgcaagatccttgagcctaacgtgtgtacaacgaaggaaagagtcaatgtcctgaagaccttaaacgagaacaatatcccaaccatcgtttggctgtgtccaatcctcccgtatataaacgatacggaggaaaacattaatcaaatcttggactactgtattgacgcaaatgtgaaaggtattttatgcttcgggatgggtatgaccctgcgcgaagggaaccgcgaatacttttataagaaactggacgagcacttccccggcctgaaagaacgatatcggcgcacttacaggaatagttatgggataaaaagccctaataacaaaaagctcatgaagatcttcctccagaggactgatgagcatggcattatgaacaatatcgaggatatatttgagtatctgcacgagttcccatcgcatgagagcacaaagcagactactttgatgtga

SEQ ID NO: 3891 - DNA, 918 bp, synthetic construct
  source 1..918: mol_type = other DNA
gtgatcgacttggccaaaatcgtgaagagcccaggttctgctacagtgatcaacgcaataagcaccggtttcggtagcgcctttggcattgatttgaacatcacttgcgaagcggagttttccagccaaggcattgactgctcatcagacctgggagtggaccccaaccttatgaacatatgtgtcaaaagtgttctgagtcactacaacatcggaaaagacctgtcgcaggacgatctattaaacgatttggacttcgggaatggggaagggatcaaaattagaacaaaatccaatctcccattaggctctggcctgtcaagtagcagtgccctgtcgaacagcgtggtcatggccactgccggcctgatttcagatgagttcttcctgaagcctctcagcgattttgaaatgatcaatcttggaatcgacgcctccctggaggctggcgtcaccataaccggcgcgtttgacgacgcctctgcatccttcttcggaggacttaccatcacggacaacatggagcggaagatcctccatcaggagaagctgcccgaatacgacatcctcgtgtttatgccggataaggagtccctgagcggttccagcgatgtaaatcgaatgaaacttgtcgggagctatgtgaagatggctttcgaagaggccatgaataagcgctatctcaaggcactcaccctaaacgggctgctgtacggaactgcactgaacttcgataataatatcgccttggatgccctcagtgcaggggccctggcttctggcctgtccggcacagggtcatctttcgttgcgattgtggaagaggacaccattgatgacgtgaaggacgcttgggcttccttcgatggcaacgtaatagagacaaaggtcaataacgagggaacgaggtttatttga

SEQ ID NO: 3892 - DNA, 858 bp, synthetic construct
  source 1..858: mol_type = other DNA
atgagcgaaaataacaggaccctgattaccataggaatcggcgcttttattatcatcgccatcttactgctcatcgccctggtgctgccgttcagtaacctggcagtggacaatgatgagattgcagtgatcaccatatctgacaccatcacctacggggacaactccacgtctgcccatacaagcaagaaggaaatcgaatccgaactgaacgatgcctactcaaaccccaagattaagggcatcgttctcgatatagacagtggtggagggagcttggtggcgagcgatgaaatctcggacctgatcaagaaatctcctaagccaattgtgagctacatcggagataaagggtttgacgaggcctatcagatcgcaagtgccacggactatattttcgccagctcctcctcatcgctcggagggatcggcctctcctacataaataccgaccggtactccgatgaaaaggtcacaggcgtcttcaatgagaagtatctcaaaaacaataaaaccaagagcaacagcaaggtcaagagtgctaatgacttggccaacgctcaaaagatggtggaccaggactatactcttttcattaagaaaatcgccgagaaccgcaaccttacagcagactatgttgcggagctggcacacggcaagaaatacaacggcaacgaggctaaaaagctagggctgattgatgagatcggctctaaatcccagtcaatagaaaaagccgcgaaattgtcaaatgctactaattacacagtaatcacttaccccgagccacagaagaagctaacggagattctgggtgagaatgatatttttaacctgaaagagcttattaagatctga

SEQ ID NO: 3893 - DNA, 252 bp, synthetic construct
  source 1..252: mol_type = other DNA
atggtgtataaagtggaggtgtttactagcccaacctgccctcattgtccgggagcggtcaggctcgtcgaaaaggcaaaggaggaactgggcgacgctctggacgtaaccatatacaacacggccgaagccgaggccatggagattgctcggaaataccacatcatgtatgttcccacaatcattatcgatggggaaatcaagttccagggcgcacccagctacgacgagctgatggccgagctaaagtga

SEQ ID NO: 3894 - DNA, 1107 bp, synthetic construct
  source 1..1107: mol_type = other DNA
atgaagatcgccatggtaggtcagttcccgccccacatcggaggcgtgggggtccacatacactccctagcaaagcagctaatccgggagggccatgaagtctatgtgattacataccctcacaaggacattaaggacattgacggcatccatgtcatcggcacaaaaggaataaacattcccggcctgagagggttgatgttcgggattaatgccaaaaaggagttaaaaaagctgatcaatgaagagaacattgatatcatccacggccactacctcttccctgctggatgggcctcggttaaggctgggaaatcaacgaacaccaaaacctatgtgacggcccatggatcagatatctttgagatgtataaaaaacaaaagtttatgaggcccttcatcaagaaagtgctctccgatgcagatattgtcctggcagtgagcaacgcgttgaaagatgagataattaagatcgacgtgccgggcataaaggagaagatcaagattcattggaacagtgtcgacattgagaagtacaaaaccactgaggagaacaaggataagttcaaaaaggaactggttaatgagtacaatcttgaccccaacaagccaatgatcctgtttgtcggaaacataatcaaacggaaaaatgtgaatctccttgtggaggccaagcgcctcatcaagaccgatgccaaccttgtaatcgtgggtgagggtagcgaattgggcaagctgaaggagaaagtgaagaacgacgataaaatcaacgacgtgtactttacaggggctcgcagggacgtggaggacatctacccatcctgtgacctgctggtactgccctcctttagcgaaagtttcggactggtgttaatagaagctctggcttgcgggaacgccgtcatcggtagcaatattggcgggattaaggagatcatcaccgaagacgttggcctgttgatcaacccaaatgacagccaggacctcgccaacgcaattgataagattcttcaggatgaagaactcctgaataagttcaagagcaatgcgagaaaccgagccaaagacttctctaaaactgaactcccttatgatgagctgaaatga

SEQ ID NO: 3895 - DNA, 471 bp, synthetic construct
  source 1..471: mol_type = other DNA
atgggagaaaaagaatttactcacctgacggagagtggcgtgcacatggtggaggttggtgcaaaggcccagcagcgccgaaccgcgattgctagcgggaaaatccatctccaaaaggagaccatccggatgattgagaatgccgaaatcaagaaggggaacgtcctgactacagcccagatcgctggcatccaggcagtcaagaagacgagcgacctgatcccactatgccaccccttgaatctctccggcatcgacatagagttcgaagtggaagaagaggaaatcaccgcgatctgcgagtgtaggctcactggccaaaccggagtggagatggaggccattaccggagtgagcgtggcccttctgacaatatgggatatgacaaaagctgtagagaaagatgagaacgggcagtacccgaacacaagaatttcagacattaaggtcctgaaaaaggagaagatatga

SEQ ID NO: 3896 - DNA, 2073 bp, synthetic construct
  source 1..2073: mol_type = other DNA
atgaagaacattcccactaatatcaaacaaataataaatgattgctacccctacatcaaagagttcaatcccgcccaaaaggctgtcattgaatctggctacctggagaatgacaagaattacatcatcgccattccaactgcaagcggtaagactgtgcttggcgtcatggctgcacttcaaagcatcctatctggcggcaaggccgtatacgctgcccctctcatatccattcagaatgagaaggtcaaggaatttaagaaatttgaagagcatgggattagcgtggggaagcatccaagttcctctgacctgagtatcatggtctttgaatcattcgatgtcctgacgcgattttcgtgggatgtcctgagagatgtggacactatcatcatcgacgaatttcacatgattggcgagtattccagggggcctacaatcgagtgtgccataaccagggctaagatcataaatccaaacctccggatcattgcactgtctgcaaccttggagaacatgtctgaaatcgagaattggctagatgctaccgttatagaacacgattataggcccgttcccctcaataaagacgtactggataccgagatgttcaacactaaaaacaagaatgatgtcgtggtaaaagttattgaaaaagccattgaagacgatagccaggccctgagcttcgtgtcaacacgcaggttcacagagagccttgcaaactatgtggctgagaagctcaagaaaaaaaccacagacgagcagaagaaacgctttaaggaagtggccgacaagatccttgaggttcccgagaagaaaggcagcagaccgacctccacctgcttgaagctggctgaaagctgcgagaacggtgccgttttccaccacgccggactcttctcggaacagaaggaaatcattgaagaggaatttcggaacgggaacatcctaatgattgccgcaacacccagtctgatgtatggagttaacctcccttccaaatacgtggtgatacgagactacacgcggtggacctcccagggtccgcaggcgatcccagtctttgactacgagcagatgagcggtagagctggtaggccccagtacgacaacgccggatattcctatctgattgcgaaatcaatggaggaagcttccaccctggaggagcgctacatctatggcgacattgagcctaccaactccaagctgattgagaacaaggatgccgtgttcaggcaaatcatcgcccaggtggcttccaccataagtaagacgccagaagacctggaagacttcttcaagaagacattctacggctatcagatgaccaataacagttcaatgagctttttcgcagaggagagcctcaagttcgagatccagaatgccctcgaatttctgctgcagaatcagatattgcaggctacaccaagtggacttaaaaccaccgcactgggaaacctgatcgccaagtccaactacacagtggaaactgcagtgaaggtcaaggagtatgcgaacctggtggaccagttcagtgcggaggaactgatctatcacttagcgcagactccggatatgcctctcatcagttttaagggccgtcgctctaaagacccagtgcgagaaaagctggctaactacggcctatttgccttggagatcgccaaccccgaggcaacggccgtgtcccttatcgagtggatcgatgagcggaacgagtacgagattgagaacgcctataatgtctacgcgtcatctaccagacgggctgcatacgaggcgtcgctccttgtccgattcactaaaaacacgttggaagttctggggaaatacaattacagcaaggatttagacttcctctcagccagactctattacggggtgaaggaggacattattcctctggtgattggggtgaaacgcctgggccggaagcgtgccagagccttggtgaacacattcggagaggacttacggccggtgtcagagaatgaactgcaaaaagtagatggaatcgggcctaaactggctaaaagcatccgcaacttcgccgacaattattga

SEQ ID NO: 3897 - DNA, 303 bp, synthetic construct
  source 1..303: mol_type = other DNA
atgagcttctgtgacattcgcggggaaaccatagatatcggcgcctttatcaggtacacgggaacagggaccatcagcaaggtcgtggacctaaaggaggaggacaagcagcagtgggtaaagctggacgagcccgcgctgtggtatgctgcagactccctggaggtggtcgacgaaaaggatctcattaacgtggagactgtggatcgggatacactcgaaaaagttaaagacataaaagagggctacgaggaattgaatgccaaccttaacgatatccaaggctgcgaagggggaggttga

SEQ ID NO: 3898 - DNA, 456 bp, synthetic construct
  source 1..456: mol_type = other DNA
atgaagattaaacaactgctgggcatgctggttttggacgacaacgcaaacgaaattgggaagatcatcgacgcagattttgagcccgaaactggcgccatcacaaagattgtcgtcagccttaagaaaaacttcctcacatccgaccagctagacgtggagtataatgatgtgaagagcatcggagactacgtactcctgaagattaccatagataaggaaacgaaaataaaggaggccgaggaggccaagaaagcggagaaggaggctaagaaagaggccaagaaggctgaacgggaggccaaaaaagccgccaaagaagcggaaaaggaggaagcagtcgccgagcagatcgagaagcaggtggaagttgtggaggctgaaatcgtggacgatgccgaagaggctgaggaagcagtcgaggctgaagagaccaccgatgtgaaagtggagtga

SEQ ID NO: 3899 - DNA, 1707 bp, synthetic construct
  source 1..1707: mol_type = other DNA
atggataaagcatgccggatcatcatagaagacattatgaatggcaaaattacgactcgacgggagttggaggtggagaaacggcagctatgccgggatcgcaaactgaaaaagttcatgagcaattcggtgatcctcgagcacgcaagccttgaagagaaaaagatcgtgtccaacctactgaggaaaaagcccacgcgcaccatctctggagtggctattgtggcggtcatgtgtcatccacaccagtgtcctcatggcagatgtttctattgccctgaaagtgatattgcaccgccaagttataccggcgaagagcctgcggctctgaggggccgcatgttcaagttccacccttacgtgcagtgctataaccgactgaagcagcttcacaaggttggccatcccatcgacaaggtggaactgatcatcatgggagggacattcccttcaaaggacatctgctatcaggaatggttcgtgtcccagtgtctcaaggcgatgtgcgattttggaattatcctggaaaacatctctcagatcgacgacatcgagtcaatcaagagagaaggcctgttaaaataccatccgtacagcaacaatgaattgaagacgtaccccccaaacgactatgtcctgatagatgacattcaaaggattaatgaaaattcaaaggtcagatgcattggaatgacctttgagacccggccagactactgtaaagagccccacgtcgatagaatgctggacatgggggtgacaagagtagagttaggcgttcagacaatctataatcacatctacgaaaagataaaacgcggccacaaggtggaggatgtgattgaggccaaccgtatcctccgcgattccggggtaaaggtggccatgcacatgatgcccgggctctttcccctggctagggagaatccacgtatagaacagtgtcccgaacaggacctcaagatgtttaaggaaatcttcaacaatgagaactttaagccagatatgctgaaaatctatccttgcctagtcaccgaggggagcgaactgcacaagctctacaaggagggcaaatacaggccctacactgatgaggaggctgtagagttgatagttcagatcaagaagatccttcccaaatgggttcggaccatgagaatccaaagggacattccatctaccttgattgaagcaggggtcaagaaatcgaaccttggcgaattggtctataaccgactggaagaggaaaaaatcaactgtcagtgcattcgctgcagggagataggccacaagaaaacagagcaggactactccattgacgactaccgcctgttccaagaggattacactgccgtggggggtaaggaacacttcctctccatcgaggataagaatgaggaaagcctggccggattcctgaggctgagaatgccgacagagcaggcccatcgcgaggagattagagacaatactgccatagtgcgggagctccatgtctacgggaacatgattaagattggccataagggaaacgccattggtcagcacaccgggtttggagagcggcttctcaagaaagctgaagagattagcatcgaccaaaacaaggaggagctgctgataatcagtggtatcggagcccgaaactattaccggaagtttggttacgagcgtaaaggtccttatatggccaaaaaactcatctga

SEQ ID NO: 3900 - DNA, 723 bp, synthetic construct
  source 1..723: mol_type = other DNA
atgattacagccgaagaactggctcagtacatcgagtttaccaatctcgataacactgctacggaggagcagatgaaagcattctttgataaggccaaagagtacaacttttacgcagtggtagtcctgccccactacgttaaactcgccaaagaggagctgaaggacaccgacatgaaagttgtgactgtggtcgacttcccactaggtgctggaaccaccgagagcaaggttgccgaggcaaaggatgccatcaagaacggcgccgatgagattgacatgatggcgaacatccctgcaatcaaggagcacaacttcaaggccgtgaaagaagacatcattgcagtgaaggaggccgtgggagatcacatcctcaaggtcataattgaaaatgcccttttaacggtggatgaaaaggcgggggcttcggccatgtgcgaagcgggaggtgcagactttgtcaagacctcaagcgggttcaatggcaatgagcatttctatgctttgatggagagcctgcggatcatgaaaaagaacgctccgcacaaggaaatcaaggcggctggcgggataaacaattataaactggtgaacaatgtcatagccgccggagtgactaaaatcgggacatcctccggccacattatcatggaccagttcaaccatgtgatggacaaccaaaaggtaagtcccgaacagaaaacaggcccaaggctgatttga

SEQ ID NO: 3901 - DNA, 201 bp, synthetic construct
  source 1..201: mol_type = other DNA
atgagcgagctgccaatcgcccccgtcggccggatactgaaaaatgctggcgcccagagaattagcgacgacgcaaaggtagccctcgccgaggcgctagaggaaaagggagacgaactggccaagaaagcagtgaacttcgcacgccacgctgggaggaagaccgtgaaagcggaggatatcaagctcgccatcaaatga

SEQ ID NO: 3902 - DNA, 1287 bp, synthetic construct
  source 1..1287: mol_type = other DNA
gtggacaatatgaaagtatttatcgagacctatggatgtacatttaaccaagcggattccgaaattatggcagggatactgaatgagaacaacatcgggctagtctccactgaagaggaggctgacgccatcattgtaaacacctgctacgtcaaactgcctactgaaagcaaggtgataaacagaatcaaaaacctccagaagcagtaccccgataagaagattatcgtgggaggctgcatggttgaggtggacccaaaaaagctggaggccatcggacctaactgtagttggatcggtccccaccaactgaacaagactgctgacgtagtcaagtctaccatcggcggggagatcgttagggagttcggtttttccgacgaacccaaagtctgcgttcccaaaatacgaaaagatccatacatccatgttatccaaatatgtgagggctgtctgggtgcttgcacatactgctgcacccggttcgcccgcggccaccttaacagctatcctataaaggatattgtggaggaagcccggctcgccattgaagacggctgcgtggagattgagctgaccgcccaggacacgtcagcatttgggaaggatacaggcgagaagctcagcgatctgattaaggaggtggcgagcttggatggggactttagagttcgtgtgggcatgatgcacccacggaacattggcaatgatttggataatctaattgaagcctttaagatggaaaaagtgtatgacttcatccacctgcccatacagagcggcagtgacaaggtcttaagggaaatgggccggaaccatacggtcgatgactataagaatattgtctacagcttcaaacaggctattccagacatcacgatcgccaccgacatcattatcggatacccgacagagacagaagaggatttcatgaagacagcagagctgatcagagaaatcaaattcaacctgatccacctctccaaataccagcaccgcgagggtgccatctcatcttccctggacaatattccgttcgacgacatgaaacgacgctcaaagtaccttagtgagattaagtttgaaatgctcgaagaggagaataagttcctgcaggacagggagatggatgctttggtggtggaaaagggctcgaaagggggattcatagcaaagaccaatagctatatccctgtggtggtccaggacgtgaaccttggagagttcatcaaggtgcatatcgataagaccactggaacctacctcattgggcataaaatcgactga

SEQ ID NO: 3903 - DNA, 633 bp, synthetic construct
  source 1..633: mol_type = other DNA
atggtatgccccgtttgtgggagcgatgatgccatcgtcctgaaaaacaaactaatcgacgctaagtccaaggagatacgcgagctgctgcttaagtgtggcgaatgcggctctgtctacaaggagcgcctcactcaggataagccaaaacctttcaggttgatcatcagcgagcacgaagacacccataaggtgtcaattgacttgtaccccgacgaagagctgcgggtgggagactttctgatgtccgaactcggagaagtgaagatcacctccctggagcttcccgatgagaagcgggttcagaaagctatcgccagtgaggtgaagaccatttgggcctcgtctgaggagatcccggcacgttttggcgtgagcattgacctccacggtaaggtcgctagcttcaaatgcgaaacagaccgggactttaagatagcggtcgatgacattattaaaatcgacaagtatgtggcaagagttcatgtgataaagacagaagagcgaaagacgactaaagggtacgccaaagccagagtaattaagagggtgtatgcgaaacctgtgaaattcaaccacttcgattacgatttaagtaaattcatcgtctcatttaagccactgaataagtga

SEQ ID NO: 3904 - DNA, 486 bp, synthetic construct
  source 1..486: mol_type = other DNA
atggctgaaattaagggcaaagtgtggaacttcggcgacaacattgacacggacgtaattatccccggccggtaccttcgcacattcaatcctaatgacctggccctgcacgtcctggagggggagagacccgatttcaccaaaaacgtggaaaagggcgatgtcatcctagcgggggagaacttcggatgcggttccagtcgagagcaggcgccagtagccatcaaggcagctggagttgatgtcataattgcaaagagctttgcccggatcttctataggaacgccatcaacataggactgccggtggtggtggccgacatcgaggcagacgatggggatattgttagcgtggacttggaaaatggcatcatcatcaatgagaccaaagacactaaggtggaatttcaggcctttaaagagtttatggtcaacatactctcagatggtgggctggtgaagcattacctcaaaacaaaggaatga

SEQ ID NO: 3905 - DNA, 981 bp, synthetic construct
  source 1..981: mol_type = other DNA
atgataattcgagcaccttcacggctccatatgtctttaattgatctgaatggaagctataagagaatcgatggggggataggcctcgcgctaaaagacccccaatttgtgctgcagagcgaggagacaaacgagaagggatacactctggagtttgccgacagcattagcgaagattcacgcgaagaatgtatcgagaagatcccaaaagctgcggagaagatagccgagctttgcgacatcgaatccggattccactttaaggttcttgaagcctatccgccacactctggactcggctcgggcacgcagatctccgtctgcaccgctcatctgatgaccgagactgtgggccagaaatacaccagcagggagttaagtacaatggtcggccggggaggaacctctgggatcggcacctttgcccacgacctggggggcttcattgtggacggtggccacagcctggaggagaagcctggcttcctgccatcctccgcttcaaaggccaaacccgctacactcatagccaggtacgatttccctgaagagtgggacattttgcttgcactgccggaagtgaaggagcatatgcatgaccagcaggaagtaaatgtgttccagacctattgccccatcccaaaaacagaggtggagcaggtgtcccacttgatcctaatgaacctcctccccttcctgctcgagaaggacattgtcaactttggttgggcaatcaaggagctgcagaaagttggcttcaacaagctggaacacagtttggatgccagtttcctgcccacgatggaagcgattgatgaggccggtgcttacgggacgggaatcagctcgttcgggcctaccctgtacactgtctttgataagaacaataaagacatcgtgaaggccgcaggtgagatcgtcggggaagaccgcgtgaaagtggtaaaagcccaaaaccacggctacgttctggaaaagtga

SEQ ID NO: 3906 - DNA, 1530 bp, synthetic construct
  source 1..1530: mol_type = other DNA
atgttcatcaagaaaacaaccagtctgtgcccacactgcctgaagcccttagaagctgaggtgtaccaggaggatggcaaggtctggatcgaaaaggaatgcccagagcatggggtctttaaaaatacttactggagtgatgcagagttatatgacagggtggaccaagtagattcaatcacccaggatctggaaaaccctatggtgaataaggtggcaaaatgtcctcaaaactgtggtatctgttctgagcatgagtcctacacggttcttggactgattgacgttaccaaccgctgtaatctaaaatgcccgatctgcttcgcaaatgccgcaacctccaaaaagctctttgagcccacgcaggaagagatccggcagatgctgcgaaacctgagaggcgaaaagcctgttcctacccctgcgattcaatacgccggcggggagcctaccgtcagaaaagacttgcccgacttgattcggatggccagggaagagggattctcccatactcagatcgccacaaatgggatcaggattgctaagaaggagggctacgctcaagaactgaaggatgccggcctcaacacagtttacttgcagtttgacggtgtcaccgaggagccgtatcttgtagccagaaacaaaaacctccttgatgtcaagttggaagccatcgaaaagtgtagagaggtcggactaggggtggtgattgtacccacggtggtgaaaggcgtcaacgaccaacaggtgggagacatcatccgctttgccatacagaacattgacattatccacggcgtgaacttccagcccgtcagcttcagcggcaggactcccagcgaccaggtggaggagcagcgcatcacaatcccggacttcctcaatctggtggaggagcagacagacggccagatatcaaaggacgatttctacagcgcaacttctgtgcagccagtgagtaagttcatcggggccctgcgaaatgaagagccaccagtaacgctaaactgccaccagcactgcggttcggccacctacatattcatggataatgataagatcattcccattacacggttcatggatatcgataagttcctcacattcctcaacaaatatactgagaagctcgaggatggtggatttgcgataaaatcacgggtcctggcgagcgcagccaaaaacctccccaaggttctgaatgaggatgaagctcctaccggactggatatgaagcgtatactgctggacatcttcaaaacccagagctatgatgctctgggggaatttcatattaatagcctgctgatttcgtgcatgcactttatggacccgtttaactttgacacagaccgggtgaaggactgcgtgattcactatgccgtgccagacggaagggtgatcccattctgtaccatgaactccatctaccgccagggcatagaggacgagttctccaccccccttaaccagaaaatgacggagtttaatgacaagactggggaagaagaggaagacgctgattga

SEQ ID NO: 3907 - DNA, 303 bp, synthetic construct
  source 1..303: mol_type = other DNA
atgaaactcagcgagtggatcattatcaacaagatacccaacaataagatcctgaccatcctcgaggaatacgagaacattgaagcaatcgagttcaacgaccctgaagatgtaaaggcggaggtggaagagcatgggctgaggtatgtggcccacaagtacggagtcaatgagaaagctctaaaggagtacggctggcggttcaagaaaagagacgccaaaggcaagaagcgcgaggaaacgccgattataaagacagatgaacagaaaccactggtggacatctttggtgacgaagagtga

SEQ ID NO: 3908 - DNA, 576 bp, synthetic construct
  source 1..576: mol_type = other DNA
atggcactggagctgatgaacctgttgatctccatccttggagctgtgtatttcatgctaccggcctatgtggctaacctgtcgggtctcgcttttggggggggaacgccaattgacggcggggcgaattaccgggacgggaatcgaatcattggaaacggagtaacatggaagggttgcattaacggcaccattatcggcacactggtgggtgtggtcctgggcatcgtcggaatgtactacggggacctcagcaccctgaccggcggcgtcatcgacctccatgtctatggcagcctcttctctgggctcatcttaggattcctaatggcattcggcgccctgttcggggatgcggttggctcattcataaaaaggagaatgaacctccaatccggccagcctgcccccatcatggaccagttggattttgtgcttggagccctcatatttagcctgctggtggttcgcatcagttggtccttctttatcataatttgtctgctgtcaattttactgcacctgagtagcaatactattgcctacttgcttggtatcaaggatgtgtggtactga

SEQ ID NO: 3909 - DNA, 690 bp, synthetic construct
  source 1..690: mol_type = other DNA
atggggaagatatttaaaatcgtgacaatcatcctcattgtcatcgccttagccatactcggggtgttcatctactccgacggacattccgaaaagatcggggaaaacaatctaggcgtggtgtacaaggttacatatggtcacagtaatgaccccaacgtgacaatcgggattgtgtcaggcatgcatagccgagagaagctccaccaatacgtcctgccatacgtcagtaaggcctttgcgtttctgcacccagacgtgaagattgtcaactatattgtgaacgtcacgaaagaccctgaagactttacgaaaggcagagccaatggagaatcgcttgtgcacgactacgtggtaaaagatgtgaagaaagaggacttcgatgtggtaatcatcggacacgaccacgagccaggctatggtgaggcatattatatagcaacccctgttatggataacgcttcagtcaagctggctaagaaggtgaccaaagatattggcttcaatcattacaccaggaacaaaagccagccgactactagcacctccatcctgaaggtggacaagcccatcgtcgatgccggcacccgcgtattcgtttacgagattcccgaggtggatggaaaggtcaacgcgttctacaagagctatcagctggttaatgctacttacaaccggttgaaaaaatga

SEQ ID NO: 3910 - DNA, 1023 bp, synthetic construct
  source 1..1023: mol_type = other DNA
gtgaaagtggcaggatttgacatcggtggggccaacactgacctggccattattgattttgagaacgacgagattaaagaaatcaaaacagacttcgagtacctgcctatgtggagtgacaataaccggcttggaaatgtgctgattgaccttatagagaagatctgccccctcgaagaaatcgacgcagtgggaatatccatgacggccgagcttgtggacgccttcgagaccaagaccgaaggggtcttggatatagcaaccacttgcgaaaagttattcgaatgcccagttgcttatattggcgttgataaagtcctaagtctggctgaactggtacagaaccccatcgaagtggcggccgctaactggattgccacctcccagatcattgctgaaattgagaaggactgcatattcgtagatacagggagcacaaccacagacattatccccatcaaggatgggcgggagtgtgcgaagggccgcaccgactttgagcgctcagccactggagagctggtctacacgggcaccttaagaaccaatctgacaagcttcgtcgactcagttccactgaatggaaaccaatacagggtggcctccgagctctttgcgagcacagccgatgtctataatgttctgggcctgatctctgaagatgatttcacttgcgccacctgtgacggtgcaggcaagagtaaggaggacagcgcaagacggataagccgcatcctctgtgccgacttggacatcctatcgaaagaggatattctggagatcgccgattacatccacaaggaacaggtcaagcagatcgctagcggcctgaaagacgtaagcgatagggagggactcactaaagtggtggtgacggggttgggcaaggacatcctgtgtgccgaggcagctcgactcctcgggctggaggtgaagtccatgggcgattattacacggatgacgagtgcaccgtggcgccggccatcggtacagctatcatgatgaagaactacctcaaatga

SEQ ID NO: 3911 - DNA, 1167 bp, synthetic construct
  source 1..1167: mol_type = other DNA
atggacttgaaggatgtaactgatgattctatactggtgttcgaactgttcacagccagcgggattgaagacctgtccattgtgtcagaagcggtggagcttatcagatccctcgtcaatgacttgaaagacgaggacacttatgtgctaatcgcagagccttttaaaaacatcttcgacgactttgacttcgatgtaaaaacaataaccatagataacctcgaggaatggctcgaggagaatgcttacatctttgaccgggccatgttcatcgccgctgaaaacgacatgaacctctacaacctgaccaagctactggagaacaaggctgtaaaggtttatggcagcgactcatacgcagtcaaattatgctctgacaagtatgagacctttgattacttaatcaacagagttaatcagccaatgacctacaacatcctgctcaacaaaaagacgtattggaagagggccatccaaatcttctttgataagatcaacggcgactacggggatggaagcgataatggtgccgtgccgatcatgcagaagcctaaggacatccccgtcctggataatagcgaccgggatgaggttaaaaagtacaagctcattgccaagccacgctttggagtggactgcgaaagcctgaagatcatcagctcgaaaagggatatcgacgagctggaggaaatctaccctgaggggtcccgcttcattgtgcaggagttcatccccggggatgtgtgcagtgtcactttgataagcgacggcaagaacgccattccaatcagtcttaataaacagattgtggagatcgatgagaacggaggcaaataccttgggggatacgttccctatgagcacgaaatgaaagagaaagcttttgaggtggcgaaaaaggcatgtgaatcaatccccggcatcaaagggtgtgtcggcgtggatctgattatagcagacgacgtctatctcattgaaatcaattcgcgattcacaacgtcctatgtgggactgtccaaggtggccaatataaacatcggcaagaccattgtggacctgattgacaagaagatctctattgaggagctgggtgaaattgagtacaaggataaggtcagtttctacaaggacgaaaatggcattctggatataaaaattggtgaatga

SEQ ID NO: 3912 - DNA, 1329 bp, synthetic construct
  source 1..1329: mol_type = other DNA
atgaaaatagcgattgtccttgggacaaggccggaaataatcaagatggcctcggtgatggatgaaattgaaaaccggggtcatgaactgttgctgatccacacaggccagcactacgataaggaaatgagcgaaaacttcttcattgacctcaaactccccaccccaaattataacattcacgtcggctccggcagtcacggggcgcagacgggcaagatgatggagggaatagaagaggtgctcctggacgagaagccagatatcttgctggttcaaggagataccaacgctgtgctggccggcgccttggtcgccagcaagctgcacattcctgtcggtcatgtggaggccggcttacggtcatttgacgagacgatgcccgaggagatcaaccgcctggcagccgacatctgtagcaaactgtactttgtacccacagaggagtcagcaatcaacctggctatggaggggatttcccgaaaaaggatcttcataaccggtaacacggtagtggacgcttgcttcaggaacctcgaaatatccaagagccgggataaagaccagtatgatgagggccttcaggagttggatattgacaatatggataatatcctcaccctaacaatgcaccgggcggaaaccgtggacgataaggaacgcctaaccaatataattgaggctctggaggaactgagcgacatgaacattatcttcccaatacaccccagaactaaaaagactatggagaacttcaatctctttgacagattaaacgacctccctcacgttcatatcatcaagcccgtcggctatctggactttctgctgctcatctccaagtctacaatcatcctaacagatagcggcggacttcaggaggaggccatcacccttgacgtgccggcactgaccctcagatacaacacggagcgtcctgagacagtcactgccggagggaacatccttgtaggttccgacaaggaagtgattctggaaaatgcacgaaagatcctggacgatgaggactttgccaataggatgaaaagcgctaaaaacccctacggaatggggaatgctgccgagctgatgattaagatcatcgaggaaagcgataagaatgacaccctgaagatggtggccccagacgaggtgatggcaagtttcactcgccatatgaaggcagttgacgaggacatcactgtggtggactttgaagaaaaaaataactcactgattaaaatcgccttccaaggggaagatattaaatacccttacgatgagctcaacttgaatggattaaccatcatttatgaggattacagttga

SEQ ID NO: 3913 - DNA, 642 bp, synthetic construct
  source 1..642: mol_type = other DNA
atgtttgaatttactaagaacgagctgcgggaccttgtgattgcattcatcgtgctgagtattgcttttgcaattgctaacgtcaagttcgacctccatgctttcatctccattctcccaatcgtaatgttcggagtgggggtgggcttcctcttgcacgagctcggccacaagtatgtggctaataaatacggttacaaagcggagttcaaactgtggcccataggacttctcattgcactgatcacaagcctgataggctgggtcttcgccctgcctggtgaagccaagatcaccgccgagaatatcgacgaagagaccactggcaagattgccatcgcgggaccgatggccaacatcgggctggggctactatttatcgtcatcgccgccatcacctacccattgaaaagctcattcacactgtttgagctgatttacctcgtcagcacggttggcttctctgtgaacgcatttttggctacatttaacatactgcccttctataccctggatggaacgaaagtgatgaagtggagtgtaaaggcctttatcgttgcgttcgccatcgccgcaatcatgatgttatcctcgatgttcataggggctgaaaatatgattcttatgctgattggctcctga

SEQ ID NO: 3914 - DNA, 678 bp, synthetic construct
  source 1..678: mol_type = other DNA
atgaaccaggaactaatcataaacaataaggaataccggaagacagagcccctcgagtctctgaatatgtttaaagggcagctctatgaaactatcgtcaccacccaaagcaatgagcacatcaaaaacgcagcccccattggagtgatctgtaaagacagtaatcatatcgtcatacatctggacaactgcgtgcacacacaccgcaacatcatagaaaacggggaattgatcgtgaacatcactaaagatccactgatttttacatattcaaccattggtgagctggacgatgagtacttcgatgaatttaacggcttccctttaattaaggattccctgggattcttcaaggcccacgtaataaagaaaatcaacaagaaaagggagaacgacttcaacgacgggatcggccacgtggtcacctgcgaagtggaggacattttcatccgagagtacaatgagattgtgccgctgaacagggctatgaacgcagttatcgagagccttgtctactattgcagatttgatgcgaagtacaagcacatgcagaaggagatttggacgcatatgaaagagctgaatcgggttgctcagaaggtgggcaatgagaaagaaaagaagtccatgaaggccatcctcgacaaaatgcgcgaaaatcatgattacttggactga

SEQ ID NO: 3915 - DNA, 465 bp, synthetic construct
  source 1..465: mol_type = other DNA
atggaggatgtcagtgaatttaaaggaatcaacggacagctggtgagcttcaaaaatgaagtggaaggcgccgataagatcacgtttatcggctctccgggggtgtgtaccccattcgctgagctcttgtcctacgctgtacggaataaggagaaccatttcattcccctgcttgacattgacgacgcccaccagtttgagttcaagccatacggcatggtcctcaaggatgaagtgtcaaaccctcgcgacgcggatgtggtggtcctactgggaggcctgacaatgcccaaatatgaggtggccttcgatgacctcaacgcactgatcggggacgtcctgaaagaggatggtaagatcgttggcgtgtgctttatggacatgttcgccaaggccggttggttggacaaggtagacttcgactccgtcattgatgcaagcatattaggggttgtgaaaaagtga

SEQ ID NO: 3916 - DNA, 807 bp, synthetic construct
  source 1..807: mol_type = other DNA
atggccgacaaggataagatctttgaagacaatgcctacgatgactctgagtacatctataacgacacctacgagggcagccgaaacgattacgatgttgaatatgatgagagtgaggattatgaatacgaggaacctctaatcagcctgttcgacatcgtcaaagagtatgacaagggaaaggtgatcgcgttaaacaaggtaaacctcgacatctacgagggggaatttgtaagcattatcggcccctcgggctcaggaaaatccactcttctgaacatgctgggggccctcgacgtgcccacaagcggggagatattcattgacggcctaaacattggaaaggagaaagacctgagtgatttcagaagagaaaccatcggttttgtgttccaactgcataacctgattcccaacctcagcgtttgggacaatgtccagatcccattggtcggcacggggttgcctgaaaaggagatgaaaaagcgggccaacgagatgattgatgctgtgggactctccgataagaaaaagcagaagccgaataagctgtccggcggagagcgtcagagggtggccatcgcacgggcacttgtcaataagccatcaatcattctggcggacgagccaacaggttcccttgatacgaaaaccgggagcatggtgctgaatctcctgcgcgcaatgcacgatgtgtacaacgttaccttgatagtggtgactcacgacatggaagtggctcgcatggccgataggatgattacaatcaaagacggccagatagtcaaagacgtggacaatttctga

SEQ ID NO: 3917 - DNA, 1137 bp, synthetic construct
  source 1..1137: mol_type = other DNA
atgagatttataagcttaatcataaaaaacccattcaggaacaagactcgcagcttcctctccatcgtcggcattgcaatcggaatcgccaccatagtggcgctgggcctgatcaccacagggatggagcagtccgtgcagacaacaatgaacgaaggggccgccgagatcactgtgaccaatatcacctccatcggtgccgggactattgacagcagtctggtggatgagttaaaaaacataacgaatgtgtcacggactgcggggattctgagtgccacggaccagaactttgtggatatggcctcatcgaacgacatgtcttctatggagagcagcacacgcctttacggcattaaccgggcagacctggacttggaaggaatcaaagacatcaacgggagcttctttgaagaaggcactaagcaggccataatcggcaagcaatacgcccaaatgaataatatgtcgatcggcgataacatctccgctctgggcgaggaatttgaaatcgtcggggtgttcgaaaccggtggagtccttgccgatagtggagtttatgtgtccctggaaaccctcgacgaggtaaccggtgccgagggcaaggtaaatcaggtaattgtcaagacagatgaaggagtgaacgacactgtggtggcagacgcgatcgaggataaatacgagaatctgacgacaataaccagcgaagagatgtctcagatgctggataatgttatcgggattctcgacgctgtttccgttgccgtgtccgctctcgctattattgtgggtgcaatcggcatcgtcaacacaatggtcatgtctgtgtacgagcgtacgaaggagattggcgtgctaaagtctgtaggatggaaaagcagaaagatcctaaagatgatcattggcgagaccctggtgctgacaatcctttcaggtattgtgggctcagctttcggtattctcatcgcagaggtcggggtcaggctgatgggagacaccgatttcgcgttgggctacagtcccagcacgttcatcatggcatttgggataaccattgtcgttggactcattggaggcatctaccctgcctataaggctagtaaattggctccgaccgaggccctgcgatatgagtga

SEQ ID NO: 3918 - DNA, 873 bp, synthetic construct
  source 1..873: mol_type = other DNA
atgaaacgcacggctcttaagattgcgtatatcggcacccactttcatggattccaacgtcagccggacgtaaggactgtggaggaggagcttatttatcacctgaggaaactggaatacatagacgatttaaaggcgtcccgatttcggatcgccggaagaacggacgccggtgtccattcattgggcaacgtgatttccttccaaagcgaaaaggaagtacgtgtcaaccagatcaataatagcctgcccgacgacatccagataatcgcttgggccccagtgcgatttggattcaaacccagatttgccaagaggcgctggtaccgctacatcctctttgaggaggacttggatattgatctgctaaggaaaacagcagaagtcttcaaggggacccacgacttcaccaatttcacaaaaagaaagcagaagaccactgttcgcaccattgaggatatcagaatcaccaagccaatcattgatgaagaagacaagaacaaaaaaagtgatttcgcccacctaaacaaaagttactcccctatctttgtggacatctacggggagagcttcttgtggaacatggtgcgaaagatgatgcggatcttcctggatgtcaattacggcaagctcacactcgatgacgtggaacggctcctcaaccccgaggaaggcgagcctcgcgcctacatcaaggtggttgatgcagagaatctgattctgatggacatagagtatgaggggataagattccggtacgacgactatgcatgtgaaaggtttcggcggtacctgatcgacaacctgttcgagctgcagaagacatattcgattactgagtctatgctgaactgccttgacgatctcatttga

SEQ ID NO: 3919 - DNA, 897 bp, synthetic construct
  source 1..897: mol_type = other DNA
atgcgaaaggagaaagagtcaaaagaaagtattagcatttacgacaactataaaatagatatggagcttaagcacaccgacaagcagtactacttcatcttttataaacggaggctgttcctaataaataacaagatcccccttgttaaagacttgatcagcctgaatatcaatgatagcgatgtgaaaaactccatttacattgggcagttccatagcaaggactgcttcgccgttgaactggatgaagaatttgactgtgagcattatatcaaggccaacgacgattcccaattcattgaattgtatttcgtgttcgatatcgacgaggagacctacctggtggcaggcagagccatccagataatcgactgggaaaacacccaccaatactgcggccgctgcggcgccaaaaccgtcacttccgatatcgaaatggccaaggtgtgtcccgaatgtgggtttactagctttacacgtatttgtcctgccattatcacgtccatcatcaaaaaggacgagagtgagctggaccaggagggacggcctatcaataaggtgctcatggcaagacactcatatcacacagctccccggtatgctctgattgcagggtttctggaggctggagagagcgtcgaggaagcggtgaagagggaggtcatggaagaggtaggcattgaggtgaaggacattgaatactttggaagccagtcctggccatttccaaacagtctcatgatcggttgcatatgcaagtacaagagcggtgagatcaaggtcgatgaaaacgagatcctcaaggcgaagtggttcaaaaaagaagacatcgagcgcccggcctcggagatctctatattctcaaaattactcaagaatttcattgagaactactga

SEQ ID NO: 3920 - DNA, 615 bp, synthetic construct
  source 1..615: mol_type = other DNA
atggaacttatagccaagaacattagcttcaagtacccctcagcgaaggactacctcctgaaggacgtgagtatcgagctagacaacaagaagattgtcgggttgattggcgacagcggaagcggcaagtcaactctgtgtaagatcttatccgggtatatcactaagtatgagggtgaagttacctttgacgggcagcccttccataaaaaaggatttaaaccggttcagctcatttaccagcacccagaaaaggtgatgaaccctaaatggaaaatggaccaggtgctgtctgagtcctgggatgtggatgacgccacactgtctgagtttggcatccagaagtcctggctcaccagattcccacaggagctgagcggtggagaacttcaacgcttttcggtggtcaggtccctgaatcccaatacaaagttcctaatagcagatgagatgaccaccatgctcgacgcaatcacacaggcccaaatcattgatagcgtgttgaaaatcgtcaaggagcggaaaatgggcttcctgctggtaagtcacgatatggacctggtggaaacggtctgcgacgagaaaatctacttcaaagatctcaacaaggcttga

SEQ ID NO: 3921 - DNA, 1341 bp, synthetic construct
  source 1..1341: mol_type = other DNA
atggataagctgcttgatgtggaaaatgtgtccatcagtttcatacagtacacaaagggcctgaaccaaagggatctgaaagtcattaccgatttgaccctggatatctctgaaggggaaatcttagccgtcctgggttcaagcgggtctggcaaaagtttgctcgcccatgccatatttggaattttgccggaaaacgcacggctgaacggcaaaatcaaatttaaaggcaaggagctttctcaagccgataaggaggagatccgcggtaaaggaatagtgctggtgccccagtccgtgaacttcctggaccccttaatgaagatatcagacatcgcaatcgggcactgtgacagcgaggaggagaaaaaggagaagaaaatcaagcagagagagatcttcgaacattataatctcggtcctgaggtggatgagatgtaccccttccagctgtccggaggcatggccaggagagttctagtgagcacagcacttctggcagacccggacctcgttgtagcggacgagccaacccctggcctggacgagaagactgtggaagagacgttgaatcactttaagcacatgaaagatgatggcatcggcgtgcttctgataacccacgacattcatgctgcactggaggttgccgacaggatcggaatcttctactcaggctatgtcattgagatcgccctgaaggaggacttcagcggagatggggagaacctactccacccatatacaaaggccctctacaaggccctccccgcaaacggattcgaggtcatcaagggacatcagccactgcacggggagatcgtcaaaggctgcccctactatgaccgatgtgactggcgttttgaccgctgcaaggaagagcggcctgaactgatggacattgggctcaagaagattcggtgctttaaatacgacggagtcaccgaagacatgattaaggacggggctattgaggagactgctgaggccaatatcgaggacgcggccaatgaagtcgttgaaaaagctgctgaactcgtggatgagtccaacattgaagagagcgctgaggcggtggaaggggctgaagaggctgttagtgaaacggaggatgccattgaggaggaagtagccgaggctgtggagggtgcggaagaagctgtagagggcgcggaagaggcagtggaggtcccagaagaagccgtcgaggaaggcactgaggaggccgtggaggagtcttccgaggaagccgtggaggaatcgtcggaggaagccgtggaggaatccagcgaagagacagtggaggaaagtagcgaggaggcagtagaagaaggtgcctga

SEQ ID NO: 3922 - DNA, 507 bp, synthetic construct
  source 1..507: mol_type = other DNA
atggacatcaagatcaaggaaatcgaaaacgatgagagtcaaatcaagagcgtgcaggagttcttgtacgctcagatcaaaatagagtacggcattgggccaatgcctgagttccactatgatattgacggcctcaaggactactacatactgccgaagaggaatgccttcttcgccgcttacgacggggacaagatagtggcgacagcaggcgtgagggcctatgataaggattatgagttttttaaaggtcagtacaatgaagagaacacagccagcatttggagactgatggtcgacgagcagtatcggcgaaatggacttgcacgcattctcgttaaaaaaatcgaggagtttgccaaggaggaaggatataaagaaatttatctaaacacccatcggtacctggaggcggctctgcccttctggaactccctggggtacaccgtcacgatcgaggaagatgactacgacgaaactaaccacatgatcaaggtactcgtgtga

SEQ ID NO: 3923 - DNA, 855 bp, synthetic construct
  source 1..855: mol_type = other DNA
atgattaagaaaaaaactaatgataaggagcagtggtttatctaccgggccaacctgcgaaccaagaccctggtgattattggccttgccgcattgattatcatcagcattttcgtgtgcggatatttcatcagggacatccccacaaattttgcttccgcgaaccagatgccttccctggaacacctgttcggcacggattggatgggccgggacatgttccagagaaccatcgccgggctgggcctgagcattatggttggtttcatcgcgtcagttctcagtaccatcatttcaattgtcttgggattgttcagcagctttaataagtttgcagacgaggccgtggctggcatcatcgacctgttcgggtccattccacacatcctgctcatcattatcgtgagcataatgtttggtggcggagtctggggggtgatcatgggcgtcgggctgacacactggacaccactggctcgcgtgctacgctctgaagtcaaagagattaagaccaaggaatacatcgccctgtctgagaaccttgggaggaacaaagtgtggatagctataaaacacatctttcccctcatcatcagtcaaataattgtaggcgtaatcctcatgttccctcatgcaatcatgcatgaggcagccatcactttcttaggattcgggctgccaccccatgagccggccattggagtgatattagcggaaagcatgcactatctttcggctggctactggtggctggccttctaccccggtctctccttgctgatagtggtcctgctatttgatcttatcggagagaacgttgaaaagctcctcaaccctgagacggcccagagttga

SEQ ID NO: 3924 - DNA, 990 bp, synthetic construct
  source 1..990: mol_type = other DNA
atgaacaaacagaagatcgccaaatattttggctggaaattggtgcgttttgtcgtgctaatgatcgcagttgccatctttagttttgtactcctggatctctcccccattgacccagtgaatgcgtatctgaaaggcgccgctgtaacggaagcccaaagagcaattctgcagcagtacttcggtaccaacgttccactgcctgagaagattttccattggctgatggacctgctgcagggcaatctgggaacttccttgatctaccggcgccctgtgatggatgtgatcattgacaagttcatggcgtcactggccctgatgacaatctcctggatcttgagcgggatcatcgggtttgctctcggcgttgtggccgggaaaaacaaagggtcctggattgataaggctgtgaaggtctactgctacgccatccaaagcgctccatccttttgggtgggtatgctgatatcgatggtcttcagcgtgtacctgggatggttcccaataggattcggagtgcctatcggcgtaaggagtacggatgctaccttcattgagtgggccaccaggctggtgcttcccaccctgacactcagccttgtcgggcttgcccccattgctatgtatacccgaaatgaactcgttcaggtcctatcttctgactatgtcctctttgccaagagccgcggggaaaagggctgggcactgataaaggatcacggcctgcggaacattatgctgccggccatcacacttcaattcttatcattcagtgagctcttcggaggggctgtcatggtggaacaggttttctcataccccggcatcggccagactgcagtggcagcgggtttgcagaacgacgtgcccctatttttaggaatcgtggtcataagcgccatctttgtattcgtgggtaacctcctcgcagacattagctattacttcatcgacccgagaataaaggagaacgagttcaatgactga

SEQ ID NO: 3925 - DNA, 1620 bp, synthetic construct
  source 1..1620: mol_type = other DNA
atggataagaaaacaatcattatagcggctgtggccattctcgtgattgcgggcattgccgtgttcgcctttggcggcggcggcagcagcgatagcgatccgacccatctgacagtcgctacacacagcaatatggcagagcccgaggcagggttcaacccgcttacggggtgggggtgcggacacatgaactataacccattggtccagagctgcctctttaagacagacaagaatggagacatagtcccagacctcgccaccaactactcaattagtgccgacgggctgaaatggactgtgaaggtccgagatgacgtcaaattctcagataactccacgtttgacgccaaagacgtggcatttacattcaatactgcaaaggacactgagacggatctggatctgaccaatctgaagaaggtgacagccaaggatgacaagactgtcgtgtttgaattggaagaaccacgcagtacattcatctatgacctgcggtatgtagggatcgtgcctgaagagtatgacaacgccacctacggcgagcaccccatcgggaccggaccttacgtcctggaccactgggataagggtcagcaagcgatctttaaggctaatgacaactggtatggggacaaaccttacttcactcagatcaccatgcttttccccgaagaagccacctggctagagctggctaagagtggtcaagtggacattgcccctgtggccacctctgccctcaacgaatctgttgacggatacaactttgtggaaaagtccgcaggaagggcacaaggtatctccctgccctatctggaggacactggaaaaaccagcccagcaggtgctaagatcgggaacaatgtgacggctgacaagtccatccgcgaggcattgaacataggtgtcaaccgggataagatctgtgaggaggtcttcagcgggcatgcctcacctgagtataccagcgtggataccagaagctttgccaaccccaatgcgaaggtgaaagatggcgatgttgcaaaagccaagcagatcctcaaagagggaggatgggaagacacagacggggacggaatcgtggagaaagatggcgttaaggcttccttcgacctttactacccacctgattacctggacagacagtctctggccacagtatttgctgagcaggcgaaagacttaggcattcaagtaaacctccagggtgccgactgggataccatctacgctaacatgtactcgtcggcctctgtgatgcagcagaccagtccggacccctataaatccatctaccagcagtatcatagtaaggaggctgatgacttctacatgaaccccaacctgtataacaatactgcgagcgatatgctgatggaacaggcaatgcactccaatgacttcaagctagccgactccttatgggctcagagcgccctggtgaatggcggcggctggggccccgctggagatgccccatgggtatggcttgctaactacaactacaattacttcgtgaaagaggatattgatatgggcgaccagcccgacgggctcggcaatgacttcttgataaatgttgttgattggacgaggaccaattcaactgcctga

SEQ ID NO: 3926 - DNA, 693 bp, synthetic construct
  source 1..693: mol_type = other DNA
atgtccttaagcatcgaactggaaaaatacctgaaaggcaacggcgcaattgaagtaggctacgccgacatcaccaatttcactccaaagaaaggtttgaacacaggcgtggtctttttcatcacctaccccaaggaagtgatccgaaacatggccaatgctccaacgctcgagtacctttatgaattgattgacctaaacaccaggctggatgccctgggaatgatctgtgaggagttcctaatcaacaaaggatataaggcctatgcacagacaaaaaagcgcctcggggggaactttggtgagttcaattcgtttgagctcccccacaagaccatagctaccagggcgggcatggggtggattggcaagtcagctctcttcaccacgttcaagtacggcagtgctctgagactgtgcagcgtgctgacagacgccccgctggagatcggagagcccataattaagtcccgctgcggaaagtgcatgatctgtaaggaggcatgtcctgggggggccataagcggaagaaactgggactacactctcaaacggaatgatttttacgacgataagaagtgcgagaagtatgcgcttatcgtcagcgaagagaatctgggtaaacctgatacagtttgtggcaaatgcatttatgcctgcccacatactcagaagtacgtgaaacggacgtga

SEQ ID NO: 3927 - DNA, 561 bp, synthetic construct
  source 1..561: mol_type = other DNA
atgaacgtgaatatcaaagagctaggaaacgacccggaggagataaaaaacgttcagaactttctgttccacatgatcaagctggagtttggctatgattatgtccctgagtggcatcaggacattgtgaacatggaggactattacattaatccagaacgcaatgcattcttcgtggcttacagtgagagcggggaaatcatcgccacaataggtctgagggcttacgataagaatttcgaaaaatttgaaggcatatactccaatgacaccacctccagcatctggcgcctgttcgtcgacaggcgatacagaagatgcgggttggcctcgaagatgttcagcgtagccgaaaacttcgccaaggaccgggactataaaaacatttacttgcacactcaccggacattagagggggcgctgcagttttggatgaagatgggctttatcatcaccctcgatgaaggagatgagcttgagacggtgcatatggaaaaattcatccaaaagctcaagatttcaccccaggcaggcatcctcacttacgccattaagctgtga

SEQ ID NO: 3928 - DNA, 726 bp, synthetic construct
  source 1..726: mol_type = other DNA
atgctgacgtttattcaaatggagttcctgaaattaaaacgctcgaagatattcttactgagcgttctgatggcagtgctgcccgccctgctgatgtacatagccacatttgcgttcgatgaggtccaggcctttgacgcgctcttcaccaatgtcaacatgtacatgtctgtattgtttgcggttcttatcttcgcaatcatcatggcatatctcttcggccgggaatacaacgagcacaccctgaagatgatgctgaccatcccaatttccaggggtaagttcctgatgtccaagtacctcatgttcctgatttggattttgatcctcaccgtgattacaagcctaagtaccatgatcttcggttttgctgccgggctcagcgggtttacggtaaacctgctcatcaacagctttgcccagcttctatttgccaacctactgctctttctgacattctcaccgttcgtgttcatttcattgtttgtgacaaatatggtgcctgctatggttggcggcgccagtcttactctggtgaacatgcttgtgtacggacagacctgggctccatatgtcccatgggtctgcccctatctgatcgcctccggagagatcgcagaatatgggatcaatatgctcttgccttatggcctggtgttcgctactttcatagtgggaatcgtcatttcttacctttacttcactaaaaaggacgtgcccctctga

SEQ ID NO: 3929 - DNA, 1068 bp, synthetic construct
  source 1..1068: mol_type = other DNA
atgagtcagctcatcaactactacttcatcatcaaaggggatttcgtgactgattacgtgattgagacgacaaatctatcaaaaaagtactccaaaaaatatgtggtcgattctattgatatgcacgtggaacgagggaagatctatgggcttctcggcaaaaacggagccggcaagaccacgaccatgtgcatgttgttaaacctggtggctcccagtgatggagacatcctgctcttcggcatgaatccgaaggagcactccaaggaagtctactcaaacatcggatcgatcatagagactcccggcttctacgagaatctgactgcgtacgaaaatctggagatagtgtcgaaactgcgcggcaagtataacccactcatcattaagatggttcttgagatggtcaacttggaccatgagaagacgaagaaattcaaggactattccctggggatgaagcagcgtctgggaattgcagctgcaatcatgcacaaccccgagctgctcatcctggacgagcctataaacgggctcgacccattcgggatcaaggagattcgggacttgctgaaaaggctatcccgggagtacggcgttaccattctcattagcagccacatcttgagcgagattgaaaacatcgccgatgtcataggttttatggatgaaggctgtctgattgacgagataaccaaagaagagctgcatacccggctgaacaagtttgtagagtttgaggtgtcagacattgacctagcggttgaccttctcaaggacacaggttttgaggaaaacggggactttacattcgccagaaacatcggcaattacattgaagatatgaatagccttaaatccttcgagtccgatggttatgtgaatagtgaagatggcttcgaatctagcgaaaatgccatcggaggaaccatccacttactgaccaatcttgacctgcgcgaccaattcaacaagctgttcgtcagcagcggtatcgacgtgagaaaggtaaatctctgcgaagagaacctggaagagttttttacaaggatcgtgtctagtgcctga

SEQ ID NO: 3930 - DNA, 756 bp, synthetic construct
  source 1..756: mol_type = other DNA
atgaagaatgagaaaactgaaaacgaaaacaacaaaaatacgtcctcacccctcgtcaagtacctgttccagacccgctttttcctattcggactcactaaaaagtctaagacaataaaaaagatctttaacaaggtcttctttgaagacaatgaacttttcatcctgccgaataaaagcaccgtgaacaaatccaacaccaagatcacggccaacatcgaaattaaggagtcctttcagaaggacgactctgagtttctgccaagtgaaatcctgaaggaaataatcaaggaggctaacaatatctttattatgaacaaatgcatctgcaggagctctagcaactgcaaagactatccccacgacttcgggtgtatcttcctgggccctgctagcaagaaaatatcgtcaaagtacggcaaagcagccacagtggaggaagcactggagcacgttgatatggccgacaagctcgggttaagccatttgattggccggaataaattcgattccctcttgatgaacgtgggacccaaagaggagctgcttacaatttgtcactgctgtccttgctgctgcctctggaagatcattccagatctggatgatgagatcagcaataagatcaagagactagaggatgtggaagtaaatgccctggatgacaagtgtaagatgtgtaagaaatgtctggaggagaacgtgtgcattagtaacgcgataagtcttgaggacgacaagatcaccattgactga

SEQ ID NO: 3931 - DNA, 120 bp, synthetic construct
  source 1..120: mol_type = other DNA
gtggggtgtggccactgcgtgcaggcatgcaagttcgacgccatccggctgaactatagcaggaagagcgtagattccgtgattaaccgcatcgaggaactcgtcgactacaaaaattga

SEQ ID NO: 3932 - DNA, 741 bp, synthetic construct
  source 1..741: mol_type = other DNA
atgtcattccaagataataaaatgttaattatgcccgcggtagacattcggggtggaaaatgcgtccagctcgtgcagggaaagcctggaagcgagcaggtggtcatcgaaaacccagagaaggttgcgaaaaaatgggaagacgccggggctgaagtggtccacgtaatcgacctggacggggccctcgaaagtgtgaccaatattgagacaatcaaaaagatactgaatgaggtgtccgtgcccattcagctcggaggaggcatcagatcaatcgaatatgcagaggagctcctgaaccttgatattgatcgcttgatcatcggcactatggggataaagaacccagagatcatcagcaaactatctaacgagtacggcagcgagagggtgatgatctccctggacagcaaggacaataaggtggtcataaaaggctggcaggaaaagatcgacaagagtgccagtgaaatctccaaggagtttcaggagctgggagccgggtcgatcttgttcaccaacgttgatgtggagggcctgctgggcgggttctacgtcgaccccgtgatcgaccttgtggactctgtcgatattccggtggtctactctggcggcgtgaccagcctggatgacctcaaacagctgcagacaacgggtgccaagggggttgtaattggttccgcattgtacaaggataagataaagctagaggatgctctgaaatatcaaaacattgaatga

SEQ ID NO: 3933 - DNA, 453 bp, synthetic construct
  source 1..453: mol_type = other DNA
atgaaagtaatggccaccggggctttcgacatactccacccaggccacgggctgtatctcgaaaaggccaaagaattgggtggagaggatgcagtcctggccgtcgtgatagctcgggactccacagtgaaaaagaaaaaacgcatcccggtgattgatgagaaccaaagactggagatgatcaagtacctaaagcccgtggacgaggcttacattggccatgatggcgacatgttcgagatcgtggaggagatcaagcctgacattatcgcaatcggattcgaccagggccacgatgtcaacaagcttcaggaagagctggacaaaagggggataaaggccaaggcgatgcgggttgaagcccataggattgcggatctggacagcacgtgtaaaatcatcaagaagattcgaaatagcgactttgaagaggattacgtgaactgcgactga

SEQ ID NO: 3934 - DNA, 1017 bp, synthetic construct
  source 1..1017: mol_type = other DNA
atggtgagtatcgccattgtgggcggcagcggttacacaggaggggaactgatcaggattttaagcgctcaccctgaagcagagatagtggacattacctcccggcagtttgaagggacgcccgtccacaaggtccatccgcacatcagagggactgatctggtgtttcgcaacaagaaaccaagcgagctggatgcagacatcatctttacagcaacgcctcatggagcctctatgaagatcgtgcctgatctcattgaaaccggtgctaaggtcattgacctcagcggagactaccggttcaatgacatcgacgtttatgaaaaatggtatggcatcgaacatacctcggacctaaaaggcgtgttcggtctgccagagatccacagggaagagatcaagaaaaccacactccttgccaacccgggctgctttgtaacgggcgccatcctgtcaggataccccctgagtaaagcaaaactggccgagcgaatgattttcgattccaagactggagttagcggcgccggcgtaaatcccacaacttccacacactaccctaacattggggacaatgtgaacccctataaggtaacctcccacaggcatatgcctgagatccagcaggagctaggtgcgttctctgatgtgaagatatcattcactccacatcttgtgcccgtgatccgcgggatactgaccaccaatcactgtttcctcgttgacggtgctgacatcacatcggaggaggtgttggatatctataaggagacctacaagggagagcccttcatacagattcttgaggatggggagatcccacgtctcagcagcgtgagagggtccaattacgctcagatcggatgcttcgaaattgatgaaaccggccggctggtcatcatttcagccattgacaacctggtcaaaggggccagtggccaagcggtccacaacatgaacataatgtgcggctttgatgagaagactggcttggacttctttggaatgcacccatga

SEQ ID NO: 3935 - DNA, 489 bp, synthetic construct
  source 1..489: mol_type = other DNA
atgaaccgaatcatcctctactattcagaggggggaactactcagcaggtggcagagacactggcgattaacctacgttgtgacatctgccggatacgcgatttgaaaagtagggacggctacaaaaaccggttgttctcgaccttcgatgcattcagagaatccaagacagaaatctacccccctaggctggacctgagcgagtatgacaccatctacattggcacgcccatctgggccaacaatccaaccccggctatcattaccctcattgacaggtataatttccttggaaaggacgtggtcctctttacaacctccacgaactctgaaggcgagaacacatttaataagatggatatgaaactgcgcgctagaggggcccgggtagtgcaagaatttaatatcaagaccaaggacaagagcctggagatgattagcgaggatactgagaaggccataaaaaacttagatctggaactgtactga

SEQ ID NO: 3936 - DNA, 1158 bp, synthetic construct
  source 1..1158: mol_type = other DNA
atgttcgacaagattatggaaaatcataaagccctcattgccatacctatcatcctagccctgttaagtctggcgcttatctccttcaatggcatagaacagggagtggagcttaagggcggctcactcgctgaactgcagctgacagggagtacaagcgtcaatgacctggaaagtcaactgactaaagagctcaacaccaacaacatcaaagtgacaagcaacggcgagaacaaggttacagtcgagctggaaaataacgttaattcaagtacattttcaaaggccatcgatggcaaggccaaggtgatcagctacaacgagataggtccagtgctctctgaggaggcaatgggacagatttatatcgctatgctattcgcatttctgtttatggccgtgaccgttttcattgtgttccgggagcccgtacccagcgtcgcaatcatcctagccgccctgtgcgatattctcattgcgctgggcggtatgtccatcctgcacatacccttgtcaatcgcatctgtaggggccctgctcatgctgatcgggtacagtgtggatacagatattctcctcactacccgactgctcaaacgcagggaaggaaccgtggacgagagagctagaaacgcgatgcacaccgggttgaccatgtcctgtgcagctatcgctgcaatgggaattttgtacatcgtcactgtcatcatcatgccggaggccactaccttaagcaatatcagtgccgtgctggtgatcggactgattggcgacattctgtcaacctggcttatgaaccttggcatcttgaagacgtatattgactggcgtcagtctaagaagcaggacaagtttaatatagatgctccaaagtcgaacgagagcaagtccaagagcaaggaagaggatggcaagagcgagtccaaaagcttcaaggaccgcttcaaaaggtccaaggatgatgacagcaaagactctgaaagcgaggactcgtccaaagactctgaatcgaaggactcttccaacgacatagacagttcagaagaggagaagagctccggtaaggataagaaaagctccaagaagacgaaatccaataaaaaaggaaacaaacggaaaacgaaaaaaagcaagaagaaggggaaggggggtaaatga

SEQ ID NO: 3937 - DNA, 1224 bp, synthetic construct
  source 1..1224: mol_type = other DNA
atggctagtaacctgtccaaattcttcaaggatcgccaggtgatcatcctcattatctgcctcataatctcaatcataagcataagtttccttggagtcgagcaaggactggacctaaagggcggttcctccatccaattgcaactggagcatcctgttaacgactctacaatgaaagtggtcacctcggtcctggacaaaaggcttaacctatatggggtgaccgatgtgaaggtccgtagcagcggagatcagatggtcatagtggagatggcgggaaagagccccgaagaggtggagcggctgattgggaaccccgggatcttcgaagctaaaattgacaacaagacagtgctagtgggcagtgacgttgctacggtagacgctccggtggttggcgagtccggcgaatggcaggtgccctttaccttaactacagaaggcgctaagaaatttgcagagcttgccaagggcaaaggcggacatgaagtggtaatgtatctcgacggcaagcagatagatgatcaccctcccgccctggctgaagagttggccagcggagaggctgtaactgaagtgcaggtgacagggggcgccgaagatgttgagaccgcaaaagccgagtcaaatgaagtcttcaccgtgctgaagacaggttcacttccggtgaagatccacactgtaggctccaataccgtgtccccagagctgggtcagcagttcgcgcagggcgccctgattgcaggcctcctggcaatcctgggcatttcagcagttgtgtacatccggtaccgaagggccttcctcgctatccctatactcattaccaccctcagcgagattatcattatcctcggggtcgcgtcgataatccactggaacattgacctggcagcgattgccgggctgatcgcctctgtcggtactggggtggacgaccagatcatcattacggatgaggtgctgcaccacgacgatgaaaacaccaggcatagacgcacacgcacgcagatgaatgtgaagaatgctctgttcatcatctttgccagcgccgggaccctgatcgcagccatgttgccattagcctacgtcggatttgccagaggcagcagtggaatcgggactatcgccggatttgcattcacgacaatcatcggtgtcctgattggtgtcttcattacccggccagcctacgcgaagtttattgagttgtttgtttcttga

SEQ ID NO: 3938 - DNA, 1242 bp, synthetic construct
  source 1..1242: mol_type = other DNA
atggtgatcgtggtggggactggtgccgggggagcaatcattgccatgaagttggcaaaggcaaatattccagtcacaattattgaacgcggcccctatatcgccagcaaagacgcctacgaaacctatgacatgaaatattatgacaagcgatttgaaagcgagcagagtctcgacctgcttaagaccacctgcgtaggggggagcaccatagtggccgctggaaacggcgtgagggttctggaggaggagtttaaggacctgggcatagacctgagtaaggagtacgaaacaatcgaagagctaatcggcgtccaccaaatggatgacgaccacataggtgaggggactcggctatttttggaatctgcaaaggagtgcggattcgatgccatcaagatgccgaaattcatcagggatgaggactgcaagccttgcggcaaatgttccttcggctgtcctagagatgctaaatggagcggcaaggactttatcgacatagcaatcgagaacggggctgagctgattgagaacgccgaagtcacgaagatcctcacggcccacaaatccgccagcggtgtcgagtacatccaggatggccaggtgaagaccatcgaatccgacctggtgatcctggcggccggtgcgatcgacacagccgtcatcctgcagaagacgggaatcgacgctggaaacaagctcttctttgatcccttcataagcgttgggggagtcctgaaagacatcaaatacaacacagaggtacagatgaacggactggcaataggaaatgaatacatcctcgccccccatttctccagttttatttcaaaatatatcaaagaaacctaccccgaagtggaggataaggacattctctccattatggtgaaggtgcaagatgatatggtcgggtctgtagacattgatggcaatgttaagaaattcaatacaatcggcgacatacggcgtctcgggcagggtgctgcggctgccggctcaatcctgcagaaggccggggtcgatgctaccaccatgacttcaaccgtgttccgcggtgcccatccaggcggcactgccgctattggagaggtggttgataagaatctgaaaacagagatcgacggcttatacctcggagatgcaagcgtgattcctatctcgcccggcaagccaccgattttgcttatccttgctttagcggaaagactggcgaaccacctgattgaggaggtgatttga

SEQ ID NO: 3939 - DNA, 429 bp, synthetic construct
  source 1..429: mol_type = other DNA
atgtgggaaatggtttggccgattttgctcgtcatcttaagcaatacgatttacaacatctgtaccaaatcaaccccagggaatgtgaacgcctttggaacattgatgataacttatatcaccgcagccatcctgactgcgatcatctttgtctttctggtcaaacccgagaacgtgatggtggaacttagccacgtaaactggacctccgtggtgctgggcatagctatcgtgggactcgagctcgcctacattttcgccttccgggccggttggaaggtcagttccgcttctattgtggcaaacattggcctcgccatcgttctggtattcgtgggggcgattctatacggagagaacatcacactgaagcagctgggcggcatattcatctgcgcagtggggcttttcctgatcaatatgggttga

SEQ ID NO: 3940 - DNA, 462 bp, synthetic construct
  source 1..462: mol_type = other DNA
atgactaaggtcgagctgaaggtgaagccaatcgagaacggcactgtgattgaccatattcccgcaaataaggcgctccaggtgctcaagattctagggctgccaaagaaaggaaccaacgtgacactggccatgaatgtccactcccggttaggctacaaggatattgtcaaattcgagaatcgcgaactggcccacacggaaatagataagatcagccttatcgctcctgatgccaccatcaacatcatcagggactatgagatcgtatcaaaaaacaaggttcggaaggtgaacgagttgaatggtataatcaaatgcaccaaccccaaatgcatcagtaacaccgaagagcccctcgagacaaaattctacctggtggacagcaacccgattacagtgcgatgccactattgtgaaagactggttcaatacgacgagatatacaatcagtttgaatga

SEQ ID NO: 3941 - DNA, 6768 bp, synthetic construct
  source 1..6768: mol_type = other DNA
atgaaattaaataagttcttcattatcagcataatcctgattatatttctctcaattagtgcaataagtgctgagaatactgataacgctctctcaacagatacacactcgaatgacaacgtgctctccaccgattcacgatctaatgagaacgcgctcacaaacgagaacacactcctcaccgatacacacagcaatgagaatgccctcacaacagacccactcacaaaggagaacacacattcttataaggactcagaaaagtctctgtcatcggatgcttttaataagaccatttatgtgaataaaaccgggagcgatgagggagacggaagcgaagcaaatccttacgctacactcaagaagtccatctcacaactggacgactctgacaacgctgtcatctacatcggtcccggcaactacacaggtgaaaataactctgccctggagataaacctggaccataaggatcatgacggatcactgtccatcattggggactcgaatggaggcaccgttttcgatggggaaaacttaaatccaatcatcatatcgatcagtgaggattcaatcgtgaccctcattaatatcacattcactcacggcaaaaacaatatgggctctgccatccgaagttctgggaacctcacgattgacaattgcatcttcacggaaaactatgcaacaaatctggctgccctgtacgttgacaagcatagccctttaacagtgatgaactccaaatttctggaaaatagggccaaacagtgtgctgacatctatttttcgcagaactcagagataatcttactgaacaacctctttgaaggttcaactgcagagtattcctacgcctacagcccatccgtatccctgcagacaggaaagagtttagtcaaggggaatacttttaagaatctgacaggcgcttattataaaggtgctttgtatattgcctataacaatgggataaatatcgccaacatcactgataacacattcatcaactgtaattatacagggacagatggggcgatcctctttttccagaacgcctacttgaagaacaacaagttcattgactgccactcttccactgcctttctatactccaacactgagtttaatgcgtacctaagtttcgaagacgccgaaatcgatggcaccaccttctttcttaaagccaatgtgaccgacgacatgggcaataaagttaaaaatgccaaggtcatattttacttgaatggagagaatgtgggttctgctagttctgataataacggcgtagcaatgatcagcattaaaaagctcctggagaatggagaatatgtaatttccggtactcagtcatactctgagatcaacccctttggggtgaacgtgaaaaatgcgacggccagagttaattacgaccacagctctctggaggtgtgggtgtcaactgatggagatgatggctctggcaacggcagtgaagacaatccattcaagacgcttagaaaagcattggattacggcaccgcatctgctgtcaacctgactgtgcacgtgaagaacgggatttacaacggggatgacaatcgcgatctctcctattccacgctcggcaaaatcaccatcgtgggggagtcctactccaatgtggtgatcgatggagagaacatcacaaagagcatttttgctttctcttcgacccttgacgttacactgattaatctgaccttgatcaactgtccttccactctgataaacgcatacaccctgagcatgatggacaacattgtcatcaacagcggtaccatacgggcccagaccggtaacaatggggtgacaatcgataatctgcgggtaatcaacggtaccgatcaggccatcactggctataatctgagactgaccaattcccgctttgaaaattgtgatggtctcacgcacaccggtcttatctggctctccaccaataacaacaaggtcacctatctggagaacaacaccttctttaataataccatcgcagggtcggccggcggcggcgccgcgtactacatccagagtgaccttataagcatcaataacactttcgactcgaattggatcacggaaagtaggggagagaatgtggcttatgcagggggcagacacataatctccatcaatgacaaattcatcaacaacgaggtgcccaaatacgtggcccagtatcgaagcattggaaacgaagagtgtgagatcattgtggaaaacattactttcatcaacaacaaggcatctgggaacggtgcaggtctagcgaccacgggggccatcgtcaaaggagggaaattcatcaacaacagcgcctctggaaacggcggcgcgatttacctcctgaatcatgacaacacaagttcgtactgtcaaatgagcctggaagatgtcatttttgagaacaattccgccacgtgcggaaaggacattttcatcgaagggagttctggcaacaatatctttacctatctgaacaatctgacaatagtggccaatgatctgaacgtaacgagtctgtctgacaatcttaccgtcagcgtgtttcacccgtccggcgccataatcggaggaggggagatcagtttctatctggatggtgaatacattggcaagtccactctggtcaatcagaacgcaagtcttgagtatgtgggatttaaaaacaataccatttacgagtttacaagcatttacgaatacgcctctttgaacgacacttacattgacggcatagtttccaccaaaatcccttacgccctggagaacatcgaactgtatgtgtccgacggcagtggcgatgatgaaaacggaaacggcagcatcagcaacccatttaagtcaatctccaaggcattgagcgaaggataccaaaaatccacaaatattacagtgcatattctggagggcacttataccggaagtctgaacagcaatctccgaatccccacaacggtgaacatactgctgatcggcgagggggcggccaagaccataattagtgacagctcctcggactatttcattaccgccctgaagggcaagtgcgagctgcggatttcccagatgacattgaatagggcggcccgtgacacacagtcagccatctacattgaggaggaatccaatgtggccattgacaatgtcacattcatcggcggccaggggaactacggcggcgccatcaatactgcagggaacctgtccatccgcaactcatatttccatgacaatggatatgccgaccggactcttcgtgccaacgcctattacggaggggccatctgcaatgacggcaccctaatcattgacaacaccatcttcgaaagcgaccacgcaggcaggctaagtgaaattgcgaaccagggcacactgtacatgaacaactcaaaagtgattgacagcattaacgcgtatagcataaacatggatctggttgctatcggcgcttatggtggccaaaagggcgagattacaatagaaaactcccagttcattgtgagctccaagaccatcaatgaactgaatgacagaatctatgaccctacgagggcgttgacctgcttgggcattggttcgtgccaacatgcaatcctcatcaactccacattcatcggcgagggggctgtgttctccccttatgtatttggcggaatcaactcaaataaccttgctagtggagggtgtaccatgatccccggggaccttgaggtctacaattcaacatttcggaatgtccaggctgtgaacataatatactcacgcaccgacaatgtgcggtatcactcccagagggtgttcgaaggatgcctcttcgataacgtggagtatataatcgctgtgctgaataccggcaacttttcagtggagatgcacgactgcgtgattctgtcagatgaccttgctaaaatcggatttggaagtgaaaaaaccatgaagatggacatttccaacaactggtggtcctccaacgacgggagctacgacaacgccaccctcggaactaccaactacatttcaaattgtgtggtgaaactcaaggaaatcagttcagagactgttcaccccgagtcctatctgatcctaacgctcaattcaagcaatagaaccggtctgctacaggacgctatcctggcattcaaggcatacgacggcgaaaacatcagcgactacgatggagctctgtacccgcgaaatttcgaaatgtctgccattaatgccactttggatgacctggagggcacaattatcaacaaggccatcaatccctttgagggtgtggaaaacagcgggtattacattgaggccattgtagacaatcagaaggtcaacctgacagtccacgacagcctatctatcggcaacgcatacattcttgctgagaacatctcgatcaactacaacgagacacagataaatgtgacggtgctcgaggagaacggcaaacgggcggatgggggaaacgtttcgttgaaattgcatgataaaacctatatctccgagatcattaacggcactgccattttcgacatagatgtccttcctaaaggggactacctccttaattactccttaaatcgtcccaaggtttatcacagcatttccaactcatcgaacctcacggtgattccatttaagatcaacgcttacgccaacgccagcaatatcaaggtgggggaggatgccatcgtcattgcctatctcgacaaggatgccggaggcaacgtcacgttaggtgaggagatccagaaggtcaatgatgggactgccactttcatcatctccaatctcgccaagggggactacacgtaccagctcagttactccggagatgagaagtacgataatgaaaccttccacgtgtcgttctctgtgaacctgaaggacgctagcatcagcgtggagaatgacactttggacttgtttgtgggctccaacgagaccatcgttgccactatctctcctatcggacttgccgtaaattacagttgcagcaacgaatctgtggccatggttgatgagaatggtgtcgtcagtgcagttggtgcgggaatggctgtaattaccttgacggtcggtgatgacgtaacttatagcaaaaactctagctctgtcactgtcattgtcagtaaaatcccaaccatcattgagatcgtgaacgataccattagccttgaggtcacagacagccttgattccatcgcgagtctgaatccagaggagggaggcaaccttaactatgcaataagcgatgacttgatcgctaagatcgacaatggccagattactgcattaagtgaaggcagtgccattataaccgtgtcatttgacggcaacgacaagtacactaaagctcagaacaaaagcatcaagattatcgtgaatctgaaggaggccagcgtgagcgcattcagcaacattgacctgctggtgggtgagaatgataccctgtctccaaagacctcccctgaagggttagatgtgcgctacgaatctaacgatacctctgttgtgctggttgataacggccaggccatcgctgttggcgagggcaacgccaccatcacactgactgtcggcggcgatggagtctatgctgaaaacacgaccaccgtgaaagtcagcgtgagccggattgctaccatgattgaaatcgagaaagataccatcgagcttaaggtcaatgaggagtcccccatcggagctattctggagccggatgttggcaatctgacttactccataagtgatgagagcattgctaaagtggaaaacggcaagatcatcgctctggctgaagggaacgcaagcctatccatttcatttgctggggatgaacgctacatcggaaccaacgcgagtgtggagattcgcgtaaacaagatcaacacaatattgactgagacagacataaccaccacctacaaagaggagggctaccttatagcaacactgaaggacagccagaacaaccccattagcggggctgtactgactgtggacctggatgggatcaaaaactacacaacggactccaatgggcagatcaagatcgcgaccaacaatctgattcccgacacgtatacggccagaatcagcttcgccggcaacgagaactacagctcatctaacggaaacgcgagtgttaccgttaaaaggataggtaccaagctgaacttcaatgacatgaacacgaccgccttcgactccaatattgaagggcggatcggagaatacttctatttccaattagtggactgcgatgggaatcccctcgccaacaaaaaagttatcattggattcaatggagtcaagtacaataggcaaaccaacgaaacaggatgggcaaagattcagatcaacctgaagtacgccaactcttacacctttgcaattgcattcctcggggatgacaactacagcggttcattcaactttgccgtaatacgcgtgagccaacagaccccgaagttgactgcaagtagcaagacctacaagtcaagcgccaagaccaagacactgactgccacgctcaaatcctctagcgggaaagccattgccggtaaaaagataagcttcagactaaacggtaaagtctatacagccaacaccaactcgctgggggtggctactgtgaaggtctctctgaacaagaagggcacctacagctttacggcgcaattcagtggtgacagcacctataagaaggttactaagactgcaaagctcacgatcaaatga

SEQ ID NO: 3942 - DNA, 1371 bp, synthetic construct
  source 1..1371: mol_type = other DNA
atggaagagcacatcgacctctttaaatctatcttgaacaagatcgaggataaagtggattacgccgacattagggctggcactggcaacaacacaagtataaccatgaaagacaaccagattcaagacattaacacaggcctgtcaacggtggcccgaatcagagtgttaaacaatggggcttggggctttgcaacaaccaatgacttttccaaacttgaagagatcagcgaaaaagccatcaagatatccaactcactgaaaggggacatcacgcttgcagaatgcgacatcatcgaggatgctgtggctattgagcagaagataaagctctcggatgtgagcatcgaggagaaaaaggaaataatacaggatgccaacaaggccagcaacgtgggcaatgtaattagcaccaccgttcggtacggggatgccgagtcaaagactgcgttcctcagcagtgagggatcgtgcatcctaacagacaatgcacgcgtcagcctttcgctgaatgcagttgctagtaatggggagctgatccaattccatcacgactccctgggcggggtcaagggattcgaggtgttgaagaatgccgatatcgaatcctttggacggaaagtgggggaaaaggccactgaactgctcgatgccaagcccgctccatctggccgctttacaatcattgcggacaactccctgaccggcgtatttatccacgaggccgtaggccatgccgtcgaggcagaccttgtgctgcaggatgactccatcctgcatgaccagatgaataaaaagattggatctgatattgtgaacatctacgacgacagcagcaacaaggatgggttcggctattatccctacgacgtcgagggggttaaaaccagaaagaaccagatagtcaaggatggcgatctaatttcatacctctcctcccgcgaaagtgccggtaagctggacattccgctcacaggtaatgcgcgatcaagcatcagcgatcagcctattgtcaggatgagcaatacctacctccagccaggggacctgagcttcgatgagctgattgaggacattaaggacggaatctatctcaagggctcaaggggaggtcaagtggataccggaaaaggaatcttccagttcaatgcttccgaggcgtataagatagaaaacggagagttaaaggaccacttcagagacgtttccctgtctgggaacatcctggaaaccctgaaatgtgtggacgcaatcggctctgacttcaagttgagcgtggggttctgcggcaaaggtggacagacggcccccgtgggcgatggaggtcctcacactcggattttgaacgccatggtcggtggcagtagttga

SEQ ID NO: 3943 - DNA, 558 bp, synthetic construct
  source 1..558: mol_type = other DNA
atgctgtccgaggacgacggcaaataccttctggaactggccaaagacgccatcgaaacctatgtcaaagagcacgataaaatcgatgtgccttcagactgccccgagcacctccgggagaagctgggagttttcgtcaccctaaacaagaacaacaacctcaggggatgcattggctacccagagcctatcttcccattggttgaggccactattgagtctgcgatcagcgctgctgtaagagacccccggttccccgaagtgggggaaagcgagctggacagtctggaatatgagattaccgtgctcactaagccagagctgattgaagtggataagcccatagattacttggacaatataatcatcggcgaggatgggctgatcgtcgagaaaggattctaccgcggcttactactcccgcaggtggcacctgagcacaatatggacaaggaagaatttctttcccatacgtgtctcaaggcaggtctgcgaccggatacatggctgaataaggacacaaaggtgtttaagttccaagggcagatctttaaatga

SEQ ID NO: 3944 - DNA, 1056 bp, synthetic construct
  source 1..1056: mol_type = other DNA
atgatgctgcccactataccaacaccagatgagctgctcgataaaggctttcgccgcggaaagaaggcagccgacctgaggagaggagagaagatgcccaagcgcctgaaagggaagcgaattgaggagaccagagttatcacggcctgtcaggtaatcaaggaccggctgaaaatgattctggatcggactcctgaaattgaggagctgccggagttttatcaggattatatagacatcacagtaggggtggacgacttcaagcaagcgctcggtgccgtcaactgggcgtacggcatcatcacccagctcgaaaaggagtacggggccaagattaggaaagctccttccgagcgggccaccggtctccgaaagcaggcctacggccgtataagttctgtggtccataagattgagaaagacttggactttttggacttcgccaagcagagcctgcggaacatgcctaccgtcgacttcgatgcaataagcatcgtgattgcaggctttccgaatgtgggcaagtcaacattactaacccacatcacagacgctgagccccaagtggcaaactatcccttcaccaccaaaggcattcagattgggcatttcgaaaaacgctggcagcactatcaaatcatcgacacgcccgggcttctcgacaggcctattggcgacatgaatgatatcgagctaaatgctatggtggctcttgagcacctggctgatgcaatcctcttcatcttcgatgcatccgaaacatgcggatatgccctcgagaaccagtacaacctgctggaggaaatcaagaacgtctttgatgccccaatcatatacctgttcaataaaatggacatttcggactatgacggcgccaggcacgactacgttcaggagtacatcgacaagacggagaatccactgcttatcagcgccgcggaaggagaaggactggaagagatcattcagttaatccagcaggtggaaaaaagagagatagctgaagaagatgaggatgaatacgaagacgatgagaactactttgatttgacttga

SEQ ID NO: 3945 - DNA, 594 bp, synthetic construct
  source 1..594: mol_type = other DNA
atggccgaggatatgagcgagaatatcgaaaccaagtcagactttaaggacaaggcggaggagttcaaggcaaaggccgaggcccggactgaagccaacaaagaaaagtgggatgaaacctacaataaagggaaagacgtcgccggaaaagtgggcgagaacctttcgaagacgattgatgacacaatcattgcaatgaaggctatgcagaagaacttcgatgacaagtatcagtcctataaggagacaagcgcaaccaacaagatcagcgtggacctggcagaaacgaaggacttctactacttgcaggcgtacctagctggtgtagctaaagaagacatctcaatcgaagccaccgacagttccatctccatcaacgccgagctgaaaaatattctctgcagcattgaggaagatgaggaaaacccagctaacctgattatcactggagtgaaaactggcgttgctgagaggaccatcaaactcggcgccgaaatcgtcaaagaggagattagtgccaagcaagacaatgggatactgtttataaccatcccgaagaaggagatccccacaacaaaaattgatatagagtga

SEQ ID NO: 3946 - DNA, 204 bp, synthetic construct
  source 1..204: mol_type = other DNA
atggccatcccaaaggctcccgtgaataggatcattaaggacgcgggcgctgagcgggtcagcgccgaggccgtggatgcactggtagcatacctcgaagaagacgcagccgccatcagcaagaaggccatagagtatgcaaaaatcgctaaacgccagaccgtgaaggcggacgatatagccctggctattaaaaacgagtga

SEQ ID NO: 3947 - DNA, 672 bp, synthetic construct
  source 1..672: mol_type = other DNA
atggaattttacatcataaacggcgggccacggaagaaatacaacaccgcagagcttctgaaaaaggcctcagagggtattaaggatgagttgaaggacattgacgaggatgtgaacattcatcaaatccacctctacgacctgaacttcaagggctgcaaatcctgcttccactgcaagcgaattgggggcaagtactacgcgcagtgtccaattaaggatgaccttctggagctgctaccgaaggtgcagaatagtgacggaataatctttggcagccctatctactttggtgaaatcactggagagttaaggtcgttcctggagcggttcctcttcagcatactggtatatggaggggagagcaacgcccctaaaagaatgcccatggcaatgatctataccatgaacgtgacagaagaggggttcaatctgttctatggagataagtttgacatcttggaaaacgccatggcgaatctgatcagtaagccctactccctcaaggtctatgacacgttccagttctcagactattccaaatatgagaactacgcctttgatcccgaactcaaggccaaacgcaaagaagagcactttccaatcgatctagacaatgcttacaacctgggcaaaaaaattgctcaggacagcctgaagctcaatgaatga

SEQ ID NO: 3948 - DNA, 1011 bp, synthetic construct
  source 1..1011: mol_type = other DNA
atgagatataagatgtacgacgagatgatggagcagccggaggcgctcagacgcacatttgccagcgagagtgaaaacatggcaaacattagcaaaatcgctgggagcgtggagaccatctatctcatcggttgcggcagttccatctcgacatgttactccgtaagggatgcattggcctcggtcagtgacttacggatcgaagtgtttacaggttacgagtttgtttacaataaaaaactaaatgacggcgagaacagcctgttcatcgcgacgtcccagagcggggagactgcggataccttgacggccctgaagcgggcaaacgagttcaacattgatacagtgagcatttccaacgagcccgagagctccatgattaaggaagccaagtaccctatcgtaactctgggcaatactgaaaccgctattctgggaactaaaacctacataacccaactggcttgcctttaccagatactgttccccgcctcaggatatgaaaagacagacgagattatggagcagttagccaacatgcctgacctggtgcaggagctcctggaatcaacggaggaggacaataaaaacctggccgaagaactcaaggacgaagagggattctattgtctggggagcggcgtcaattacggcctggcctacaagctggctatgaccatgctcatggaaggagctataaagcatgcgtgcccactttatagcgcagaataccgccacggacttatcgaacgagccgaggaaggggtgcctttgatcttcctcgatgcagatctcgagtcagacgagctaaccaaacgtgccatcgctaacgccagggatgagctgaaggcaaattgcataatctacaacctcagggactatgctgacattaacccattgcttgcccccttcgtctttgtcgtgcccctggagtggtttgtgtactatctggcccacttcaatggcgaagatccagggagcacccggcacatcggcaaggttcgctattga

SEQ ID NO: 3949 - DNA, 546 bp, synthetic construct
  source 1..546: mol_type = other DNA
atgaacgtcgacctgagcaaggccagtatgaatgtggggcagcaatacgaagccattctcactaccattaacaatgaaggcaagacgaatgcagctccgttcggcgtgcgaatcatagaagaggacaaggtcatgctgaagatctttgagggtggaaacaccatcaaaaacataaaggataacggggaatttattgtaaacattacaaatgaccccatcatgttctcctacgccacaaccacttccatccccgatgagtatctgagtcggataaactacgacgaccatgagtttgcccacatcagcaacgcggacgcttatttcatctgtaaagtctattcgatcaaggaaggaatgcgcaaggataatatcaaagattccgaggcgaatgtgatcaaggcagatgtgcttgagctcaaaattaatagcccttgcgttaggccaatgaacaggggcatccacgccttgatggagtctctagtgaactactcaagaatcaacattgtggacaaagatacccaggacttcttctaccggaagatttga

SEQ ID NO: 3950 - DNA, 1371 bp, synthetic construct
  source 1..1371: mol_type = other DNA
ttgcaagaggccaacgaagacatagatctgatcgtaaaccacccaaaacaggcaattaacaagttagccctgccgatcattttcagcaacttcttcatggttttaaacaacatcatcgatggcatctgggttgcaggactgggatcaaattccctggcagccgtgggcttcgtaactcccctgttctttgccatggtcgggttcgcaaacggcctgggagcaggggccaacagcctcatctcacggtgcatcggtgctgaaaactaccagggggctggaaacagcgccatccattcgatgatgctgagcataattgtcacaatctttgcaacaatcgtccttttggtgttcttaaatcctctccttatgctgatgggcgccggggagatcatcgaggagactagcaactatggttacatcatccttgtgggcgcgtatagcatctttctgccggcaatgatggctgcgattttccggtccgaaggggaaatcaacagggcttcctatcctctgatgttgaatgccataatcaatatgatcctcgatcctatctttatctatgtccttggatggggcgtcaagggtgctgccttcgccactgtgctggctggaacctttgccacacttccaatggtctactggatgtttatcaaacaggacagtttcctcaaaatcaagctaagcgaatacaagaccaatctcaagatttacaaggacattctggtagtgggcatcccagcgagcattgagcaatttataatctcttttgtgtcgatcctaatgaattactggctaaccctcctggctggcaccctggctgttgccgcatacacggcgacgtggcgactggtgagtattggcgtcagccccatcattggtattggagtggccgcactgaccgttggcggtgctgcctacggggccaagaatttgaagaactttaagacggctttgaattacagtgcgattctcggaattattagctcaataatcatctgtagtattttctttgtgttcgccgagcagctctccttcatattctcctatagcgccgatagtgcaatcctcgctccccgcgttgtggacgccctgagaatcctgtgcttcttcattctcctgatgcccctgggggtcataagcggtaatctcttccaggccatgggaaaaggcaccatttccctggtgctcaccattttgaggtcattcattctagaggtgatatttgcgggcatatttgcctttgtgttcgactgggccgacatcgggatttatacaggcctggtgtgcggcatgatgtgtgggtccattgtgtcttatctttacataaactactacctgaaaaagcacgaggactattttatcgtgaaatga

SEQ ID NO: 3951 - DNA, 1875 bp, synthetic construct
  source 1..1875: mol_type = other DNA
atggatgagaaaactattgactacgagggaaacataatcacagtgagcgcagagggactggatgaggacatcgagatcggggatatcaccattacagatgccgaacccccagagggggacctagtcataacggccaggatcttggaagttgagataaaggaggtctaccctgcggaaattgtcatcgaaaacggtctttttaaggatgccattcccatcatcactgatgatgactcgctccttgatttagattacgacggggtgctaatcccaggcttcatagattcccattgccacatcgaaagttccaagctatccccctctaatttcgccaaggtggcattgacccacggaaccacgtccgtggtggcggaccctcacgagatagccaatgtgctggggatcgatggtgtaaggttcatgattgaagacggcaacaaagtgccctttgacttctattacggggctccctcctgtgttccagctactccattcgagagttcgggggccattattgacagcaaggacgtggctgagctgttgagccacgatgagattgttgccctgggggaaatgatgaatttcccaggtgtcctggctgaggatgaggaggtgatcgctaaaatcaaggcagcgcacgactttggaaagccaatcgacggccatgcccctctcctgtcaggagacgacctgaaaaagtatatctcatacgggatcagtacagaccacgaatgcagcaatttcgctgaagccgctgagaagaagcgggccggcatgaagatcatggtgcgtgaaggctcctctgccaaggatatggataaccttttcgacgccgatgagcgatttaactatatcatcgaggaagagatgagaggcaacatcatcgcagatagtactgacgaggctatggcagtgcccccattcgactttctcgtgtgtgatgatgtcgatgctcgcgacctcagcaaaggccacctgaataaattggtgaaaaaggcaattagcatgggaatcaatcctaaggaagcaattgccatggccaccttcaacccggccgagcattacggcctgaactgtggatcaattgacccgggcaagatcgcgaactttgtattggtcgatgacttgaaaaacctgaacatctccaaggtctgggttcatggggagctggtggttgacgacggcgaggttctcttcgatgtggaagctcctgagataatcaacaattttgacctggacgaagtcaagccttcggactttgacgcgacaatggaaatgggttatgtcagctctttaatggatgagaccaccaatgtgtttgtgatcgaagcttatgatggcgagctcatcacgggaaaactggaagagagcctccttataaaaaacaaggtaatccagcccgacattgataaggacattataaaaatcgcggtaatcaacagatacggcggtaacaacatcaccaacggattcataaaagggttcaacatcaaaaaaggggccatagccacaacagtttcacacgacagccataatattgtggcaattggcaccaatagcgaggaaatggcagacgccgtaaatctgattcgccagcaccaaggaggccttgccgtggtgtgcaaggaagatggcatccaggacattcttgacctcccgattgccggtctgatgtctgacaaggacgctgagtacgtggcctctaagctggtcgagctctttaacctggtccggggtctgggctgcacgctgacttcccccttcatgaccctgtcatttatggccctgctggtgattcccgcattcaagattagtgacttaggactcttcgactttgaaaaattcgatttcatcgacctcatccacaatatttga

SEQ ID NO: 3952 - DNA, 1218 bp, synthetic construct
  source 1..1218: mol_type = other DNA
atgtacaaaagagagatagagctgtccggccatatcattgatagcctgaccctgcctaaaaccatggacattatcatggacaacggtggcgacttcgacatactggaatttgacataggaaagcgtaaatcggacacgagtaaagctaagattatggtgagtgccgaatcccccgatatcctgaacagcatactggacgagcttaacttcattggagtgtctatctctgaaatcgaagaggttaacctggtcccttcgccaaaggataaagtcgctccggaaggcttttactcaacaagccatcatgttacgcacatttactacaaaggcaaatggattctggtggataaaatcgaaatggattgtctgatcgtcattgatgaagagaatgagaccgcatcctgcaaacccattgccgacctaaagaaaggcgacctcattgtggtggggcgggagggggtaaagatcacacctccccaacgcagtcgaggtaagcagggggtgttcgagttcatgaacagcgatgtgtcctccgagaagcccatgatgagcatcataaacgatgtggccactgaaatcaagaatgtcaaggcgaatggcggaaagatcgccctcgtcggcgggcccgcgatcgtccacacaggcagcgccccgatcgtggccaagctaatcaaagagggcattatcgatgtgatctttgctggcaatgcattggccacccacgacattgaatgcgaccagttcggaacttccttaggtgtgaagatagagaccggagaggtggtggcacacgggcacactcaccacatgagggccatcaacaggatcaataagtcaggctcaatcaaggcagcggtagaggatggaaccctgaagagtggcatcatgtatgaatgcatcaaaaacgacgtgccatttgtgcttgccgggtcaatccgggacgacggaccactccccgatgtgattacagacacggccgagagtcagaagctcatgcggcattatgctcaggaggttgacatggtcataatgatcagcacaatgctccattccattgcaactgggaacttgctccctagcagagtaaagagcatttgtgtagacatcaatccatctaccgtcacaaagcttgcagatcgcggaagcgctcaggttgtgggtattgtgaccgacgtcggggctttcttgccagttctgtataacgccctgcacgattga

SEQ ID NO: 3953 - DNA, 726 bp, synthetic construct
  source 1..726: mol_type = other DNA
atgtttatcggtctgctggccccggcgattgtgtctaccgttttcattatgctgtcgggctcagacctgttgaagaaggactttaagaacaaaatgatcggcttttacaaggtaaagtggctgaacgtgatctgggctgtgatcgtattcgccattgtgatagtctgttccattctcctaagtctgttgtttggacagcccatcgaccagttctccttcactgaaagcttctccttcaccggtgtgggcatcgccggcgcattcatcaccatcacacttgcttctataattgaggaagtggggtggaaagggtactgcgaggatagtatcgggaactacatgaactggttttgggaatccatgatttttggagtgctatggtctttctggcattttcctttaatctttattagcggaacctatcaagcagggctcatggtgaatcccctgtatgtgatcaacttctttgtcagcggcatcccaatgggatttgtcatcacgtgggtctatctcgaaagtgaccgctcaatcctggcctgcatgatattccacttcttcgttaatttcatgcaggagaaaatagcgctcactccagagacaaagtgcctggagacaattgtgataacggtggttgccatccttattgtcatggctaaaaaggatatgttcttcgagaccaggcacgtcggccggctgctcgagtacaatagcagccagcagcaatga

SEQ ID NO: 3954 - DNA, 615 bp, synthetic construct
  source 1..615: mol_type = other DNA
atgaaaaaaggcgaaaaaaggaaacaagagctattaaagatagcttatgatatgtttctgacaagaggatacgagaacacctccgttgacgaaatcatcgaaaaggcccagatcgccaagggcacctactactaccatttccagagcaaagagcagatgctcgaggaggtcattgatatgatgattgatagtgagatcgaaactgcaaagcagattatcggcatggacatctctgtcccacaaaaaatagtggggataattgcatcaatgaaacctaccgaagtggagcagcccattaaggacacgctgttccagccggagaatgtgctgatgcaccacaaggtccgcaagcagttgattgatgtgcttactccactgctgtccgaagttatccaagagggagtggacgaagggatcttcgaatgcgacaatatccccgaacgggtgaagatgctccttatcatctccgatggtacctttaacgagggcacattcagcgagcgagatatctcggtatttatagacatgacagagaagctgctgggagcggagaacggtacgatgagcttcatttatgacctcatcgacaagagtgagatggagggggcccagtga

SEQ ID NO: 3955 - DNA, 210 bp, synthetic construct
  source 1..210: mol_type = other DNA
atgggacttatcctctttttcctgtcatatttcctgctctttctgttcagccagatccaccactccttctacgacatcattattattgccagtcccatctgccatagcaaatctcaggggatatacttatacatgatgatgttcaaactgctactgaagaataagaacaggccaatagtggagaagctctttcgccggatcttgggctga

SEQ ID NO: 3956 - DNA, 975 bp, synthetic construct
  source 1..975: mol_type = other DNA
atgcttttcaatacctatgagccgggcaaattcgccttcagccacgaatctgtcgattactacgatcttattaactccgaggacaacctgaatggttcctccgacttcagcaagagtaagaagtggggcataatcggagtgccatttgacagcacctgctcttatcaccatgggtcccggtatgctcctacaatcatcagagaggccagctttggcctggaacagtacaacagcgagttcgacaagcttctggatggcgagttttatgactgcggggacctgaatgtggtgcatggaaactgcaaacgcacttgtgaaatcctggaggattcggtaaatgacctcattgaagccaacatcaagcctatcattatagggggagagcacagtgtcactctagggtcagttaatgccttatctgctctcgaagataaaaacaacctgaacgacatcaccgtcattcacttggatgcccaccgagacatcattgacgagtacatcggcgaaaagtactcacacgccaccatcatgaaacgcatctacgatctggagcccaaggaactgattcagataggaatcaggtccttctcggaggaggagagggatttcgtggaggataaggaaaacataatcagtttttacgcaaaggacattaagaatcagaatatccatctcaacgaagacgtgtccacattcgaggacttattgagcaaactggactcaatcgaaggtaaagtctacatctccattgatatggatgtgtttgacccctcagtggcgccatctgtgggcaacccaacgcccaacgggctgttcctggctgatgtacaagctatcttcgaggcactaagctttaatgaagagatagatattatcggcttcgacctcgtggagctcgcaagcgaccggttgggtgacattagtggagtcctggcagcgaaagttatttatgactttctgacactctttgcctga

SEQ ID NO: 3957 - DNA, 408 bp, synthetic construct
  source 1..408: mol_type = other DNA
atgtccacaaaagtggtggaacttaaaaccgtgaaggtcggaaagtacattgttctcgatggcgaggcctctaaagtcactagcctgacgacctcatccccggggaaacacggagctgccaaagcacgactcgaggcggtcgggattttcgacgggcagaagagaagtctggtgaagcctgtggacactaaggtggaggtacccatcctggataagagggtcggtcagattctcgctgtgatgggcgatcaagttcagatcatggacctggagagctatgaaaccttcgaactgccaatacccgcagagtttgaggacgagatccggggcgccgtgggtacagacttgggagtggaatacatcatagccctaggcaacatgaagatcatgcgcaccaagaaggtatga

SEQ ID NO: 3958 - DNA, 462 bp, synthetic construct
  source 1..462: mol_type = other DNA
atgcggatcgccattgtgtccgggaacgccgagggccctacggaattaaacgcgttcgacaatgccctatatgaggcaaagataggtgacgtgaacctcattaaggtaagtagcatgctcgaggctaatacaaagatagaaaaattgcccaagctgaaggcagggagcatggtgaactgcgtcctgtcaagcattgtttcctcgaatccgggcgagaacctcactgcctgtgtggctgttgccatcggcgacgagctggggtgcgcggtggaagtcgatggaatcgacaaagatccagaagaccttaaggatgaggccaccaagatggtcaaatacatgatggataaaaggaatgtaaagatcaacgagctgatcgtggaagaggctcatcacacagtgaaaaacattggatctgccatcgctgcagtcatctacattaccgacgacatcctggaggaatga

SEQ ID NO: 3959 - DNA, 1866 bp, synthetic construct
  source 1..1866: mol_type = other DNA
atgaatcaggacgatatacagatttgtaaagagatagccactacagttttcaaaaatgttgagaatctccttgatggccaggtgggaaacccaaaagcgggcgaatttgttaagataggcgcggacggaacccccactagtcatatcgacatcatagctgaggacgaggtaatcaaacttctcaaagacgctgattttgaaagttacctgatcagcgaggagatcggggaactacgactggggaaggggaaacagcagagcgtcagcctctcggaggaattgctgaacaacactccggagaacaagaaagaggaagaggaaattccgcgctacattttcttaatcgatcccctggacggaacaagcaatgctgttaaaaacatccccgcctacggaatgtccattgcagtggcaaatgttccaatcgggagggaggctacgctggaggacgtccaattgggcttcgtaaagaactactcaaacggtaacttttatgaagccgtcaaagggaatggagcaaaggaaaacggtcagcccctgactcccagcaaagaaaccgatataaccaaaatcaccttagggggattcacaaaaagcaagaccctctcggtgtccaaactcgtggacactgcaagaaggatgcgggtcctcggttctgtggtgctggaattggcctacattgcgaacgggaagtatgatgccttcctggacttgagggggagtcgaatcatcgatattgccgcatccaagctgattgtagaggaggccggcgcaatcgtcacaaataagtacggggaaaagctcaacaacagactcagcatctacgaaaaggccgtggtggtgagcgctggaaatgaagatctccacaagcaaatcatcaaaatcataaacaacgatgagttggacaaggtgacgagcgtggctatagtcagccgagtggatgagtataaatcagtcttattctcacttaaaatctttgaaacactgattgaaaagaatattgaaaccgtcctggagacctccctggctgaaaagcttgaggagataaaggaagacccagagttgcacaagatcattgctaagacaatgaacgagacccctgaaatcgcaatgcacattgaaagcctgaatttcaactacgagtttatggattatgccaagcagctgaatgaattgcggacagacattgcaatcattctaggcggtgacggaaccctcctgcgcacccagaaccaactgacgaaggagatccccatctttggcatcaatatgggcactgtcggtttcctgaccgagattgaagtggagaacaccttcaaggcccttgacgccatcctagatggggaatggtccaaggagaaaaggacgcagctgatcatatcccacgaaaacgagtctttccgtgcgctgaacgaggtcgtgataatgactgccagacctgcgaagatgctccattatgaggtgtcagtggacggggaggtggtagaggagctacgggctgacggactgatcatttccacccccagtggttcaacggcctacagtatgtctgccggcggccctattgtggaccctaaagtgggagccttcatcatcattccaatctgcccatacaagcttggcgtccgcccttttgtagtgtccgatacaagtgagattcggatcaagctgctgagacagggcaagaaggccatctttgtcatggacggccagattcagaaagaggtgaactatctggaggagcttgtgatcaagaagtcggaaaaagacgtttactttatgcggatcaataagaagtacttctataagaaggtgaaggataaactgaatgagggcggcctggagtccattaatcgcgttctctga

SEQ ID NO: 3960 - DNA, 1635 bp, synthetic construct
  source 1..1635: mol_type = other DNA
atgaacgtctttttagtggatctgacccatggaggcgtaaagatatcctctgagctgtcgaaatccaagaggttcgaaaaggtctttgcctacgacctgtacagcacactgaaagaggaagacgagcacctgttaaagacctatgatgtgaccatcctgaaggacttcgacagctttaaagaggaactcaaggagaacagcaaagagctgctgaaatcagagaaggagaaagaaaataattctaaagacctgatcatcaaccctattcactcttcactgaacattaaggacctgctgaaccagatcacggaagagattaaccctaacaatgatttaacccatctctacgagattattaaccaccaccaggctacaaagctggtgctcgagaactggaaggaagagactaagaaacatgacattaaaactatcgaaataactggagtgaagggtaagacgagtaccgccttcctcctaaaagagatcttcctggaaaataatcaaaacaccctcctcctctccagtctgggcgcatacttgttccggaaaaaccaggacaaagaaatggagctgattctccagaagaatatcagcatcacccctgccaacattataaacacaatccagctcgcaaaaaagatagcaaacccaaagtgcagttatttccccaaatgtgctgccaacaaaaacaagcaggaggagaacgaactgtttgaagagtacaacaacaacccataccacaatctcaactatgatattgccatttttgagaactcgctgggggtgtgtggcctgggcgacattggaatactgacaaatcttgtggagaattatccaatcgccaaggggtcctccaatgctatggaagcgaagaggcaggtattcgattgcagcctggtcatcattgaatatgaaactttgaacgagttctacaagggggagagcgaggagtacaaggacaagatcaatagcttctccctcaacaacaacaaggccaatgtcttctgtaagaatatcgactttgatatcgacaatactcaaatcaagatcacataccaagatttcaaaacacggaataagaataccatcaacggagaatttactcttaattgcttcgcacccggcccccatcacgttctgaatatccttacagctgtctcaacggcgttggccttggagatagacgagaagaccattattgctggaatctctaaattcaacggcatcgatgggagaacccaggtgaagactgtggaaaatagcatcatcattgaggaaatcaacccgggcattaacaccaaagccatcgaaagctcaataaatatgatcaaagacatcgacaactactatatcattatcggcggtaaatatggggttacctgcgaagaaatagatgaggagaagctatccaattacttgaacaattaccttacagataaccccaacaccaagctcatcctaacggacgaagtgggtaagagtcttaaagagaaactagacctgttgaatgataaggacgagtacgagataatgtttattgagaattatgaagaggcgcgcgatcttgccatcaacgagaacaagaatatcctgtttatttaccgctccaactatagtcaggtttctaagcgatga

SEQ ID NO: 3961 - DNA, 870 bp, synthetic construct
  source 1..870: mol_type = other DNA
atgattgttggcactcggggcagtaaactggccctggtgcagacagattacattaggcagtgtctgtacaatatcaccggagaagaagtggagaagaatatcataaagacaaaaggggacaagattacaaactcccagctgtataacatggacagtaaaggcttatttactcgggaactggacaacgctctgctcgatgaggaagtcgactttgcagtgcacagtctaaaggatgtgcctacggaattgaacgaggacttggagatcgtagctgtccccataagggaaagccccaacgaggtgcttattagcaactacagctggagcgagctggaagagggctccacgctgggtacgtcgtcacttagaagggaggccttctgcaaacaccataacaaggacttcgagctgaagccgatccgcggcaatgtagaaacccggatcgaaaaggtcatggacgggcaggtggatgcgactatcatggccgaagccggtctcaatcgtctgggcctgcagaaatacataaaggccaagtttccaaccgattatatcatgccagcagcagggcaaggcgccttagcggtgatgacccgaaaagactcagagcacaaggagacaatcagaaagctaaatcactatttctcccatcaggaggtcctcgctgagaagaccatcctcgaagagattggagtgggctgccagtggcccattggagccatatctggaattaaaaacaaccagttggaactcaaatccatcctccttgataagaatggagagatcctgtaccaaaaaaccctgagcgggagcatccgcgaggctaaggagatgggggttcaaatcggtaaggagatgattgagttcatctga

SEQ ID NO: 3962 - DNA, 948 bp, synthetic construct
  source 1..948: mol_type = other DNA
ctgaggacgatcaatgtgggcgttataggcgtgggagcaatgggctataaccatgcccgagtttactccaaactggaaaatgccaacctggtggcggtggctgacgtagtcaagcccaccctggataaggtctgcaaaaagtacaacacaaaggggtactctgagatcgaagacctgctaaaaaaccccgaaattgaagctgtgagcgtgtgtgtgcctaccactttccatcacgaggttgttatgcaggccataaaatacggtaagcacgtgttagttgagaagccaattgccttcaccgctgaagaagcccaggaaatgattgatgccgccaaggaagcgggcgtaaagctcgccaccggccacgtggagcgcttcaatcctgcggtgcagaaagccaaggagctgattaaaaacgaagtgattggggacctcgtcgcaatctcagccaaaagggtggggcccttcccaccccggataaaggatgtaggcgtggccatcgaccttgcaatccacgacttggatgtgatgaacttcctaattgaagagcctgtcaaacaggtctacgctacaatgagtagtagattggatcagtctgactttgaggaccatgcagaaatcatggtcagctttgaggaggacattacaggcatccttgaggtgaactggctgaccccctataagcgcagacaaatcgagattaccggaacggatggaataatcacagtagattatatcgaccagtccattgaagtctacgggaagtttgctcaggacatccaaatcaagccggtcgagccgctcagcgaggagctgaactcgttcctcactaagatcggaaatgatgagactccagagatcaccggggaggacggtctgaaagcactgaagatggtgctcgcagctaacaaatcctcaaaggagcacagcccaatcaattttcggtga

SEQ ID NO: 3963 - DNA, 615 bp, synthetic construct
  source 1..615: mol_type = other DNA
atgaatcaagagctcattaaccgggcccaggaactgcgaaaccacggctttaccacgggggagatagcggatgagcttaatgtttccatggatactgcgagatggctgactctgcagaaaacagaagagcctgtggagacagaagctccggtagacattgcaatcaactggaacagcttaggcggaagcgcaacccgcctccggtacgtgtcagctgcccttagtgacattgccttgaagcatggtgacattgacctggtggtcggcatcgccacgtcgggcatccccttcgccacaatcatggccgatgtcattgaagagctaaccgggacaactacctgcgtctctatattccaccccaagaaacaccgcaccaatccaaccaacagcgacgagggcgcaataagcagcaacttcggaactgtggaagggaaaaggatcgttgtggtggatgacgtcaccacctccggtgacacaatcaaggatgtcatcaaagtggtgaaggatcatggcgggaatcccatcgtagtgacggttctgattgacaagtccggactggaagaggtggacggagtcccaatcgagtcactcatcaaggtgagtcagctgaggtga

SEQ ID NO: 3964 - DNA, 807 bp, synthetic construct
  source 1..807: mol_type = other DNA
atggagtttaacatcgtcaaagagctgaacggtcaattcgacccaattgtgctaatcaaaacggatgagaagccagaagatgcgctggcccccaagcctgggagaggaggctgtgtgatgtccttcgtggcccagtccattgcaaagcgaaaggtcaccgccttcggccgtgaaaacatcacctgcggaggggtttcagccgggttcggatggggcaccggcttcaagacagataaggacaaggagtttcaggccacttttctctctcttggccttgactccgcaaaggataaggacgctttccttgagcggttgagctacttgcccaagcccacgcaggagatgtttaaaaaaggagagaggatattcagcgactttgacactgcctatgaaaacatacagaatcgcccgttatacgatgagggcgagtatgtggtctttaagccaattgagctgctggaagagggggaaacaccagactcagtgatctttacagcaaacacaatggaactgtctgctatcctccagctgaatggtagtttccgggctgagagtgcgcacatcatgacccctcaggcttccgcctgccaggcgattggcgccttcacttttgaacaagaagactcggacaaccccatccctgtactgagccccctcgacttcgcagctcgcgcccatatgagaaggctcatcccggatgactacatgaatctgagcatgccttggaaactcttcctgaagctggaagagctaagtaaaaacagcgtgtttcagacccacttctgggatgatttcgggaataaatga

SEQ ID NO: 3965 - DNA, 1422 bp, synthetic construct
  source 1..1422: mol_type = other DNA
atgattgagaataacatctgtctgctgaccgacagttataagctcacccaccactacctccaccccaagggtacagagaaaatctactcctatctggagagccgaacgggtgctgagtttaacaagactattttttacggactgcaatacatccttaagaaatacctagaaggcaatgtggtgagcgaggagaaggtcctggaagcagagaggatcgtggacgcgcatattgcgcccggcatcttcaataccgatgattggatgtacattgcgcaggagctggatggaaagctcccagttaaaatcaaggcagtggctgaaggttcccctgtaaacgtaggcaacgtgttgatgaccgtggaaaatacagacaagcgggcctattggctgccaaactatcttgaatccctgcttcttcaggtctggtatccttcaaccattgcaacactctctgccgaggtgaaaaagctatgcaatttctatctggatgttaccggctcctcaaaggacaatctgaactttatgttgcatgacttcggctaccgtggagccagctcaaccgagagttcacgcctggctggatctgcccacctcttaagcttttcgggcacagacaccgtgccatccctggctatccccgtgaactactacaataccaatgagatccaaggatttagcgtgcaggctacagagcatagcgtcatgacagcaatggggcccgagggcgaaatggagcaggccatcaatgttgtccggaacgcccatgatggcattctatcgatcgtgattgacagctacaactataagaacttcttggagaacgcctgcatcaagggacacaagctgaacgaggaaatcaacgaatttctcaagagaactgaagggaacaagattgtcttcagaccggacagtggggagccgatctccacgacaattgactgcctggagataattgagaggggcttcgggacccacaatacggacaaaggctacaagatcttcaatgagaacatcggccttctctggggtgacgggttagactatcagaagatacgagacatcctgttcggaataaaagcccaagggtgggccgctgaaaacctcatcttcgggatggggggcggactgcacaccgcagtaaacagagacactcagcggaatgccttcaagtgttctgcccagctgcgcgatggtgagtggattgacatattcaaaaagcccttggacacgagcaaaaagtccaaaaaaggacgcttcaagctgataaggaacgataagtttgaatacagtactgtgccaatagagactgaaggcaaagatcagttgcggaccgtcttcaaagatggggaactcctgatcgatgatagctttgaagaaatcaaaaagaggacagagacttacaacatgtttcctattaaatga

SEQ ID NO: 3966 - DNA, 1374 bp, synthetic construct
  source 1..1374: mol_type = other DNA
atggaagagtccaaaaccagatttgaaggtgtggaaagtatcctcggagaccccaagaaggccatatggaaactgagcattccactgataattagcctcttcatcacaagcctctatagtgtcatcgatgccgtttgggtgtcctctcttggtgccgatgcattggcgggtgtgggcttcgtgagtccaatattcattgccctcatgggaattgggaatggtctgggagccggagctacctctgctatatccaaatacatcggagagggggataagaaaaagtcagacaacggggcagtgcacgccatcgtgatcaccgttattgtttcaatctttaccactttgctgttccttatattcctaagggatatcctgcttagcatgggggcatcaaacacgatagactacgccatggactatggagtcattctcgtcagtggctcgattctggtgattctatccaactcattgtacggggtcctgcgcggggagggagatggcaatcgcactatgtacgccatgctatttgccagcatcctgaatatgattctcgatcctatatttatttactatctgggcctgggagtgaagggcgcagcgatcgctacactcatttcccttctgtttgtaaaccttctcctgttctattggttttacattaaaaaggacacctacctgcggccatttctgagcaactacaggttcgataaggacatcacagtcgacatcctgaaggtcgggtttcccgccagcctggagctggtgaacaacgccctctttgccgcactgttctccttgctgttaacggtggtcgcatcaaccgacgctgtggcagtctactcgacaggatggagggttgttacaattgccacaactcccatgctggctgtaggcaccgctctgatcagtgtggtagctgccaattacggggctagaagatatgaggacattttattggcccatcgatattccatgaagatcgcggtgctcttcggcttcattgcagcgatcgtggtctacgtgtttgccccgcaaatcgtgagcatctttgcctacacgggcactagcatgcggcttagctcccagctgattgctttcctaagcgtgatcgtgatctatttccctacaatgggctatggtgtcaccagcacattcctcttccagggcactggcaacgggatcaccgcaatgttccagacgatcctgcgagaaaccgtatttacccttggtttcgcgatcatcctcgctgtggtgttaggctatggggagtacggcgcctggtggggcatcatcctgggagagctggttgtgaacactataaccatgttctgggccgactggcacgtcaaacgcttgatccggtctaataattga

SEQ ID NO: 3967 - DNA, 420 bp, synthetic construct
  source 1..420: mol_type = other DNA
atggaggagaacaattacatcgtcttcaaaaaacaatacggcaacatcaaacgccctagaaccaaggaagtgtccatcaaccagaacggagtcaagatttacgaaaaggatcagtcaatgattatcaacatagtgctgcccatcgaggacagcatgaaggtataccagttctttgaggaatttaacctaggtgaagacatacagtttaatatcagcaacacgggagacttcgagtgcgtgttccgaggcatttcttcggtcattgataaagacagctatagctccttcagtatcacagtgcaggagaagtatcaaaggccagatcagctccaggtggaagccgactgcaatcaggttgatgagtatgggaatccgatccagcaatgcataggctgtgggctgcaccgggacgagatttga

SEQ ID NO: 3968 - DNA, 939 bp, synthetic construct
  source 1..939: mol_type = other DNA
atgattgacgaaatttatgactactacgaaaaacgtctaagcacttccaatagcatcctcaagatgagaggaatcgacgaagaaataaacaaactgcccctggggattaatttagatatcgcaaacatccttagcacaatcgacatatacgactacgatgaaaagaaagccgccaaaaagatcaaggaagcttatgttgaggtcttcaaggaggggatttacttgggaattggctttggcaagatcctgaaattcaactacgcgaagtcgcaccctgagaactatgtggagtgcctcgaagaggattaccaacattttaccttctatgacttcaagattgaggtactcaagaagatcattccaccgataaaagttaagaaatttacgcaggagcggcaccccaaagagatcaactaccgaaacgagagcttcgaagacatccggtcatacacatgcataaatgtcgagacccagtgggaagacaaatttgactttgaggtgaacccagatgccaaggaaatggaagattatatccgccaaagggaggtgaaaagttatgaggataacgaggaacttaagaaatgtgtggatgacttgaagatgggtatccagaatatcctcttccagaagttcttcgaggctctcgaggtggatctggagaaggccgagaacgggtgcgaaaacaatctgcgctttgatgaggagaccgcaaaggacgtcttcatttcccccgtgttctccaatctggagggcgagtttaaaatccgggagctggtcaacaaatatctgattcacgtattcaatgaaggaaagatcatcggcctgctgaacggcataaagattgtgctagaggacatccagaatgacaggttggactacgaagagatgaacagtatgtcatctagagaaagctttctgtacattaaggagggtctttga

SEQ ID NO: 3969 - DNA, 846 bp, synthetic construct
  source 1..846: mol_type = other DNA
atgattaatgaaattgtgaacggctataaaaaccagcaaaaggtctacctgagttcgatcatcaaaaccctgaatctggatattcccgacgtgttaagcgtctatccaaaatcaaaccacgacctggataagatcttcaaagagatcaagctaatagacaaggacgagaacatcctggagccgctcgaggaattttacattgacaccctgaaaagaggtatcctgagctccattcccctgggcaagagcttcatggtaaagctccatagggatgatgaggaacacttcaacgaagttctcaggatgaacagcggactgttccttaattacgtgcccaaaatcagttccctggaggatttggagaaatgcactccaaaatatggggagcgcgactactataagatgaaggaggaggagcaggtcattgtgatcgtagaaggaatactacgatccttttgtgagtttacaacggacaacaaccttatggttgactaccacttcgaggaactctttgatgtgctggacattgacctcaagctggccaagaaacgttgcaataagcggatcaagctgggtaataaatccaagatcggcatcatctctgcaatctacaagaacaagaacggcaagttcagggtgactgacttggtcaaggagcactgccagacaatcttcgaggaggggatgcggctcggaatacggaatgggatcaaaattgtgatggacgatgtgcattcaaaaagaattgatcctgatgactttagcaccatggaattgaatgagcttagcgcctacttctataaggaaataaatgaagaattagaacagctcgctcgcaactgttga

SEQ ID NO: 3970 - DNA, 1224 bp, synthetic construct
  source 1..1224: mol_type = other DNA
atgcagaaagacaattctaaccagaacaatgatctgaagcaggggattagtgatagcaaccaagagaaggatttaaaccacaagaccaataactcgaatcaaaataaggacttcaacaacagaatcagcaattataatcaagaaatggggttcaaaaataaatccaataactctaaacaggaaaatgattcgaaaaacgatttggattccaacaagaacatcaaccctttcaagcagaaggacgatgacttcgacaaggccctggacaaaaactacctagaagagtacaacacccagtactactacagcattagccagtgcacttcattggacaatagctcacaggggcgtctggtgtccaacatcctcctcaacctgatagagagcctggaaaactatcttctcaagatagcgcggatcgattacattaacagttattttgactgggacttccatctgttaaacagcagctttgagaatgccttctgcatgccaggaggcaaggtgctcgtgtactccggcatactgtcaattgccgataatgaggaaaggatcgcatatatcctggctcacgagatggctcacgccttgcttaaccatccacgagattacattattgtgaaggataaagaatacaacaacgttcttctgttcaagccctttagtctgaatcaggagttcgaggctgaccgcctggcgatgatgatcctgaaatgggcagactacgacatcggcaacatcccgtcattctgccagttcctcaggggaaactataacaagtttaactatttttccacgcaccccctctccgacgaccggctgatgaatatggaaagtctgattgctgagatcaacaatctaaaggacgattgctttgcccctattatcaagaatgaccgctctaacgcccttatttatacaaagagatatgccggctctcagtacaatgacaaagacaatgagatcgaggataggccaaaggtcttttgcacaaactgcggatactatgaggactccgacgcagtcttctgtagcaattgcggtagtcgcatggacgataagtctcgatgtgacagatgcggggcactcatcgaccccggggatgtcttttgtaccaactgtggcaatgtgttggttgacgattacaaatgttttaactgtggccacaaaataaaacccggtgatgtgttctgcgtaaactgtggaatcaagctgatccggtga

SEQ ID NO: 3971 - DNA, 399 bp, synthetic construct
  source 1..399: mol_type = other DNA
atggcaacattctcgtcaatcgaagaggcgagggagttcttcaagggagataaatttgccaccaacatcggggttcagctggatgagcttgaagacgactcctgcgtatgcagcctggagctatgtgacgactttagaaacgcctatggtgctgtcatgggtggcgccatattcaccctgggcgatttcgcatttgcggtgctcagcaaccaattgcaccggcccactgtgggcctgcaggtgagcatcaattacctgagtggagccaaaggggaaaagctcattgctaaggctcattacaaaaagaacgggcgaactacgtccgtcatcaatgtggacattatcgatgacacaggccgcgagattgcccagtttgtgggcaccggatacaagatgtga

SEQ ID NO: 3972 - DNA, 1008 bp, synthetic construct
  source 1..1008: mol_type = other DNA
atgaaggacattttcgatgaatgccagttcggcgagttcaaactgaaaagccggatcatcaggactggcgggtgggaaagggacacagaagacggaggcttcttaaagccaaaagtctttgacaggtatgagaagatggcggggaatgaggtcggcctcattgtctctgaaatgtttgcactggacccgaaggaccgtttttacccctactgtgccaacatgaactataagggattcattaaagattacaaacaggtaacaaacctatcacaccactttgaggtgcctatcctcggccagctggccttcttcttttttgatgacggcaccaaccagaaagctgagcccaatgacatatcgctggaggggattcgcaagctccaggcagaggtggtgatggccgccaagaagttcagtttcgctggctttgatggaatccaaatcaacatggcccataacttctacctggctagattcatcaacccctacttcaaccagcggaccgatgattatgggggaagcactgaaaaacgaatgcggatagttgtagagatcataaagctgataaaaaagatggtcggatgtcatgtgagctttagaatcaacgccgtggacggtcgcaaagggggcatgacccttgatgaaagctttaagattgcaaagatccttgcggaggccggtgccgattctgtgcagatcaccgctcgcacaatctccttcaagtttggagagactggcgaccacgcattcctgtcctatgccgatcggatggccaaggaactggacatcccagtgattctcgggggcaccttgcgagacatgaaaacgatgaatgagatcttgaatgagacggacattgagtttctctcactagcaaagcctttcgtggcgcaacaagacttcctgagcgaatggaaggaaaacggtgacggagtttccagatgcagggcttgcaataattgttacggtaaaaaggagagtaattgcttccagtttggggatgagtga

SEQ ID NO: 3973 - DNA, 576 bp, synthetic construct
  source 1..576: mol_type = other DNA
atgctggaactagataaactcctggacatctttaacgctggggacacattggtcatggacgaggaggcgactgatgcttgcaattactatagtgccgaggcccagaagatcacttgtgaactgaactaccaatacaacgacttcgacaaacggagagaattgttctcaaaactcatcaaccaggagctggatgacgagtttcgggtcttcacacccttctttaccgatttcgggaaaaacattcacctgggaaagaatgtcttcatcaatgcaggatgcaagttccaggaccagggcggcatatatatcggagacgacgtgcttatcggccacaatgtggtgatggccaccttaaaccatgatgaaaatcctaacaatcgagctaacctcattgcagccccaatacgcattggcaacaaggtgtggataggtagcaatgccaccattctgcccggcgtgagcattggtgatggggccatcattgcagccgctgcagtggtgaccaaggatgtagaggagaactccatcgttgccggggtcccggcgaagtttatcaggaaggttaaaacggactga

SEQ ID NO: 3974 - DNA, 1404 bp, synthetic construct
  source 1..1404: mol_type = other DNA
gtggctggtttgaacctgattgacagtgtaatgtattaccctattctaattatcgttatggccattgcaggcctctactttacgtttaaaacacgtggagtccagatacggctgttcttagagtccataagaatcctcacggagcccccagacgaggaaggcagcatttcgtccctccaggccatgcttgtcagcaccgcgtcaagggtgggaaccggcaatatcatcggggtctccactgcactctgcctgggcggtcccggcgcctgcttctggatgtgggtgatgtgtatcatcggcgcatcatctgccttcatggaaagtaccctggctcagatttataaacgaaaggacaaggagggggtcttctacggggggcctgcatactacatagagcatgggctgcataaacacaaattggctctgctcttttgcgtgtttctcctcgccacctacgccgtgggattcaatatgctttgcagctttaaccttcagtcaacattcatggaataccccttctaccacccaagcatcacgccgatcatcattggtgccgtgctggccattatcacctgctactgcctgctgggagggggcaaacgcatcgtcagtgtcacaagcaccctggtaccggtgatgggagtgtcctacgtcatcatatgtttgattgtgatccttttcaacatccaaaacgtgccagtgatgtttctgttaatctttcgcgatgcatttgatttccagagcatcctgggcggggttgcaggaagttgtatggtttatgggatcaaaagaggattgtactccaatgaggccggtgtgggttcagcccctaacgctagcgcgtctgcagacgtgtcccaccccgctaaacagggcctggctcagacactctctgtatatattgacaccctccttctttgtaccgcctctgccctgatgtgcctgtccactggagtggtaagggacgcggcggtttccggtgctccatatgtccaaaacgccatcagctctgtgttcggatggatcggccctatattcattacagttgctatgatcctgttcgcatttacaagcctgatcggcaacctgtactataccaataatgtcttaatgttcatgaacaacgagaagatgccttcgaagcggttcgtgcacatatttcacattgcctgctcactgattatcttcattggcgcaatcattcccatggatgccgcctgggctatggccgacattactatggggggcatgactttgatcaacctgcccgtgtgtctgctcttgagcaaggccgcgatagattgtctcaaggactatgagcggcagaagaagatggggctgaagccagtgtttaaggctagttcgatcggcctaaatgaagaagagctagattggtggaagtga

SEQ ID NO: 3975 - DNA, 336 bp, synthetic construct
  source 1..336: mol_type = other DNA
atggcgatccccaaggctcctgtcaagaggattatgaaggaggagggggctgagcgagtgagtgccgaggcagtagatgcactcgtcgattacctggaaaccgatgccgacgccatcgccagaaaggcgatagactatgcaaaactggccaagcggcagacagtgaaagctgaagacattgcccttgccatcggccgcccggaaaccagcgagtccacggcggagaatccacacaacctcttggaggtggttcagaaagtgctggacgccgcagctgacggaaagggcttcgaagagatcataaagagctttatgaagctagagaaaaaagaatga

SEQ ID NO: 3976 - DNA, 1335 bp, synthetic construct
  source 1..1335: mol_type = other DNA
atgagctatgtcgatgaagttattgacctaattgtgaaggaaaaccccgatgagccggagtttcatcaggctgtgaaagaggttctggagagcctcagagtcgtgatcgaggaaaatgaggagcagtacagaaaagacgcactgctggaaaggctggtgaacccagagaggcagatcaaattccgggtcccttgggtggacgacaacggacaggtgcaggtcaacaccgggtaccgagtacagtttaacagtgcaatcggaccttataagggcgggctgcgtttccacccttccgtcaatgtcgggatcattaagttcctgggcttcgagcagatattcaagaacagcctgaccggccttccaattggcggcggtaaaggaggctcaaattttgatcccaagggcaaatctgacagagaggtcatggccttctgccaaagttttatgactgagctctgcaaatacattggtgccgacacggacgtgcctgctggagatataggtgtgggggggagggaaatcggttacctgttcgggcagtacaaacgcatccagggactgtacgagggagtgctcacgggtaagggcctcactttcggcggaagcttggcacgcacagaagccactggctatggactactgtactttgctaacgccatgcttaaggcaaacggcgaaacattggaggggaagacagtgattatgtctggggccggcaatgtggctatctatgccatcgaaaaggcgtaccagctgggcgctaagccagtgacctgcagcgatagcaccggttggatatatgacccggagggcatcgatgtagagcttctcaaggagatcaaagaggttaggcgggagcggttaactgcctatgctgaggcacgaccctcggccgaataccacgaaggcaagggcgtctggacagtgaaggctgacgtggcattcccctgtgcgacccagaatgaactggacattgatgacgccaagaccctcgttgagaatggtgtcatcgcggtcgccgaaggggccaacatgccaaccaccttggaggccaccgagtacttgattgagaacggggtgctgttctcacccgggaaagcttccaacgccgggggcgtggccacgtccgcccttgaaatgagtcaaaattcacaacggctgtcctggacatttgaagaggtggattcccgcctccaaacaatcatggaagacatctttgccaatgtagatgcagctgcgaaggaatacggatttgagaaaaactatgtggttggagcaaacatagctggattcttaaaggtggttgacgccatgaatgcgcagggaatcgtatga

SEQ ID NO: 3977 - DNA, 549 bp, synthetic construct
  source 1..549: mol_type = other DNA
atgaaaatactcatcagcaacttaaaggggaaagagcttgtggaaattgctatgaaaaaccagatcgacaagctcatttcagtgtactccaactataacgagacatccctccttgaccagtacatgacgaaagagaacataaagattagtaccaccaatgcgatcgatgcctgcaagcagctgacggacataattcgccaccaagacaccgatgatgagatctacgtcgcaagcgacggaaactttttgggatcgatgctgaacttcgtagccaataaggaggctgcagactatattttctattccttcaacaatcagatcatccaaatgcccaggctgagcatcaatctgtcagaaacaaaaatgaaaatcctcaagagtctgaatgaaaccgagcagactgccattctgatcggcaagaacataggtatctctcgggccatggtctacaaacatatcaacagcttgatggaggatggcctggtggggcagactaagcagtatgaaaagtactacctaacaaatgccggcaagatgctgattatctga

SEQ ID NO: 3978 - DNA, 240 bp, synthetic construct
  source 1..240: mol_type = other DNA
atggcagaggataaacaggagccgctgagtcccatcgaagagattaagaaagagtatctggaaaagatagactactttgggaatcgaaggtccaaatacgccctatacaaaaagttcagcaagaaatacaacctcaaccgccgcgtcttcatccacatcctgaacgaggcgcatgaagacgtgggcagcccaaagagatatgaactcaggcggcagacccctaaggactataagcggtga

SEQ ID NO: 3979 - DNA, 840 bp, synthetic construct
  source 1..840: mol_type = other DNA
atgctcattgtttactgtcttaacttttatatggtgttttttatgttctacctcgtggggctgggactcttcgacgaaaaagacatctccttaaagggcattgaaacgctgaaaaaagtcgataaggtgtacgctgaatttttcacttcacgcctgttcggcagcaacttcgagtccatcgaagagactataggcaaagagattatagtccttgatcggacccaggtcgaagaggagtctgtgtttctcaaagaggcgaaggagatcgatgtggctctcattacagggggcgaccccctgatcgcaaccacccacagcgacttcctggtggagtgcgcaagagatggcaccgacttcgaagtgattcacggtagtagcatactctcttccgccccggccattagtgggctccaggcctacaagtttggaaaggtgacaaccatcccattcccagacctggagtacaactatttccctaagagcccttatatggccatcgaggagaacctgaaaaatgacatgcatactttggtcctgctggatattcaagcccacaaggacaagtatatgacgatcaatgaaggactggagaacctaatgacaatcaaggacaatctggaacgagaagggatgattgatgagaacagcctagccataggaatcgccagggtaggctcaaaggacaatgtcgtaaaggcgggatacatcaaggatcttttggactacgatttcgggggccccctgcactgcatcgtgatcccctcgaaattgcatatcgtggaggctgaatatctggttcacgttgcagacggtccaaaagagatcttagatgacctgtga

SEQ ID NO: 3980 - DNA, 1404 bp, synthetic construct
  source 1..1404: mol_type = other DNA
atgaatgtgttccgaagttttattgatattctcagcgataggacagtgaacgaacggggctatttcttctcaaataaggcactctttgccctgtttctgcccctgctcgttgagcaagccctagaattttgcgtgggcctcgccgactcaatgatggttgcctcccttggggaggtagcgatttccggggtgtccctggtggacttcttggttcaactgttgatctttagcttctcggcgctcgctacagggggagctgtgattgctggccagtacctcggaaacgacgagccagagaaggcctgtgacgcctccaaccagctggtgtggttcacaaccatcctggcagtgataatggctgtgctggtcctgatcttcaggccatttttaatcaatctcttcttcggtcagatcgagccggatgtcttcaacacgtcaagcatttatctcagctatatggccatctcaattccattcatcgccatctacaacagcggagcagctatctttcgtaccatgaacaaggcaaaccttcctatgcagattatgtttgtctgtgacatcctgaatgtcattggaaatgccatcctcctatttgtcttcggatttggggtggaaggcgtggccattcctacggttcttgcaagagcattggctgcggtcattatgatctactttgtcctgcaggaacggtacgagatccacatccggaaaaccctgaggcacaagtttgactgggtcctcctgcgaaaagtcttgaatgtgggcatcccttatggggtggaaaacggcgtgttccagctgggaaggattctgatcttaagcctggtgtctacattcggcactatcgccattgctgcaaactcggtcggatatgcaattgggatattctccgttcttcccggcttcgcgatcaacctggggctgactgccgtcatcagccgctgcgtgggtcacaatgactacgagcaggccaagttctataacaagaagatccttataattacctttttgagccatctggcaatcaatctgctcatattcgctctgcttccatacatactgcagatatacaacctaagccccgctgccagtgccctcacctatcaaatggtagtgtggcatggaatctttgccgtgctaatctggccgatcgccttcactctgcccaccaccttcagaggtgctggcgatgcgaaatggcccatggcggtaagtttgtccgtaatgttcatctgccgcatagccctgagctacgtgattgccgacttcatgggcgtgggtgtgtttggcacatggatcgcaatgtttattgattggtacgttcgcgccgccttctatgtgtacagatactttagcggcaaatggatggagtaccgggctgttgggacgaacttaagttga

SEQ ID NO: 3981 - DNA, 1461 bp, synthetic construct
  source 1..1461: mol_type = other DNA
atgattctgaatcactacatcctcagtggaatcaatgaaaagatcggggagatggaggaggaatttcagctgatgctactggcctcggaaattgtggattgctgttttaatttcttcgagattgaacgaaaaacttcaaaagtcggcaggcctcattttgagatcaagaatatgataaagctgatcttctatggctacattaacaaaatcaccagttccgtggtcttggctcataatgccaagtacaattttctctacagctttatttcccacggctgcgagcccagcgaccggaccatcagggattaccgcaagaacttcatgagcatcttccaactgatcatgagctttaccctaatagcgacatataaattgggtttgagtgattttaagtacatcgcaattgacggtacgataaaacaggcctataacagccccttcaacataattaaggaaaaagacatccggctcttaattaagcattacatggtcgaggagttaacaaaaaatgagattaagaagcttagaaagaccgcgaagaaatttttgaaggataagacgaaaaccgacgaggaaaaggtggacattctgttcgaatggtggcggctcctggatttctctggacaaagctctctgggtctgaacgaccacgatgcgcgctggatgaagatcaaggacaaaggccagatctaccccaagttttcatataatctgcagctggggacagacactgagtctaagctgatctgcggcgttaacgtggtccagaacccaaccgaccactaccagatccccgctctgatgaatcagatcatcagcaacctcaatcttaagccaacaaaaatcagcgcagacaccatttatctcacgctcgccaacctgaattacttggacaacctggggatcaccgccctgatccctacctcccagcaaaaccgagagaacagcggcgagaagccaaacaatcgcttcgctataggttactttgtgttcgatgagtacaaaaacgttttcatctgtcctgaaggccaggagctcacactggacgggatttatcaggcacacccggagaagggcggaggaaacaagctaaaagcagtctactccaacttcaacgcctgcaataactgcataaacaagggagtgtgtttcaagacagggcaccgttcaatcacgcgctacgttcacgagctcgcttataagactgagcggataatctcctccgaaaaaggcattgaagaatacaaactcaggtccagtactgtggagagccataacgggactttcaagagggtgtatctttatgattttattccgatcaccgggttaaaaagagtacagggactgatgttcgccatcgtagcctcatataacctgatcagattcctgaatcttattaaagaaaacaacatgtcccttcagtctgtgattaatagcataagatacatctcatcgagttga

SEQ ID NO: 3982 - DNA, 1098 bp, synthetic construct
  source 1..1098: mol_type = other DNA
atgctgaccatcaagatcccagtgcagaacatcgaggctacccgtcaaatagtgctcaagcacaagattctggactacgactacaagatcaaggtggaaaacggctttggccacataccgattagagaggaaaccgaggacgaaattctctctaaagtcatcgaagagtgcaaagaagaaattataaaacagaatagcgattatacgatcgaagtggtcgacctgaaccaaaacgaagagctggaaactgtcaaacgatatccacgcagcataactgagctcttaaaggacaagctatcggatgaggagatcgaggagctgaagaaatccttcgacatcatcggggatgtggtgattgtggaaattccagaggagctggaggcacataagaaggaaattggggaggccactctgcagttcaccaaacgcaagacggtatacatgaagcgcagcgctgtggaagggataacacgcacacggcagctggaactgattgccggtgaggacaatcctataaccatccataaggagcacggcaccaggcttaaactcgatgtgaagaatgtctacttctcacctagactggctaccgagcggaaaagagtgcaagaggaaacaaaggacggcgaagagattcttgatatgtttgccggaatcggcccctttccgatcgttattgcacgggaaaagaatgtggacatcactgcggttgacattaacgagtatgcaatcaagtatctcaacgagaatattaagctgaacaagttgcagcctaatgcccatatcacggcaatctgtggagatacaaggatcgttgccgataacgaattgaagggtcgaaaattcgacaggattatcatgaaccttcccggcctcgcgcccgacttcctagacttggccgtctccatgtgtaaggacggaggagtcatccactactacgagttttcagaggggttcagccagggcatcgagagggcccagatcgcttgcgagaaacagaacaaggaggttgagattctgaatacacggaaagtaaagagtacctcccccgggatgtggcacgtagtgatcgattgcaaagtgagtgataaaaaatga

SEQ ID NO: 3983 - DNA, 960 bp, synthetic construct
  source 1..960: mol_type = other DNA
atgcggaccctcgaatgggaggacaataaattaaagctcattgatcagaccaaactgcccgacgaactgacgtacgtctactgcagcaattacaagcaagtgattacagcaattaaagacatgatcgtgcggggcgcccccgccatcggtgtctccgctgccttcggtatggcactggctcagctggccggtgaggacatggaaaaggttgccgtggagatgaagaatgcgcgccctacagctgttaacctgatgtgggctgtggatcgcgtgatgaaggccgagaacatgttggatgaggcccttgagatggctcgtgaggacatcaacacaaacctggcaattggagagtatggcgcggagctgattgacgacggggacactgtccttacgcattgcaatgcaggggcgctagcctgcgtggattacggaactgccttgggcgtcttccgctccgccttcaatcagggcaagaacatccaagtgatctgtgatgagacccggccaagaggccagggagcaagcctaagcgtttgggaaatgcagcaggagggaatccctgtgaaactcattccagatgtggcatcgggctacctcatgtcaataggaaaaatagataaggtggtaatcggggccgacagggtggcccacgatggcatcgcaaataagatcggcagttttatggtggctctggctgctaagaggtttgacattccgttttatgtagccgcccctatcagcaccttcgacaaggaaatcagcatcttcgataccgagatagaagaacgagaccccaacgaagtcatctactatgggggggcgagaatctgtccggagggcactgaggtaattaaccccgcctttgatatagttccaaaggacctcattaccggggtcatcacagaaaagggagtgttcgacctgaacaacctggaaaaagactttaaagagcttttctga

SEQ ID NO: 3984 - DNA, 891 bp, synthetic construct
  source 1..891: mol_type = other DNA
atgacgaaaaaagacataacctgtggcggagaccataaaggggcccgatttgcacacattaccaaagtgcatccctgctacaatgaaaagctccacgataaggttggaagggtccacgtgcccatcgctcctaaatgtaatatcggctgcaatttctgcattcgttcaatcaatactgatgaggacaggccaggtgtcgccggcagcatcatggatgcggatgctgccgtggaacacgtcctgaacgtgacaaaggacagcgcaatcaccgttgtaggggtggctgggcctggcgattccctggctaacgaagccacatttgagttctttgaaaagatcaacaaggtaaagcccgacctaatcaaatgtatgagtacgaacggccttctgctcccgaaatacgccgagagaatagcagagctgggtgtgaacaccgtgacagtaactgtgaacgccgtggacccagagatactgaaggagatcaacggattcattttctatgagggcaaggtctacaagggcctggaggccgctgaaatcctttccaaaaaccagctcgaaggcattaaaaagataactgacttaggagtggtggtcaaggttaatatcgttctcatccccgggctgaacgacgagcacattccagagatcgcacgcacagtcaaggaatgcggggccgatctggtgaatgtcttgcctctcattcccctgaataagatggcggactatccaagacctggctgtatggagattgaaaaggcgcggggggaggtggaagagtacttgcccgtgtttcgcgcatgcacccaatgccgggccgacgcttatggaatcccgggtaagaaacatgaggatcaccatattggaaacgccccacagtctcacttctga

SEQ ID NO: 3985 - DNA, 567 bp, synthetic construct
  source 1..567: mol_type = other DNA
atgtacatcgagtcaaatgacccggagggagccaaagtctacgacatgattatacggcagatcttccaggatctcgtcctgccaccctccatcgatgacatgaaggcgtacgtaaatcccaacgaggtgtgtttcataatcgcaatcaagatgaggaaaacaagccagcacattaccctgaaggaggtggctaacgtcgactataacgctgaagatgacactacagtggttatcattgacaacgagaactatcttccaaacatcctcaaaaggctgtgggaaatcaatggccgcgaaaacgttcaccaacccagcagatacgtgattcacttgcccggggagaagaatgtgagcgatctggtggtagacgaccctcatgagaatctaaagcggcgcatttacgatgccgtcttccgaatagtgcctgagggttttaagatcatgaaagacatgagtgagggcgacatcgtctgcattgttgccaccgatgagctgatcaaggacgaatgggtggaaaaggcaaaagggtatatggtggaactcaacacgccaaagacctgggattga

SEQ ID NO: 3986 - DNA, 1236 bp, synthetic construct
  source 1..1236: mol_type = other DNA
atggtacagattgccctggtgtcctgcggtaccgagtacagtggcatccaaaaggaaatcgaaaaggccgcgctcaagtttggagctgaaattatcctgcccgagattgacctggattacattaatgaagcttatgagaaatttggcttttctgctcaaagctcaagcttaaaactgatgatcgcaagggcaatgtccattgtagagggccgatgcaagcctgatgccgtcttcatcgccacctgcttcagatgtgcggaaggagccctggtgcgaaacgaagtgcgccggttcatccagaacaacacccggattccagtggtgacatacagcttcactgagaggacaaaggctgatgagctgtttatccggatggaggcactagccactacagttacacgcagaagcattcttgctcgggagaagcaggaaggcctaactcttgggctcgactcaggttccacaaccacgaaggctgttctgatggaaaacaacaaggtcattggaaccgggtggactagcacgaaagatatcatagaatcggctaagactgctgccgccgaggcctttgacaatacggattacaactgggatgatgtggacggcatcggaaccaccggatatggtaggttcaccatggggcgggagtttggcgccgagctgatacaggaggagttgagcgtgaacgcaaaaggagccgtctatttggccgactgccagaaaggggaagctacagtgctggacataggcggcatggataacaaggtgattacagtcaataatggtatccccgacaatttcaccatgggcgggatctgtgcaggagctagcggcagattccttgacatgacctcacgcagactcgacgtggacatcacagagctggggccactcgcagtgcaaggcgactggcgcaaagccatgctcaactcctactgtatcgtcttcggtatacaggacctggtgacgaccctggccgccggcggctccaaggcagatgttgcagccgcggcatgccactcggtctccgagcaggtttatgaacagcagttacaggagatcgacatccgtgagcccttgatccaggtggggggaaccagtcttattagtggactcgttgaagcggtcagtgaaactctgggtgggatagaggtgatcgtcccggagtacagccagcatattggagccgtaggggcggccctcctggtgtctgggatgggcaaaaggcacgagtga

SEQ ID NO: 3987 - DNA, 507 bp, synthetic construct
  source 1..507: mol_type = other DNA
atggtgaaggtagctatttaccccccaaattcattgatcctggcggacctgattgagcggaaaggtcacgcccccttagccctgcagaagcagatccgccagaagatcaaagacccggagatcgatagccccccaatgaacattacagaggaagacccaataaacggattgaagtacgcggccattgaagtccctagcggggttaggggacgaatgagcatcatcggacccctgatagatgccgcagaggctgccatcattgtggacggcgctccttttggcttcggctgtgtggggtgcgcaagaaccaacgaactgtccattttctgcctccggaaaaaggacatacctgtccttgaagtggtctatccggacgatgaggatgggaccgtgctcatggttaatcaaatcatggagttcctggatagtctacccggcggcggaggcgacatggaaggtgataacgacgtgctcggcgagcagatcgggacgaaggggggaaaatga

SEQ ID NO: 3988 - DNA, 507 bp, synthetic construct
  source 1..507: mol_type = other DNA
atgcctgcgaatctgtgtattactccagatctcggtaaggaggacatggacccggaggtgtccacaaggatgatcattctctcctccaaggcaaatgtaagcgagagcgaggtcgtgaacttcctgcatatgctgaacctacccctgaccataaaatggacctgctacggggcaatgatcagcggcaaggacaaatacgtccggcaggccatccgggagcttcgcaagttggacccctacggcatcttcacgaaggaaagaggatttgcccccggcgacccccgacgttgcagaggccaccggtatgggccaagggaaggattccaccagatggagaaggaatttaggattttagactatgtgggagaggccctgaaaaacccacgcgatgtggaaatcgagaagaaagaacctgttagtgtcgattacttcaaagaggtgctcgataaggctctggaagaatctgaggggtcgtcaaaggagaagagtgaggacgataacaaatga

SEQ ID NO: 3989 - DNA, 1569 bp, synthetic construct
  source 1..1569: mol_type = other DNA
atgaaacgcggcaagcctatgctaatcaaaattaatggcgaagacgtggacattcctgagggctcgaccatcaaggacgccatagagctttccaatgcgccctataagaaaggcagtatcgtctgcttgatcaagggggagagcgagatacaaagcaacgtccttaagtataaaatcaagactcctaagggaagtattctcattgaattggaagtgagcgaaaaatcaaaacccctgactgatttcttcaaggagaactattccctcttcagctccaacaacgttcggtgggagacctcgaatgaagtggccatagggccggtagagtctaactttgaaccgtctcacgatgagttcaggtactttgacaatgatgtcctgataagcctctccggtttttccaaggaggccacgcacataatctttgtaaaggacgatcactcaaatgtgtatggcgtgccaaaatacagcgacaggggcgtgtttgcccgcattatcggaggccgtagaacgctgttctcactgaccgacgacgatgagatactaagcatcgagcccgtgatcgagcgaagcacggtcaccgacagtacaggcggctcaaatctggaggaggttctggaagagggcaaccagctcttcacctacgctctgctcgagccaaatgcaaagtctcccgcatccgtggagcatctgttctccctgattagaaacaacaaaattcaggttgactttgagtcgaacagttttttagggttctacgaattgaatgggctgactaaagatgctgaagagatcagtgagcggaagagaggtacagtaaccctgcggagcgagggaaacggcaaaggacgagtctatgtctacagggaggaccgagtccgggccgaaacccatacgaatctggccacagtgaagcaggggatggaactctttgataccgccaaaaagggagacttcatcaccgtgttaagcgatccagaaagaatcatgctgatgatgctaactcaaaaggaagcagaggaaaaaatgcagagcctcggcatcaagcacgtgcgggacggaaacctcgacgacgatgcgattgttgtgattcagacacccgaaaataccattgacatcctggaaaataaggaagtcaccaccttcggacttgccagcgatgaattggtgaaaatcaaactgactgacaaagctccacgcacccgctggtatctggagaaaatcagtggactggcagagaagcctgtaggcacattgaaggtctactttgctgtgcccgacatgaacatgttcatgttcaatggggacactgacgaatccaagggactcatcccagagaacatccctacagatattgtgaaggccggggagatcgccgtgaccaacatgtcaaggaagaacctcgggctgatcggtatcaggacaatcgatacagacgagttcggtcccacgggggaggcgttctccgctacaaacattgtgggggaggtggttggtaacattgaaggcctgaacaagcttaaggatggtagcactctttacatttacgaggtttacgatgaggaatga

SEQ ID NO: 3990 - DNA, 684 bp, synthetic construct
  source 1..684: mol_type = other DNA
atgagtctcctcgaagtgaaaaatctgaagaaaagctttggagacaacgtggtcctgaaagatatctccttttccgttgaaaaaggagaagtgctaagcatcatagggccatccggatcagggaagagcacattgctcagatgtataacagacctcgagacagaggacagcggtgagatcaactttgacggaacctttggcctcgtgttccagaacttcaatctgttcccacaccattctgtaatgaagaacatcaccaatgcgcccctgaaggtgcagaagagggacaaggctgaagtgtacgagcacgcacgggacctgctaaagaaaatggggctgagtgataaggaagatgcctaccctagtgaattgagcggcgggcaacagcagcgcgtctccattgctagggccctttgcatgaagccggatatcctgttctttgacgagcctacctctgcacttgaccccgagctgacgggcgagatcctggccgtaatcaaagacctggccgcggagcatatgactatggtgattgtgacccacgagatgaacttcgcccggaatgttagcgatactattatcttcatggatgagggtgtcattgtggaagagggctcacccgaagaggtcttcagctcggacaaccagcgaatgaaagagttcttaggcaagttttatgaatga

SEQ ID NO: 3991 - DNA, 654 bp, synthetic construct
  source 1..654: mol_type = other DNA
atgctcctgagtaaaatcttagaagagctgctctgggggatgggtaccagcattgagatattcctgctaactttgctgttctccatccccctagggctggccgtggctgccggaaggatgagcagcttcaagccccttcaatggtttatgaaagcttatatttctatcatgcgcggaacgccactgatgctgcagctgattgtggtcttctttggcccatactatatcttcggaatgaccctctcgcgagattacaggatgattgccgtcataatcgctttcaccatcaactatgcggcctactttgcggagatcttccggggcggcatcgaatcaattcctaacggccagtacgaggccgctcaggtactcggctataccagagttcaaacattctttataatcatcctgcctcaggtggtcaagatagtgctgccgtcaattacgaacgaggtaatcactcttgttaaagacaccagcctttcctttgtgctcgcaatccccgagatgtttacagtggccaagcagatcgccgcagctgaagcctccattagtgccttgctgattgcagggggtttctactatgtcttcaatgcgctcgtggcaattatcatggaacgctttgagaagcggttggactactacgacacatga

SEQ ID NO: 3992 - DNA, 825 bp, synthetic construct
  source 1..825: mol_type = other DNA
atgaagaagaagatagcaatcattctgggaatcgccctgctcgcattcctggtcatcggcgcctccagcgccggcttcctcgactttctagggggcgatggcactgccacgaatgatgacaatacgtttatcgtcggcttcgatgcagagttcccgccatatggctacaaagacgataacggggaatatgtgggattcgacctggacctggctcaggaggtctgcgataggaacaactggactctggtgaagcagcccatagattgggatgccaaggacagcgaattggactccggttcaatcgactgtatttggaatggattcaccatcaacggtcgggaggacgactacacctggtcggagccctacattgacaacaagcaggttgtggtggttaaaacagattccggtattaatagtctagccgacctcgatgggaagattgtggaaacacagaaggattcaagcgcgctggcagctcttgaaggggacaacaaaaccctggcggacacctttaaggacttgactcaggtggctgactataacacggcctttatggatctcgaaaccggtgcctgcgatgctgtagccattgatatcggggtagctcagtaccagatcagccagaaaggaagcgaccaatacaaaatgttagatgaggagatcagttctgaacagtacgggatcggcttcaagaaaggaaatgaccaactgaaagatcaagtccagaagacactggacgagatgtttgaggacggcacagtggagaaactcgcccagaagtatgacacctacggagtgcctggcgcgcttatacagaagtga

SEQ ID NO: 3993 - DNA, 978 bp, synthetic construct
  source 1..978: mol_type = other DNA
atgaacttcaacgagctggttaaatcacttcaagagttcattggtgtcagcaggaaaaactccatagaaaaggtgacaaaggctctgagcgaaacttataacatctctggagacgtcctgctggactttggagacgacgcatctgcaatcgacatcgggaatggtcaggtggtgctcctggccgccgatggcatctgggggcagctgatgagtgtcaatccttattgggccggctactgctctgtgcttgtgaacgtgaacgacatcgcggccatgggcgggcgacccatcgccatggtcaacacactgtccattaacgatgacgagatctatgatggggtgctgcagggcattgtagacggctgccgcaagttcaatgtgccaatggttggagggcacctccacccagacgccgaatttaactcattggatgtggcaatcgcgggaatcgctaaaaaggatagtctaatcacgtccgcgggtgccaatgtaggggataaggtgatagtagccattgacaccgacggccggcagcatcctcagttcgtcctcaattgggacaccacatacgaaaaagatgcaaagctggtgcaagatcagattagcgtgatgcaggagatagctgaagctcacctcccaaccgctggcaaggacatcagcaatcccggcaccttaggaactttggagatgctgttggaggcatcgggggttggagcctttgtggagctggagaggattccccggaaccctgatgtcagctgggaggaatggctgatggcttacccgggagccgcctttgtcatgacggccaaggaggaaaactgtcaggagataatcgatagactaagtccgtactccttcgaagtcgcagtggtgggcgacgtgattgaggacaagatgttagtgctgaaaagcggtgatgaggaagctgttctcttcgaccaacgcaaaaatcccgttcttgtcctcggcaattga

SEQ ID NO: 3994 - DNA, 633 bp, synthetic construct
  source 1..633: mol_type = other DNA
atgacactgctgggacaccacatccatgataaacttttcctctccaaggacaccctcgagatccctttcgatgaggaggccgacagtcccgagaacttcaagtcaatcatgtttaatgtgttcaagtcatatgtcattgagagcatcaaggaagtcgtgccaagttttgttgaaaaagaccacgaatacaacgtggtcaatagctatgaaggattcgtggaagaggactacgaatttgaagacttggatgacttcatccaggagctggaatacgggagctacgagggctccaacgaaatttacgtggatgaggacggctccctggtcgaagaggtctacatcgaggacggcgaagttccactagaggaagtttatattgaatatgacgatgtacccgtagaggagatctttgtggagcacgattcggacgacgatatttatgtagagcacgagagcgtggaggagatctttgtggagcatgacgacgggtctatagacgagatcatcgtggagcatgagcccaacgaaaatatagtgtacgaggatgcaccggtcgaagagatattcgtggaacacgagcctaacgaagagattgtgtacgaggatgcgccactggaagagattttctgctga

SEQ ID NO: 3995 - DNA, 1242 bp, synthetic construct
  source 1..1242: mol_type = other DNA
atggagattggagttgtggtacacggccccggaatcatcgatagcggctgggccataaaaatcatcgacattctctctaattacggaaacgtccactgccgtctcggcggaactatgggccgaactgcagttatcgacgcggctctggaggatgccatcgacattagcctgaaactcctccctagccagtctctcgaactcttcaatagggagggtgtggacatcatcttcctactgaactacgggaagtcccccgaaacgggcagagtctttgggtataaggtgttcaaccattactttaagcagatttccaacgaggactacctggctaccaatcacaagcctttatacgatgcaagcgttcccgtgatccaaatcgaacggccgggagaagaggacggcagtattatcagctggaacaccgaactgaacgagcagctaagcaaaagccgaaaaggcagattcaaattgggcctggggaagaagaatatggtggagagtctgtcctttaacttcgaagaactgttcgatcacctgaaaacatcgcttaaccttgtagaagtcaccccagaggaagtcgtgtccaactatttctccaataatcaggagcgcaaagatgaggaggacattgagaaaatcttgcggagttatgacgattatgacatcagccattacacctaccgcaagattcacggagtaagccctgacgagaacatcttcataaacggcatcgtggtcggctactccaatggggattccattgtcctggttgcccgggacgggttgattgccgacatcataaatggtacgatcaagtaccacggactggaaaagctcggtcccgttgatctggagagggtcatagtgaaaacaggtctgctgagaaagtctgatgacgtgaacccgcgcgtcttatcaaacaaggacattagccttaaggacacagagaggcacatctacagcggtgagatctcagaggatgactattcgtttaaagtggcctacgtggatcatgcagcttacgacatctataagttcaaggactttgacttggtggtgaccataggggatgatacttccctggtggcctcagatatcctttatcggttcgatattccaataattgggataaccgacggcgacctcgataaggtcgtggaaaacggatttgtgaatgagaagagtacaatcattgaagtggccagcggctttgacgacattgcggggccatcacatagttga

SEQ ID NO: 3996 - DNA, 507 bp, synthetic construct
  source 1..507: mol_type = other DNA
atgagtgacctgtactacgtcttagacgcatcggcgtttataaacggattcgaaccgaagagtgacttcaacattacagtttccgagatcacagacgaggtaaaggacctgaagagcagactaatcctgaatcaggccatcgatgacggtaaaatcataattcaggaggcccaaaaggagttcctggataaattggatgaaaccattgccaagagcggggatgacctcaggctgtcagggcccgataagaagcttctggctgtggctctggcactcctcgacgaaggcaaagagatcaaggtcttgacggacgactatagcatgcagaacgtgctcaagatccttgatatcccctacgaaagcattataaccgaaggcatcaaaggagtgtataattggaagaagacctgtgagggctgcaaaaaggagtaccctgccgattatccattcgatgactgcgagatctgcgggtccaaagtgtttaaacgccggattaaaacttactga

SEQ ID NO: 3997 - DNA, 519 bp, synthetic construct
  source 1..519: mol_type = other DNA
atgaagagtgaaacaatggagctgcataagaagaaggctccgatcaaggtgagctgtggaattataaccctcagtgaccgcttctccaacgacaaagagggaaaggagaaagacctgtccggcaaatacttgattgatgagctaagcaaaaagtacgacgtcgacgattacacaatcattcccgatgagaaggacatactgaaagacaccatcgagagcatgatcgataacggaatcgatgtgatcatcaccacgggtggcaccggcctggaaagcagggacattaccattgagactgtcgaacctctttttgagaaggaaatgaagggatttggtgaaatattccgggcaatttcatatgaggaactcggggcgggctcgcttttatccagagcaactgccggggtgtacaaaaagacgctcatcttctgcatgccagggtcacccaatgccgtaaaaacaggcatgaagatcttctatgaagagctggggcacctgaaaaagcacgcccagaaatga

SEQ ID NO: 3998 - DNA, 531 bp, synthetic construct
  source 1..531: mol_type = other DNA
atgtgcatggtctccaaggagtacctaatcgagattctgaaggaaaacaaagtattcgaacagggggaatttactctggcttcaggtaagaaaagcaactactatgtcaacatgaagcgcgccataacagagcccgagatcttgtctactatcgcaaagctcatcaatgagaagatagatgacgatacagacaagattgccggcccagctctgggcgccgttcccattgcgacggcagtctcgttggagagtaagaaaccgctcctgatgattcggaaagagaaaaagggctacggaacgagcaaacttatcgagggagatctgaatgagggggataaggtcatccttgtggaggacgtgaccacaaccggaggcagtctgctcaaggccatcaacgcaatagtagacaacggtggcgtggtgcagaaagcgttcgtggtggtggacagggaagaaggggccatggagaccttcgccaatgaggggatcaccttagaacctctgatttccgttagcgaatttttcgaatga

SEQ ID NO: 3999 - DNA, 285 bp, synthetic construct
  source 1..285: mol_type = other DNA
atgcggattgccaaggaactgattggcaaggaggtgctgggaacagacgtgaccgtgatgggaaaagtagttgacgtggatatcgatgtggaggacaatattattgaatccatcatcgtcagtaaagggggcatccaggagtcactgaacatctctaagagcgaactcgtcatcccctttgatatgataagcaagatcggggataagatacttttgaaagacgcattcggcgaggacctcgaccagatggcggacgagatccaagatctgaaaaaccagctatga

SEQ ID NO: 4000 - DNA, 114 bp, synthetic construct
  source 1..114: mol_type = other DNA
atgatggtattcggcatcgaagatccctggatttggggagtgtatgtgctgctcatcgggatgaccctagtgtgcgtcgcctacggcgcactgaactggaacaatgaggactga

SEQ ID NO: 4001 - DNA, 1650 bp, synthetic construct
  source 1..1650: mol_type = other DNA
atgaactactttctcctaggaattgtgtttatcgtttacttcctgatggtaggttacgtggggtacctagcctggaaacgcacaaattcctctgaagacttcttggtggcggggcgggaaacacacccatacatcatggcattaagttacggggcaacgtttatcagcacggccgctattgtcgggtttggaggagtggccggtaaatacgggatgggtatactatggcttgcgttcttaaatattcttgtagggatattcattgcctttgttttcttcggcaaacggactcgaaagatgggcaagaacctgaactccctaaccttccccgagtttctgggccgccgattcgatagtaaattcatacaatactttagtggagtgctgatcttctgcgctatgccgatttacgcggccgtggttctgatcggcgccgcgagatttatggagagttcgctcatgctggactttaacctggcccttttcatcctggctgtcgtgatctgcggatatgtgctgttcggcggcctgaagggggtgatgtacaccgacgccctgcagggaacaatcatgtttatcggcatgttgattctccttgttttcatctattgggtgctgggcggggtgactgaggccaacactgccctcacaaacatggctcacctctatccccctgatgccctcgccgaagggggcacaggctggaccagcttccccaagctgggcagcccattctggtggactctcgtcaccactatcatcatgggcgtaggtatcggagccctggctcagccacagcttgcagtaaggttcatgacggtgaagtccaataaggagctgcacaggtccctcctcattggagctgtcttcattgctgtgatgaccggtaccgcttacatcgtaggctcactgtgcaacgtctacttctatcagaacttcggccagattgcaattgactatgtggggggaaatatggacagcatcatcccaaccttcatctccaccgcacttcctgaatggtttgtgtacatattcctcttgtccctgctggcggcggcaatgagcaccctgtcctcacagtatcatactcagggtaccgcactcgggcatgatattgtcgacgcctttaaaaacagaggaaccacccgcgaatataccgatgaggagattttggaaggctctagcaaggaggagactcggataggctttattagcgtgagccaactggggatcttgattgctgtggtgctgtctttaatcatcggcctcatcctgcccggaggcatcgttgctttgggtacatctctctttatgggattatgtgcagcagcattccttcccgtctactgcgccgccctcttctggaaacgtgccacaagaaaaggggccattgccgggctgctgtccggtacgttcacaagtcttttcttgctcgtctttgtgtataagaagaccgctgtgggcctgggcatctgtaaggccctgacgggtatggacatgctgatcaatgtcatgccctggtattcaattgacgtgatggtctttgccatacctgtttctgtcatatttacagtggttgtgagcttgctgtcacctccgatggatgagaaggtcatcaagaggagctttgagggactgtcggaagagtga

SEQ ID NO: 4002 - DNA, 1302 bp, synthetic construct
  source 1..1302: mol_type = other DNA
atgatctggaatcagaatgccgaatgtatggataaggaggagaaagaggaaatgcaactggccctgctccagaaacaggtgaagcgcgtttacgaaaaggtgcccttctatagggaaaagtttgataaagcaggctttcacccagacgacctcaagacccttgatgacattaccaagataccatttacaaccaaggcggatttacgcgaggcctacccatttggactgttcgccgtgagcgatgatgagattattgagattcacagtacctcaggaacaaccggtacacctgtcgtctccggctacacacaaaaggacatcgacatttggggggagtgcacggcccgagccatcgcaatggctggcggggacaagaactcaaaaatccaaaattcctatggctacgggttgttcaccgggggattcggtatagaccacggtgctaaagtgatgggcgccacggtgatacccatgtcttctggcaacactgcaaggcagctgaagatcatggaggacttccagagcgacatcctcacctgcacgccatcctacgccatgtatttggcggagtcccttgaaaaggaaggatacactgcagatgacatcagcctgcacggtgggatcttcggagctgagatgtggactgaggagatgaggcgttcgctcgaggaaaagctgggcatcactgcacataacatttacggactgacggaactaatgggtcccggggttgctgccgagtgcaagtatcagacagggttacacatccaggaggatcatttctatcccgagatcattgaccctgaaaccgaagaaatcctggaagacggcaaaagaggggaactggtcttgaccaacctgacaagagaaggcatgccggtcatccgcttcaggacaaaggacatgaccgccctgcgccgggatgagtgtccgtgcggcagaaccactgtacggatggatcgcatcactgggcgatcggacgacatgctcaaaatcaaaggagtcatggtttacccaagtcagatcgagacagctatcctacagattgagggactcactgcgaactaccagatccatgtgagtcgacctcacacccttgacgagatagaggtgaaagtggaaaccagccccgaggtattctcagacgagatgaaaaagatagaagaatttgagcggagaattgccaagaagattcagagcgctattggcataagcgtggatgtgacgctggtggagcctgagtccctgccccggagcgaaggcaaagcaatccgggtcattgacgagaggaactttgattga

SEQ ID NO: 4003 - DNA, 432 bp, synthetic construct
  source 1..432: mol_type = other DNA
atgagcgtaaaacagctcagtgtcttcctggagaacaaagagggcaagctcaaaaaagccgtgaatgcaatgagtcaggccggagttaacatcagggccctgtccattgcagacagctcgaagtacggaattttgcggttaatcgtgtcagacaacgagctggctataaaggccctgaaggaggagaattttaccgtaaaggaaaccgaagtgatcgtggtgggcgtcaaggacgagcccaacgggttgaacacaatgcttgagatcctggaaaaggagcacatcaatgtggaatacctgtacgccttcgtcagctctaagacggatgaagctattgttgtcgtgaagatagggaactatgaagacggcctcaaagccctggaaaatgcgaatgcaaacctcctttccaaagaggatctggcggagctatga

SEQ ID NO: 4004 - DNA, 1278 bp, synthetic construct
  source 1..1278: mol_type = other DNA
atgttagatcggctgaaaagcattagtttgggaaattggatactcatcggaatggtgttaggcctaatcacaggcgtaatcttaaacctgtatgtgcacagccaattcattgacattatcctcatcgataacgtgttctacctgggaggcaacatatttatcaagctaatgaagatgctggtggttcctctggtcttctgttcgattgtggtgggggtggccagcattagtgacattcgcaagattgggaccatcggtgggcgaaccatcctcatctaccttattacaactgccttggcagtttccatcgctcttctgattgccagcttcatccatccaggggctggcctgcacatggctggccttgcaacggcctccaacgtgagcaccaacgtgaccattaccaacacaatcctgggaatggttcccgacaacccaatcaactccctggccaatggcgacatgctccccgtgatcatttttggcgtactggtaggaatcattttggctaagctaaaggaggagaccgaaaccataaacaaggtctttgaggaaggcaacacaatcatgatggagatgacgtcgatagtcatgaaattcgcccccatcggggtgttctgcctgatggcgaagacttttgccaccctgggattcgacggtcttatgccgctgagcaaatatgtcatatgcgtgctcatcggcctggcagtgcaggcattcattgtctatccgagtctgatggtcatcttcactcggctgaatcccatcaagttctttaagaaattctactctgtgatgttgtttgcctttagctctagcacatccaatgcgaccattccactgaacctcgaaaaactcagcgagctgggtgtctcaagggaagtctcatcctttacaatccctctcggcgccaccatcaatatggatggaaccgctatcatgcagggggtggcagtcatgtttgctgcccaggcgtacggaatggacctgggggccagtgcgctccttacagttattttcacggcagtgatggcctctatcggcacggctggagtgccttcagtgggcctgattaccctcaatatggtattcacttcaatagggttgcccgttgacgccataggcatcattatggggatcgatcacatccttgacatgttcagaactgctgtcaatgtgacaggtgacgcaatatgcactatcattgtgtccttcaagaacaagtctatcgatctggatgtttttaatggtaaaaaacaggccgagggtagttcctga

SEQ ID NO: 4005 - DNA, 279 bp, synthetic construct
  source 1..279: mol_type = other DNA
atgccctttaaaatcgacagtgccatcgtcaaaaaagatatggactccggcaaatatgacttggtggacccagaaggaaagttctcacaggcggatgccctcatggtcatcaatagcgacgatttcattaccgtgcagctgataattaacgctatcctacggaacgacttcaaggcatggaaggatgtaaaatgggaggggggcgacagcctcaagtctctgctggtgaagcttggttacgggaaggaggagatagttgaaatgctgaaggagttttga

SEQ ID NO: 4006 - DNA, 3177 bp, synthetic construct
  source 1..3177: mol_type = other DNA
atgcctgtggacaaggacattaataaagtgctgataatcgggtctgggcccattcagatcggccaagccgcggagtttgactactcgggttcacaagcttgcaaaagccttagggaagagggtctggagacggtgctcgttaacagcaatccagccaccatacaaactgatatggatatggccgatacagtttacacggagcctctgactgccgagctagtggctcagattatcgagaaagagaacattgatgcgatactccccaccatgggcggccagaccggtttaaacattgccacggagcttggaaaactgggtctgttggagggcataaaggtcatagggtctgacgtgcagacaattgcagatgtggaagaccgagacctctttgccaactttatggacaggctagatgagcccattcccaaatgtcatgcagtggaatctgtcgagggggccctcgaagccgtcgaggaaatcggataccccgtcatcgtccggccggcattcactctaggcggtaccggtggaggcatagcccacaataaggaggagctgatcgaggttaccacccacgggcttgacatgagttacatcaaccaggtattgatagacgaatccgtgttgggatggaaggaaatcgaatttgaggtcatgagagacaagaacgacacctgcattatcgtatgcaacatggaaaatgtggaccctatgggaatccacactggggacagtatagtggttgctcctattcaaaacctgaatgatgaggtctgccagcgcctacgcgacgcgtccatcaagatcatccggaacctgggcatcaatggtggctgcaatatccaatttgccctcaaccccgaaaccaacgagtacaagattattgaagttaacccccgcgtaagccgaagtagtgcgctagcatccaaggctaccgggtatcctattgccaaaatctcctccaaggtggcactgggcctgacactggatgagatccagaacgacattacaaaagagactccagcctcctttgagccatccatcgattatatcgtggtgaaaatcccacgctggccgtttgacaagttcaaaggaatcgaccggaagattggagttcagatgaaggcaacaggagaggtgatggccataggcaggacctatgaagaggccatccaaaaagctatccggtcactggatatcggcctgcatggcttcgagtatctggaatacactgaagacaacctggccaaccctaccgatgagaggctcttccatatgtactctgcaatcaaggacggcagaagcgtggaggagctggcagagctctctaagatggatgcattcttcctctacaagattgagaacatagtggagtttgaaaatcaggttacgaaagaggccctggaagatgaggagtttctgctgaaggccaaaaaactcggattcagcaatttcacactggcaaagcttgcaggaattgaagaggaggatgttaaagcactactggataaatttgatattaagccatcctataagatggtagatacctgcgctgctgagtttgaagcgaaaaccccctattactacagcagctatgacaaaggaaatgagctggtgaagtcggacaatcggaaaatcctgatcatcggcgccgggcccatccgaatcggtcagggaattgagttcgattactgttgtgtgcattcgtcccttgccctgaaggaccagggaatagagacaattctcgtcaacaacaaccctgaaactgtgagtactgactatgacgtgtcagatgacttgttcttcgaacccctcacctatgaggatatcatgggcatcattgagcaggtcgagccagagggggtcatcgttcagttcggggggcaaacaagcatcaacctcagcgtgcccctggccaaggctggagtcaagatactgggtactccatacgagagcatcgaccgcgtggaagacagggaaagattcacggaagtcctgaatgacctgcacatccatcaggccccctacggattggccaatagttttgatgaggcaaaagaggccgcggagagaataggcttccccgtgcttgttcgtccgtcctacgtgatcggcggcagggcgatggaaatcgtctatggtgtagatgagctcgaggagtacatgaaagaggctgtcaaggtctctcccgagcatccgatcctcgtggacaagttcctggaagatgctgtggagcttgatgtagaccttttgtgcgacggggaggacgtgttcattgcagggatcatggagcacattgaagaggcgggtgtccactcaggcgacagcgcttgtgtgatacctcctcagaccattccagagcacttgcttgaagtgatcagagagaatacgcggaaactggctctggaattagatgtcattgggctcatgaacatccagtatgctgtgaaactggatgaggaacgagtttacatcatcgaagccaacccacgcgcgagcagaaccgtgccattcgtaagtaaggccattggggtgccccttgcaaaagtggccaccagcttgatgatgggcaagacccttaaggactttaatctgaccaaggaaatcaagatcaaccacgtcgctgtgaaggaatctgtgttcccattcctgaagttgacagaatcggacagcgtcctggggcctgaaatgaaatccacaggcgaaagtatcgggattgacgagaacttcggcctggccttctataagtcacagctctcagcgggcatggacttgcctaaggaaggaaacctcttcatcagcgtgcgcgaacaggatcagcccaagattcagccgattgccgagaaggctcacgctctcggctttaacataatggctacgaaggggacagccaacagcatatttgacgttcccattacaagggtcaagaaggtttcccagggacagcctaacatcaaagaagccatcctggatggcaaggtggacatgattattaacactccgcacggggaacaggcttccaaggacggctacacaatccggcgtctcgctgtagagctgggaatcccatacgtgactaccttagccggcgcccgggccgctctgaatgcaatcgcagccgtgaaggaaaatgatttaaaagtgaaatcattaaatgagcacattgccaatatttga

SEQ ID NO: 4007 - DNA, 1080 bp, synthetic construct
  source 1..1080: mol_type = other DNA
atgggaaatgaggccaagctggctttggaagatgggacggtcctaaaaggtaaagcctttgggtacgaaactacgactgtcggtgagctggctttttcaacgggcatgtccggttatacagaaagcctaacagacccctccttcaagggccagatactgatgagcacctatcctctggaaggaaattacggggtcagcgaagattggtaccagtccgacagtgtgcatgtcgaaggctttgtagtgcgcgaagcctgcaagaagctctccaacttcgggactaaaaagaccttggacgactttctcaaggagtttaaagtatctggcatcgaagatatcgatacaagggacctgactttaaaaatcagagagaaagggagcctcaaggcagcccttgccaccgaggagattgatgatgacgagctcgtggccaaggcacgtgagcacacaagcatcaccgagctggatctggttccattggtgtcaacccccgagatcaaggcgttcggagactttgacaagacggttgcgatcattgactgcggagtgaaacggaatatcattaagtgtttcctggaaaacaatattggcgttgcccttttcccatatgataccgactatcaaaccattctggactacggagtggacgggcttatggtcagctcaggccctggcaaccctgagcgactcaccagcacaatagagaatgtggaaaaactgcttaaccggttcccagtgttcggaatctgcatgggtcagcaggtgatcgctaaggcattcggcgccacaacatacaagatgaaatttgggcacagaggagcaaaccagccagtgaaggacctgaacactggaaaagtgttcatcaccagtcagaaccacggcttctgtatcgatcccgagtcgctggctggcagtgacctggagctcaaccaaataaacctcaacgacggcactccggaagggttcctgcataaggaattgcctttacgcaccattcagtaccacccggagtccggtcccgggcccaatgataccaaggtcctgttcgaggagtttggccagatgattagggagtactga

SEQ ID NO: 4008 - DNA, 750 bp, synthetic construct
  source 1..750: mol_type = other DNA
atgtctcatttcgacaacagtgacttcaacaaggatctggatgtgaacaaccaatatgacccagtgaaaggcaacgacaaggccttcaatgggaagtattcactcaacttttcaatctctcacaacgaccccaatttctcgaatctggcaatgtccagcagtatcatctctgagaccactctggaggaagactgcatcctgctgaaaaagaaatccctgctcaagcggaagtctttaggctcccagaagatttactatcgagagattctggagttggacctgatcaagtccaccctatcatcgctgtacagttccataaggatcgtgtattccaaaaacgggtacagcaagcgggtcctcagtcttagcagttccgatggattcgctgtaaggtggttctacgacgccttggttgtgaagtattcctacgtcaagagcgggcttgacaaaaagtacgattttaattcaaatgagagcgactggatagaagcgaatgagagcaacaaaaacacgagtctcagcggtgatctcacaaatagtaacgatctgaacgattctagcattaaagaagacgatttgaacaattctaatggctccaacagcggcgatgaatcccacaattcgctgtcttccaagcagtctaaactcagcgactttgtgtcacagatgaacaaggagctttcagaggaggaaacacgcagcctaaaaaagaagatgaaatttgagagatgtagcagcggagaatactga

SEQ ID NO: 4009 - DNA, 390 bp, synthetic construct
  source 1..390: mol_type = other DNA
atgttcctggatcggttttcactcgaacgcaatgatctgaacttcaggaaatacaacctcgcaatcctaatcgctagcctgcttctgtacctgttgaacatttattttttaagttccttcggagatttcttcaaattttattttgacgacctctttgcaattatggtcctcttcagcttcctgaaccttgtttttccctataagatcgacaatttctggataattgtaatcatcaccatattcgccgccttcttttgggaatatgtggcgctgttcatcaagccaggctcggtgttcgactacctggacattctcgcttactttctatccatggtgatctacctgatcctgatttacgccttcgagggggagttgaatgtcagcttttga

SEQ ID NO: 4010 - DNA, 228 bp, synthetic construct
  source 1..228: mol_type = other DNA
atggaagacgaggtcatcgacgtagaggattatgaggttaaggagacagcaattgtggtcagcgatgacgaagaggataacgactactctaaaagttcaaacgacaacaattacacatccaacactaccttccggacggccaccatcagcctttccaatgaaaagctgatcatactagctctggtggcgattgtgctcatcgccatattcctgctcaccttttgctga

SEQ ID NO: 4011 - DNA, 231 bp, synthetic construct
  source 1..231: mol_type = other DNA
atgaaccagttctgtccaaagtgcggcgcaaagctgctagacccttatgccaagttttgcagccagtgcggcacgaatctgactgagaagaaagagattaacatcgatgaactcccggaggagcgcatcgacctgagggaagggatgacaaacaccaataagggaatgtacagatacaccaaatggggtcggcgaaagaaaaaacccgtgaactgggacatggaaaagtga

SEQ ID NO: 4012 - DNA, 351 bp, synthetic construct
  source 1..351: mol_type = other DNA
atgagaagtttagaggaaattggcgcgaaaatagaggaactgaatgataaaattgcaggaatccgggccgaagatgaggagaacctcacgaacgaactgaaggtcatcttggccggctccgagctgcagtcaatcatcctgacaagcactctcacaagcaaagagcagcaagtgcgggacttgctggacaagttcgtacagcgaggggacgagctaaacgagaggtacgaagaggccagcatagaggatgatgcagccgctaagaaccagctgcacgctatgatttggaccaatgacatccgcatcgacaccctcaagtgggtgcttgaagaggaagacgtgggtatttga

SEQ ID NO: 4013 - DNA, 1419 bp, synthetic construct
  source 1..1419: mol_type = other DNA
ttggttcttatttgccctatccttgctgaagaggcgcacgcgacgacggtctttctcacatccgacaacgtgttaggccacgatgaggacatgcagatgctaaacgatatcaagcagcagatcgagaccaagtcaaacgggcaaattacagtcatagtggatgagaatgcctccaaccctggagaagggactcgggccatgaacgctgattgcgacatcgctgtcacaattgcctacgcctgtgccggcaacctggtggacctggggagctacagcgtgcagtccaccaagaagatcatctacgtgaatgccggctcactcgaccttaccagcataaacttcctgaggaggagctacgacgacaattggtcttcatccagctttgcatccctgcaaaaccctgggcagtacctctacgattcgggcatcaccctgctccagcccgggcagaagttctacggggaaacggacaatggaaacctggaccactgcagctctgagatcgacggttacattgcagatgaggtgatgaagcaggtctacagcaatggcgttatccggaaactggactccgattatatcaacagacacaagctggacccgaagtacttagccgaagattccaaaaagatcgtggacggctttggcactccaatggcagattcctatggcagctacaccacccagcagctgctgtatatgagcgcgtcctatttggtaggatatagtctagatgtgccccaacaatttgcccccccagagaatcccgccgaatactcggcttttacaaagggaacctacagtttcaatgagtactgtgaaatggcagatattgtagtggactatatgaatgagcatggtaaggctccagatagtataagctataagggagctacaatcagttattatgacctggtctataacttcgcgctccttactcaggatgatttcgatgccgctcatatgaacttccctcagaatgccgacttccagaagtacaacagtaacatcctcctggacattctccccatagccatcatcatcgtggtcattattgcagtggccattataatcagaaaactgattaaaaagggtcggagaggcattaagcgtatcaagaaccggggcaaggacaataattactacagaaatcaggcaagtggaaacagatctcggaaatcaagaggaggtagccgcgacaattattccaggaacagtgcccgctataataattcacgcgggaaccaatcctcgcgcaaatctcgcaacagcggccgaccgaggaactctcgaaacagccgcgacagcaggaacagcaaaaacaaaaggtcaactaaattgttccacaaaaatgttgacttggaccagtacgataactctcgtagcaaggagccaaaacgactgaataagaaacggtga

SEQ ID NO: 4014 - DNA, 930 bp, synthetic construct
  source 1..930: mol_type = other DNA
atgacttctcagaccagcgaaaaagaaaatcaggagctgatcgacagtctgaacaacgagattgactacctgaaggagatcttgactagcaagatctttgaagaagagcatctgttaaacttcacctgccgtgacatcgaaacagattacgccctgaagtttggcgtttataagtacaaaataaagggatataaactgaagattaaaaaaacaaaaaggacaatcgagctcatcaaaaagatggtcaatcgacaggagataaatcttttcaacaagaaactcgaggagatgcagccaaatcaagccaaaatcaatgaaaccaagatcaacaaacctcgactcaatatgaaggagatcgaagaccacattgaaaatgaatttaaggaagaggacatcgaactcgagaccgagacggcgagaaccaacatcctgatcgaagagcaccgcaacaatctggatcgccgcgtgccggtgcgggagatagacgccctttataaggaatgcattaggaagatgcaccccgatctgctgttcaaccccacagagtatgaggagagcctatttttcaatgcaaaggaagcttatgaggacagggatttcgaggaattggaagcaacgtacaacctcattcacacccacaagatcgaggagaccccccaaacagtggaggagatggagagattcattgaacatctcgagatccatataaaactcgaagaacgggagatttcgaacattatcaactccaagccatacactcagcagaagttccttctaaaccagaagaaggtgaatgattacagagaggggctggtcaaatcccttttggaggtagaaaaggagtacattaagtgtaagcgggagttaactgacctgaaatcaaaaaacaacttgagttacaaactggatctgacgaagaaggacaactga

SEQ ID NO: 4015 - DNA, 447 bp, synthetic construct
  source 1..447: mol_type = other DNA
atgctcatccgcgaatttctgccatctgatctggcgagagtgtatcagatcgaggttgagtccttctcaacaccctatgatatccccatcctgaagcaactgtatgatatcggggccggatttctcgtagcaaccgaaaacggacaggttgtggcttatatcattttctggctgaaagaggaaaacctcgggcatattatcgctctggccgtcgaccggaagttccggggccagcacatagcaacgcgactacttatgatggcggtgaccgtcttaaggaactgcagcgtgccgaaaattaccttggaggtcaaggcccagaacactcctgccattagcttctacgagaaattcggctttaaaatagagaggaaggtgccaaattactacgaagacggcagtgacgcctacgtgatgtacttttacacagactccatcaagaattga

SEQ ID NO: 4016 - DNA, 414 bp, synthetic construct
  source 1..414: mol_type = other DNA
atgtgggatgaccttgaagaatacattgagaatctaagcaatgattacagctcaaagaacaatcggaagacaaagattgtagagattggcgtgggtaagttccagaccatcagtgaccacctgagggaaaatgagaacatcgagctgataatgaccgacatcgacccggcaaacgagaacgtcgtgaaagatgacgtgtttaacccaaacatggacatctacaagggggcggacatcatattctctatccgaccccctggcgagatccaagaagccattatgaaaatcagagatgagatagattgcacgttgatcattaagcccctctttaacgaagacctgaacatcaaagccaagggaatgaaactcaaaaattataaccgcgcttccttctacatttatcagaaggagtga

SEQ ID NO: 4017 - DNA, 2721 bp, synthetic construct
  source 1..2721: mol_type = other DNA
ctcatagaggaaatcctcaaaacctacaacaccacaattgagggtctgaccaatcacgaggctaaagagcggttagagaagtacggccctaataagatccaggagcaggagagcgacgggctgttaaaactctttctgagtcagtttgccgatgccctgatctttctgcttataattgcagcgataatcagctatctaattggtaaccatttggatgctgtggtgatagttattgttgtgattatcaacagcataatcgggttcattcaagagtatcgtgccgaaaacgccatgcaggaattgaaaagcctagtgagcaaggaagcccatgtaagacgcgagggcaagacaaaaatcatccccgctgagaagcttaccattggggatatagtcctgatcgaagagggcaacaaagtcccggccgacctgcttctcgtggagagctatgaccttacaatcgatgagagcctgctcactggggagtctgaagaggttaggaaaaatgcggattactccaatatgggcaatttggaggaaaagatcagaaatatctccagccactaccaggaggaggaattgcgagagaagatcgtctcgatgaatagtaatgtgctgtccggtcggggcacgggtgtggtgattgcagtggggatggacactaccatcggaaagatcgccaccatgatccaggaggaggacgaggagacgcctctggctaagaaagtggacaagcttggaaagcgcattggagctttgtccatcgccgtctgcattggagtattctttatagatttcttccaggactacaatatcattgaaggatttatgactgcagtgtccttggcggtcgccgcaattccggaaggcctgcccgccgtgctgacattgacgctcgcgctcggaatgcaaaagatggctaaatcaaacgccatagttaagaagctttcttcagtcgaaaccctgggtagttgcacattcatctgtacagataagactggcacactgacagagaatcggatgactgttagggaagacttccttctcgataacgacaagagtgtactgatctcgggcctttgtaataatgccaaatatgaaactgtggacgaaggcgagtatgaatctctagaaaaagacaacaatagggctcgcaacagtagtgaagaagacagcaaaaagacggaaaacagcaaagaagagagccagctgatcggcaaccctacagatatcgcagcctataacttcgcaaagggccacggctttgacaaactcgaccctgaacactcctacacccgtctggatgagatcccttttgacagtaaccgaaagagaatgagcgtgatctataagaaggagactcagaacgagaccgagtactacatatttactaaaggcgcgcccgagctgattctaaacctatccgataggatagaaaaagacgggaacatcaaagaaatcgattctgaaaccatctccaaaattaaccgcaagatcgatgagatgaccaataagacattaagggtcatcgggctctcctataagcagatagatgaggaagactacaataagatcaaaaatagccacaacgataacaagattcatgatatccaagaggaactggaaagaaacctcatcttcaccggcctgctcgggataatggaccctccacgagccgaggcgattgacgcagtggccagctgccaaaaggcggggatcgaagtcgtaatgataacgggagaccacaaggacacggctactgccatcgcccgagaaatcggaattttatcaaaggaggattgtgagagcctgagcaagcatgtgctgaccggtgaggaactggacagactcaatgatgatgagtatcggaatatcgtggaggaaatcaaggtttacgcccgggtctacccagagcagaaacgcagaatcattgatatcctgcaaagtaaagaccacatcgtgtcgatgactggtgacggggtcaacgacgctccggccctgaaaaaagctgccattggagttgccatgggcagcgggacagaggtcaccaaagagtctgctgacatgattattcaggacgacaactttgcaacaatcgtctcctcaatcaaagaggggaggaccatctatgacaacctcaagcggttccttaagttccagctctcgaccaacataggagccattctgaccatcactatcggctccctcctgcctatccccacgccctttactccaatccagcttctgtggatcaatattattatggacggcccacccgctcagtcactggggctggaggcctctgaggacaatattatggagaggccccccgaacggggcgagctgctggacaagaagaccttgattaagattacaatttccggaattgtaatgaccattggcaccctgtccctgttcatttatgagttgggactaaattcaccctacggtaagaccaaggccatcaccatggcatttacagtgttcgtgctgtaccagctcttcaacgcactgaactaccgctcaaagagtaacgtgaaaaacaagatgcttatcttttcactgattggaaccttcatactccaggtgctggttatctacgtgccatacttgcagataatattcaagacatgcccaattgagccattcgattggatcttggtgatcatcttatctgcaatcattctggtcacggataaaattgctaaccgcctcatcaactga

SEQ ID NO: 4018 - DNA, 123 bp, synthetic construct
  source 1..123: mol_type = other DNA
atgaacctgatcgccgatatcgccagtggcctcttttggatgagcctggtgatgatagggggtttcattgtcgtgattgcactgatgaccctaatcggaaagggcagctccgctgacttctga

SEQ ID NO: 4019 - DNA, 309 bp, synthetic construct
  source 1..309: mol_type = other DNA
atgaatcaggcaagaatcaagctgactggaacagacccagagaagttgaactacgtgtgcgaccagcttaagaaaatcagtgagcggacgggagtggatattagcgggcccatacccctgcctaccaaaaaactcgttgtgcccaccaggaaaagcccggacggcgaaggcaaggccacatgggaaaaatgggagctccggatacacaagcgcctggtcggcatcggggccgacgagcgagctatgcgccaagtgatgaaggtgaatgtaccagataacgtctccatcgaaattgagctaaagaactga

SEQ ID NO: 4020 - DNA, 1242 bp, synthetic construct
  source 1..1242: mol_type = other DNA
atggcaaaggagaaggaacatttgaatctagcatttattggccatgttgaccatggcaagagcacattagtcggacacttgctgctgaaggccggtgccatcgccgaacagcagctcgatgaaggggaagacaagttccgctttgtgatggataagctgggagaggagcgggagcgcggagtaaccattgacctggcccaccagaagttttctaccaataagtacgactatactgttgtggactgcccgggccatcgggacttcgtgaaaaacatgattacgggggcctcccaggcagatgcagctgtgctggtcgtcgccgctaatgatggtgtgatgccacagaccaaagagcacatgttcctgtccatgacgctgggcattaaacaactaattatagcaatcaataaaatggatatggtggactacagcgaggacagatataacgaggtgaaagacgaggtatccgatctcctccgaagtatcggtcgcgatcccgccagcactccttttatccctatgagcgcctttgagggagacaacatcaaggagctctctggcaacatgtcatggtacaaaggggacgccctgatgacagctctggacaagttggtgcccccggagaagcccgtcgacctcccactgcgaatccccattcaggacgtgtacagcatcacaggggtcggcaccgtcccggtgggaagggttgaaacagggatcatgaagcagggagacaacgtgatcttcgagcctgccggcgtgagtggcgaagtcaaatcgatcgagatgcaccacgagactttccctgaagcggagcccggtgacaatatcggattcaacgtccggggggtcggtaaaaacgatatcagaaggggcgacgtggcgggacataccgccgacgcgccaacagtcgctaaggagtttactgcacaggttgtggtacttcagcaccccggcgtgataaccgttggctatacccctgtgttccactgtcacacctcacaaacagcctgcactttcctcgatctgacgtccaaacttgatcccgctaccgggcagcccgaagcaacaaagccagatttcattaagacgggggacgccgctatcgtgcagataaagccaaccaagcctatggtgatggaagaagctgctaacattccacccatgggcaggttcgcgataagagatatggggcaaaccgtagccgccggcctgtgccttaaagtgactgataagaaatga

SEQ ID NO: 4021 - DNA, 2208 bp, synthetic construct
  source 1..2208: mol_type = other DNA
atggtgatgattttgagtcgccgagataaaatgatcgcaaaaatcaaagagctcatgtaccagccgaaaaatatccgcaatataggcatctgtgcccatattgaccacggcaagaccacactttccgacaacctcttggcaggcgccggaatgataagcgaagagctggcaggagatcaacgctttttggatttcgacgaacaggagcaggcccgggggatcaccattgacgcggccaacgtgagcatggtccacgaatatcatggcgatgagtatctcattaacctcatcgacactcccggtcacgtggacttcgggggcgacgtaacacgggcaatgcgcgcggtcgacggtgccgtagtcgttgtatgcgcggttgaagggatcatgccccagacggaaaccgtcctccgtcaggcgcttcgagaaaaggtgaaaccagtgctgttcatcaacaaagtggacagactgatcaatgaggtgaaactgggacctgaggagctggcaaacaagttcattggcattatcaatgaggccaacaagctgatcacaaaaatggctcctaaagataagaaggacgaatggcttgtcaaagtggatgacggcagtgttgccttcggttcagcatatcataattgggctatcaacattcccatgatgcaggagaccggcatcaactttaaagatattatcgattactgtaatgatgagaatcagaaagaactggctaagaaggttccgctggctgatgtgttattaggcatggtagtggagcacttgccatcccccgaggtgtcccagcaataccgatgccccaacatttgggatggagacattgaaagcgaggctgggcaaacgatgataaataccagccccgacggccctctggctgtcatggtcaccaatgtttcggtagataagcacgccggggaagttgctaccgggcgcgtctatggaggcacggtggagcaggggagtgaagtctacctggtcggaggtcaggcccggtccagagtgcagcaggtgggggtgttctttgggcctgagagagtgcctacggagaaggtgccagccggcaacattgtgtacattaccggagccaagggagctaccgccggggagaccatctgctctccggagaataagattgtcgagtttgagggcatcgaacacatcagcgagcctgttgtgacagtggcggtagaagctaaaaacaccaaggacctacctaagctcattgaagtgctgaggcagacggccaaggaggacccaaccattcacgtgaacattaacgaggagaccggcgaacatttagtttcaggtatgggagagcttcacttggaggtgatcggggtgcgaatcaataataagggtgtcgacatcctcacttccgagcccattgtggtgtacagggaaacagtggccggcaagactccaaaccctgtggaggggaagtctccaaacaagcataaccggctgtacctcgaagtgtcacccctggacgattccatatttgaagccttgcagaacggggacatcaaggaagggaagatcaaagccaaagaggaggcccagcaattcatagaccatggcctcgacaaggaggaagctagaagggtctgggatgtgtacaacaagagcctgttcatcaacatgacccggggtatccagtacctggatgagatcaaggagctggtcattgagggcttcgaatctgccctggaagaggggccagttgcaaatgagatagccatgggaatgaaattcactcttgtggatgcaaagctgcacgaggacgcagtgcaccgcggaccggcccagatcctacctgcaatccggaacgctattaaggggggtatgatgatggcggacccaacactcctggaacccgtgcagaaggtgttcataaatacaccaacagactatatgggatcggttactaaggaaatcctaaaccgtaggggtcagatcatcgacatgcccactgaaggcgatatggtcaatgttgaggccaaagtccccgtcgctgaaatgtttggctttgccggcgagatccggagcgcaacacaaggccgctgcctgtggagtactgagaactctggatttgagagactccccagggagctgcaaggccagatagtaagggaaataaggcagagaaaaggacttgctcctgagcccttcggcccggaccactatctgggatga

SEQ ID NO: 4022 - DNA, 561 bp, synthetic construct
  source 1..561: mol_type = other DNA
atggccaagttatttaacaagtgggacctcgatgaagtggaagtggaggacctgggccttaagcgatacatttgccttgatgagacgattgttcctcataccctgggccggcacgtcaaacggcagtttgccaaaagcaatgtgtctatcgtcgaaagactcatgaacaaaatcatgaggaccgagcgcaactccgggaagaagaataaggcctacaatatcgtaaaggaagctttggagattatcaataggcgaactaagcagaaccccgtgcaagtactcgtcaaggctatagagaacaccagcccacgggaggagacaacacggatcaaatatgggggtatcggctaccaagttgcggtcgacatttcaccgcagcgcagagtggacctgtccctgggattcctgacacgcggaactctgcagtccgcattcaagaacaaaaggagcgtggcggagtgtctagccagtgagataatcttcgcttcggaagaagatacccgtagtttcgccctgcagaagaaagaagagaaggagagagtggccaaagcagcacactga

SEQ ID NO: 4023 - DNA, 426 bp, synthetic construct
  source 1..426: mol_type = other DNA
atgcccggccttttcgccgcaaaaaagctgaaaaagaataggcagaattttaagtggaaggacgtggattacaaacgtagggcgctgcgcctcgatgttaaagctgacccgctcgagggggccccccaggcccgaggaatcgtgattgagaaggtgggagtggaagcgaagcaacctaactccgccatccgcaaatgcattcgggtccagctgatcaaaaacgggaagcagataaccgcattcgctccaggtgacggggctatcggtttcatcgatgagcacgacgaggtcatgatagaagggatcggcggaccaagcggcagaagcatgggcgacattcctggcgtgcggtggaaggtgagtaaagtcaacaacgtggccctatctgaaatggtatcaggaaagattgataagcccgttagatga

SEQ ID NO: 4024 - DNA, 405 bp, synthetic construct
  source 1..405: mol_type = other DNA
atgcgcttcattgctctcttcgagagtatgacaggtgccatggtcaaggattgcatcattgacgacgaaaattccaaggtcacctttgttgtgaaaaacggagacatggggctggctatagccaaaggcggcaccaccgtaactaaagtgaagaaggcagtcggccgaggggtggaaatcatcgagtacaatgaggaccccgaacagttcatcaagaacatcctgtccccagcggaactcaagtcaattaagattgtgacgaaaaacaatgatgagaagatagcctttgtgaacacagattctagcaacaagaggatagccatcgggaaaggcggaatcaacatcgagcgggcaaaactactggccaaaagacagcacaacattagcaatatcgtgcttaagtga

SEQ ID NO: 4025 - DNA, 300 bp, synthetic construct
  source 1..300: mol_type = other DNA
atgatggacgtggagcggggaataagggtcgccgtggacacaggagatgtgaccctgggctcagagaagagcatccagtccctaaagttgggtaaaggcaagcttgcagtggtcgcggcaaacagccccaaggaaattctggaagacgtggagtactacgccaatctctccgagatcccgttcattgtgtatgaagggactagtgtagacctggggtcggtttgcggcaaaccttttacagtcgctaccctcatcataaacgatccaggcgatagcacgatcctggaggccatggggtga

SEQ ID NO: 4026 - DNA, 1245 bp, synthetic construct
  source 1..1245: mol_type = other DNA
atggcaaaatatgacatttcaatgattaaggacaacaactactacaaagagcagtgcgagcacgctgaagaatctctcaacaagaaatggtatagcgagtcgattctcacaatggctatcactcttgaggaactgacggaggagctgatcaagtataccaaaaatatttccgatggaaagcttagtcagcgggacaagatctggatactgaaggataatggcatcaccaattacaacatctacaactacttgcgggaggccaacatcagccgcaacaaactggtgcacggcgagatccctaggaattatagcaatactttttccatgtataaaaactttcttaagattgtattttggtatgacgaaaactacgtcattggaaagctgaacactaagagtaagctaaagcaatacctgaataaagtttgtgatgattcacatatcctcaatatcatcgagcaggagattaatgatggcgccatcacggaaaatcatcagatcattaagcgccataacaaagagctgattgattatgttgaaagtctgaatatagagttagagattaaagagaaattaataaaagacatctattctggtgtgaccaaaaacaggtcccagatagaggaaaagattaagagagaaaagaaagatccaatcataggtgtggtgaacatcgtgaatacagagaacatgatgaagtacacgatccagtcgaccgacattgacaaagaagtcaaggaaaacatggagaaactcgaaaacaacacccacgagaacaagcagctccaggaagactacaacaaatacgggcccgagtccttcactaccgagacagtcaacatatgcaaaaacgaggagctgagcaagatcacaaaggaggacgaaatcatcttcaatgccaacaagagctacaataatcgaaagaaagatattaacccgaagataggcattgcaaacatcattaatacagaaaccctaatgaagtacacaatccaaagcactgacctggacaaggagatcgaggaaaatatcgggaaattggaaaacaacacccacgaaaataaacagctccaagaggattacaacaaatacgggcccgaatcattcacgatcgagacagtgaacatatgcaagaacgaggaactgagcaagatcttgaaggaagacgagattatcttcaatgcgaacaagtcctataataacaataagaaggaggagaccggagagaagaatcacaccctgtga

SEQ ID NO: 4027 - DNA, 1755 bp, synthetic construct
  source 1..1755: mol_type = other DNA
ctgctcgggggcataaatctcaacaatgaggacattataatcgggattgatttcggaaccacaaattcggccgcttgcatttacaaggatgaaaaattccagataattccgagcgctatgggttatgattacttccccagtgtggtagcagtgaacgagaatggtgaattgctagtgggacaccatgctaagaagcaaatggcctcaaatgccagcaattctgtggcagaatttaaacttaaaatgggtgaaaacgagactattaagttcaacggcgaagataagcttccccaggagattacttcctatgttctgggtcgtataaaacgcgacgccgaagcgtacctcggcaaacctatcaataaagcagttattagcgtccccgcgtcctttgataacgacgccagaaatgcaaccatggaagccggggagatcgccgggtttgaagtcgaagctctggtggacgaacctacagccgcctgtctgacctacagtctcacaaagaacttcttaggcaacatcctcgtcttcgatatgggagggggcacgcttgacatcatcatcggagcctttgacggttcggaacttgttcccaaagtcacgactggcgctcgctttggcgggcggaacatcactatggctctccgggattatctgcagagagactttgaagaacagaacggactgaagctagaggactacatcacgcctgaatacgaccccctgatcgacctctataacgccactgaaatcgctaagatagagttgtccagcaccaaaaccaccaatgtgcacatcgatagcatcgtcatgaccgataaagggcagcgcatcaacttggataagaacgtaaaccggtcggacctgaacaagctaagtgacgaggtggtcaaaggctcaaaggagaaggtgctggaggccctcaaggacgcgaaactgacaaaggacgatatcgacttcctggtgtttgtgggcggccccaccaagatgccgctgatcagggagagcatcgaaaaacttctgggcaagtccgccgctgagggcattgacccaatggtgtgcgtggctcaaggggcgtccatatataaggggggtccaattacagtcggcaccatcaattctttgacattgagtgttgtaatcaacgaaaaagagagcgacccactgatcccaaagaacacgcctcttcccgcagaggtgacgaaggagtaccataccatgcgggacaatcaaacatcagcaaatatccagatcgtggagggagagtccatcctggccaaagagaatcacaccctgcacagctttaccctcaggggactgccgcccaggcctaagggcgaggtcgcaatccaggtcaagctgaaagttgataagaatggaataatgggactgtctgccaaggaactcagcactaataagaagctgtccgcgacattcgactcaagtaaccgcatgtccagcgaggagatcaagaaggcagggctggacaacgagaaccttctgagtgattacgaggagaagatcaagcagcgaaatatcattaacgacgccgaggaggtgattttcgaaggaaaaaaactaatcgagaactactcaggccacatgctgatatctgataaaaacagagtgaacgagaacattgagaaactcgaggggctcctggtgattccaaagaacttcgaattaattaagttgattactaaggatctgcgaaatttaattgagaaaattgaatccgaggacttctattactga

SEQ ID NO: 4028 - DNA, 2052 bp, synthetic construct
  source 1..2052: mol_type = other DNA
gtggtaaataaagggtccaatgatgattttaactgcaataactgggagctgggccggatctttgcccgcaaggggaattttaccgaagcagacatccgttttgaggccgagctcaaccactcgctctcgcctaatagcctcgtccttgatgaccacggccatctgttgaacaggatggggaagtatcaagatgctatcgataagtttcgaaatctactcaatagtgacgagaactatgtgagcagcctgtttggtattggtatctcttacatcggcctcaacaagctcggtgacgctctgaagtactttgagaaggtgaacgaactcgacgaggaacacgcagacgcctggtactactccgctataatctacggcaatccattctacccgaagtatgatctgaacgtcgccaaaatccgctataagaactaccagaaatcaaaggagagctacatcaacgatcccaagtatttcagtaaacccttcgacaacctgagctgggaggagctgcacgattactataagtgcaacagcctattccggataattgagcaaagcctggataaagggattctcgacgagttcttgaacttcagcaacgactataaacgactctattgctttgacgaagaggggctggacaagcagttcgacattttcagactgttcgaaaatgacacgcctcttgctgacaagatcgataaattccatgaggacaaaaatatcgaagacaagttcgagagcgcagggtttgaggaggatttaatcgagggcttatcctttaaacttggcatgatgtccatcgacgacaagaaaatgttgaacgaactgatggattactccaagagttcacagttaagtttcaatgatatcaacgatctgatccgggaaaatgtgctggacgaggatatgagcctcgacgacttctacgaaaatcgcgaatatatagttaaaaatcgcatcaagaagaacaactccgaatatgagaggaacgtcgaaaagagagtcaatacagagttgaagaaccagatcgcaatcaacaaacgcctcaacgataacctgattgaaaaggacgaggtgatcgaaaagcttaatgacaatcttattgaaaaggatgaagtgatcgagaagcttaacgagaacttgaacgacaaagaggaagtgaaccagaagatagaggacaagctgagaaacaattatgagctgctgagcgatgaaaacataaaccaaccagagcaccggttcgataattatgattttagcacgaaggagattaagtcctccttctcgggcctgaaagaatcaatggactcatacttggaggacatggagtcttacctgaacgagtgccaggacgtcagttcgatgaatattctctcaggtatcaataaccagtgttaccaggatgacttggagtacattaaaaatgaatgtgggatctccgatgtggatctgaaaactctgaaaagcgcctttaaggacttctacaacggcaagtttggatctgcctcttacaacttcagtcttgagcggctaagaaagacaatcggaaaaacctctgagctcaagaagtacaggtacttcttaaaactgacttccaagtcccgagaaaagatactggaagaagaggactttaattggctcattattaaaaatctgaagctgaaagattacaagaacgagaaagagaagaagatcaataagggaaaaaaacttaaaaaggaaaagtaccccataggatggttcaatctgggcaacatctgcttcgactatgcgaactcccagtctgttaagaccaccgtaaaagccggaaacaatgcgatggacgcttacgagctggcctatttttgttataagtgcgccgaggacagtatttctaatcaggaagaaaactcaaagtacgagttcaactttaaggacacaaaaaacgaacaagagttcaaaaacaacgttgtgaggatgatttctaattgtgaaatcaagattttgcagcaggagattaagggcgagctaaaaaaactggataaactgcagggaaagttcaattggtga

SEQ ID NO: 4029 - DNA, 1638 bp, synthetic construct
  source 1..1638: mol_type = other DNA
atggtagacgccgaagccaaactggacgcaatcaaaaaggtggaaaaggtgttgaagaagaataagattgactttcctcagagttacattgatgaactggcaagtgcctatatcagaagagatctgacggacaaggaactcaacactctggttctgaaggtcgaagaggcttatgaacgtgctcatatcgaagcaggcgaagccgtaggaaccgtggccgcgcagagcgtaggcgagccaggaacccagatgaccatgcgaaccttccactacgcaggggtggcggagctcaacgtgacactggggctgcccaggctgattgagatcgtggatgccaggaaaaagatttccacgccaacaatggacatttacttcgaggacgagtacaagaacgacgaggagtttgtcagaaagttggccaaccaaatcggcaaaagcacaatcaacgatatcttagctgattatgacattgactacttcaattacaagattgtcactgtgcttgacaatgagaaaatcgagtctcgccgcctcgatatagacgacattatcagccgcgttcagaagacattcaaaaagctcgaaatcattaattatggcgacgatgagcttattgaagaagaggctaaagatatcgaagatgtcgactccgatgtggaggagaccgacatcgctaaggtcgacaaggtggacgaaactgggatggctaaagcggactctgacgctgaggagactgggatggcgaaagctgattcggaagaagatagtgaaactatccaagtgtcagatgaggaagtccaggagccgtccaacatcaatcttaaaaaatcagatgaaaacattacattaatctttgagcccagcaagcgaaccatcagagaactgcgcctcctcggggataaggtccgggacctacagatctcagggaccaaaggtatcggtaaagtgattatccggaaggacgatgccgagtgggtgctgcataccgaggggtccaacctgggcgcaatctttaagattgaggggattgacaaggtaaggtccactacaaacgacatacacgagatagaggtggttctcggaatcgaggccgcccggaatgccattgtctatgagttgaacaggaccctaagcgaccagggtttgacggtggacatcaggcacatcatgctggtggcagacatgatgacctccgagggaacggtcaagtccattgggcgccatggcatctccggggagaagtcaagcgtgcttgcccgggccgccttcgaggagaccggaaagcacctgctgcacgcaagtatccgaggagaggtggatgatctcaccggaatcatagagaacattattataggacagcccatacctctgggcacagggagcgtctccgtgacaatgaaaccagatgcctaccctataaccgcaggcataacgaaacggggtaaaggcaagagcggtggaagcgccagcgaatctaaggaggttaacagtgggatcgcgaaaggcggaaaaggcaagtcgggtggctcagcttctgaaagcaaggaggtgaatagcggaatcgctaaaggcggtaagggcaagtctggcggctccgcctctgaatcgaaggaggttaatagtggcatcactccctga

SEQ ID NO: 4030 - DNA, 2781 bp, synthetic construct
  source 1..2781: mol_type = other DNA
atgtcaccagatcaaatcagggagatgtctgtggtaaacatcacccgcccggatacctacgatgaagacggatacccaattgagaatggcctgatggactcgcgcctgggggtgatcgacccaagtttaaaatgcagaacttgcggtgagaaaggaggagagtgccagggccactttggtatgatagacctcgccagacctgttattcatgtgggtttcggtgatgacattcataagatactgcgtagcacgtgtaatgagtgtggccgcgtcctactggatgaggaagagatagaagagtatactgaaaagctgaatgagctgcaggaagctggcgaaagcacagaggatctcataaaggaggtttacaaaatctgtaaggccaagaaggcaaaggatgtctgccctcattgcggcgctgaacaggaggacattaagatcgtgaagccaatcggcattatagaggtccgtaaggaatacgatgagaacggagaattgctcacagatgccaatggaaatcctgtaacaacagattatgatctcacagcctctgaagtgagagagaagctcgagcgcattccagatgaagacgcctatgtcctgggcgtgaaccctgaagttgcaaggcctgaatggatggttcttacggtgctgccagtgccccccgtcactgtaaggccgagtatcaccctcgatactggcgagcggtccgaagacgatttgacccataagctggtcgacatcctgcgcatcaatcagaggctgattgagaacatggacgctggcgctccacagctgattgtcgaggacctctggcagctcttgcaataccatgttacaacgtacttcgacaatgaggccagcggagtgcctccggcaaggcaccgaagcggaaggccccttaagaccttggcgcaaaggctcaaagggaaggagggaagattccgaagcaacctgtccgggaagcgggtcaacttctcagcccggaccgtcatctcacccgaccccaacatcagtattaacgaagtaggcgtgcccgaaatgatcgccaaagaggttactgtacccacctacgtcaacgaatggaacattgaggatctgagggaggcgatcctaaacggccctgatgcccatcccggcgccaattatgtgagaaaatacaatgaccggatcaaagactacaataaggtccgcgtactggattccaataaggagaccgtcgccgaaatgttaacttgcggggacattgtgatgagacatctgaaggatggagacattgttttattcaaccggcagccctcccttcaccggatgtcgatgatggcccacgaagttagggtgctgccatacaagacctttagactgaacctttgtgtctgccccccctacaatgctgactttgacggagacgagatgaacatgcacgtgttccagactgacgagtctcgggcagaggcgaagtcgctgatgagagtccaggagcacatcctgagccctcggttcggcggacccattatcggggcgatccacgaccacattagtggggcctatctcctgacccgggacggcttcaccgttccagaagatgacgccttccaaatgatacgaaaatcccaccttttgaaatgcccttatgatgaatatcttaaaagggatctggatgagaaggaatataaacagcaaatcaaggaatacaacgaaaagctcaaacgtaaacaccgcgattggactgggaaagagttattcagcctgctactgccaagcaccctgaacatgaattaccgagccgaaatctgtcgaaaatgtgaggagtgcatggcagaggcttgcgagtacgattcttacgtggtgattaaggacgggcagttgacccacggcgcaatagacgaggccgcctatggttctttctcaggcaaaatcctcgacaatatcgtgaaggagtatggtccggcctacgcgaaggagtttcttgaccggtccactgaccttgctatctgcggaatcatgaagacagggattaccacaagtaccaacgatgaggaaatccccgaagaggccatcgaggtaatcgacgcccacctagataacgctgagcagaaggtcgataaactgattgagacctatgagatgggcgagctccagcccttgcctggacggagtgccgaggaaacgctggagatgcggattgtgcaggtgctaggggaagcgagggacgcagcaggggacatcgccgctggttacctcactatggggaagcagtcccccgacgattcctacgaccatgtgatggctgtggaaaaccactctgtggtgatggcaaagaccggagcccgcgcatccatgttgaacctcgctcagatcacggcctgtgtggggcagcagagcgttcgagggggccggataacacgcggatatctggccagaccgctgccgcactttagaaagcacgagctgggggctcgcgctaaaggctttgtgcatagcagctacaaagaaggcctcgaccctgtggaatttttcttccacgctatggggggcagggagggcctcgtggacacagcgattcgtacagcccagtccggttatatgcagcgcagacttgtgaacgcactggaagacttgaacgtccgatcagacggactggtgacggacaataagaatcaggtgatccaaaccgtgtttggggaggatggcatagacccagcaaagagcgactttggtaaagtggctaacctggacaagctgatcgacgagatgcgcatcaaagatgagggcaaatga

SEQ ID NO: 4031 - DNA, 1812 bp, synthetic construct
  source 1..1812: mol_type = other DNA
atggtgaaggcgaaaatttacattaacggaaaactgacaggaacttgcgatgagcccgaggagtttgtgaaggagatgcgcgctagacgccggtctggcgagatccataatgaaatgaacatcacctactatgatgagaaccatgagatctacattttcactgaccccggcagggctagacgacctctcatcctggtggaaaagggcgagcccctgctcaaagatgagcacatagaagctatcacaaagggagagctaaaatgggacaatctgtttgagctgggcctgctggaatatctggatgctgaggaggaggagaatagttacattgccatgaacctgagccaactcaatgaagaccacacccatctggagatagaccccagcaccatgctcggtatatgcgcgggaatcattccctttagcgaccacaacagctcccctaggaacacaatggaggcagggatgacaaaacaggccttgggcctgtacgtctccaactacgcattgcgtaccgatacccgtggtcacctcttgcaccaccctcagactccactggttaagacgcgcatcattgatgccatcaattacgatgacaggccatccggacagaacctggtggtagctcttatgtcttacgaaggatataacatggaggacgcaatgattctcaacaagtccagcctcgaacgcggcatgggaagatccagcttcttccgctcctatgaggcttctgagagaaggtatcccgggggccaggaggacaagtttgaacggccggaaaaaggagttaaaggttaccgctccgaggaggcttacaaaaacctagacgaagacggcatcgtgaaccctgagtcccatgttgagagtggggatgtcttaatcgggaagactagcccaccaaggttcctgggggaaattgacgagttcggcaccgtggcagagaaaagacgggagactagcgtcacagtgaggcatggtgaaaagggtatcgtagatgcagtgctccttaccgaaaccgtggaagggagcaagttgaccaaaatacgagtgcgcgacacacggcaacccgaatttggtgacaagttcgcctcacgccacgggcagaagggggtggtcggcctcatactgagtcaagatgacattccatttacagaagacggcgtcgtgccggatatcatcgtcaatcctcacgcgattccatcaaggatgtcggtaggccaggtcctggagatggtggccggcaaggccggctgtatggaaggccaccgtatggacgggacgccattcaacgacaatgtggaaggcgaaatcaagagagccctgcatgacaacggattcgagtctgccggctgcgaatcattgtacaatggcgtcaccggagaacggatcgaggcggagatcttcgtcggcgttgcctactaccagaagctgcaccacatgacgaccgataaggtttacgcccggtcgaccggacccgtgcaggtgctgacacggcagcctacggagggtagggctcgggaaggggggctccgattcggggagatggagagagactgccttatcgcccatggtgccgcccttgcccttaaggaacgactcctggatgagtctgacaagtatgaggcagtggtgtgtaatgaatgtggaatgctggcagtatatgataagaataagaacaagatgtactgccccatatgcggagacagtgaaacttatcctgttgagatttcatatgcctttaaactattgttagatgagctgaaaagtctgtgtatcttcccgaaattaatccttggggacaaagcttga

SEQ ID NO: 4032 - DNA, 1563 bp, synthetic construct
  source 1..1563: mol_type = other DNA
atgaataatgagacatgggggctggtggactcattctttgataagtatgatatcgtggatcatcatatcaaaagttataacgattttgtcgaaaatcggattcagaatattatcgacataacggaacctatcaccattgaaaacgagaagggcaactatacgcttcgaaccggcaagcttaccatcgaaaagcccttcaccaaggaggcggacggtagtaagagcatgatttaccccactgaagcacggctcagaaacttaaactactccgcccacatgtatttggaaatggcactgcacgacaataatagcgatgaagaggaagagctggaaaatgtctacattggcgagctccccctcatgctcaagtccagtatctgccacttgcatggcctcagcgatgaggagctggtgaaaagaggggaggacccgaaggaccccggggggtactttattgtgaacggttccgaaagggccgtcgtgacaatggaggagatcgctccaaacaagatcatcctggagcgcatcgatgagattgaagatagacatgccaaggcaatcgtgacctctatcaaaagcgggtttcgagctcgcatcactctcgagtacaaaaagccacgtaaaagcggcgtgtttctcagaatctcattcccctatgttccaggagagatccccctcgtgatcttgctgagggctctgggactgtcgacagacggcgagattatctctaaaatatcggatgacttcaacttccaaatgtacattgctgacgacctgcaggtttcagagaaggacttgaaactggattcagatctgttactgagcctgtccaacgaggagagagacgaatatctgcagaaggcagctatcaaatacataggtaatagggtagcgaaaggcatgaccgaagagtacaggataaaacgggccgaagacgtgattgaccgctacctactcccacatatgggaatcgagtctgataaacgttacgataaggccatctacctggctgagatgactgagatgctcctgcaggtgattgaaggacaacgggagcctcacgacaaggaccactataccaacaagcggctgcgggtctccggggacctgacggaagacttgttcagggtggccttctcctccctgacacgagacatgagctatcggcttgaacggagcctctccagaggaaaagagctttcgatcaaacaggccgttcgctcagacgtgctaactgagaacatcaagcacgccattgcgaccggtaattgggtcggcggccgcgcaggcgtcagccagctactggatagggtaagttacatggccacactttcccaccttcgccgcgttgtatctcctttaacacgaagtcagcctcactttgaagccagggacttgcacccaacccagttcggaaagatttgccctaacgaaacgcccgagggcccgaactgcgggctggtgaagaacctggccctgatgtgtaagattagtgagggattcgatccggaggacatagtcaacatcataagcactatggacaatgtggatatgatagattga

SEQ ID NO: 4033 - DNA, 249 bp, synthetic construct
  source 1..249: mol_type = other DNA
ttgaaattcgatatcctggaacacaatgccgtgcccaagcatgaaatcctaacaaagtccgagatcaagaagattttcagtaagctggactatgacgtatcacagctgccaaaaatcaagatagatgacccggtcagcaaggccattggagctaaagagggggacgtgctcaaaatcacacgggagagccagaccgcaggcacttttattacctacaggctcgtggatggcttcacggcgaacaaatga

SEQ ID NO: 4034 - DNA, 915 bp, synthetic construct
  source 1..915: mol_type = other DNA
atgactaacgaaatcattaaggagaatacggaaaagattgaggagatcctgaacgggatcgaggaggccatggagaacgttaaggctaaatcccccctgacccactgcatcacaaattttgtgactataaatgattgcgccaacgcggcattggcgattggcggctcaccgatcatgacgaacgacagtcaggaagttgctgaaattggaaacatagccagcgctatcgtaataaacatcggccaagtctcgcagctccagatcaattcaatcaaaaagtcctgcgaacatgccaataaaacgaatacccctatcgtctttgaccccgtgggcgctggagtgagtaatatcaggaataccatcaccaaggaaatggtcgagttctatgagctcaccgcaatccgagggaacatgagcgagatcaaggcaatagtgaatcttattgacctagaaatcaaggacaacgaaaagaaagactctgctggcaaaggggtggatgtggccgaatccgatataattaccagagacaacctttacacaaacggcctgattgtgcgcgagctggcgaaggagctggagactgtagtgatggcaagcgggcccatcgacatcatctccgacggtgaatacaccttcgccctcgagaacggcgatgccatgatgcctctgattacaggcagcgggtgtatgctaagtacaatcattggaacatatatcggtgccaacgagccattgattggggcaataactgccagcgctctgatggccattgccggagaaaacgccgccgaggcggtcaagaaggacaatctgggtccaggaagcttccggaatttcctcattgataacctgtacaaagtgaccgcagatgacatttctaaacgggctaacctctttgagatcgatttaaactga

SEQ ID NO: 4035 - DNA, 660 bp, synthetic construct
  source 1..660: mol_type = other DNA
atgtttaaggccatgaaaaaagaggataagatgaacaagagctccattgattactcagtttatctcgtgacagaccacaggggtaaaaccgacgaggaaatcctcaatattatcgaacaggcgatcaaaggggggacgagtgttgtccagatccgggaaaagactgcctccacgaaagacttctacaatctggccctgaaggctaaggaaatcaccgaaaagtacaacgtgcccctgattgtcaacgaccgaatcgacatcgcccttgcagtgaaaagcgatggcgtgcatatcggacaagacgacatgcccgcaaaggtggcgcgcgagatcattggcgaagagatgattctgggtgtgagcgcttctacagtggaggaggccatgaaggccgaatctgatggggctgattacatcggcagtggagccgtgttcccaactgccaccaaagacgatgctgattccgtatccaaggaggagttgaaagagattgtcaactcgaccagcataccggtcgtggccatcggcggaatcacaattgaaaatgccgagtcactgaaggacgctgagatagacggcttcagcgtagtcagtgcaataatgaacgcggatgaccctaaaaaggcatctgagatactaaaggagatctataacagatga

SEQ ID NO: 4036 - DNA, 1233 bp, synthetic construct
  source 1..1233: mol_type = other DNA
atggctaagttcaacacgatcgatgacttcgacgtcaacggcaagacggtcctcatgcgcattgacattaatagcccggtagaccctaattctgggattatcctcgatgacacacgcatgaagatccatgctgagaccattaaggaactctccttgaagggggccaaaacagttctactcgctcatcagagtcggccaggtaaaaatgactttactaccttcaagcaacacgccgaagtgctgtccaaagcggtgggaatggatgtcaaatatgtggactcaatcttctcatccacggctaaagaagctatcctggccttggagccaggacagatactgcttctggaaaacgtaagattctactcggaggagcagttgaagcgtagcccagaggaggaggccacctctgtgcttgtcaagtcccttagtcccttgattgattacttcataaacgatgcattcgcagcggcccacaggtcacagaccagcctggtggggtttaccactgtagttccctctgcggccggccgggtcatggagaaggagctaactgtgatcggcaatgcgctcgagaacgtgcagcacccttgcgtcttcgcactggggggaatgaaagccgacgactccataatggttacagagaatgtcctggaaaacggcaccgccgattacgtgctcgtgagcgggctggtggcaaacatctttatttgggcagccggctacgacatcaaatccactaatgaaaacttcattgaggcccggggctacctcgacatggtggataagtgcagggatctgattaaaaggttcccaggcaagatcatctaccctcaagacgtggcagttagcgttctgggagaccgagccgatgtgaccatcgaaaacattcccgacgcctcgatctttgatatcggcagacagagcctgattgagtattctaagatcatccgcgaagctaaaacaatatttgcaaacggtcccgctggtgtgtttgaagatcccaagtttgccatcggtacagaggacatcattaacgccatagcctcttccgaaggattttcaataattgggggcggacacatcgccgcagcttgtgtgaatttaggctatggcgataagatggaccacatcagtagtgggggaggggccagcatcaacatgctggcaggtaagccgctggctgctgtccaggccttagaggcgagcgccgagctgttcaacaataaagaatga

SEQ ID NO: 4037 - DNA, 675 bp, synthetic construct
  source 1..675: mol_type = other DNA
ctgagtctcaagacccccgtggtgatcctaaacttcaaaacgtatctggagtccagcggtcagaaggcccttgacttggcaaatgccctggagagcgccggggaggagtcgggcattaccatggtggctgtaccacaggccattgatatctaccggatcaaagaggaaacaagcattcctgttttagcacaacatattgatgccgtgtcccctggaggccacactggaagcaacctcttcgagagctttgtggcaaacggcgtggacggaaccctcctcaatcactctgaatgcaggatgaccctggcagatatcgccgaggtcgttcagaaaaccaagggggctgacctgatctcatgtgtgtgcacaaacaatatcgaaacaagtatggccgccgcaacgcttgctccagatttcgtcgctgtcgagccccccgaactgataggcactggaataccggtttctaaggccgaccccgaagtggtcgagggctcagtcagtaaagtaaaggctattaacaaggacgtgcaggtcctgtgcggtgctggcatctccactggggaggacatggcggcagccatcgacctgggggccgaaggggtgctattggcgtctggcatcataaaggcggaaaacccaaaagatgccctcctggacctggtgtccaagatttga

SEQ ID NO: 4038 - DNA, 915 bp, synthetic construct
  source 1..915: mol_type = other DNA
atgacatttactaaggaagagcaggcaaaactcgagtacagtggatacagattcgtcggggagcacgggcacgcggcggccaagacctgtcattggactcggaaaagcatcaaaaatgaaggggtgtgctacaaggaacagttctatggcgtaaagtcacacagatgcctccagatgtctccagccgtcccattctgccaccaaaaatgttccttctgctggcgcgacctctcccagacccgaacggaatgggaaggagagtatgatgatccaaaaactatcattgaaggtgcgattaaggctcagaacaatctcctgtgtggctttggagggaacaagaaagcagataggaagaagctggaggagagcaagaggcccacgaacgcagccatcagtcttgcaggcgagcctacgctgtacccggaaatagacgaacttatcggcgagttccaccgccaggactttaccactttcttggtgtcgaatggaatgtactgggagaagctgggcagcctggaaaacgaacctacacagctatatgtgtcactggacgccccgaacgagaaggtgtacaatgagttgtgcaacccccaaattgatgacggatggggcaaacttaacaaaacactagagctgatgcccagctttaagaacaacacagccattcggatcacctccgtcaagggcaaaaacatgttcaataccgatgaatacgccgagctcatcaataaggctgaccctacctatgttgaggtcaaggcctatatgtttgtggggtcttcccgcaaacgattaagtatggacaacatgccccggttccatgaggttaatgattttgctaaagagatagctgacaagacaggtagggagctgaccaagtactctgaagccagcagagtggtgctgctggagtga

SEQ ID NO: 4039 - DNA, 1125 bp, synthetic construct
  source 1..1125: mol_type = other DNA
atgaagttttttgaacacagcgcaaaaaaagtctttgagagtgaaggcatcaaaattttagaggggcacgtggtgtactccccagaggaggccatggaggtggctaccgaatttggcaggcccatcgtactgaaatcccaggtcttggtcggtggacggggcaaggctggaggtatcaagttcgctgacaaccctggcgaagccctcgaaattgccaatgagctgctgaaacttgaaataaaaggggaaaaggtgaagcacctactcattgaagagaaggccaacatcaaaaaggaatttttcttaagcgtgtccaatgaccgagccaacagaaggcccatcatcatggccagtgctgagggtggagtggaaattgaagaattggcaaagacatcacccgagaagatcatcagatataatgtgaacccactcaaggagttcctgccgtatgaggctcgggaaatagcccgaaagatgggggtaggctcagaacttatttcgccccttggaagcatcatttggaagctatataatgtttacgataaatacgatgcagaggtggccgaaatcaaccctctcatcctgacagacgacggcctgattgccgcagatgccaagctcgagatagagaatgacgctcttttccgccatcaggatctcgtgaagcagaaccgcttcaagcagaaggacttcgcgttcgtcaagctggacggagacattgcggttatcggaaacggtgccgggctcactctgaccggcatggatatggtgaccctgttcggaggcaagccagcgacgttcctggatatcggggggggagcctctgaggagactatcaataaggctctgagcctggtgctgaactaccctccggtcaaagtggtgttcctgaatgttctgggcggtattacaagggccgatgacgtggcaagaggcgtaatagcagccttggaggctaacaagtgggacgtcaacatcgtcatccgcctgaccgggacgaatgaggaggaggggcaacggctctttgacgaggcaggcattccctacgagatcagcttggaagaggccgcgaaaaaggccgttgagatgtgcaacgagataaaagcgaaagaggctggcaaatga

SEQ ID NO: 4040 - DNA, 582 bp, synthetic construct
  source 1..582: mol_type = other DNA
atgttcggcaagttcaaggtgaaaaaatacttctccgagctaaataaagcatattacagcaacgactttaagaaggccatcaagtatgctgacattattctggagatggataaaaataacctggaagtccttaaatacaaatacaactcactggcgaacatgggcgactacgagaacgccctcgtgtgtatagatgaaatcatcaccttggagaagagctgtatggcgttactcaacaaaggaacaaccctgtgctatatgaaccggattgaagaggggttcaagctgctcgactacgtaatcgataactgcgaagaatacgaggctgcattcatcaacaaatgcaatttctttttcatgctggaagagtttgacgaggccctatccctctccgataagatactgaatatgcacccagactgctcaaacgcctatgacacgaagagctttatctactataagagagaggagtatgattcgagcctcatttacgcaaacaaagccctggagaagaaccccaataataatatcgccctggagaggaaggaacgccttctgagtatcttgaatagtaaggactga

SEQ ID NO: 4041 - DNA, 546 bp, synthetic construct
  source 1..546: mol_type = other DNA
atgcggactgaggtgcggatagctgggtttggaggccagggagttatcatggcaggaatcattatcgggaaggcggcatccctgtatgataacatcaatgcggtccagacccagtcctacggcccggaagctcgcggaggcgcctcaagaaccgagatcgtggtcagcgatgaggagattgactaccctaaagtgacaagtccagatatcctggtcgccatgagccatgaagccctgatcaaatatatgggggacctcaaggacgaaggtgttctaatcatagaccccgacatgatcgttgaagaggagattgtggacttcgtaaaagagcacaagatcaagctctaccgagccccagctactaagaccgccaccgaggatgtcggcctgaggattgtggcaaacatcgtgatgataggtgctatcgtaaaggtcacgaatgtggtgtcggtggatgccgccaagaaagctattttggacagcgtgcccaaaggcacagaggacaagaacattcaagcattcgaagccgggtacgcccttatttga

SEQ ID NO: 4042 - DNA, 864 bp, synthetic construct
  source 1..864: mol_type = other DNA
atggtcgaagtaaaagaaagcccatataagaagtacctaagggaggaccgactgccccacatattctgtcccggctgtgggaacgggacagtgatgagcgccttcctgaaaggccttgagggcacggacatcgactttgagaacattgcaatggtgtcgggtatcggctgctcttcacgcatcccaggctatgtcaagtgcgattcactccacaccacccacggaagggctctgagcttcgccactggtctcaaggtggggaatccagacctagacgttgtggtcttttccggagacggggattgcgcctccattggaggaaaccacttgattcacgcggcccggagaaacatcaatctcacagttatctgcatcaacaataatatttatggtatgactggaggtcagataagtcctacgtcccctaaaggcagctttggaaccactgcaccctacggcagccgcgacatgccttttaacctggccgagctggtgagcgcggctggcgccagctacgtggcccggtggaccacaacacatccgttacagctctcaaaggcaatccaaaaggggctggagaacaatgggttctcgttcattgaagtggtctcccagtgtccgacctacttcggccggaagaacaagctgaaaacgccactttccatgttccagtacattaaggaaaactctgtaaacaaaagacgtgctgaaaagatggaagaggacgagctcgaagggaagatcatcgtgggcgagttcgcaaacaagccccatgatgagttgaccgatagtatcaaaaaactgatagaagagaatagtaatatgcccctggctatcaaatctgcctttgaggagctggattga

SEQ ID NO: 4043 - DNA, 1131 bp, synthetic construct
  source 1..1131: mol_type = other DNA
atggcagaagagcggtttgtccaaggaaacgaggcttgtgccctgggtgcaattgcagcgaattgccgcttcttcgccggttatcccatcactccaagtacggaaattgctgagcaaatgtcgatcttgctccctaaatatgggggcgcctttgtgcagatggaggatgaaattgcctcagttggggccatcataggggcgagctggagtggccttaaggccatgacagctaccagcggtcctgggatctcactcatgcaggagaacataggctacggcttcataacagaaacccccatcgtgataattaacgttcaacggggtagcccctctaccgggcagccgacaatgtccgctcaggcggacatgatgcaggtgcgctgggggtcccacggggactacgagcccatcgccctggcgccctcaagcgtacaggagtttttcgactttactatcaaggctttcaacttagctgaagagtacagggtgcccgtgacagtgcttgcagatgaggtcgtaggccatatgcgcgaaaagctcatcattccagatgagatcgaaattgtgaaaaggacaagacctgaaaagccagacggccagtacctgccttttgatgctcccatggacggaaccactccgatgcccgccttcggtgacggattcaacatccatgtcacgggcctgacccacgatgagcgaggctacccagacaccaatgatcccgagtcccataccaaactggtggaaaggctatgcaacaaggtcattatgaacagaaaggacatctgttccgtgaagaaagagcagtgcgatgatgccgacattgtgattgtcagttgcggcagcccatatcgatccgtgggcgccgcaatgaaaaaagcacgggaagaaggaatcaaggtaggatctctgaagatagacacgccatggcctttcccagaggaagaaatcgcagagattgccaagactgccagcgacatcatcgttccggagatgaatttgggacagatggtgcacgaggttgagagagccgctaaaggagaggccaatgtccacctgatcggcaagattggaggcatcctccacaagcctgaagagatactggccaaaatcaaggagatcagcgggtga

SEQ ID NO: 4044 - DNA, 207 bp, synthetic construct
  source 1..207: mol_type = other DNA
atgatcatcatcgatagtaagctgtgtaaaggatgcgacatttgcatagccacctgtccaaagaaggtctacagcaaaagcgacaaggtgaatacaaaaaacgtgtacctccccttccctgagcacgaggaaggctgcacgaagtgcgggctatgcgagctgtcctgtccggaccaggcaatttatgtagaaaaagaggtggaatga

SEQ ID NO: 4045 - DNA, 129 bp, synthetic construct
  source 1..129: mol_type = other DNA
atggacttgaacgatctgaacaaaaataatctaaagcagaagaaaaatcaccaagtgcttaaggacctgaagataaacaacctcatcattatcttcctggacctcacccagtacatcaataacaactga

SEQ ID NO: 4046 - DNA, 372 bp, synthetic construct
  source 1..372: mol_type = other DNA
atgggcgcaaaagaaaaatatttctccaacatttccaatagggagcgcgcaatatttgaaggagccatcagcatgggggccctgttccaccagttcgtaggcacgcccttcaacagaaagaccgctgaaagcctcgaaaaggcgatggaagagagctttaccctgcagccgtgcatcgacaaggtggaggtctcgatcgacttggatcggctggataaggctatgacagagttcgagtacacttctctaagtggtgacatgctcgatgttaagatctactcaaaagtggatgacgtcctggccgtgatccgaatagagtttatcgaagagcttaactacccactgatgtatgtggaggacattattgagtga

SEQ ID NO: 4047 - DNA, 762 bp, synthetic construct
  source 1..762: mol_type = other DNA
atggatttgaaaaatataaaaattgctaccatcatcaccatcattgcctttataatcattggcctatacgccctgacggaagtcaactacttcagctacaagaacgttgtggagcatgatgatattaacgcgtccgtagtaattatcccctccatcggggtgtttgagaagataaacaatgtgtccatcagccaaggggtctacatcgaccagatgtccaaccttccaaccaaaggagatgtggtgctctttggccacaggacactgcaggggagccccttcttgcgcctcgacagcctgaagaagggagacattgtcactctcgagtggcccgagatcggtgagatcaactacacagtcaaatcttctaagatagttcctgccagctatggactgtatctgaacgagagccatatggaaggggacattcacaatcaggagatttatctcatcacctgtcacccgcttggttcgtcagctgaaagacttattgtcgtgggagaactgaatagtacaagtctcatcaacgaaaccgctttggaggaaaatccacacgcgtcatgggcatggtacatcactctgggcttctttgccttaggcctcatcgtttcattcctaagccctgaggaggaacggaagatcatcctggcagtggtgatcataatcacgattattctggtgtatttctgcctgttcccaatatcgtcccagatctgggccgaccagctgggctggctgaatagtatgatgggcgtgaactga

SEQ ID NO: 4048 - DNA, 1932 bp, synthetic construct
  source 1..1932: mol_type = other DNA
atgtctaaccgattcaactccttcaagaaaggcatttctaaggtgaaaaatatatcgcccaaaatcaagggaaattccaaccgaaagaagaacaacagcaagaataaaaggtctaaaagcacaattgaatatatcgtgcccgaaaactctccactgagaaagaacagtaccgacctcgacagcgattctggatttttcaatagcgattacttggacgacttgcctgagggtgtgtcctacacccggcccgtgggggacttgtcggaaggggtgacttacacgcatcctgcggacgactcatacgatctggatggagtcgacaaacgctatgctaaatatattttcggagacgacttaagtgacagaaactttaaggacccccgggactcgagctacatggaggatctcgataataacgacggtctgaataatgagttcggcagaaataggaactttcataaaagtcggaactacgcagacaagcgctttaacaacgatctggataacaacggggagaactataaaaacgactcttacctcgatgagagttattctgatttcagctttaaaaaggacttggacaacggctatctgaatggcgacgcgtacctcagtaattctgatttttctgacttcgataaggactacctggacgactctaactttaagagcagtcactccaagaaggcctccctcaaatccaatggcatcaagagcaaactgcttaacttcaaagatggccttttgaataaggatgacaactccaagagccgctttggcaagattgtgttcatcctgatattcctcgtgttggcttcaagcatgttttatttcttcgtataccagccattccaggacgaactgaatctggaaaagaatgctaagctgaatgaattaaatactctgtataaaggtcccctggaagcccacgagaacgcctacattctgaagaaccaaatcgaatcggagaatgatataaacgagctaaagaagatcgatattttaatgtacgcgacgaaggattggagaacttatcacaaatccaaaatagtcagctccaaggacaattttggaagggtcatgctggcctacggggatgaaaacaaaaacctgatcatgagcgtcaaggatgcaaatgagttcgttggggacaatgacggacgggtcctatcaaacattcaattcgaaaaggtagacaccatcatcgttcctgtgtccatttcacggcttcaggcaagtgcagggctaatttcggtgggtagcatcgttgatatctactccctaaaggacaattattcctacgggggcgacgaggactccaacttcgagagctcatcagccctgaacgagtcctccgaagggcttgtagagaaccagtcagaggataacgaggacctcgggggtggcgaggacattagcaaaatgcctgtcgattcaaaccccgaagaggattccggcttctcacagaatggcgaaccggacgtgagcggagccacagtgttggccatcctgcgctctaaagatagcggcgtgatcgacagtagcatcagcaagtccaataccctcgtggagggaaaccttacggacccatacgaaaacaccagttcatacacaaacgatgtggaagagctgcttaaagccagcgtgtttaacagctatgatgacaataaggctctcgagtattacctcaacagttatggcataaagctgtcgaattacgagaggatgtcaaatctggctgatctcgatagtgagtatctggttctgctcgaggttccacgttccgacgtcagttttgtcatcaacaacatggacaaccttattctgaccatcccaacagagtttgccccgaattgggtgatcggagaactcaatgagacctattacgataacatctacaattacgacctgaacagctcctctttcatatga

SEQ ID NO: 4049 - DNA, 945 bp, synthetic construct
  source 1..945: mol_type = other DNA
atgagattaaaaagtgtgggcatgggctatttcctcgcagtcagcgacgctatttcaatcctgaacattgcattcggattcttagctattctgatggtgatcgacaacaatctgatatatgccagtctctgtatccttctggcagttgttttcgactcggtcgatggctgggtgtctagaaaacttaatcgggtggacccgctgggatttgggatgaatatcgactctcttgccgacattgtttcctttggtgcagcgcccatggctatcttgtactccatagggtcaagcatttcctcgtgggccggatacctgatcgccatcgtatgcatgattactctggtgtgcggtctgctaaggctgacccgctacaacgtgatagccgataaaatcaattaccgaggctttgttggcctcccaatccccgccacagccattatactggtgacctattatctcagcggactttttaatattgctgtggccgccgtcttgatgctgcttgcttcatttctgatgatcagcacaatccggtaccccaaagtggataactattacctcatcgggctgggggcgctaatgatcctgctcctcattttgccaatacaggtctttattggccctattaacctgcctgcgctcgtactgtttgtgctcgcactggtgtacatgttcatgaccttcctagagttcttcatcgacgatgacatgacattcgatagggataaggccagtgacaaggtaagcaacgtgcgcgagatcaccgaaagcaaggtcagctccagcgttactaacgtcaaggacgtcttcaagaacatgaaggacacgatcaaccagatctccaatgaggacttggatgtggggctgaaggaagatgctgaagaggagaaggaaaaagaggaaaaggaggtgaaagaagccgaaatcgtggaggaggtcgagtga

SEQ ID NO: 4050 - DNA, 852 bp, synthetic construct
  source 1..852: mol_type = other DNA
atgattgaggagagaatccagattctcaggcgggccgcccaaatctccaccgaggaccgggaggagaaggtatggtgtgtcatagcgggcaatgacagacttgtcgacgacatcgcctacaacgcaatcacccgccagggccagagtccagattatcctctgggggaaaacgtgtcaattactagtaagcattcatacaagaagttcgattgcatcatgcttaagggcgaaaccttaaaaatcagggagctgaagaataagacccacgaggaagggggagcctctttgcagatcaccacaacgtccctggaaaggcagccaaacctgctcgttgtgataggtcccgaagagagcatgaaacgttttgttggtcagacaagccgccaagaggtgaagattgacatcttgctagaagatcacacgacaggctttatcaaatccgagcccaagtcaacaaagattcccaagttcctgaaaaacttcttcaatccgatcatagagagcagcgaagtcatcctctctgtgctcctgatttccgtgaaggacgaaggggatatcgataaggtgaaaggaatcagccaggagaacagcctgtttggcattgacctgaagtcgactattcaggataaggaaatagcgcgactgaaagaacgcaaagcacgggaaaaggctaagaaggaggaggctgagaagaaggaaaaggaagagaaggaaaaggccaagaaagaatccgagaagaaggagaaggaggagaaagagaaagctaaaaaggaggagagtaaggaagacaaaaaagagatcgagaaaggagaaactaaagaggacaaaaaagaggaagataaaaaagactga

SEQ ID NO: 4051 - DNA, 1071 bp, synthetic construct
  source 1..1071: mol_type = other DNA
ctgagtattttcggaaatgaagacgctattgagattgaaccaacgcgggtcgtaaaaaatagtttagggattgacctgggtaccctgaacactgtgattgcaaaacccagcggagacaagtttgacttgtatcagattccctcagtggttgccgtcaagagggatgatcccactgctgtgcttgccgtgggagaagaggctaagaagatgctcggccgcactccggaggacatcattgcggtcaggccccttaaaaagggtgtgattgagaacatcgcacaggcacaagccttgctcattcgggcaatggaaataggcattaacgagggggagacagtcgaacgcatagtgatcggcatccctggcgacagcagcgaggtggagaagaatgcggccgaggaaatcgggcgaaaggccggtgctgagtatgtgctggtcatcagcgagggcctggccgccgctatcggtgcaggactgcctatagccgagccgatggggaccatggtgctcgacattggggcagggtcaaccgacatcgttgtcatatcccttggagggatcaatgatatagagacagtaaggtgcggaggcgacgacatcgacaatagaatcgtcgagctgattgaggaaaaatacaatgtggccataagcatccacgatgccgaggccgctaagatcgaggtggggatggtgcattgtagtgaggagttcgagaacctgaactacgaggtgatcggcaaatccttggagaccaacagacccaaaaaggtcgtgatcgattccatgctagtggccgatgccgctgaaccaatcatcaaacaggtaatcggcggcctaaacctcatcctcgaacggctgccagctgaactgatgatgggcatctacaacaacaccgttgcagtcggaggctcctcgcgactgcgcggcatcaaggaaagaatcttcgatgaatctgaaatccctattaagataagcgatgaccccatgacagtggttgctaagggaacggcgattgttgccgccgagccattagccctggaacctgaagtgcgtctcaaagcgatgaagtga

SEQ ID NO: 4052 - DNA, 240 bp, synthetic construct
  source 1..240: mol_type = other DNA
atggatatgaaaaccatttacctaagcgaagaagtctacaaccgcctttcactgttggccctggagagtgaaaactacaatgatctgatcgccagactcatagacgtgtatgagaatagctatttcgacgagctctccgatgcagaggctgacttttacaacgagaggatcaagtacttcgaaaatggggactatgagggcatccggaaggtggacctgaaattctttggaaagaactga

SEQ ID NO: 4053 - DNA, 660 bp, synthetic construct
  source 1..660: mol_type = other DNA
atgaacacactggggctggacgaggcaggccggggtcccgtgctgggacccatggtagtggccggcatcgtcatacctgagaagaaggaaaagatcatcgaaagaatgggggtgaaggattccaaacggattaccccaaagcgtagggctgtgctctatcgcaaactaaccagaatgttcgattatgagaccgtggagatcagcgccaaggacattgatctgttacgggcgaaaggagttaacctcaaccagattgagaagttggccatgatgagaatcattgcaaagctcaaggccgacaccattatcatcgattcgcttgacataaaggaaggaaggctggaggaggagatgcagaatttcgtgggcgagggctcaaaggtcattgccgagcacaaggcagatgacaaatatattgttgtcggcgccgctagtatcatcgccaaaactaaacgcgacgaaatcatcaaccagatcaataaggaatacataaggagcactggaaataaggatggcatcggttccgggtacccgagcgaccccaagacaaagaacttccttaaaaactacaaatacgacgagatgccagactttgtccgccgaagctgggggacggtgcaacgaataaaagaagcggaagaagctgagaaaagcctgtga

SEQ ID NO: 4054 - DNA, 618 bp, synthetic construct
  source 1..618: mol_type = other DNA
atgtacctgggacgaatcatttcagccggtaaaacagaggatggcaagccctttgtcgcttacagagtttcaagcaggagcttccctaaccgccaggtaaaggttctcgaggacgaagcggctatcattccaaaggagggctttgagaaggacatttttaaaaactcttatatcgcttacgactgtataaaaacggtgggcgacattgccataatcagcaatgggagccagaccaatccgatcgccgataaaatatccatcggtatgaacatccgggacgcaatggcctactccctaatcaccctggattatgaaaaggacgattacaacactccccggattgccgccgtggtgaaagggggagatgacttcgaggcatatatcggcatcgtgaccgacagtaagatactggtggaaaagatcgatgagggggctcaattcatttccacatacgagaagaacagtccagaagacgtggtctattctgccgagactcctgatgatgcatgcaagttcatcttcgacgagggggcctttgcggagttcgaaaaccccgtctgcagcgtggcggcaatcttcgacggcaaatggaatatttcgggactcaatccagaatga

SEQ ID NO: 4055 - DNA, 402 bp, synthetic construct
  source 1..402: mol_type = other DNA
atggcaattgacattaagcgccacaaggaaaagctgaggcaggacgagcccgaaatcaaactggttcccttcatcgacatactatttacacttctgatcttcctcgtggtcaccagcaccttcggagctgctacagtcgacgataatgggtcagggtctggaaagccgaacatgacggacactacaggcgatgcggagtattacctgatccccgttgccggtttgcagaaagtgactgtagatggcgtggatatgtcctccgagattaagggcaacgccatcggggtgcatgcacgggtcctcgaccagggcgacgtgcagattaaaaccagtgaacacgccataatcatcaaagcccctccaggaatgagccctcaagaggccgtgcacaccccagagtga

SEQ ID NO: 4056 - DNA, 840 bp, synthetic construct
  source 1..840: mol_type = other DNA
atgatcatagagatgctaacggatggattcaacatgattatggagatgctgcagagcggaggagtgatcacctacataatcctcctcctcggtatctacggcttactgatatccattcgcaaaatattttacctgaggaagatatcaaaaatcgacgctacagagatcatggggaccatcaccagctcgatggaacagggcggagccattgaggccctaaaaaacatcagtcactacaagaaccctgtctcaagaatcatgtccgaagcactcaagatcggctataagaacaaaacagaagttgaggagagcatggagcagatcttcatcgtcgaactcagcaagatgacaaatgggatcagcgccctgaagaccatcattgagttagctccgtttctgggtctcatcggcactgtgcttgggatttggatgaccttcaagaacctgggggtgaacccagatgcggccgcaatggctgagggcatctacattgcactgataactacaatcgccgggctgactgtggcgattattcttatgcccttgtacacgtatatcaaaggcctgattgacgacgaaatggacaaaatcgagttggcaacaaaaatgacgaattggagttatgccgttattaagattcgggtgtacgaaaaactgccatgtgtggtcgaggctcttcaagaggccgatggcatcgtaagtgtgaaggagatcaccgacccctattccaatattcagatctcattcaagcccagcatgttggaaaagagcataagcaatatcattctggagaaatgcgatgtcaagtccgaaattaccgaatccaagctgcgacagtga

SEQ ID NO: 4057 - DNA, 765 bp, synthetic construct
  source 1..765: mol_type = other DNA
atgactctggagctgttcggcttaaaaaaaattccgctggtcaagaaaggagatgacattgccaagattattgaagatgacttgaaagaggaagacatccagctggaaaatggcgacatcctcctcattgccgaaacactgatttcaaaggctgaaggaaacatcataaagatggatgacgtggaagtcagcgacaaagccatcgaaatagccgagaagtgcaagaaagaccccaagattgtcgagaccatcctacaggaaagcaatgagatcgttgccgtaggcccaaacttcattgtgacggagaccaagcacggctttgtctgcgccaacagcgggatagacgagtccaatgttgaggacgggctagcgacccccatgcctgaaaaccctgacaagagtgctaaggagatccgcgagtacctcgaggagaaataccagaaggagatagccatcataatcacagacacccaaggaagggcctttcgagtgggggccatcggaacggcaatcggttgttcgggtatcaaccccctgtgggtgcggattggggatacagatctttatggcagggctctggagaccaccgaagtggcgacagcggatgagctggcagctgctgcatccctgctcatgggccaggccgatgaaggcatccccatcgtgcttattagagggttcgatgcattcaacatcttgcgggatactgagactggaatcaagccactcctgagaccaaaggagtttgacgtgttccgcaaatga

SEQ ID NO: 4058 - DNA, 510 bp, synthetic construct
  source 1..510: mol_type = other DNA
atggtggaaatcaattacagttgcacaaactgtgacttctcgttcctggacaagaacctaatcttctatctggacaccgcgaacgaaacggagaggatagataacctcgaagagatcttgaatgataaaacagacaacctggagttaattgaaacaagcctgaataaagagagctccgacaagatgaccaaagcacttatcgccggctttctgtatgaaaattactgtcctcactgcaagcagttgataaaaacctacgtgcccgaggataacaagctctttactgaccaggagatggagaagattctgaagaaggaaattagcaagaacaaacaagagaataacaattttaagattctgtttttcgatttcaaaaatactctctaccgcgaccggagaaagatccttgagtccaacgaatgccccaactgcaacaaggagatgtctctggtcatctcagagaaaaccccgtgcccagagtgtggggagaagctcaaagaagatttctga

SEQ ID NO: 4059 - DNA, 906 bp, synthetic construct
  source 1..906: mol_type = other DNA
atgattaccatactgtccggaggcaccgggactcccaaactgatccaaggtataaaagaaatctaccccgaagaggagatctctgtcatcgtgaataccgtggagaacgagtactttagtggcggctatgtcgctgccgactgtgacacagtgatgtacacctttgcggatatgattgacgaccagttcttctatggcattatcggggatacattcaagatccgcaacatcctaattgagatgggaactacggagctgcttaaaatcggagatatggacagggcaatcaagattcagaagacgatcttgctggaggagggaaagaccctcagcgaaattgtagagcatcagaagaacaagctcggtgtgaaagcaaagatcatccccatgtcggatgaggactctgagataaagatcatcacgaaggagcacggcgaactggatttccacgacttcctcatcaagcaccagtgcgagggggaagtgttggaggtaaagtacagcgacgtgaagccaagccctaatgtgattggcactattaaagatgccgacaaggtgatcataggtccgtccaatccgatcacctcaatacggccaatcattgccattgaaggggttgaggaggccctgaaggaaaagaaagtcattgccgtcagtccatttctcggggaagccgctttcagcggccccgctgccaaattcatgaacgcatttggctatgaggcatcatccaagggagttgctgaattatacaaacctttcctcgacacatttatcatcgacaacgaggataaagacaaaaaggaagaactggagaaaataattcctaacatcgtcgttgcgaacacctttatgaagacaattgaagataagatcaatcttgccaaagtggtgctggagctgtga

SEQ ID NO: 4060 - DNA, 762 bp, synthetic construct
  source 1..762: mol_type = other DNA
atgatccagatgactttgatacaaattgataattacggtccctggaccgtcactccccggccacggactgaatctgacctgcagattttacaagcggagctctttgcagacgtgcagagacagattgccgccaagaaaggccttgtgttctttacgcgctttgacaacttgctggcagttacaaacggccttaacgaagaggatcatatgcgcatccagaggtcgattcgcaaccgttacccgatcacgataagcatgggggtaggggccgccgagaccgctcatgaggcccagcgactagcaaccatagccctgcagaaggaggggggagcccagtcctcaggcaggaaagaaattctcgcgatcaataatctgattgaaaaccctgaagacagtttcgtgcaggcggcccacattgacatcaacagcgtgaccgagacactgaccgacatcgagagtgcctttgacacatccttcatggtgaacaaggctcaacactacctcatgaccaagctgagagaaaaaggagctctcctgttcttcatcgggggggacaacttcatgtccccatgcaacggcctgagcgaagaggatctaacaaacatcctcaaggaaatcgatgaggagatcggcatcggcctgaaagcaggtatcggcagggctgataatatggaagacgccgcttatatggcagatatcggacttgagataatccgggagggaaataataaggagtggattcacgtcattgaggagctgtga

SEQ ID NO: 4061 - DNA, 714 bp, synthetic construct
  source 1..714: mol_type = other DNA
atggccggcatcacaaacgccgaatttgctatgaaactcataccttacggttttgacacagtcaccatcggtggatacaatacggactccgaatccatagacgcctgtgaaaagattattgcgagaggccgaaaggagttcaattaccccaaagaggagatctatagcgtgattgaaaatgaagtgaacgcaatcaaggatagtttcaacgtacaggtctctgccaacttgagggggagcactcccgacccactgatcaaaatcagcaagatagagaagctggacatcattgagatcaactgccattgcagacaagaggagctggtggcggtcgggtgcggacagtcaatgcttttacggccggacctcgaagattacatcagggaggtggttaaaaagagtgagtcgaaggtctcaatgaagatgcgggctaacgtggaaggggtggacaatctggagatcgccaagctggcagaagattgtggcgttgactatctccacattgacgccatgaaaatgggagtgcgcgatgctgatttttatctaatcaaggagatcgccgagaacaccaatattttcatcattgggaacaatagcataaattccatctctcaggccgagaagatgctgaacgccggagcaaacggcatttccatagctcgcgctgcaattagcggcaaactgaacttcgatttgaatcagatcaaaatctga

SEQ ID NO: 4062 - DNA, 981 bp, synthetic construct
  source 1..981: mol_type = other DNA
atggccggaactatgaaggcgtggcgaatcaatgaactgggcaagcctcctgtcttagaggatgtccccatacccgaacctggatttggggagatcctcattaagatgaagggtgcaggaatgtgcaggactgacctggaggtgatagatgaagggttcatcaccgtgccatttgtcggacccttcacctttggccacgagaacgcaggcaccgttgcaaagctcggcccgggagtagatacggtggaggtgggccagaatgtcattgtggacacattgcatgcatgtggtaaatgccagtactgtctgtccggccgggacaacttctgtgaagtggctagcgcccgtggtctcaaggaggacggcggtatggccgagtacatgattgccgatgctagggaagtcgctcctctgggcgacctggaccccacagaatatgtggcactggcggatgccggactatctccatacggggctgtccagactgccaaaccattcatcccaaacaatgggacggctgttgtgatcggggtggggggactgggcttctactgctgccaatatttagcgctgacaaccagtgccagagttatcgtagtgaaccggtcagctgataagatggcgaagatgacaaacttcggtgccgacgaattggttgtgcttgatgacaatgcctacgataagataatggagctgacggacggcaagggcgtcgatgctgtgtttgactttgtaggacgcgacaacactctcgagcttgccgcccagatcaccaaaggcctggggctcatttccattctggggctcgggggaggaacactgccggtgagctggaccaccgtcaaacccggggttatggtgagattgactcagggtggcaccattacagacctatacgagatcatggaccttgcaaaagccggcaaaatcaccgtgcaggcccaaaaatatcccttcagtaaggtgttccgcagctcgtga

SEQ ID NO: 4063 - DNA, 258 bp, synthetic construct
  source 1..258: mol_type = other DNA
atgagcaaactctcaaaactgcccaacatcgggaaggtgctggaaaagcagctcaacgatgtcggcattaagaccgacgaagacctgatcgatcttggcagtaaggaggcctggctcaaaatcaaagaagtggacgacagcgcatgcttgaatcggctaatggctctggagggagccatccagaatattcgctggcacaacctgtctcaggaggataaggacaacttaagggagttctacaattcccaaaagatatga

SEQ ID NO: 4064 - DNA, 660 bp, synthetic construct
  source 1..660: mol_type = other DNA
atggtaaggcccaagatagagcgtcggattgtgaaaaaacctagctacacatgcatccagcacggcgacatctccagagaggaggacttcgaaagcatcaagatgaatctagacgagtttgaagcgatacgcctgggggactatcacaacatcaagcagaaggaggctgctgaactgatgggcatatcccaacccacgtttcatcggataatcaactctgcccgcaagaagactgccatgtctctcattgaaggtagaaaaatcgaaatcaacaacgagaatttctatagcgaggataagatctacatctgcaacaattgcggcttccagtggaacaacccaaaaaaggagtacgcaaactgtccagactgcaaaagtgaaaatatcgagcgaattaaggtcaacctgaacgagtccgactacatcaataacaaccccaataagatcaaaacaaatagccagatttgcgatattgataataccgatgtgccccttaatgaacggaaatcatttgggggacctgggagtggtaggggaccatcaaaggcatgcgagtgtcctaactgtggccacattgccccgaaaattaaggggttcccctgcaggaacatcaagtgtccagagtgtggaaccccgctctgcggctcgaagcataaatga

SEQ ID NO: 4065 - DNA, 1611 bp, synthetic construct
  source 1..1611: mol_type = other DNA
atgtctttcatcacacttaaaaacattaataagtcatttaacggagaacctgtgctgaaggatatcaatctgactatagaggaagggtctactttgggtattctcggtcggagcgggagtggcaagtcagtgctgataaacatgttgcgcggtacgaaggaatatgctccagacagtggccaggtgctctttgacctggccatatgcgagaacaagaagtgcctgcatgttgagccggcgtccaaggctggcggaaagtgtccagagtgtggcgcggaactgcaagccaaacagatcgacttctggaatgcaggaaggctggagaaggccgccatccgccgcaggatctccatcatgcttcagcgaaactttgccctgtacgacgagcagactgtgatagacaacgtcttgaatgcaatgggcgacgagggcagatatgaagaggagaatatctacaatgccattgacctcctggagatggttcaaatgagccacagggtaacccacgtggcacgggacttatcggggggcgaaaagcaacgcgtcgtccttgcaagacagctggcgaaaaacccgatgctgttgttagctgacgagcccacagggacactggacccccagactgctgagaagctgcaccagaccctcattgagggtgtcaaggatgaaggaatctccatggttatcacttcccactggcccgaagttatgaatcacctcgctgatgatgcaatttggctggacaatggggagatcatagaacatggcgcccccgatacaattgtcgagaacttcctcaaaaccgtgcccaaagccgagcaggtggaaaaaatcgaacacaccgaggagattattaaagttcaggatattaaaaagcattattactcaattgaaaggggcgtggtgaaggcggtggacggcgtaagcctaaccatcaaccagggagaaatctatgggattgtagggctcagcgggtcaggcaagaccacattgacgaaaatgatgatcggcctcaccgagcccagtgccggagagcttgtcatcagactgggtgatgactggattgacatgaaaaagcccggtcccttaaaccgtggccgggtgacgccatacctgggcctgctccatcaagaatactcgctttacccacaccgagatgtactgggcaacctgaccgatgccatcagcctgaacctccctgctgagttcgcaaaaatcaaggccgcccatatccttgagacggtcgggtttgaaaaggacaagtccatgagcatgctcacaaaatggccggacgagctaagtggcggagagcggcacagggtggctcttgcccaggtgctgataaaagagcctaatatagtggtcttggacgaacctacagggaccatggaccctgtgacccgaatcatcgtgaccaactccatcctaaaggcacgggatgagctggatcagactttcgtgatcatttctcacgacatggacttcgtgctggatgtctgcgataaggccagcctgatgagaggaggaaagctcctaagcacgggaaccccagaggaaatcgttgccgagctgacaggggaggaaaaagctgatatgattaaggaccactga

SEQ ID NO: 4066 - DNA, 483 bp, synthetic construct
  source 1..483: mol_type = other DNA
atggcatgggatgacgccccgtcccacatctgccggggaggcgatgtcagggggctcgccttctgctgccccccagttaaaccatgccccgtcatgaacgcgctgcgggaagtgggtattaccccccaggagtttctggagatcaaacagaagttcgccagggaaacccgattaggggagggccctgcaacttgcttcggatcactcgtgtggtgttgtaagaccagtaagccttgtcccctgagagacatgaccttgaaccaaattaagatgactgaagacgagtacatgacactgaaaaagcagctttctgaagagatcctgaaggcaggcaagccaaaagacaatagcgctgaagccatggccctggctgagacatttaatataagcgtagaggaggcgaaaaagacgctagaagactgtgataacgacctgcgcatggccgtgaagttgctcaagcttaaagagctcgataacgagtga

SEQ ID NO: 4067 - DNA, 624 bp, synthetic construct
  source 1..624: mol_type = other DNA
atggggcttacgtccttgttcctggaggtggaaaacaaaaacgttttcatcctgggcactggcgaggtggccaccagaagggcacaccgctttctggacaagggagcaaatgtcattctagccggcaactcaatcgatgaagagctcagcaaaaagggcgctatcctaactccgattaaagatttggaggagctggtcaaatggagtgacattattgtgaccgcaagcggagacgatgagttgtgcgaatacatcgcctcaatctcccaagggaagctgatcaaccgggccgacaagcctgagaaggggaatatcattgcgccaacaagcttcctgatcgacgatatagaaatttccatctataccaatggacagagtcccttaatggctcgagagcttcggaaaaaaatccagtcgataatcacagaggaggacattctggagataaagcttcaggactacgccaggaagctcctgaaagaaaaggtagaagaccagaagacacgcaagcagtacctgctcaagattctcaacaacacccagataaagcaatgtctcaaggaaaagaacctggataaagccaaaggtctggcggaggagatcatcaatagcgaatttaattga

SEQ ID NO: 4068 - DNA, 1197 bp, synthetic construct
  source 1..1197: mol_type = other DNA
ttgataatcaatatacgagtagaccacaccctggcagacattgagactatggaaaaggtctcaaaagacctaaaggagctcttttccaacctgaaagaaaactttaacatcagtgagtacattgagatcaacacctgcaacaggtacgagtacttcctctatactaatgttgatgacgacagcctcgactgcgacaacgagtatgtcataattgaatacgacgatagcgccattctccacctattccggatgacgagcgggctggagtccatgatcatcggcgaggaccagattctcggccagatcaaggattccaagaagaaaagcgagaaggaaggccactgcggaaagaccttagacaccatcttcacaaaggctatacacgtgggtcaggtggtgcgcaacaagacaaaaatcaatcaaggctctatctcgatcggctcagccgccgtggatcttgctgaagagcatctgggagacctgcaggacaagcatgttctggtgatcggtgccgggaagatggggacgctggttgccaaggctttggcagagaaaaacctcaaggccatcttcgtagcgaacagaacctattacaaagccgtgaagctggctgaggagctggatggggaggccatactattcgacaatctcgaggagaagctgctgaacgcagaccttgtgatcagctctacagggtcgccgcaccctatcgtcaacaaggagaggctgatgaaagtgttcggagatgaagtccccgaaaaaatgatctttattgatatcgcaaacccaagagacattgaagatgatgtcaaggaattgggaatcgacctcttcaacattgatgacttacggggaattgccgagaagaataagaaacttcgcgagaaggaggtaatcgcagctgagaagatcattgaaaatgagttcaatctgctgaaagaatcctttaatctgattgaaattaatagcatccttggcagtctgcgcgagagcatggaagaaatccgacaaagagagagtcagaagggcatagtgaaattgaatgcggtggatgcgagggacatcaaagtcattgataagatgactaagtcaattgtgaacaagatcttttacgacatctctgagaaagttaagatatccgctaaaaacaacgaggaagatgtgattaaaatgtgtgaagccatcctgaaacggtga

SEQ ID NO: 4069 - DNA, 1128 bp, synthetic construct
  source 1..1128: mol_type = other DNA
gtgaaatctgacaataagagttcaaaaatcaaaaaatcagaggtgtatatcaagtcgagtagcgatagcatcgacaaggaggccgaggagctgatcctcgagtctgcagggtacccattcaactttgcactcctggaaggacctcatctggaaataagtgacaacgtcctcttcgagcaatacgccattgagcagtggagtggaacgctggtaaagactggctcttacctgttcgaccaaaagatcattccggactacgccttcaaggtgctgaaggtttttcccgaaaattccatcataagcgagaacacctctatcgtggtggctgacgtagataaggacaaacgttcctcgatcaagtcaaagcagtatgacgtgcattttgatgacatcgtgggtcaggagaacgcgaaaagcaaatccaagctgatttacaaatatctgcagaaccctgacaaatttggcacgtgggctcccaagaacgtcctattctatggcgctccagggacagggaaaacaatgctcgccaaggccctcgccaatgaactcgacatccgcctgtaccttgtcaagagcacctcattgattggggagcacgtgggcgacgctgcaagccggatacacgagttgtttgaggctgccagcagaaatgcaccctccttaattttcattgacgagatagacgcaatcgccctgcacaggtccttccagtccttgaggggagatgttgccgagattgtaaacagccttttgactgaaatggatggcatcagcccaaatgatggggttgtcaccattgcggctaccaacaacccttccgcgatcgactttgccatccgaagccgcttcgaagaggaaattgaatttaagcttccgagtgatgatgagcggcgggaaataattatgctgaacctggacactttcccccttgactacgatttagacatcgagaagctggtcaaagtgtctaaaagaatgtccggccgcgatattaaggaaaagctactgaagacagccctgcacaacgcaatcatcaatgacaagcagaccgtggatatggatgatgtcgctttcgccctcggtgtgaataagtataaagaagaggaggtgaaaggaatgttcgaatga

SEQ ID NO: 4070 - DNA, 837 bp, synthetic construct
  source 1..837: mol_type = other DNA
atgaaagataaggtgatctttggacccgcgggtaagcccattgatttcaagggaaaggcatttgaatctccagaatatttaggcccaagggggttgtacgccttcgagtaccagtccacgtatggcgtcaggatcggggagagcagcgcaattaaactacgcgagtcggcggagagaaatggggtactcatgtccatgcattgcccgtactacatcaatgtgtgttccaaagaggaagaaaagattgacagcagcatcgagcgactgattcaatctgctaaggtgggcgaatatatgggcgcctaccggcttgtgttccaccccggcttctactcaaaccggaaggctgacgtctgcatggatttggctaaagaaacctatcgacggctccttctgagatgtgaagaggagggcatagaggactttaccttcgctccagagaccacaggaaagcgttcacagctgggaaacatcgatgagataattgaaatgtgcgccagctttgaccatttcgagcccacaatcgactttgcccacgttcatgcaagagggcgcggaatactgaacaagaaagacgactacaactgcatattcagtaagcttgaagacaatctggacattgacaggctccattgccacttcactaccatcgagtactcccacaagggcgagcggaagcaccacactctagccgaaggtgatgaatacgggcctcacattaaagatctgctgctcaacctgatcgagaacgattggaaagccacaatcatctgtgagacgcctctcatcgaccaggatgccttgcgcatgaaaaagctgtatgacagtctgatctga

SEQ ID NO: 4071 - DNA, 1017 bp, synthetic construct
  source 1..1017: mol_type = other DNA
atgaaaagcgtagccatcaatggattcggcacaatagggaaaagggtggcggacgccgtcgccgcgcaggatgacatgaaggtgattggtgttagcaagaccaggccgaacttcgaggcaagaacagccgtggaggaaaagggatatccactgtatataggcatcccagaacgggagcccctctttaaggaggcagggatcgaaattgccggaactgtggaggacatgattcaagaggcagacattgtcgtggactgtacgcccggcaacatcggcccccagaaccttgagatgtacaagaaagctggcgttaaggccatttaccaaggtggcgaggaccatgagctcaccggcctcagctttaactcgttcgccaactatgatgatagttacggggcagactacgccagagtcgtaagttgcaacacaacagggctaacccggaccttgcacaccctgaatccactggttgacatcaagaaagtgcgcgctgtcatggtcagacgcggatcagacccaagcgaaatcaagaaggggcccatcaacgctatcgtacccaaccctccaaaggtcccttcccaccacggtccggacgttcagactgtaatgaaaggcatagacgtgactacaatggctctgctggtgcctactaccttgatgcaccagcacaaccttatggtggagatcgggaatgatgttacgaaggaggaagtcatcgaggccctcgaaaaacgatcccgagtgatggtggtggaggccgctgccggcctggactcaacggcggccctgatggaatatgctaaggatttaggacgcagcaggaacgacctgtacgagattcctgtctggaaagagtccataaatgtcgtggataatgaactcttctacatgcaggctgtgcatcaggaaagcgatgtggtgcccgagaacgtggatgcgattcgggcaatgctggagatggaatctgataatgaaaaatccatcgcaaagaccaataaagccatgggaatcttttga

SEQ ID NO: 4072 - DNA, 552 bp, synthetic construct
  source 1..552: mol_type = other DNA
atggttttcatgattgacctagaccagttaaaaaaggaaatcaatgatctgaccaaggactacaagggatttgagttcaaatacatagataccgattccatcgtagtggagccctggacaaggctcaaatgtcagtacggctgccctaattacggaaagaccctcgtctgtccgccattcactccaaaggccgaggagtttatcggcatggtgaatagctataagacggcaatcctcttccaaataagcctggcctccctggaagacgacattgggggtattactaaagtgtcggtggacatcgaaaacctgtgcgctcactttggctattacaaggcctttggcatgggcgcagggccttgcatggtgtgcaagtcaaaaggggaagaatgcagtttggatgcctgtaaatatcccaacgaagcgcggccctctggagaggcttgtggtgtcgacatccataagacaattgagaacaacggctacgatattctgggaatcgacgaggagaacaacagctatttctgctacgggatcgtccttctggagtga

SEQ ID NO: 4073 - DNA, 1086 bp, synthetic construct
  source 1..1086: mol_type = other DNA
atggcaaatactttcttttccaaaatagtgaaatccctctgggtcctggcctcctttatcccaaccctcaacggattggggttcgcttatatcggcgcgaaagagttcaaaaataactggattattgaaggggtgatctacgagattccctggttcctgctcttcatctttgtgaacaatgaggacctgggcgtgttctttgccacaataggcctgctgggtatggctgtgtcctttgttaggtcactctacgtctactataagcacaaggacatattgattgacgacgatgccgaaagtcgcatcagcacggagaagtccatcacgagcttttgggtgatcttctctgtcattatcttcctaaatgggctggggctgatatatgtcggatttaaaagaaacgttcggcaatggatcttggaaggtgctttctttgagttcctgtggctcctattcttcatcacccccagcaacaaggccttaaacagttttatcatcagcctgggatttatcggtatgattctatctgtcatccgcacatttatggtctactttgaagaggaacgaatggatggcggcttctacagtccaacagccgtgaagaaagagccccctgcccagaacccgattgaaaacaccatcaactcatacagtgagaacaaccttagcgatgacgacattgttcctgagttcaagggatataagacccaggtggaggatttgaaagacgcattcaagactaaggaggacaatgtgaataacctgctctctaagagattcaccaaagaggagcttagctacggccggttcaagtcagtggtaaacgagtttcataagacattctacagccaggcagattccactttaaccatgattaatctggcgcccgaatacagcgagagggtagatgagaccataaaaaacaagatcggccttatggactcgctgctcggggagatgaacaatctgctcgaagaactgattctgaatgacggacttccagagaagtcagatgaggaaatcacggaactgttcgaaaacatgcacaatctgattaattcggtggacgattataacaaggagtga

SEQ ID NO: 4074 - DNA, 345 bp, synthetic construct
  source 1..345: mol_type = other DNA
atgaacttcaataagaagattctactgatcattgccctggtattcatcgctagtgtgggcattgtggcagctgaagacgccacagtcgatccctacactttcactataccagacgactacactattgcgacatccgacgacacgacctgcgcaatgcagaaggacgcgacccacgccatcagctttgcaaccggcgtcagcgatgatatcgaagccgccaaacagaacttcatctcccaaggaaaaacactcctcaaggaggagtcaatgaactataatgacatggacatcaccctgcaggcctttagcgctgatgtggatgggacgaccatcatatgtctttga

SEQ ID NO: 4075 - DNA, 1653 bp, synthetic construct
  source 1..1653: mol_type = other DNA
atggagaataacgatctcgaaaatctgcgcaaactgatccaggacatcctggacttcgcaaagacccactctgataccttggacgaggactctgcgcccctttggtattttgcaaagggaaaatttaacatcactcttgacgcccttctgctaaacgatattctctgctttctgagctttctggggcttagtgacggaaacatcagtagcgacgagttgaacttcatcaactacgtgctgaatttcaacttcacaaaaagcgatttggagctctacttaaagaataatctaatcgatgattatagcgaatctcttcctccatccttctttgtgttctatgaatttgataagtttgccctggagaatgggaaactgactgaaagcatcgtagattccttattcgaggtcttcaacggcatcggccatctctttatagccctcgacaacgagtcgagcctggagaagaatattctggattcatttctggacaacattaaaaagcagctggctgacctccggggcttccagtacgaacttatggtgttggcgctgaaaaatgatctgatagacaatatgttggacacgaactcaattgacggcttcagcgactcgaatctggacacttctttcgactcggacttagacaaccctcaactggatgactctttcctcgataaggtggatgactttttcttcaacaacgaatccgacgatgacttcgtgagttccgtggacagctcaaatgatgacttaaatatggggggtgacgacagcctggatagtgatagccaatccaactcctcgtctccaagtgattccgacagccagaaagacaacaaaaagagcattcaggagagtctcgataagcttaacaagctggttggtctcgaggctgtgaaaagtgacgtaaattccctaataaacctcattcagatcagaaagctgcgggagcagcgcggaataaagcaaccagacatgtccctgcacctcgtgttttctggcaaccccggaacgggaaagaccacagttgccagactcctgtcagatatctattgtcagctcggcctgctgagcaaaggccacttggtcgaaacagataggagcggtctggtcgcaggttatgtcgggcagacggccatcaaaacccaagaggtcatccaggaggccatgggaggcattctcttcatcgacgaggcctacgccttgagctccgcaaagggagaaaacgattttggccaggaggcgattgataccattctaaaggctatggaagacaaccgggatgactttatcgtgattgtagcagggtaccccgacctgatggatgagttcctccattcaaatccgggcctggaatcacgcttcaacaagcacctgtacttcgaggactacaacccccaggagctgttcgatatattcgtgtccatggccagtgagaccaacctaaagctcgacgagaaggctgaggagtttcttaaagggcacttcgaagacgtttataatagcagggatgacaattttgctaatgggcgttacgtgcgaaatatctacgaaaaggtcctgtcaaaccaggccaacaggctggtgggcatggaagatatctccgatgacgatttgaacacacttaccctggaagacttcaaggacttttga

SEQ ID NO: 4076 - DNA, 1977 bp, synthetic construct
  source 1..1977: mol_type = other DNA
atgggaattaaagaatttttcctaaacaaagaaaaacgaaagatcgtggctattgagaaagacctcaataacaatctgagcatcctgggaggctatagcatgggcattaaggaatatttcatagagaaaatcgacattattttcattctaatctccataattgctattgccctggaccttctgggtgtggacatctacggaatcagtctgatttggatagcaatcatattctgcggcattccaatcttcaaggaggcggccataggtctgtacacggagtttgacataaaggctgacgtgctcgtgacaatcgctatcataagctcaatactcattggggaactgtttgccgcaggggtgattgcagtcatcatggctatcggcggctacctggaggagtacacagtgagcaaaacacgggcgggcatcgaaaagctggtggacctgaccccccgcaaggggagactgatcgaaaactacaacaagtccaacgaatcggaacgagagatctcagctgatcttattgaagtgggcgacatattgaaagtggtgccgggagagacagttccagttgacggcaaaatcataagtggcgagacatcaatagaccagtccgtactgaccggggagtccattcctgtcgacaagctggagggggatgaggtattcagcggaacaatcaacctgtatggttccttcgtgatgaaagccatcaaaaagggtgaggacagttccctccaaaggctcattaagctggtagaattttcaaatccaaacgatgccgagattgtcaagactgccgacaaatgggcaaccctcattgtggtgatcgcatttatctgtgccgtcttggcactagtgttcaccggtgagatcatccgtgctgtaaccgtgctcgtggtcttctgcccttgcgccctcgtgctcgccactcccactgccattatggcctcgattggaaacctcagcaagaggggaatccttgtcaaggaaggcatcaccatcgaaaagttggccaaagtggacagggtcgtcttcgataagactggcacgttaacctacggcaagcctaccctaacggatgtcatcgtctacgatgaggaaaccgaggagaaggagctgattcacctgctggcgtcactcgagaacttatctgagcacccgcttgccaaggcgatcgttaaatattatatggataattacgacgataccctgcttaagctgagcgacttcgagatgatcattgccaaaggggtaaaggccaatctgaacggcagcaatatctgtgcaggcaacctggagtttttcaaaagtttagggattgatatcccagaggagttcatcgaggagattgtgtctccctccctggaaaagggggctaccgccatctacattgccaaggacagtagattcttaggttgtgcattgctcagcgacgtcctacgcaaggatgcctctgatctggttgtgcaattgcggagactgaaggtggtttcaactctcctgactggggacaacaagcaggcagccgaatacatcgccaaagaggcagatatcgtggattatcagtacaattgcctccctgaagataagatctccaccatcaagaagtttcagagcctgaaacttaatgtggcaatgatcggggacggcataaacgatgctcccagcctgcgccaggctaatgtggggatcagcatgggaggggtcggcagcaacatctccatcgaagcctcggacgtctgccttgtaagtgatgacattaaatatgtgccccatctcttggctctctctcgcaagacgataaggacaatcaaccggggaattgcttttgccctgatcctgaatatcttggccacagttcttgcgatgtacggaatgattggccccatcgaaggtgcttttgttcacaacattggatctgtgatcgttattatctatagttccttgctgctgcggtacgagtatgcgaattga

SEQ ID NO: 4077 - DNA, 261 bp, synthetic construct
  source 1..261: mol_type = other DNA
atggattctgaaaatctccatagacggctgaagaagattatcggccagctcaacgccatcgatcgaatgatcgacgaggacattccctgtgaaaacatactgatgcagataaatgcttcaaaaagtgccttgcacagggtcgggtacattattgtggagggccacctagataactgcatcaagaacgcaatggaaaaaggagacaccgacgaggcgcttgccgacatcagctccatcctggagtattacagccgcctgtga

SEQ ID NO: 4078 - DNA, 450 bp, synthetic construct
  source 1..450: mol_type = other DNA
atgtctagtgagaagcgcaattccaaagatcagtcctacctgggctttgagcttattgaagtggaggactactatctcctgtcgaacacggaaaagctgctggaaaccgtgaagaaagactggtttaaaagcctcatggacgagatccgggagttggttggaaagcattacccagacttcgtgatttacctggcctatgtggatcacggagatgacggcacaatccttggctacgtgaatgtcagggaagatgacaacaagagggacgaggagtattcagaagtcgccctcaacaaggagatgctggagatctgcgagaaacacaaggaagataaaatattattcgtaaccattccgcggaagagaaagagcttcatcaagctgaaaaaagggagcatccgagaacacttcaaagaggctctactcaagctgggggcaaagcccttgtga

SEQ ID NO: 4079 - DNA, 1089 bp, synthetic construct
  source 1..1089: mol_type = other DNA
atgaccggggaaagtactcatgagcatacgcacaaagagcaaagacggcaatacacattcaataagctgaaggccttcggccaggagatcatagaggacatagagaagaacaaagtgccaacactaaagattccctcgcggggaactggcaacattgtgtacgatgaggataaaagatactacatcctgggggatcgatatgggcgaaggagcctcggaaacgttaagcaaatccgcaaattagggcagatggtctacgtagccaatttctgtaaggatctggtccagcgcgacaagaccgcgaccatccgggagatgtattatatcagcgagggttggggtatcgagtttaacacacagcaggaatccaacatcgtgggcgaggacctcgaagtggccctcggggccacccgtgaagacctcggattaatgcctgaagaagacggcgcatctgtgtacggtgatataaccttgctggacggagattatgagatcaacgcggcccgggccggcaaatcaggctacaccataagcccaactatcgaccaggttgagctcttggattgcggagccgacttcctcctggcagtggaaaccatgggcatgtttcataggcttgtgcaggaaaaggctcacgagagatacaactgcctgattgttggtcttaaagggcaggccgctcgggctacacgcagatttatcaaaagggtcaatgaggagctgggccttccagtgtatatctgcaacgacggcgacccctggggattccacattgcccaggtaatcatttccggcagtgcaaagctggctcacgtgaatcacgatttggctacacctgatgccaagttcattggcgtgacggcgtccgacattcaaaattacgacctccccactgatccgctaaaggacattgacgtcctgaggctgaaggagctgagcaaagacccccgctaccagacggacttttggcagaccgaaatcaaaaagatgctgaagcttgggaaaaaagcagaacagcagtctttctcaaagtacgggctggaatatgtggtcgatacatattttcctgagaagctgggattgaactga

SEQ ID NO: 4080 - DNA, 1800 bp, synthetic construct
  source 1..1800: mol_type = other DNA
ttgtcgcagcaggcgcaagagctctttgaaaatttcaatgagctaactccaagtgagttctttcggaaaaataaacagatgctgggattctcaggcaagattcggtctctgacgatcgttttccacgagctcataacaaacagttttgacgcagcggaggaggccggtatcctgcctgaaatcagcattaaactggacagactggggaaggaccattacgtgctgacccattcagacaatgggcctggcatccccgaagagtttgtaatgaaggtgtactgccagatgttcgccggttccaagttccggaacatccaatccaggggacagcaggggctgggctgtagtggctgtgttctgttgtcccagatgaccaccggtgagtccacccatgtcacgtccggctggatggagaatggggagctcaaaggggtcaagatggaatttaagatggacgtgaagcagaacaaaggcgacctcatcaagaaaagcgaatttacccctacaggaacgggggtgtgcattaagctccactttaaggaggtttcctactcgttagctgagcaaggcgcgttcgaatacatccgtagaaccatgattgccaacccccacgccaagatcacattcagggaccccagcgcccacaaatacatcttcaaaagggcagcagaaatcgttccagtgctcccccaggaggtgttgcctcaccccaagggggtgacagccgacgacatcattaccattgccaagttcactgacaagaggaacttcaagagcatgctgacaagttccttgagtagaatgtccagcaaaaaggtgagcgaacttcaggagctgaccggaatagatatgaagaaacggccgaaaaacatggagtgggcagaagccgagaagatcgtcgaagctttcggcaaaatgaaattcatggcccctccaacttcaggattgatcccgatcggggaagagcaaatagaaaagggtatgaaactcattctaaagcccgagtttattaccaccatcacaagaagcccagtaacctataagggcggtgtggcgttcattgtcgaggctgggatcgcctatggcggagatgcaggacgcatcgtgaacgagcagcgcaaatcagagatcctgaggttcgcaaaccgggtgccactaactttcgatgcaggcagctgcgccattacagaggcgctgcgatctattgattggagacgttacggcctgcgggacctcgacaacactcctcttaccctgtttgtgaatattatctctacgcaggtgccctacttaagcacaggaaaacagagcattgcccccgagccggaaatagttcacgagatcaggcaagctaccatgaaaatagcccgccgcctgcagaagcacatccgatccaaaaaggctgagaaggagaaggccatgcgcagcaagatatttgaggactatgtgcccgtcatcattgaagaggccgctagtcttgctgagactgaagtgccagattataagcctgtgctggctaaggtaacacggagggcactcgctgaaatcatgggtgaaaaggtcgaggaggaggaggaggaagaagatttcgtcgattcgctgcttgaagagcttgacgagtttggccacacggtcgacaaggagcattcagctcgcaaggacagaatccaggaatctgacctggatgaagccttcatagatgatgaaaagccacgaaagcgaagcaaaaagtccaaaaaaagcgagggcgccgatgaaggacagtctactctgtttgattcagaggaacaggaggaatga

SEQ ID NO: 4081 - DNA, 612 bp, synthetic construct
  source 1..612: mol_type = other DNA
gtgaacgagctgccggaaaccgactatctcagggttccctctgatcggattggcgctttgatcgggacaaaaggtgaaaccaaacacctaatcgagaacgccactaatactcatctggacattgacagcgacgactgcaccgtagctatttacccaggagagaacatggaggaccctcttggggtatggaaggccaaccatattgtcaaagcgatcgcacggggcttcaatccacacgtggctcttaaattaaacaaagatgacacctacctggaaataatcaaattgcccctgtatgtggggaagtccaaaaaggccatggcgaggtacaagggcagaatcattgggaaggacggaaagacaagagagattatcgttgatatggcagaagtggatatggcaatctacggtaagacggtgtcactgataggcgagctggataatgtcatggtggccaaggaggccgtggagatgatactcaacggcagccgccacaagagtgtctatgccttcctggagaacaagaagaatgaacgaaagatgaaagaatttaaggaggtcgtgggaatcgaaaaagatgagatcgagttccgcgacgacctcgatgactga

SEQ ID NO: 4082 - DNA, 234 bp, synthetic construct
  source 1..234: mol_type = other DNA
atgagcctgctggacaacattgataaaatccatacaacagagatgggggtaggacgcatccagcggaacctcggcattgacgtggaccccgtcgaatattgcatcctaaaaatcaaggataaggacgcagtcatcgaagagaagggcaaaaactactacgtgacggttgatgactgtataattaccgtgaataagcacagcttcaccataatcactgcccacaagaagaaatga

SEQ ID NO: 4083 - DNA, 780 bp, synthetic construct
  source 1..780: mol_type = other DNA
atggacgacgaaaatccacgcgtggctaaagcagatgcagaagtgcagaaactgatctcaagaaaacgcacgaaagatgccgatgaccgcaaggtcagtagcgagatattcgacaaggccaccttgcaagtcctctataagctggcgaatcagggccacttggatgttttaaacggggctatcagcactggtaaggaagccaatgtgctgaagggcataaaagaggacggctctatcgtggccgtgaaaatctataggatagccaccagtgactttaagaagatgcagtactacattgctggcgacccccggttcaacgtcagatcaagcaacaaacgacagctgattaacaattgggtaaataaagaatttagaaatctgacccggctaaaggatgcgggagtaaatgttccagaggcaatcacaagccttaacaacgtgctcatcatcgagtttattggggacgaggatggaaacccggcacctacagtgaagaacctgcctccccaagacccagcccacttctacgaacagctagtggagcagatggacaggttcataaacaaggccaacctgattcacggagacctctcctcctacaacattctgaacttcgatgagaagcccgtcatcattgacgtgtcccagtctgtggtccgggatcatatcattgctaacgagctccttgccagggatatcaagaatatcagcttcgaattttccaaaatgggggttgacacttcgatcgaggatctgaccaatcgactcatcaaggactga

SEQ ID NO: 4084 - DNA, 321 bp, synthetic construct
  source 1..321: mol_type = other DNA
atgtttcgaaggcagattctggcaaaaccccaaaacaaccagcaggaataccggcgtgtgcggaccccaaagaagggcgaaatcccgggcgtcgtcgagcaaataatgggacacgggaagctgaaagtacgctgcgcggatggaaacatccgcatgaccaggatacccggtaaggtgaaaaagcggatctggattcgcgagggggacgttgtgctcgtgaagccttgggacttccagagcgatcagaaggccgacgtgatctggagatacacaaggacggagagcaattggctagagagaaaaggctatctgaaaatgtga

SEQ ID NO: 4085 - DNA, 1215 bp, synthetic construct
  source 1..1215: mol_type = other DNA
atgggtgtggagtttctcaatattatcgagtcagatgaagctaaggagatcataaaagaaaagttcgaagagtgttataccgcccaaagcgaaatcatagacattgccgagagtgctaatcgaatcacatatagcaaaattgaaagtaagatcgatttcccaccattcaaccggtcactgaaagacgggttcgccatcaaggcagaagacagctacggcgtgaatgaggagaatcctaaaaagctcaaagtcattgacttcctggaggcgggatcgtttacggataagaccgttgagcttggaagctgcgtggagatcagcacgggggcccccattccagacggtgctgatgcggtaatcatggtggagttttcatacaagtctgatgaaaatccagagctcgaggacgatgaggtggagatcctaacaagcgtcactccctcccaggatatcggccaaaagggctccgacgttaagaaaggccaggtcatcctggatgagaacatcttgctgaacccacccaagattggggtgattgccgctcaggggatcgacactgtggaggtgtacaagaagcccaaggtgggaatcatctcaactggaaacgaactcctaacgaaccaagaggaactgaggccgggcaaaatctacgacgtcaacagcgaaatgatcagggcgggggtgaacgcctgcggagccgaaggtgagtgccttgggattgtgagagacaattatgatgacctgaagaacaagataaccgagagcctgaaggaatgtgacattctcctgtgctccggcggcacctccgctggggttggagacaacatccgccacatccttgatgagctgggcacagtctacattcatggtattaccgtccagcccggaaagcccaccatcctgggcgtggtagatgggaaaatcatcataggcttacctggcaaccccgtttccgcaattgtcattttcaatgtgtttgtggcacctgccatcaagaagctggctggcttcaaacaggaggaagagcagaagaccatcaagggaaaattggccaaacggatacacagccctattggccgcatgcagtaccagttggtcaaggtagaaggggacagtgttattcctatatttaaagactcgggagcaatattctccctggcaagtgccgccggttatacaaaaaagtctcagaaacagaacccgaatctcgtgtga

SEQ ID NO: 4086 - DNA, 468 bp, synthetic construct
  source 1..468: mol_type = other DNA
atggagatccaggaaaagacaattgaagaccagaaagtcgctataatgaactataaaggctaccttaaggacatggagattctgatttccaaactgaccggatggatcgagctagaagagatcgagaccgtgggggacctgttcgccatattctacaacaatccaaggactgccaaggaggatgaagtcgtgtatgatgtgggaatcccaatcaatcccgaactcgaccctgatgagactgaggagatacggattgtaacaatcatcgaacataaagtcctgagcgggctccactatggcagtatcgacaacatccaggagacctacaacattatggcagaatactcaatcgagaataaatacgacattatcggctctcccaaggaggtgtacatcaagagcaagtttgatgtggaggatgaagaggacatgataacggaaatccaattgccggttattaagatgtga

SEQ ID NO: 4087 - DNA, 309 bp, synthetic construct
  source 1..309: mol_type = other DNA
atggccgaggaagagaagagttctaagaagaagtccaagcgggagctggagaaggagcttaacagcaaagtggacaagattattgagaagaacttcgaagactttaaaagccaggatgaactggaagactttatccaaaaggccttcgacgataaggcttcccagtacaataagaaaatcgaactcaaagaaaaagagttggataagaagttcaaagcatcacgcgagaacgacaataaaaaaatcgatagaaaaatacgggagatggaccgaaagctgaaactcaggtataagaccatgctaaagtga

SEQ ID NO: 4088 - DNA, 1314 bp, synthetic construct
  source 1..1314: mol_type = other DNA
atgatttacgagatcgcagaagaggccaaaagagagataagcaaatattcagacacttatgaaatctacatcgaccggactgaactgctggaacttgattctcaaaagacggagctaaacttcgcaaaggaagatctgagcctgggcgtggggatcaggatcatcaaggatggagccataggcttcgccttcacaagcgacatggatgagattgcaaagacgtgtgagaatgcttatctgaatagtaagctcaacacaaaggacgaattttatagctttgccgaatacgaaaaactcccagtggtcaaaggcacgtacgataaacgattcaaggacctcgacctggacgagctgaccggctcacttaaatcggtcctgaatagtgtagaggactacggctgccaggtaagctccgggggattttccgccgctgaaggggagaccttaataataaatagcaacggcgtggaggcctacgacaactcgacaggctttgccattggagtgtcaatcaacgccgtcaaggacggtgaattgaccaccgcttacgactccgatagctcctgcctctacgacctagatggtatggccctcgtcgaggatatttgcaatcttgccatggactcccttgggggcgaagacatcgagaccagtgacagggacgttgtgctggactaccacgctgccactggattgttgtccacctttctgagcggcttcaacgcagataacgtgcagaggggaagatcccggatcgcggataagatggatgagaagatcatcaccgagaacctctccatttatgacgattccaccatcgatggtggactgaatagttcgcgctgcgatgacgagggcaccgcgtcaaagcggacctgtctggtggaggatggggtactgaagggattcctctatgatatctacacagcgaataaggacggagttaaaagcagtagtaacgggttcagaagctcctacctgggaacgccgagcgttggggcttcaaacctattgttcgactttaaaagccatcgcaacctcgacgacattgatgacgcattcctggtcacagacgttctcggcgcccacacagccaacccaatcacaggcgactttagtgtggaggcaagcaactcattcctggtgtctaacggtgataagaagcccattaaaaaagccatgatttctggtaacatctatgatcttctggcggacgctgaagctgtcgggactgagactaaacagcgaggctctttcattatccctaagatatttttacccaatgtgcgcgtggtggggaataacagcaattga

SEQ ID NO: 4089 - DNA, 705 bp, synthetic construct
  source 1..705: mol_type = other DNA
atggtgaaaatcgaagcaatcgcggtcgatgtggacggaacaataacggacggccggagacgggtctgccacagcgccttggacgcgctgcgcaaggcagaggatgctggcatccccgtgatcattgcaactggaaacatctcccacttttcgtatgctgtggccaccttggtagggaccaccggaggcctggtatgtgaaaacgggggtgttatctatcacgacggctacaacgacaatcgagtgatcgtcttaggagacatctctaaagctcagaaggcttacgacttcctctttgacaagttcggcaaagacattccgtttaggatagtggaagattccgatgccagggtgagtgaaataactttctacaagaatatgagttcagagccacttaaagagatgctgaaggacttcgatgtagaggtctacgacagcggttttgcactgcatctgaccgaccctgcggtcgataaggggacagggctagccaaactggctaacctcgttgggtacaatgttgagaacatcatgtgcattggcgatagcgaaaacgatattgactttctccttgccggaggcttcaaggtggccgtggccaatgcctgtgatgagctgaaagagattgccgattatgtctgcgagaacaagtacggtgacggcgtggccgaggcaattgacaagttcgtgttcaatcaggaatga

SEQ ID NO: 4090 - DNA, 954 bp, synthetic construct
  source 1..954: mol_type = other DNA
atgatggccagtatgaaagagatggcggacgctatactcaagcgcatcaacgatctagccgttcccgtaaagatcatgcatgtgtgtggttcgcacgagcatacaatcatggagcacgggattagatccctgctgcccccggaaattgagattgtggccgggccgggatgtcccgtttgcgtggtgcctagccgcgagatcgacgaatgtctgcagctcgtcgaaaaaggggtgactgtaaccacctttggagacatgctccgtgtgccaggctccaacggctctctggcagaggccaaggccgagggcgcagatgtacgagtggtctacggtattccaaacgccgtggaaatcgcggaaaagattgataatgacgttgtgttcatgagtgccggcttcgaaacaacagccccagccaccgcttccgagctcctgaagaagcctccggaaaacttctcaatcatttcatgccacaggctgatcccccctgctcttgacttcctgatcaacagcggagagaccaatctaaacgcactcattcagccaggccacgtctgcaccatcctggggacggagccatttgagaagttcagcacggaatacggaatcccccaggcggtggctgggtttaatcctttggatatactgatgtctgtttatatgatattacgacaaatcgatcggggcgagcccagaatagacaatgagtacaagcgggccgtgcggactgagggtaatgtcatcggaaaagagatgatggacgaggtcttccacgtggaaagcagggaatggagaggattccccaaaatcccagacagcgtgttggaagtcaacgacgagttttcccagtggaacgcaagggagaagtatgatattgaggtcaaggacgtgactgaagctcccaaaggctgcatctgcggccctattcttcgcgggctggcaaaaccttactga

SEQ ID NO: 4091 - DNA, 1725 bp, synthetic construct
  source 1..1725: mol_type = other DNA
atgtataaagataataaaatattagttgtgattcctgcgcggggggggagcaaaggcatcccgcgaaagaacattcggttcctgggtaaaaagcctctcattgcacacacaatagaaatgggcaaggcttccaagtacgtggatgagctagttgtgacaactgacgatgaggaaatcaagttcatcagcgaaaaattcggagcagaaaccatcaagagggatgggaagctggctgaggactctatcccattagacccggtaatctacgatgccgccattcagaaggaagggaagtcgaatgaaaaatacgatgtggtcattaccgtccagcccacttcccccttgttgaagacaaagaccctggatctggctattgagaaactcctgaaccccgacaatgaaaacaaagattacgacactatcatcagtgtggtcgacgacaggcacctgagctggggctacgatgagaaagagaagaagtatttcccactgtataaggaaagggtgaaccgacagtaccttcccaaggcatacaaggagaccggaagcatatttgctacgcgacgcgaatttgtgaaggaggattctcgtctgggtgagaatataggtctcattgaagtctccaagcaggagagcatcgacattgacaactatgaggactggtgggtggcggagcgcatcctcaataagaagaagatcctcatcaaggccgacgcctcccacgagattggaaccggccatatttaccggggcctcagcatagcctcgaagcttgtgaaccacgaggtgattttcctgcttgacgaggcgcaggaactgggcattgagatcgtgaaaaacaacaactacccattcatcacccataattccaataaaggcaagggtaaagaggcagatgaaaaagctaaggaagagattattgagaagatcgtggagtacgaccccgacattatcataaatgacatcctcaacaccaattcaaaatacactaagaccttgagggacaatggcttcttcatcgtaaactttgaagacgttggcggaggcgtcaagtacgcccacctggtctttgatgcactctacgagcacaagatacctcttaagaacctttattcaggacaccggtactatatcctgaaagatgagttttattaccagtcatttaagaaaattgacaaggaggtgaatcgcatcctcctgacgttcggcggcaccgatccaaacaacctgacagagaaaacgctggaggccatcctggagagtaaataccaaaacgagattgagatcatcctaggattgggatacagcaaaaaagaggaaatccaagaaaaatataaggacaacgagagaatcagcatctatgaaaacgtgaagaacatgagcgaacacatgcacaatgccgacctgatcttcactagtgctggccgcaccatgtacgaaatagcctccctgggggttccttgcatatgcctctgtcagaatgagcgcgaattaagccatatctttggaaacatcgagcatgggttcattaacctcggtcttgggtcaagggtcagtaaggaggacctaatcagaacactggaaaacacaatcaacgattatgaattgagaattgagatgaataaaagaatggggaacgtagacctgaagcatgggtttgataatattcggaagctgatcaagaaggaatataaaaattggaaagccgagcagctgaacaaatga

SEQ ID NO: 4092 - DNA, 840 bp, synthetic construct
  source 1..840: mol_type = other DNA
atggaatcaaaagacattaccaacattgaagagattataccaagcaatgacgtgtatcccttagtcaatctgctcttccagagcaagctcttcaaaagtaaggagattaacacaaactctctggcaatcagctgtctggacctgatcgacaaaaacagaataaagatcacgttcaatgaggagatcgagtcaatcaaaatcagcaagaaccctcttctgaagactaagggccagctggaaaaggaactggagctcatgaaaaacatcaaatttacaatcaatagtaaagagatgaaaaaactggataaacgggaccagatcatcttgaagatgtttaaggacatcaacaagaaccacgaatttgacctcaaatccatgtatgataagatcctaaagcaggatatagctatcaaatttgccaaatacttcaaggattattccaagtccctggaaagggaaaccaagtacagcttggaaaactataaggacctcatcaaggatggggagttcacctttaagggaaatgagataagcaatgagtggaaggaatttaaatcgtctctgaagtcggataagtccttatacagccaagacgcagagataattgacaaatacctgatttatggccgatgccttgagattgaaaaggatgtgctcaagaacattgagaaggcgaatccggactacgatagcgagctttacaggttcctacggcataatggtgctgacctgttgaagctcattttcgataaggccctggccaactccaagatcgagcgcaaaggagacggctcagtaccagtgggcaacagtaaatacttcgtccccgggttcgggtga

SEQ ID NO: 4093 - DNA, 1071 bp, synthetic construct
  source 1..1071: mol_type = other DNA
atgaccatcttcaatgaggaacccttcctgatcgccgaaatcggcgtgaactactacgacattgcaaagaaggaaaatatatccaatatggatgcagctaaactaatggtaaaggaggctcatgacgcaggatgcaatgccgttaaattccaaagctataaggcaaacaccatcgcctccaagaatagtccggcgtactgggacacaaacgaggagcctacccagagtcagtacgagctcttcaagaagttcgacagctttggtgaggcggagtaccgggaaatcgccgactactgcaaggaaatcggcatcttgttcctgagcaccccttttgactttgatagcatagactatctcgacgactttatggacgtgtataaaatttcaagcagcgacctgacgaacatccccttcatcaagaagatcgccaataaaggaaaggacataatcatatccaccggggctagcacccttgatgaagtcaagctagctatcgaaacaatagaaaacgctaacgacaaatacaaaaagggggaggctggtatcggaatcatgcactgcgtgctctcctatccaaccgcgaatgaggatgccaacctgctgatgattaagaacttgaaggacctttacccgaattacgagatcgggtactcggatcatacaaagcccgatgagaatatgctcattctgacaactgcctacctttacggcgccactatcctggaaaagcactacacattagataagacactgcaggggaacgaccactatcacggaatggacccagatgacattagaaagttcaacaaaaacattgagctgatcaaaactattaacggccaatatgataagatccctctcccatgtgaaggggaaagccggaaacaggcccgacgctcaatcattgcaaaggaggagatcggtgaaggcacgattatcaccgaggatatgctgacgtataaaaggccaggaactggcatttctcccagtgagatagataacgtcgtgggcaaaaaagccaaaattaccattcccgaggatgagctgattcagtatgactttttggagtga

SEQ ID NO: 4094 - DNA, 1527 bp, synthetic construct
  source 1..1527: mol_type = other DNA
atgacttttacagtaaaggagatctgccagcacatctggtctcttgaggagaaatatgagctgaaccacaaggagattcagggctgctacccatggcagctgatccggatgtacctctactacgagatcaccaggaagacgaacgtctttgagtcagctcagcagtccagtctttccctggcggacaaagtgaacaccttcctgcctttcataaagaacagcattctgtcaaaccccctgagcgggaaggataccaaagatgttctcatcttcgaccatcctagaaaagtcatactgaacggggagtaccaggacatctatagctatttcctcaaggacattctcataaaaaacaataagagctttgagacaatcgaatccccatacctaaacaaccacttccgcagcagtgcaaataagaaggagaataatgtcaaatacaatgaccgcatccttttaggctcttttataaacaagaccaagaatcggggcaagttgccctttaccgatgaagaaaaggacttcatcgaaacgatcaaaagagagctggagtcggccttcaaaatcgaaattaatctattcaacattattgaagaccacatcctgaatttccaatatgattataagaagtacattgagctgcttgaaaagcgaaagcccaagcaggtgtatctggtggtggcctacgaaaacaaggcgttggtagccgcctgtaagaaaaagaacatcgaaattattgaattgcagcacggaaccataagtccctaccatctcggttacagttacccaaagaacacaatgctgatgaacaacacaatcaaggagatcgaatacttcccggataaaatcctctcctttggtgactactggcaaaactcctcaagcttcccgatagagtccgataagattatctccatgggctttccatactttgaggacaactctaaaacttttatgaagatggccgatgaggacaaaaacaagaagcagattctgttcatctcacaaggcgtgatcggaaaatacctgtctgagttggcttatgaactggctaaagagctaaatgagaaaaataagaagaatgacctcgagaacagcgaaaataacgagtctgacctcgaaaataacaactatacattcatctacaaactgcatcccggcgaatatggaacttggagggagaattacgagtatttaaataaagctaatgaatttgacaactttaaagtcattgataagagcgagcctcctctgtacgagctctttgcaaaaagcaactatcagataggggccttttcgaccgcaatctacgaggggcttgccttcaactgcaaaacgttcatcattgacgtgcccggagtggagtatctggatgacttgattgacaagaatatcgtgaaaaaggttaaaagcagtgaagagctgattaatttcattgaagatgaagacaatttagatctcaaggaatatgataaggattacttcttcaagaacttcgacgagtccatctttgacgagatcctgtga

SEQ ID NO: 4095 - DNA, 1443 bp, synthetic construct
  source 1..1443: mol_type = other DNA
atgagtgaatacgtgcgattcatacagcggataggtctggtcgggattaccaacatcctaatctctctgagttctttaatctttattccaatcattacaaaatcctttactacagccgaatacggcatgtgggctcaggtaaacactaccatcgcgctggtgcccaacatcgccaacctcggtctgccctacaccatggtcaggttcctgtctgctgagaaggataaggaaaaaatccgggactccttctacccaatgatcagcctgaccttcatctcaaccgtgatcatctgcctgttgtttctgatcttcggacaccctattgccgatgcgctctttaatggaagcatgcaggtcttgtacatcacaactgccatctccttcttcgcttgcatgaacttgatgctcataacctactttagaaccttccaggagatgaagcgctattccctcttccttgttctgcaaagctatatcggggtctttgtgagcatctaccttacatacgccggatacaatatagagaccgtggtgctcggcctgctgacgggctatgccgcagtattcatcatgatggcctttctcattgtcaggcatctggggttcagcttcggcaagtggtccaacctaaaggaacagctggcctttgccctgccgaccattccaagcaatgtttcatcgtgggtcgtggacagcagcgacaagtatgtgattggcatcctgctggggtcggtggcagtgggatgctattcacccggctacgccttaggcagcatcttgctaatgttcctctctccatttgcagttcttcttcctacgattctgcctgagcactacgaaaagggtgacatggctgaggtcgacaagtatctctcctactcaatgaaatactatctgttgctcactgtgccggccgctgtcgggatgagtgtgctctctaagccattgctgtacatcataacaacccccgagattgctcttggcgggtatatggtaactccctttgtctgtctcggggcaatattcatgggcatgtatggcataaccaacaatatccttattctagagaaaaacacgatgatcctgggtaagctgtggatcattgtcgccatctccaacattgttctgaatctgattctggtgccttacctcaacatcattggagcggcaatagccacactgctctgttacatgctcgcttttggcgtgactgccattgccagtcgtaagacgatgagattgcctttcaatcgcaaggagcttgtcaaaatcctgattgcctccgcgattatgggtgcagtggtttatatgatgaaccccagtggaatagtgaatgtgctggtggctatcttagtgggagtggtggtttatttcgcaattatcttcgtgttaaaggctgttacacggaaagagatcgggatctttaaagatctggtaaaatga

SEQ ID NO: 4096 - DNA, 507 bp, synthetic construct
  source 1..507: mol_type = other DNA
atgatctcaaagattttcaacatcaaacagagcatcaaacgggcctactatacatatagggtaaagagagtgtccaaatcctgcggcgataacctcaccgtcaacaattactcctacgtcacgcccaagacaagtctggcagataacgtgaacttcaatggcatgaagatacaaggaaccgccaatgttagcatagggagcaacttccactcaggcatcgactgtatgatcatcactgacagtcacaactatgagggggaagcgatcccttacgacgagaccgtcatttcgaaggatgtggtgattgaggataatgtgtggattggcaatcgagtaatcatcctaccaggcgtctgcattggtgaaggggccataatccaggctggaagcgtggtggtgaaggacatcccgaaatgcgccattgctggagggcaccccgcaaaggtttttagctctcgcgacaaggagcattacgaaaaactgaaagaagagggtaagtttcattga

SEQ ID NO: 4097 - DNA, 1986 bp, synthetic construct
  source 1..1986: mol_type = other DNA
atgaaggtggtagtctgcgagaactgtggtgcaaagtaccaactgaacgatgacgatgatattaacgcattcgaatgctccaactgttctggaagtctcaaggagctggagagcttttcagacgaagagattcctaagcagtcggatgaatcaagtggctccgactcagttctggtgtactgcataaattgcgggctcaaattccagattgaaaaagacgacaatatcaatgactttgaatgtgccagctgtggcggtccgttagactacctttccaacaaaagtgaagaatctcaggagtctcagatctcccaagactctcagggttcagatagttattatgaaacagtgtcttatgtgcagtctgatgacatcattcctattcatgccgaccccaactattccgacagcgacgacatcattcctattcatgccgagtccgactcccagaccccatactacgaggaacttatagagagtgatgagatctacgctaaccagtacgaggatgatgatcagtactatgtgagcgagtacgagaaggttctgcaatcggatgctgattcctactacgaagacgagtatgacgatcagtactaccaaacagacctgcaggaggaaggcagcgggcagatcagcctggacgagctgtattataccagtgaataccccgcttatgacggaactgatgagattattccgatccacgctgaaaaacggtacatggaggattcacaggatagtgggtttgcgtacgggcctaacggaaaatacgcggaagactacctagaggaggagtacattgaagaggagtatgtggatagcgtcgaagaggagagcccctatgtcgaggtgatagacataccagaggacgagttgcccgaaacccccgtggtgctgacacgccaggtcctatccgaggaggaccaaaggctctttgacagggtgcagaaccagatggtatttgacagccctgaggaatatgaggcatttaaggccgccagatacaaatattacgtcggcctgctggatatccttaaggaggaatacctcctgagcatggagaacgaatttaagtcgggccggagcgtgaaaaacctcatcaaaaaaggcggagagacagtgaagcaaagcaacctttatgccgacgattccgatagtttggtcagccccgaaacggtggaattgatgaaatcaaaccgcaaatatgagcccaagaagtccaacgccgacgtgatcatcatcgctggattttttatagttatcgtgtccctggcgtactacttcttcgttagccagatcatgtatgtgctcattgccttcgcactcgggttggttattctggcctacggcgcctacaagaaatatgtcttcaatgaatacatcgcacgaggcaggatcatccgggaacgactgctggccctcccaaatgacttctacgtattctatgcagttcagcccccacagagtaaggacatcatcaatcacgtggtggtgggaccgacgggcatctttacaattctctctcaaagatacgactcaaaggattacaagaataagcttaagtctgacactgagaccggagatatgttaagcgaatccgcgtccatacaggactataggcagaagaagaataccctcgagctgcagacggattacgatgacaatcagtcacgcttccagtttggtaacgaagagatccacttcactcaaaacagccagatcaaacggaaggctctggaattaaacgaggacttggccattttccttgataagaaggggttcaacggcatctatatcgagccactgatcggcttcgtcaatgacgatctggccatactgaatgtaattctaaccaatgaggacctgttcatcgacgagctattcaataaggtcattcgtgggagaaaaagattggacgagctgaccgtggctaaaatagctcgcctcctgtcgtactactctgccaactgcgatgtctattga

SEQ ID NO: 4098 - DNA, 1173 bp, synthetic construct
  source 1..1173: mol_type = other DNA
atgaacatacttcacgtggctcacttcttctatccctgcctgagcgctggcggagtcgtgaatgcaagttaccaaattgccctcaatcaggtcaaagacaacaatgtgcacgtgtacaccagtgactcctgcaagcagcgactgaagttcgaagacggtagatacgacgtagatgtggatggaattaaagtggactacttccggaatctgtcaaaccggttcaagctcgcgaccatgttggacacgcccctgtccgcgtactttagaatccggaaggatatcaaaaaccacgacatcattcacattcacgagcataggcagaccctggccattttagtaagccactacgccaggaagaacaacattccgtacatcgttcaggcccatggctctgttcttcccttcttccaaaaggaggggctcaagaacatcttcgataaggcattcggctttaagatactccacaacgccagctgcgtatttgccctgactgaagtggagaaggagcagtacattaaaatgggagtctccgaggacaagatcgaaatagtccctttgggcataaacatcgaagagtatgagaatctcccagaacccggaaagttccgatcaaggttcaatatcgctgatggggacaagctgattctgtttgttggtcgcatccatgagatcaaaggcctggatctactcattgacgcctttaatctgctgatcaaggatagtagctcccctataaagctcgctatcgtggggccagatgatggctatctggacactctgaacgagcgcatagcagagaataatctggaaagtcaggtgattatcacgggaccgttgtataagcgcgaaaagcatgaggctctcgtggactgcgacctctttgtcatgccttcaaaatatgaatccttcacaacaagcgggcttgaggcaatggcctgtggcaagccattggtgctgaccaaaaacaaccatattcacgactgggtggatgggaacgtcggcatttcctgtgacgatgacgaaatctcgctaaaggaagccatgaaaaagcttctgtttgacgacgatctgagcgagacatttagctcgaacggtaaaaaactaatcaaagagaaatacaactgggatatgatcaatgagcagatcttaagcatctataacagatttatctga

SEQ ID NO: 4099 - DNA, 1788 bp, synthetic construct
  source 1..1788: mol_type = other DNA
atgatgttttccaacatctccaaggaccttaacatcgaacggaaggattatctgtgcctcttcctcctgttggtctacagcgccatcatcacggtcctgttaatcaatttcaacgagagtatcggcatatactgtagtgatgtctatatctatctgtacaactccctggtatttgcccgaatgggctataacaacacttatctatatctctctcccctggacttcggtctggtggagcttcactttttgttcagactcggctttgtgaacgaggtgtccatttacgcggttactggggtcttcagtatctttggaagcctgggaatttatgttctcctgaaaaggtatttcaattctcttctgagcctggccggcggtgtgcttttcaccagcttctccttgaacctgctctggtgggcaaacggaacgctggacctcccggcggtaggactctctgtgtgggcgatcctatttttgatccttgctgtggacgagagtcctaaatactacatcctgtcgtttgtctttttggtcttaagcatcttcactcgctacacctgtctctttctgatcccattgttcctgctctactacttatcgaaacacgatctgtttggcttcttggattcactgatctccgatcggaaagaggccttctcaagtctccggagctttctgaaaaccgaagagttccgttacctcatgatcgccctagttctggctctcattgtggccgtgctcttcatctcagtgattctctactatggggctgaactgagctttctagagcagggcagcacattcgcctccgggagtaagggcgctttggacgattacgcacatactacagacaccctgttctacttccatgactttctgaacttcctgttctcccagaaggtgattttccaggagaatttcattcccacccttaccggcgcaagctatctggcctatttgatcctattcatactgatcatcggaattagcctgggtatttaccgcttcttcaacaagaacaaaagtgaggacaaaaagcagtttgacaatgtcaattcttccattagcaatcttaaggagttctcgtttaagacaagccactttaaaacacttttgtacattggcctcctcctttcactggccatcgccatcctgggattcaagataaattcaataatcaccattgcattcctactgatcgggctggttatcatattttccctgctcaagtctaaggggcttgatcgcaaagactattccgtccctatttttatgataggatggtttctggtctatttcatcttcttcacctttttaaacataaaggtgaacaggtacatcattacagttttccccgcattcatctactttgtaatcctggctcttaatgaaataattgggctgttagacggcaaaagtctgaagattggtgacctcaacctgtcaaatatcattccaatcgtgctgattgtgctctgcatgttttcggcattcagctttacaagcacttttgaggataacctggactttaatgactacaagatcgtggccgattacctcattgattacgatggggactatgccagcaaggacattgctgtgtttaagcaaaggaccttcaattggtggcttaaggactccacgatcgctgtgaccacagatcagttggatttcctggaatcaagcaacataacgtactacatctgcgatgaagacctgaaactggagaactacaccaagatttataactataaagacatattcttatacgaaagagtgaataattga

SEQ ID NO: 4100 - DNA, 882 bp, synthetic construct
  source 1..882: mol_type = other DNA
atgaacccttatctggagattattaggcccgggaatgcagtgatggccgccatatcggtggtcttaatgatgattgtcggccactattacgacttgccaatcattctctgtgcagtgatcgtctttgtttgcactggcgctggcaatacaatcaacgacgtcttcgattataagatagatgaaatcaacaagcccaaccggccaatcccttcaggccgcatcagtctgaagaatgccagaaactactcctacctgctgtttgcaatcggaatcatcctcagcttcgtgattgattacatgatcaattccatttggccttctgtcattgtcgtgccagctgtggtaatcatgtacctttacgcccgcaacctgaaggccatgcctcttattggaaacatcaccgtggccaccctgacagggttctgctttgtaattgccgggacggtcatcgcgtgtgcgacctccagcctgcgaatattgtttattagcatctatctcggattgtttgcactattcatgacgctggcacgggagattgtaaaagacatggaagatattgaaggtgacaaactcgagggagctaggacattccccatcttatacgggaaaaaaatcccctccatcgtgtcaatcatcctcatcgttgtgaccactctgatgtgtccggtgctttacatatttggcatcttcaacgtgttctatatgattgtgatgatagtgccaatatgcatgttcctctactgcgcctatagtctgaaactgaatcccccggaggaggtttgcgctaaggtcagcaagaacctaaagatcgccatgctcataagctttgtggcgttcgttctgggtagtttcgactggttcagcatttttgccgctctgtga

SEQ ID NO: 4101 - DNA, 1371 bp, synthetic construct
  source 1..1371: mol_type = other DNA
atgaagaaagtgatcctaattgcattttatttcaaccaggtcaacgagattgcgtctaagcggctgcgggcattagctaaatatctgcctcagttcggctgggaagtggtggtcatcgtgccagacttggggtatgagccctccagcaatgcagaccttagctcccgcataattactaccgaatatgaggacatgttttcccacatctttactaagtttaagcctggagacaaaagcaagctgaacgataaaagcgataaccattccaccagcgacagtcagaagctcaaggactcctcgtctgtctctaaccccatcgcctcaaaggcaatcagcatagctggagaggtcttcgcctaccctgacggaatgaagtattggtacggtccggcctatgaggccgcttccaagatagttgaagaagaaaagattgacgccattatcagctccagctggccgattacctgccataccattgcaaaggacatcagcgataaatacaacattccttggatagccgatctcagggacttgtggaatatggacccctacatctcacacaccttcatcagggattacttcgaaaaacggctcgaattgaagacattcgagaatacggacgtactgacaaccactacagatttggctgctaaaacactagccacactgcaccccaataaccgtatcgtgccaatcctgtcggggtacgacgaagacgacttcaagttcctggagagtgtgctcgaggagaacaacgattcggattcgagtgaggactctgttagcgcgggggatagcaatagcagtgagggctctgtctccgccgagaacagtaactctagtgaggattccatcactacggtggactcaacggatagaaaactgaaactgatctacgccggttccctctatggcgggaaaagagacccaacccttctgttcaaggccatccgccagctcgaggacgaatccaaactggatagttcaaatatttccatagagttctatggagatagcggcaatctggaggagattgctcgcgaatactctctgcttgacatcatcaaaatcggtggcaggatctcccacgaagaggtgcttaaaaagcaactggacagtgatgtgctgttactcatatcatggaataacgaaaaggagaaaatgttcattccaggcaagatctacgagtactttgcgctgcagaagcccgttctaagcattgggtacaaggaaggatcacttaaggacctgatcgaggataccaacgtaggctaccacgtctcagatctcgagtctacaaaaaaggtgattctggacatttacaacgaatttatcagcctcggcaaggtggagtttaagatccgaaattga

SEQ ID NO: 4102 - DNA, 1095 bp, synthetic construct
  source 1..1095: mol_type = other DNA
atgtccaaaattaagattgcgatcgtcggaatcggaaactgcgcaagcagcctgatacaagggatctactactacaaggacaaaaaccccgaagatgcaattggcttgatgcactggaagataggagagtgggacccaacagacattgaggtggtagctgccttcgacattgacaagcgaaaggtgggcaaaacgattgatgaggccatcttcgccaagcccaactgcaccactgtcttccaggaggagatccctaaatccgacgttaaggtgtgcatgggccctgtcctggacggtgtcagcgaacacatggccgactttgaggaggactatacgtttgtagtggccgatgaagagcccgtggacgtggtggaagtcctgaaggagagcggtgccgaaatcctgctcagttacctgccagtcgggtcagaggaggctgccaggttctatgctcagtgtgccctggatgcaaatattgcatacatcaattgcatgcccgtctttattgtgtccgacccagagtgggatgcgaagtttcgggagaagggaatcccgattgtaggggacgatatcaaggcccagatcggtgccaccatcactcaccggacactcagcaatctctttaaagaaagaggagtgaagttagatcatacatatcagataaacaccggcggaaataccgatttcatgaacatgcttaaccgaaaaagactcgactctaaaaaggagagcaagaccgaagccgtgcaagcggtccttgctgagcgcatggaccctcatgacatccacatcggccccagcgattatgtgccctggcagaaggacaataaggtgtgtttcctcaggatggaaggcagaaccttcggggacgtgccgatggaaatagagctgcgcctgagtgtggaagactcaccaaactctgccgggtgtgttattgatgctatacgctgctgtaaattgggtctggaaaggggcatcgggggccagctaactagtatctcgtcctacgttatgaaacacccacctgagcagttcacagatgatgaggctgctgcaaaagttgaggcatttatcaaaggcgaaatcgagcggtga

SEQ ID NO: 4103 - DNA, 1722 bp, synthetic construct
  source 1..1722: mol_type = other DNA
atgaaagtgaaaataacagaaaccgcattccgggatgcgcaccagtccctgttagccaccagaatgcgaacacgagatatggttcctattgctgaagagatggataaagtgggatatcacgcaattgaagcgtggggcggagccacctttgacacgtgcataaggtttctaaacgaagatccatgggaaagacttaggatcttgaaagagaacttcaccaacactccgctacaaatgctcctccgggggcagaatttactcggctacaagcactacgccgatgacattgtcaccaaattcgttgagaaatcctatgagaacggggtggacatctttcggatattcgatgctatgaatgacatcagaaacatggagcagtccattaaggttgccaaggctcagggagctcatgtgcaagggacaatcagctacacaatcagcccagtgcacaccgttgacaagtttgtggagtttgccaaggagctggaagcattggaatgcgattcaatagccattaaggacatggcaggtctgatcagccctgctgtggtctttgagctggtgagcaggctgaaggaggaaacggacttgctcgtcaacttgcattcgcactgtacaagcggtatcactccaatcagttattacgctgcctgtcaagccggcgtggacattctggacacggccatctcgccactggcttgggggacttcacagccgcctaccgaaagcattgtcgcctccctgcaggggactgagtatgataccggattggacctgaagacactgaaccaaatcaagaagtactttgaaaccctgagggctaaatacgaaggctacattgaccccatcagtgagcgcatcgacactgacgtcctgatgtatcaaatccctggcggaatgctgtccaacctgatttcacagctcaaacagcagaacgccctcgaccgttaccaggacgtgctggaggaaatgcctcgcgtccgcgaggatatgggatatccccccctggtgacgcccacaagccagattgtagggattcaggcggtcatgaatgtgatcaatggcgaacgctacaaaatcgtctctaacgaggttaaagattatatgaaaggttactatggccgggcccccgctcccatcaatgaagaaatcgccaagaagatcatcggggatgaagagcggatcacctgcagaccagcagacctgatcgagcctgaatatgacaagttcaagaaagaggcggaagacctgaagaacttcgagaaggaggaggatgttctcacccttgccatgcttccgcccgtagccaagcagttccttaatggcgagatcaaggaagaggacttcccagagaagaaggtgatagacgatggcggaatcagtgccattcctacagagtactctgttgaggtggatggtgacgtcttcgatgtgaagatcatgcccaccggatacataaagatcgacggggagggcagtgagcccgccccagtgatcgagggggctattactgcatccatgcaggggatggtgctcaaaatcaaggtgaacacgggcgataaagtacagaaaggctctgtggtcgcagtgctcgaggcgatgaagatggagaatgatatttacgccgaggaggacggtattgtggagcagatattcgtcgaggaaggcgacactgtgaacgcaggagacaatataatggtaattaaaggcctagatgaatga

SEQ ID NO: 4104 - DNA, 606 bp, synthetic construct
  source 1..606: mol_type = other DNA
atggataaacgaataaattttgtctcaatctctcgcttcaccctccttgtggctatcttcctactcatcatcaataagattcagtttcacgcaaagattctggactatatggccctggccttagccattttcgctataatctgcatcatcatctttatcattcaattcaaaaagggattggtggagtttccgatcaaagtggtggttgaaacaaacgttgacaaggctttggccgacggggcgattacggaagagcaggcggaaaatatccccaagcgcgtggtccttaatgcaaacgatatcttcctcaacctggtctttaacctggcaatcgccaaccattttgatctcctgcctgtagacgtgctaagggagtatattccagacattcccccagccaacctcatgcggctgtacgaaaagtccagagagataagtgacgatctgaatgattacttcaggagccagaagttcctgaacaaagccgacgtgattaccagaagcgatgagataaaaacatacctgcgggagacttatccctggatggacgacgtcaccttggataacactttcgactacttcttcctgggcatcggtaacggctga

SEQ ID NO: 4105 - DNA, 1275 bp, synthetic construct
  source 1..1275: mol_type = other DNA
atggtgtttattattgaccctcaaaacgccggcatctcggggaatatgatcatcggcgccctcgtggacttgggggcagatggcgagaaggtcaagaacctgatggaagacgtggcttacgacttcggagaggtagaggtgtccataaccaaagtcaataagagcggtatcgaagcgaacttctgtaacgttaaaacgatccacgatgaagatgaaaacaaccaccatattcacttccccgacttcattgataaaattgactcactaaaagagctggacattgaaaacctcactgatgagatcctggacatggccaaaaatgtcttcaagcgcatagccatcagtgaaagccgcgtgcatggaaaaagcctggaggaggtgcatttccacgaggtcggggctgctgatgccgtggcagacgttttaggtgccatctgcgcttatttcgacttggatatggacaaagaaagggttgttggattgccgatcagtgtgggcggaggcactgtaaagacagcccacggtataatccctgtgccggcacctgccagcctggatatcctcaaaggcctcaatgaggacgaatttaacgacttctacaagggagaggcccagtgccgaggcgggcccgtggagagcgagttggcaacccctactggttgcgcactgtacatggaattttgtgatgaatttcttgagtttgcgccaatgatgtctccagagcggatcgcctatggctgcggctctaaggaatttgatttccccaatgtcatcagagtcataaagtcaaaggacacaaatgagaagcaccgggtctgtgtgatagagaccaatatcgaccacatgagtggggaagaactgggattcctattcgacctgctgcttgatgctggcgcgtccgatgtgtccatggtcccaatagtgatgaagaaaaacaggccagggcagctcattaaggtgatctcaaagccacttcttgtagaccatctcgtgaatatactgtttaagcagaccggaaccctgggcattcgagtttccgagaacacacatcgggggattgctgagaggcacttcgtacccctggacattaacattaatgaccgcatttataccatcaactttaagatcggtctgatcggggatgagatcatctcccaccggcccgagtacgaagacctgaaaagaatcagcttagaggaggacatccccctcacggagattaaggaagtggccaacacaatgattcgtgattttctggagaataacagagaatga

SEQ ID NO: 4106 - DNA, 1218 bp, synthetic construct
  source 1..1218: mol_type = other DNA
ttgtctaagaagaataaggctaacaaaaacaagaaaaagaaagagagtgaccagaccattcatgagcttgagattggaaaactgattaaaaacgaagacgtgctatacataaacaatccagattactttctgaccttcagcgacctggagataagcgatggcatagacatcattgaaaacatcatgattctctctaaagactatgtgagcttcaacaggcagtatgaagacgaaaagattagtgacgtggaactgatggaaatcactgaggaatacaaggagaacaacaatatcgagggcggatacatttcacagagcttcgacaactcccagttcatcatcaattcctacaacgacatcacaataatcacggtgatctcgaacgatctggaagtccagaagttcacggacaatctgaaagtggtgaacagctggaaggggttccacaatgcaaagatcaactttggacagatcattctaatagaccacgccttatcgccgaagctgctcattcagctctataagaccgccacaaagcagaaggcaaaattctttgaatctctgcacatgcccctccacatcaacaatatcctcaacaatgaggatttcttggtgattgcttccaatctgcccgaggagaccctcaaccaggattacatcatggaaatcggcctggacatcacaaatatggagtacgaagacgacaaactggacctcgaagagtttcaagagcggattgaagatggggtcaccatcagctgcgaggacgccatacgtaagatcaacctgaacatcggcattctcgactactttgtgagcgagggcattttaattggggatttggtagagctcggaatggaacttctggaaaacacggagcctacagatgagctaaaggagaagctgaaaaagcagttgcttaaatcagtcagtgacagaaacattaatgccctgattatggctgccatacgactggaggatgatttccgcaagcaacgggttcgggagatcgatctgaatgagaagctggtgcatttctatcctgatgagatcatcggggtagcaatcgccaaccaaatatccggcactaagggagtcctcaattacagacgctattcaaggcacaaaccaggtatcctgtatgggcttggccccatcctgtccaatacctttgcgggtcttgttgcgggttgtatgactaaaatcttggaggaatga

SEQ ID NO: 4107 - DNA, 837 bp, synthetic construct
  source 1..837: mol_type = other DNA
atgaaagagaaaaacaatgatgactattttgagaagcagaacccttccatcctgcgcagcattgggggcctgttcacattcagcaccatcctgccactgaatatctacaccactatcgatgagatggccaaaatgacatggttctggccagtactgaatggcatcgtgggtttgatcgctgccatcatcgcgtttatcctgtgcagatttgcccacctggacggcctcgtcatcggcgcaataatttatggattcctccttataatcaacgggtacaaccacttcgacggcttgatggacttcggcgacggagtgatggtccacggcgatcccgaaaagaagctgcggatcatgaaggaccccatgacgggtgttggcggaattgccacagggtttatcgtcggtacgatcaccatcgcactctattcaagcctgattgattactcctatatgataagcccggacttcattctgctcatcattgtggctgaaatcgcagctaagattgggttgacaacctgttgcatcacctcaaaggccgggaaggaggggatcggcaaatacttcattaaatacatgaacattaagaactacatcgtgggacttataatttgcttaatcattgcctccctccttagcatgcggataggaagccagataggaattttaggaataatcgggggggcttttggaggtgctctgactgccctcattgcaaaacgacatctgaagatcgccaatggcgatgtgcttggcacttctaacgaactaggcaggttgtttagtctgctagcgatgctcattgccatttcgatgcatttcagtgtgctgatctga

SEQ ID NO: 4108 - DNA, 558 bp, synthetic construct
  source 1..558: mol_type = other DNA
atgacaatcaacgtgctgaggctagatcaccgaattggacgcgacactcggattaccacccatgtctgcctcactgcccgcgctttcggcgcaagtaaagtttggctcgcaggggaggaggaccacagcatgatgcggagcgtgagagacatcgccgataggtgggggggagactttgagatcgaatacaacaattcatacatggaagtcataatgaactggcgggagaaggggggaaagatagtgcacctgaccatgtatggtgctcaggcccatgaggtggtcgatgaagtgcgtgagagctccgatgatatcttgattatcgtgggcggcgcgaaggtgcctacgaaggtttacaagaacgcggactggaatgtgtccgtcaccacacagccccactcggaggtggccgcacttgccattttccaacatctgctcatggagggtaaagagttcgacctggaatttaaagacccggtattcgaggtcatcccaacggcccacggcaaaacagtaaacgttcacaatgaaaacagaaaactgaataagaaggaatga

SEQ ID NO: 4109 - DNA, 1122 bp, synthetic construct
  source 1..1122: mol_type = other DNA
atgcagcggagaggcacaacgaatctgccactacacggcgggcacacgccacgatggctctttgatcggatgaccaaactttcaggggcaattactgaagtagtcatcgacgagtacggtccgaacgaatttctcaaccgcatctcgaacccctactggttccaggcgttttcctgtgtgctgggctttgactggcacagctcaggtacaaccaccacaacccttggagcgctgaagagctccatcgaccccgagaaacacggcatctacatctccggcggtaagggctctgcgagtcgaaagaccccccaagggattgtcagggctggcgagattttcaatctcaaaagctcgcatgtggacaacatggtaaactccagcaaactgagcgccaaggttgacaactcctgcattcaggatggctatacactctatgtgcataacttcttcatcaccgaaaagggagactgggccgttgtgcaacagggtatgaacactgaaacaaagtacgccaggcgctatcactggatgggggagaacgtggacagtttcctgcaggaccctcacaatggaatttcctgcgataaaaaggaaaaggaagctctgaacatggcctcaaaggacagtgtggaggctcagaagataagcgtggatttaatcaatgacaatcctaaccacctccgggactacttcaaaagaaaagactcaaatcagcttctactgactgatttcagcattagccaggagaatacccttaccctgcctccccaccatcaggtgttggatatggatctctctgacaaagagttccaagtcttgaagaatgcttgggagatacagccagagaactacgaagagctgatcctgctgaatggaatagggccgaaaaagatccgcgccctggcattgatttctgacttggtctttggggagcccgcaagctggaaagacccagttaaatacacgttcagtcatggaggcaaggatggattcccctaccctgtggatagggatgtctacgacaacagtatcgccactgtgaaggatgcactgtatcaggccaaactcgacaagtatgataagatgaaggccttaaagagactggatgactttatctcctga

SEQ ID NO: 4110 - DNA, 501 bp, synthetic construct
  source 1..501: mol_type = other DNA
atgaaaaggataaccacccccattagtgatgatgacatcaacgatctaaagataggggacaagatttccctgtcaggaaaaatgtactgtggccgggacgcggttctccctaaattgtccaaaagcattgaaaatggccaggaggacaagtatccattcgactttaaaggcatggccatcatgcacactgcattcagtgtggctgggatcgccccaaccacaagcaacaaggccgaaatcgaatctagcatggaggcactgtcatccgccggcgtgaaatttcatatcggtaagggttccctctctgatgagacgaagaagactctggacaagtacaattcgatttttatagtcaccccccccgtggctgctctgcttacaaacaacgtaatcagcaaaaagtgcgtcgcatacgaggaggaagggatggaggccttcttcgagctggaagtgaaggacatcccgggaattgtggccatcgcgcacggaaagagcctctga

SEQ ID NO: 4111 - DNA, 1167 bp, synthetic construct
  source 1..1167: mol_type = other DNA
atgaacaaggagccgatcagcgaagaagagattttcaaggagctggacttttaccagtctcaggattgcaaatatagcgatggtcgtattttgggatctatgtgtacacaggcacaccctatcgctcagaaggctttcattcaatttttggaaagcaacctgggagaccccggtctgtttaaaggaacaaaggccatcgaagataaggtgctcaaaatgatcggttcgttcttatccattgagaatcccgttggccacattgtgacgggcggaactgaggccaatattatggccatcagggccgcccggaatattgcccgggatgagaaaggcataagtcagggggagatcatcgtgccgcagtcagctcacttcagcttcaaaaaggcctcagacatcctcaaccttaagctgagggaaatcgtgcttgatgactcctaccagttggacgcgagtttcgtcgaggacgaaatcaacgaaaacactgtcgctatcgtcggcgtggccgggactacggagctcggaatgattgacccaatcgaggaactgtctaatatcgctctggaaaacaacattcacctgcacgttgatgcagcctttggcggcttttccatacccttccttaaagagatcgggtacggcctgccagaatttgactttagcctcaagggcgtcaagtccataaccgtggacccacataagatggggctggcccctatcccagctgggggaatcctattccggaatgaggagtacctggactccattagtgtcaacagcccttacctaaccataaaacatcaatccaccattgtagggacacgaatgggggcaacaagcgcggccaccttcgcggttatgaagtatctgggcaaggatggctacgccagactggctaaggaatctcttgataatgcaatcttcctggcagagagcgtgaagcagttaggttatgagctcgtagtggagcctaaactgaacatcgtggcattcaaccaccccaaactcgagaccgatgacctcgcccaattgatcgagaagcgcgactggaaggtctcgtgctcatcctgccccaaggcgatacgcgtgattctcatgaatcatatcaaaagagagcatatcgtggagctgatatcagacctgaaagacattagtgaaagcatctga

SEQ ID NO: 4112 - DNA, 2271 bp, synthetic construct
  source 1..2271: mol_type = other DNA
atgtatgtgataaagttcgaagacttagggaaagacgacatcgggattgctggtggcaaaggtgcgaatctgggagaattgacccaggcaggcatacctgtgcccccaggctttgtcgtcacatccgagacgtataagaagttcatgatggacacaggaatattcaatagtgttatggacatactggaccagacggatatcaacaacacaaaagagctccaggaggccgctgaggagatcaagagaatcgtgatcgagactccaattccagaggacatttccacttacatcatagaggcttataatcagttatcccaaaaggtcggcgtagacgaggccgatgtggccatacgttctagcgccactgccgaggacctgcctgaggcttccttcgcggggcagcaggacactttcttgcacgttcagggcattgacaatgtaatcgaatatgtacggaagtgttgggcttccctttttgaagcccgggccatcttctacagggaagagaacaactttgagcactctcaggtttacattgccgtggtggtgcagcagatggtcgatagcgagaaggcaggagtgatgttcaccgtcaacccaagcacgggtgagaacattgccttgatcgagggaagctggggactcggtgaatctgttgtcagtggaactgtcactcccgacaactatgtggtctcaaaggagaacaacgagctgctgaatatcacggtcagtgataagaaaaccatgtttaccaatgacgagaacggaacctccattcaagtggacgtcccggaagataagcgcaatgaacgagtcctctcggatgaggaactggagaaactggtcgagatggctaaaagggtggagggtcattacggcaaacctcaggacaccgaatgggccttccatggcggaaacctattcctattgcagagccgcccaattaccacgctcggagacgcggaggaaaaagccagcgaagaggatgttgacctggaagtgctgattaaagggctcggggcaagtcccggactcgccagcgggacagtaaaggtgatcttaagcctggatgagctggacaaggtgcaagaaggggatgtgatggtcacaaccatgaccacccccgacatggtccccgcgatgaagagggcaaacgggatcgtgaccgatgaagggggcgtaacctgccacgcagctatcatctcaagggaacttggcatcccttgtgtggtcggtactggcgatgccaccaccacacttaaggaaaacgacaaggtaacagccgacggcaagaaaggcctggtctacaaaggcatcatcaagggagaggagccggccgaggcagcggccgtccaagttagcgcaactcccctgatcactgtcaccgaagtgaaggctaatgtgagcatggccgaagcagcgcctaaggctgccgcaacgggggccgatggtgtgggactccttcgcaccgagcacatgatgctatccactggcgtgcacccccgaaaattcatcctggatggcgaagaggacaaattggtggatgtgatcgctgaaggcgtactgaaagtggctgacgagttctatcccaagcccgtgtggtaccgcactctggacgctccgaccgatgagttcatcacccttgaggggggcgaggacgagccaagggaacacaaccccatgctcgggtggagagggatcaggagagaactcgatgagccggaaatcctaaaggctgaatttaaggccatcaaaaagctgcatgacaaaggttacacaaacattggaatcatgattcccctgtcacagcacccttcagagctgcgacgggccaaggaaatatgccgggaggtgggcctggaacctcaggtggatgtggagtttgggatgatggttgagattccagcggccgccatactcattgatgagtacattgccgaaggcattgactttgtgagccttggcaccaatgacctgacccagtacacactggcagtggaccgtaacaatgaatttgtggccaaacattacagagaggagcacccagcagtgatggccttgattgagcgcacaatcaagcactgtgcggccgcaggggtgacatgcagtatctgcggtcaagccggatcggtgcctcatattgttgaaaagctggttaagtttggcattacatccgtttcaagcaatacagatgctgttgaggaggtgcggaagacggtggcacgggccgagaagaaaatcatgctcgatgctgctagaaaacagctctga

SEQ ID NO: 4113 - DNA, 483 bp, synthetic construct
  source 1..483: mol_type = other DNA
atggtgcgtgcctactcacggcgcgagtatatccggaagataccaaataacagaattgtccagtatgatatgggtaatctgagcgaggacttccccgtccgcctctctctggccgtgaaaaaaccagcccagattcgccataatgcgctagaagcagctcggattgcctccaaccgatacatgcaacgaagcgctggcagactgggctaccacttgaagctgagggtgtacccccacaacatcgttagggaaaaccctatggccaccggagcaggagcggacagggtgcagagtgggatgagaaacgcatttgggaaggccatctcggtagaggcacttgtcaagacaaatcagaaggtgatgagcatcgacgtaaaccccaagaacttcgaggatgctaaagtggccctgaaacgggccggcatgaagctcccggtgtcctgcaaaatcgttgtcgaaaagggggctgagctcataaagtga

SEQ ID NO: 4114 - DNA, 237 bp, synthetic construct
  source 1..237: mol_type = other DNA
atgaagataaagtcgaatatccggcttaaatataacaactcaaaaaacgccgagattgtctacaagagcctggaggtggataatgaggggttcctggaaagcgaactcaactccgacgaaatcgaatacaacatcaaaagcgacaagctgggcagtttcttgaataccgcagatgatctaattgcgtccgagatactcatcgaggacccctttaagaagcagccaaagaaagactga

SEQ ID NO: 4115 - DNA, 1230 bp, synthetic construct
  source 1..1230: mol_type = other DNA
atggaatgttacaatcaccccgacagagaggcagtcaccacctgcagcgtgtgcgggaaggccgtctgcccagattgcgccatggagattgccggcaacgtctactgtaaggattgtgtgaatgagattgtcacacagagcataatggaaaaggcatcaacccaggcccccaaggaggcagccgaacccatcactgaagaagtgcaggaggcggaagccgttgaggaagctatcgaagagccggtggaaatcatcacgcccgttcaacaagaggaagtggaagagatcatcccagagactccgaaaaaggcgcctgaaaactttgagcccgaggtggagtacgaaacagaatatgtagagacatacgatgaagacggtgtggaagactcctactacgagaatcctgaaatcattcccgaacctgagccggagtacaaggaacgcgagagaatcgttaaagaggaggccaaagcaaaggaggaggaggagatcattgagccagtgcacaaaacggaggacattcccaaggaagcctatatggacgacatggaggcagacttttatgaggaacagccttccaaagctccaagtaaggacctcgaggccaagtatgagaaatatttggaagacctctactacgatgaagatgagatcgaggaagaaatttacgaggctcccaaaacccagaaacggcggtcaaaacctcggagaccccaacgcgaggatagttactatgacgaggaccataagcgaagtccaagaaactattccaaccagggagaatactacatcaacccgcgcgaagaggaatttgaggaagaggagtttatcaccccaagccatagccgcaaacgtgctaggtccgaagagactgaaagctacgaggagctaaagaggaggatcgaacgaaattatgctaaggagcaggaggcgaaggagaatcggcgattcaggaggtctaagaagtctaaaaagcagaaacggcctgactatgagtacgatgagcttgaaaacatacaggagatgcactccttcccagagtatgagaaggaggacaagattggcatcctggatattatcctggccataatcctcattgtgctgatcatcctgctgatattgtacgtgatttacctgttccgcctgaacggggagtacttctcgttcattgactcactgttaggactcgtcagagatcctagcggctatataagctatgtacttaactga

SEQ ID NO: 4116 - DNA, 771 bp, synthetic construct
  source 1..771: mol_type = other DNA
atggccatccaggatggggactttgtcagggtcgactttactggcagtattaaggaaaccgatgagatctttgacaccacatcagaagacatcgccgaggaggctgggattttggtggaaaacaagaagtacgggccaataccaatcattgtcggcggaaatcacctgctccccgcaatcgaggaggcgataatcggaagtgaagccggggaatccgtgcacgtttcagtcacgcctgagaacggcttcgggcaaaggaaccccaatctgatacagctgatcccgatgaaagagtttaagaagcagggcatgacacctgtgcgaggcatgaagatcagcaccgagaacggtaacggcaaaatcattagcgtaaacggcggacgcgtgaaagtggacttcaaccatgaccttgcgggtaaaaacctagaatatgacgtgactgtggtagaactcatagaggatgacgaagagaagattaagagcatgatcgagctgcactactcctatccaaatatggattatgacaatattgagattaagttcgacggaagcaccgtgtctatcaaactggatgagatcacgcggttcgatcagcaatcctacatggatgtcacattcgctagattccggatctcgaaagacatttgggacaatatggattacgagaaagttcagttcgtcgacgaatttgagaagatcgtggaagaagctcccgatgaagaggtggaggcagaggttgaaaccgaggtggaagccgacgccgaggagtga

SEQ ID NO: 4117 - DNA, 1188 bp, synthetic construct
  source 1..1188: mol_type = other DNA
atgcccagtatcgactttataagaaatatcctcaaagaggacaagaaaacattttgtaatgactacaagaaagctcaaaagtcgctgtctgacgacgacggatattccaatggctctagtcagtcaaaacagtcttatgagaagactaatgaagaaagtacctccaatccccttatcgccgactttacggagtattctcccctccacaatgggcatttccattgcatgaagaccgccaagtctaagatccccaacgggcttttcgtggctatcgtgccaggcctttttgagaggagcggtcggggcctgccttatatcatgcaccggaacgtccgggcagaaatagcgattgaggtgggggccgatattgtggttgaaggacctcccatggggatcatgggatcaggccagtacagcctgtgtttatgcaagatgttccaggcactgaacactgatttcataccacgaggctacaggccgttcgatggctacgatgagatcctgaagcgcatttccatgggacatggtgtagcgccaaagccttataagatcgtggatatggacacaaaagaaacgattctcgagggaaagcttgaggaggacaattatgtcatcgtttccttttccaaaagcctgaagagaataggcttcgacttcaaggacaaatttatcttcgtccctcgtatcgaaggtgtgagcgggaccctgattcgaaaggcctgctccgaaaacaagctggaggacgtagagtcaatgctccctccggagacactgcgcatcctaaaaagagagctggataacgataacgctcccttgcacgaccagcgcgactacgaagtgatcctcaactcagcaaacaacttgtcctacgatgagctaattaaactgaacttcttcagtgaaaaactggccaacgagtttattgaaaaacgggagaacaaggagtttgaatcgatcagcgaaatagaggatgccattttctatggcttcagcagccactacaaaaatagggttctcagcattttggagacccagatgcgcggggatgtcatcagcaattacatcaatacctacccatttaacgtgagggtgctgaattacaagaacgagacagtgctgacccaattcgaggaaaaggtgttaaacgaccacccattcgtcaacagtattgaactcactaacgagtga

SEQ ID NO: 4118 - DNA, 198 bp, synthetic construct
  source 1..198: mol_type = other DNA
atgagcgaagaaaccaagataaaaagagtcacaatccacgtggaatccgagctcgattatgagttcaggcgcctggcgagccagaagttccggtttgagcccaaatggtacagtaaggcaattaaggaggccatcctgctgtggatcgagaacaatccagaagaggacttcgaggacctaccggaagaggacacgtga

SEQ ID NO: 4119 - DNA, 1254 bp, synthetic construct
  source 1..1254: mol_type = other DNA
atgttcgatctggtcctgaagaacctgaagttggtaggagagtcgggagaattttatatcgctatccaggatggtaagatcgcgaagatgtctaaaacccccatttccgccgacaacgagatggatattaaaggccagtatgtcctcccagggctgatagacccccatgtgcactttcgggaccccggcctcacctacaaggaggatttcaaaaccgggtccatggcagccgccaatggcggatttacctttgtgatggacatgcctaatactcttcccaaaacgaacacatacaaggcatttaaggataagctagaaatggccaattcaaagagcgtggtgaacttcggccttcactcagggcattcctcattcgaggagatggaaagaatactggaactgaatccaatgtcctttaaggtgtttatggatcttgagagtgacgaaagattgagggagatcttcaaaaacatttctaacctggacggaaaccccatcctcactgtccacgctgaaaagcagtccatcgtccgagaaaacacagaaaggctctctgaggacctggagcttaaggacaagcccatcagctatagctacgcccgcagcgccgagtcggagatcgagtcaatctcgcagacgatttccctgagtaaggaatttggcaacaatctgcacatatgccatctcagcacaaaaaaggggatggaattggcaaaggagaacaacattagctacgaatttacgcctcaccatctactgttcgacaatagttattttgacaagtttggcacaatcgttaagaccaatccacctctgcgggagagcaaggataaggtgaatgtgtcagatatcgacagcgacagtatgattggtacagaccacgcacctcacagcctcgaggagaaaaataaaggcgtgtgggactccagtccgggtatccctagcctggaaaccgtgctcagcttgttactgactgaggtgaacaaatccaatctggatttcaacctgataccgaagatcttcgctgaaaacccagcgaaacgcttcaacctaaaaaacaaaggattcatcaaggagaattacgatgccgacttcgttgttgtcgacctcaataaagagggcaccttcaacattgatgagttctacacaaaagccgagtactctccattcgacggcatggactatcaaggggctgcgaccatgactatcattgggggagaggtaattatggaggataacgaattattcatatga

SEQ ID NO: 4120 - DNA, 1233 bp, synthetic construct
  source 1..1233: mol_type = other DNA
atgatagtatttaatgaagatagctgcattaaatgtggcgcatgtgagggagtctgcccgacagccgctattgaagtcggcgatcatatcgtgtactgtgatacgtgcagcgaagaacccaaatgtgcagaggtctgcaccaaaggtgctttgcaggtggacgacatagccatcgacgaggaggggaacacccaggtccgattaatctttaacaagacaaagtgcgacgagtgtggagactgcgtggacgcctgtccttcgaagactctgaagctcgaccccgaggattctcaactcctgaaagggttctgtgtcatgtgtcagaaatgtgtggacatctgcccagttgacgtgatcggtgttcccggaatcaaagaaccggcgtctcgcgtaatcgaaccagagggcgcggtgtacattgatgattgcaaaggatgcggcgtgtgcgtggctgaatgccctgtggatgccatcaccctgagcgcttacggagagcctatcgaggtggatgaagacaagtgcatccaatgcggcgtctgttcacagtcctgtccctggaatgcaattttcatcgctggaaacgccaagcccgcaaagcggagcaaagtcatgaagtcctttaccctcgacgcggatgcctgcattggctgtaattcctgcgtggacgcctgtccaggggacttcattagtcccaagtctgacttgacagtagctctacccgaagcctgcgcggcttgcggtctttgtgttaacgtttgccctgtagatgcaattgatctagacgtggaatacggcgccagtaagttcgactcaactgagggaatctgctgggacggcgagaaatgcctctatgatgggggctgtgctctcaaatgtcctactgaggctatacgcgtcgtgacaaagagggggatggaggtgcctagcagacagaaggatatgggcgagcagagtttcatcatgtgcgtgaggtgcggggcctgtgccaatgtttgccccaacgatgccctgcagctggactatgtggacaaggagattgatggcgagacggtcatgagagaccggatcatattcaacccatccaagtgcgacgagtgcggggaatgcattgacgcctgcccatatgatatgctgcacaaagcatacaaggtgaacctgccaatcgcaggtttttgtaccctgtgtgagcagtgtctggccaagtgcaccccggaagcccttagcctgaagtga

SEQ ID NO: 4121 - DNA, 1413 bp, synthetic construct
  source 1..1413: mol_type = other DNA
atggagcctgttactcgtatagaaggccacgcaaagattacggtccaccttgacgaggccggcaatgtggaggatacgaggctacatgtgatggaatttcgcggattcgagaagtttctacagggaagacccgccgaggaggtgcctcggattgtgccgcgcatctgcgggatctgcgatgtccagcatcacctcgccgctgcgaaggctgttgaccagatctacggatttaacgatgatgatatcctgcccgccgcttacaagatgcgagagctgatgaactggggctcgtacatgcacagccatgcgctccacttctatttcctggccgcccctgatctggtggtgccgaacggaacccgaaagacaagaaatgtttttcaaattatccaagatatgcctgaggtggcacttcaggctattaagatccgcagaaacggactggacatcgtatccgcaaccggcgggcggcccattcacccaactagcagcacccccggcggcatttccaccgagttagatgaggaaacacaggcggacctgttggcaaaagccaaggaaaacgtggaactcgcgcaggcgaccatagaacttgcagtgcccatcctggaggagaaaatcgacctggtcaaaaccctgggctacttcggggacacccggcattgtgggatcgttacgaaagatggtgactgggacgtctacaatgggaaagtcaggataaaggacaaggacggctcaatctacactgaatatcgaaacctcgagtacaaggatattgtggcagaacatgtaaagccatatagctggctcaagttcccctatataaaggaactgggataccccgaagggatttacagggttgccccactgtcccggataaacgtgtgtgataagatgccggatgccgcccctttggcccagggcgccttggaagacttccgcgaccgctttggttacgcccaatatccactcctgtttcattgggccagactcatcgagctgctggcttctgctgagatggcggtggacgcactggagcaggacttatctggcgacaaattccctgacgcactcgaaaggactgctggggagggggcaggcatcgtcgaggccgcccggggtacgctgatccaccactacacaacagatgacgagggactcatcacccaggccaatattattgtggccacaatccaaaataacccagctatggagatgggtattcagcaggtggctaaagactatatcaaacccggcgtcgaggtggatgataagattttcaatctaatggagatggtgatcagagctcacgacccatgcctttcatgcgctacccacactatggacagtcagatgaggctggccacagtcgaagtatatgacagtgaaggaaacttgataaacaaaatctga

SEQ ID NO: 4122 - DNA, 927 bp, synthetic construct
  source 1..927: mol_type = other DNA
atggccgacaaggcgaaagtgggaacgatgtggctcggaggctgttccgggtgccacctgagcatcgcggacttccatgagagcctgttggatgtgctggagttagctcagttcgaattttcaccagttctatgtgatacaaagtacgatgaggtgcctgaattagacgttctcatagtggagggcggcatcaggaacgaggaaaatagggaacttgccgaaatgctgagagagaaggccggcctcgttatcgcatatgggacttgcgccgcctatggtggcatccctggtctcgggaacctgcacactgtggaagagctcacaaccgaggggtacattaattcctgcagtacggtaaacccagagggaatcattcctaatgaggatgtgccaaccctggagagccgcgtgcgcccgcttggcgaagctatacaagtggacctgctgattcccgggtgccctcccaagtcagacgtggtcgcagaggctatccttaccctactgaacggaggaactatcgaactgccgaccacaaacctttgtgaggtctgtccccgagagaagccccccgccggtctcgccatggacttcatcaaacggcagtttgagatcggcaagcctgaagacgacttgtgtctcatagcccaggggctggtctgtatgggcccagcaaccgtatcgctgtgcggcgcccagtgcccaagtattgctatcccatgccgggggtgctacggccccacagctaaagtgaatgatgcaggtgcaaagatgatctccgcgattgcaagcgactacggggtcaacgaagataagaccgtcgaccccgagcaagtagccgatcagctggatgacattgtgggcacattctacacgtataccttgcccgctgccctggtcccggccaaaatgcagaagggaggaaaatga

SEQ ID NO: 4123 - DNA, 426 bp, synthetic construct
  source 1..426: mol_type = other DNA
atgtcggaagatgtgaagatcgtaatgttttgttgcaactggtgttcatatgggggcgcagatacagctggtaccgcccgcatgcaatacccacccaacatccgggtcatacgcgtgatgtgctccgggcggattgacccgcagtttatcctcaaggccttcagagacggtgccgacggggtgttcgtggccggatgccacatgggcgactgccattacgatgcagggaattacaaactcgacaggcgaatgcgtctggtttataagcttgtcgaggatatgggcatcggccgggagagagtccaccacgactggatatccgccagcgagggagaaaagttcgctagtagcgtgaaaatgatggtggacaggattaaagacctgggccctagccccctgaaggcgcagctagatgcggagggatga

SEQ ID NO: 4124 - DNA, 420 bp, synthetic construct
  source 1..420: mol_type = other DNA
atgagcaaatactttctcgatgccaacttcatcatcgcaattttccgggaaatcgagacgaacaacgagctggcgatctccacttgcgaggagctcctctccaaccacgaatgctacataagcaacggggtgttcaatgaaatcatcacaatccttatgatgcgcacaaaggatattgaactgaccgtcaaggcctactactttatgaaggacaatctaactattatcaatgagttcgagataagtatgttcaacgacagggtcttcgagatgtttaaaagatacaatagcaagtcattcaaagtgggatttaccgactgttcgattgctttcctgtataaatactatggcctggactatattgttaccttcgataagaactttaaggtatttgatgacgtgaatctgttggacttatga

SEQ ID NO: 4125 - DNA, 246 bp, synthetic construct
  source 1..246: mol_type = other DNA
atgatagacattatcgccaataccaaaatgtacaaaaacaagcagaccatcattcccagcgaagtgcgcgatcggttcaacgtcgatgaggacactatcatagaatggggcgtggatgagtttggcgacctgcgaatcacgttcagaaagaaagtcacactcaaggatgttgcagggatgatcaaaaaggaaaacgacgtagagggtgactggaagattgacaggggagtgtatctgaatgagtga

SEQ ID NO: 4126 - DNA, 1224 bp, synthetic construct
  source 1..1224: mol_type = other DNA
gtggctaatgatgccctgcgggcaaaggacaaaaaggccgccttaggtactgatatagtgatcgaaaacttcagcaaagaggaagtcaatgcctttgacgtcctggacgatatcgatgacgtggacaagaagaccaaaaggacactgctaaaagttggggtggatacggagtctgaggagcgagccgggtcgttcctccagatggaccagtccaacgtattctccagttccatttccaactctgtcgaggtcatgaacactggcattgcccttgaaaagtattcctggctaaaggactacatgtggaatgcggtaaagccggacgcagacaagtacaccgcgcagacggcactgcgggaagtggaggaagagagttacagcggctactttgtacgctcgctgcctggaaccaaagaggttttccccgtgcaggcctgcatgtttattgcagaccaggatgttatgcagactgcccataacattatcattgcagaggagaactcggagcttcaccttatcacaggctgtgccacgggggaagacgtgagctcagctctccacgtgggagtgtctgagatgtatctgaagccaggaagcaaaataacctttacaatggttcacaattgggccgaacaggtggaagtgcgcccaaggactgcgatcctccaagcggagaataccacgtatatcaacaactacattctgacaagccctgtcaactcaatacagtcctatcctaccacccattgcaacggcgagaatgcaagggccttgttccagagtattcaaagcggaacaaaagattcaatcatcgacgtgggttcacgagccctcttaaacgctcccaacaccagcgcggagatcatctcccgggccgtcgccaatgacgaatccagcatctacagtagaggccacttggctggcaacgtgcccaatgtgaagggccacctcgaatgccatggactcgttctggacgacggcagcagtatctacgctgtgccagagctggaggccaatgctgccaacctcgaaatgtctcacgaggcagctgtcgggcaaatcgacgaagaggagatctattacctgacctcaagaggactgactgaagaggaggcagcttccatgattgtccgcggtttcctgagcatggatattacagggctgcccgatgaattggctgccgagacccagagaatgatagatatgagtctggatgggatgtga

SEQ ID NO: 4127 - DNA, 759 bp, synthetic construct
  source 1..759: mol_type = other DNA
atgttgcttgaggtaaaagatctggttgtggaggtggaaggcaagcgcgtgctgaatggcgtcaacctggccataagagaaggcgagactcacgtgctcttaggccccaatggtgccggcaaatccacactgttcttaactatcttgggatttcctaaatacgaagtggttgaagggtccattatcttcaatggggaggatatcacggggcttagtaccaccgaacgtgtgcagaagggtctcggagtaagtttccagaaccctccagcaatccggggggtcagcgtcagggacttgctgaagttcgaatccaagcaggacccagatgaagacctcaacccccgcatgcaagagctggcgaagaagctaaagtttagcgatgagtttctggaccgggacgtcaaccggggattcagcggaggagaggtgaagaggtcagagattctccaactgctggctcaggagccgctatttacaatgttcgacgagccagactctggcgtcgacattgagaacgtggagcttctggccggcgagctcaatgtgctgctcgataaggacaagaagcccggccagcgaaaaagggcagggctccttatcacccacctggggtatatcttgaacttcgttaaagcggacaaggctcacgtgctgatgcatggtataatcgcctgttcgggtgaccccgatgaaattctggaggatatcagaaaagaaggatttaaagggtgcgtgggctgcgccgagtgcggcaaatga

SEQ ID NO: 4128 - DNA, 270 bp, synthetic construct
  source 1..270: mol_type = other DNA
atggagaacgctgtagccaagcccaacccacacaggagggaagaaaaactgtggtccgagatcaagaattaccaggtggccacgaacaatgcacggattctgggagtgcttgacgaactcattatcaatgagaaaaccggtaagatcgtggatattgccgtcaagatcgagagcggccgcaacatccatgtcaaaggggcgaaacggcgaggcgacctgctcctcataccgttcacaaagctgagaaagctggagaacagcctattgtga

SEQ ID NO: 4129 - DNA, 633 bp, synthetic construct
  source 1..633: mol_type = other DNA
atgattatcgctctggtcatggcgggtggaaagggcctgcggctcaaatcaaacatcgaaaagcccctgttccccatcaacgacaaacccctcatggactatgtcctggacaacttgaagaagtccaaatacatagaaaagacggtggtggccgtgagcccaaatggggaaaacaccaaatcctatctgaaggatgatctgaatttttcagatttccacgatgacttttacaatagcacaaaaaccgatttttacctggacaccaagggaatcgggttcgtcgaggatctcagtgagatcctcacttgcttcgaaaatcatagcaaggatgacatcctccttttcatcaatgcagaccttccgcttgtggacgagaacataattgactacatcattgaatactacctagaccacgacaagcctgccttgtccacactggtgccagtagaaatctttgaggagtatggcattccttatacctacgatttcaatgggaaggtccccgcaggcatcaacatcctgcgcagtgagaacgtggtgcaggaggaggaagttttaattattccaaggtatgagctggttttcaacataaacactatcgagacaagcattttggcctcgaaatttctatga

SEQ ID NO: 4130 - DNA, 1479 bp, synthetic construct
  source 1..1479: mol_type = other DNA
atgagctttctcgataagatctttaataagggacccaagcccattattgcggaaagtcagtcccgcgatcttagtattctgaaagccgggaacaggccgcaaggccccggcgttatggtggcccagcaggacgaatactacgtcaccgcttcggtcgagttaggcaacaccaccaccaaatgcgtgattatggcgaccaacctcaacaacagccagtcttatctaatcaataagacggtgaatatgacaagggacgttcgggcccctaaacctgacgaagaggtcttcggcaaaacagtgtgggggatcgagcttagcaaggaatctgtggccgatatgattaaagacacggtgctggagtcactgaagaaggctcacgtggatatggacgaagatttggacttcgtggtccgaagcaccggggtcactgccgggttcgccaccactcaggaagtggggcagatggtaaaagccctggcagatggctgtttggatgcaggaatatcccatacaaaaatggctccagccatgagctcagcacacctcccaaagagacttcagaaatacactctcctggataatgtgatgtttgatggggcggtggtcagtgttgtgcccccaaaaggcaaggaagtggtcgctaatgaaatggaaggggagctggttacagccggcatcaaactgggcgctaagtggactgaggtagactatcggaacccttgcgtctcgctcgacttcgggtccaccctggccggacgcatcgtaaacaaggatgagccttacgccagcactgttggtaacttcctagggttggcgggggtgatctcagacagtttagctaaaggttccaagcagatcgaccagaagaatggtgcagccttggacctatttgacccgaaactcctgaaaaaggccgatgggaagaaacaccaagagaaagccaagcagtacgctaaagaggctcatgagctcattaacatctgcaaggtgcccgaaggcatcgatagattcggtaccgtcccactggacgccgccggagcaaaggcagcggggacatgtctgataggatgcgatgtgggaacaaatgcagacggccttgacggattggtggagataggtgccaagatctatgaggacgaaggcatccccacactcctggccaccatggaccacgtaagcgcaaatatcgtgtaccgagtcctggacgtggccttcgaggagaacctgatccttgacggctccattctgggcgtcacgggaagagcgggcatcacgggcaagaagccagagctgattctcgagtatgcccaagacaagttcaaggacgtggtgtttgttgaggatggcctggctctcggttctgcaatcatggctcggtgtatgaactccatgggaacccagaagaaccctctgggaggcaaccagggagagaggtgcattctgaagaagcgcatgcaggctcaaggtactatagaatga

SEQ ID NO: 4131 - DNA, 882 bp, synthetic construct
  source 1..882: mol_type = other DNA
atgggcggccaacccggagagtatccaaccgtgctcgcaggaactatcttttacggcggccacaagattattagtgatgagaaagcaggcgactttgataaagacgctgcggaaggcctgattaagacaatggaggagatgtctgatgttaccggaaatccatgcgtggtccagacgtttggtgctacagccgaggctatggtgaaatacctggaatttgtgggggacatctgcgacaagcccttccttatcgactcaactgctgccgctgcgaagatcgccggggttgagtacgtacaggaggccggactggcggaaagggcggtctacaactccctgagtatggccgccgaagctggcgaaatcgaggccgttgccaattcagacatcgacgcaagcattctcttaggtttcaacccaatgaccccgggggtccccggcaaactagaaatctgggagaccggtggctcggtgatcgacgaaggtattctcgaaatggccgagcggtgcggcatcacaaaaccctggatggacgtggctgtgactcctctggggcagggtgccgggccggccgtccgaacgtcctatgctgtgaaggcgaagtggggataccccgtcggctccgggatacataacgtgcctagcgcatgggattggctgcgccagtataagaaggaacacaaggaggcatggcctgtgtgtgatatagggagcaatatcgtgcaacagatggctggaggagacttcgtacttttcggacctatcgagaacagcagactcgccttcccagcctgtgggatggcagatattatgatagccgaggcagcccgggatatcggcaccgagcccattgaggcccacccattgaacttgctgctgtga

SEQ ID NO: 4132 - DNA, 252 bp, synthetic construct
  source 1..252: mol_type = other DNA
atgagcgaggaggaatcagtgccccagatcattgtctccaccgacgatatggccgccgcgatcaataagctggacgaagctgaggagaaagtagaatttgccgttggcgagtacttccagcgcttgggacagcaaaacgggcgggacatcggcattctctatggaattatactggggcttgtgatcctaatagtgtctatcgaatttggcctcgtgtccgcaatgagtacgatgctgacaagcctggtctga

SEQ ID NO: 4133 - DNA, 207 bp, synthetic construct
  source 1..207: mol_type = other DNA
atggtgcgctttagtaacaagccaaatacacgaggcattaggaacgcttccaataacgtcgagtatcgggcaaagctcctggggagagaaggaaggctattcgccggcgtaatcagcacccggttcagcggcatggccataggtatcggactggcgcttgctctcgccgtggtgatcccctacctggcaaaattgtgcgggctgtga

SEQ ID NO: 4134 - DNA, 738 bp, synthetic construct
  source 1..738: mol_type = other DNA
atggcggacaaaaagcctgctgctgataactggcccgtcgtcagcggagactacatcgtgggggacccggaaagtcccgttgctgtgaccaccctggcttctcacaatgaagatattccagcagctgccggagcagccatagccggaccgtgcaagacagagaacctaggcattgagaaggtggtggccaacatcatttccaatccaaatatccggttcttaatcctgtgtggggccgaggtgcagggacacattactggccagagcatccaggcactgcatgagaatggttgcgaccccgagaagaaaaagatcactggtgcgaccggggccattcctttcgtggagaacattcccatggaaggggtggagcgcttccaacaacaggtcgagctggtggacttgatcgacaacgaagacgggggcgcaatcacagccaaagtaaaggagtgcatcgagaaagatcccggggcgtttgaagaggatgccatggttattgaagtgaaagagggcgatgacgacgaggatgaaggcgaggagatacggcctatctccgctgaaaccgccctcctcgaagccagaatccgaaacatagacacacaggtgaagctggttggtgccgtccagaggaatatggcaggcaactattcaggaaaggtccagggcatcatgattggactgatattcacgctcgtaatcggctttttgcttctcatggccccacttctgggcgcatga

SEQ ID NO: 4135 - DNA, 321 bp, synthetic construct
  source 1..321: mol_type = other DNA
atggtgcttcccttaatacagtttatccccgaactgaacctgaaccttgaccctgagaccgggctcctcggcgcaggtggtggagacctgatcatcctgagcatggatgagatcaatggcgagatcgccaaggtcgaggcggccgctgatgaactcatgaacagtttggacccaaatagcgccccactggggtccttcccgggccgggaaggcaacttcgtgattgccggaacattgaccaatatggtgtacggctttattataggaatgttcctgatcatggccgcaatgcccattctgacggctatgggggtactatga

SEQ ID NO: 4136 - DNA, 819 bp, synthetic construct
  source 1..819: mol_type = other DNA
atgagcgcaggcggctcgggagcccctgccgagggtgccgtcaatgctaatgtcatgctcgccgtggggattatcggcggactgatcggtatatatgcgtcaagttttgagcccactattggcccagtcatcgcatgccttggggccgtttgcgcaatcctgtggggcgttctggcgattcgcagcgtagccagttacggccttgggacgggggtccccagcatcggttatatgagcttagggataggggtgatcggggcattagccggggtagggataattgcagcattcaaactgaaaggacttgaaatgctcggacccatactggccctggtcttcgccatgctcatcggactgctcgtggccattgtggctaagaagattgtgggaatgaagatcccggtgatggaacggtgcacagctgaaatcgctggcgccgctgctttggctgtgctcggcttctccagtgcaatcgccggtggatacagcatcgatctgttgctgaccgcggtggtggcgcccggcttcattgctctcttttacatattggtgacaatggcgatccagcacccattcaacgcctgtctaggacctaacgaggaccaggtaaggaccctgaaatgtggtgcctccactgccttcctgaccatgatcatcaccggcattctcgcaatttctgccggcggctatgcatggtttgccatcctggtggttggactaatcggctggtacgtctcatttaaaatgttcgttaacgcttcctacgaggctgccgcctctgtgaagtggtccggcctgtggccaaaggtggaggaatga

SEQ ID NO: 4137 - DNA, 702 bp, synthetic construct
  source 1..702: mol_type = other DNA
atggatcttttgatatttatcatatgcgttgtgatcgccgggatcattatgggtggaggggtgcacttcattcctgtaggcggcgcccctgccgctatggccacagcgaccggcgtaggaacgggtaccgccatgctggcagcgggcgccggattgactggactaattaccgccgctagcatgaccggtcagccagtgtggctgatcgtcttagcaggcgccgttgggtccatgctgatgatgggcatcaccatgctgatcgggaacttcatttatattttcggcgttggcgtcgtgccagcatcgggaaaagcagcagtcgacccaatcacaggctggaaccaggagaaatacaagacccccgggaccgagggacatggcatccccacagtctgctacataagtggcatcatcggtgggctcctgggcggggccggcggcggactggtctactgggccattaatgaatttgctacagcaaacctgactggatttgacgcgacggtgatcgccggtctggccgccatcctcagcgtcgggatgttctttatcaattcagtgacagcttcctataacattggagggactattgaaggtttcgtggacccgaagttcaagcggctccccacgggcatcctcgcttgtgcggtggtgagccttgtggctgctatcttcatggtgctgatgataggagggatttga

SEQ ID NO: 4138 - DNA, 873 bp, synthetic construct
  source 1..873: mol_type = other DNA
atggaccctattacacttggcgtggtcgcattgatgggggccgccgcaaccattgccggggctgcagaggacctggagtccgacatcggctcacagagtaaccccaacagccaggtgcagctcgctccgcagatgggacacctacaccgcatgataaataaggccgcttcgggggagccagtggcctacggatgctggtgcgggatctccggcgccatagcagcccttgcgatgggcatgggcattatacctatagtggccattgccatggggagtacggtcgctgcacttgtgcacgccatttatacagtcacaagccacatgggccggatcgtcgggcagtctcagtttgaacaaccattatttatggatgttctgacccaatccctgggccctatcgccgctcatggttttatagctagtttcggtatcgtcggaatcgcctatttgatgacgctgcccctcgacggactgggacaccccttcccactcccactcctcgctgtgctgtggggaattaccatcggtgccatcggaagctccaccggggatgttcattacggcgcagaatcagaataccaaaagttcgactacggtggcggtactcctgtagcgattcagggggatatcgtgactaaagctccgctcggtgcgaagaactctatcgatgtagggaacttctgcgccaaatatggaggccccctgaccggcttctgttttggactgatcgtgttcgtgagcttctggatcactgtggtattcggcgctctgggcggacagattgtggggattgtcatcgttatcctactgatcgcggccaattacttgctggaaaagagcacaagggcaaaatttggcccctacgaggagtga

SEQ ID NO: 4139 - DNA, 1653 bp, synthetic construct
  source 1..1653: mol_type = other DNA
atggcggataaaaaatttctggatgccatgacaaagaagtttaaggaggcgccagaggagaaaactacgaccttctataatatgggcgggtggactcagagtgagcggaaaactgagtttgtgaatgaaggcaaggctatcgcggaagccagaggaatcccaatgtataatcccgacattggcaacccccttggccagcgcgctctgatgtcataccagctgtccggtacagacactttcgtggagggggacgacctacattttattaacaacgcagcaatgcaacaggcctgggacgatatccggaaaacagtcatcgtcgggttgaacacagcgcacaatgtcctcgagaaaaggctgggcatggaagtcactcctgagaccataaccaactatctggaagtcgtgaatcatgcgatgccgggcgccgccgccgttcaagaacacatggtagaaaccaacccactgctcgtggacgactcctacgttaaagtgtttacaggcgacgacgatctcgccgccgaaatcgatcctgcatttgtcctcgatataaataaggagttccctgaggagcaggccgaggctctgaaagccgaggtgggcggagctatttggcagatagtacgggttccatctgtggtagggagggtctgcgacggtgggacaaccagccgatggtctgctatgcagattggtatgagcatgatttccgcatacggacagtgtgccggagaaggggctacgggggacttcgcctacgcctccaaacacgcagaggtgatcggcatgggcacttacctgcccatccgaagggcccgggccggaaacgagctcggtggtgtcccattcggattcatggccgatatctgtcaggccacccgcgtgaccgacgatcctgtggaaagcgccctggaagtggtagccctgggggccgctttatatgatcagatctggctaggcagttatatgagcggcggcgttggatttacgcagtatgctaccgccgcatacaccgataacgttctggatgacttcagctatttcgggaaggattacgtggaggacaagtacggagatctgtgctccgcccccaatgacatggacaccgtgcttgacgtgggttctgcagtgacattctactcactcgagcagtacgaggaataccccgctctacttgagacgcacttcggggggtcgcaacgcgctgctgtggtgagcgccgcgtcaggtattagcacagcattcgcaacgggaaacgcccagaccggcttgagtgcttggtacctggcccaatacctgcacaaggagcagcattccagattgggattctacggttacgacttgcaggatcaatgcggcgcagctaacgtgttcgcaatccggaacgacgagggcctcccccttgaactgagaggacctaactatccgaactatgccatgaatgttgggcaccagggcgagtatgcaggcatcgcacaggccccgcatagtgctcgtggagatgcctttgccgtgaatcctctcgtcaagatagcctttgctgacaagaacctgccattcgacttcaccaaggtcagagcggaatttgcgaagggcgctttaagggaatttgagcccgctggggaacgctcgatcatcattcccgcaaagtga

SEQ ID NO: 4140 - DNA, 753 bp, synthetic construct
  source 1..753: mol_type = other DNA
atggcacagtattatcccggaacgtcgcaggtcgctgagaatcgccggaaatttacaaacccagatgtggagttggaggtgcttcgcgaaataagtgatgaggatgtggttaagctgttgggccaccgggctcccggcgaggagtacaaaagcgttcatcccccgctcgacgagctcgatgagcctgatgacatcattagggaaattgtagaaccgatcgatggcgcgaaggcaggagaccgagtgcgatacatccagttcgtggacagcatgtacttcgccccagcccaacctttcctgagggccaggtcctatgtgtacagatacagaggaatcgataccggcaccctgtccggccgccagattatcgaagcccgggagagagatgtggagcgcatcagcaaggaaattctggagaacgaatactttgacactgcacggaccggaatcagaggtgccggggtgcacggtcattcactgaggctagacgagaacgggctgatgttcgacatgcttagacgccaggtactcaacaaggagaccgggaatgtggagatggtcaaagaccaaattgggcgggagctggacgaacctgtcgttctgggggaaccactggacgaggaaacgctcagggccaaaaccacaatctaccggtgcgatggcgaggcgtataaggacgacgaagacgctgtgacagtcttacgacagatacacgtcactcgttctcagtttggctacaatcccgaatattga

SEQ ID NO: 4141 - DNA, 597 bp, synthetic construct
  source 1..597: mol_type = other DNA
atgatcggcagatgcacacaccttgtggactgcagggagacacgcggccttggtgaaggcggcggaattgcccagcgcggaactttcgcggaatgtggcagcgatgtgctcgcagttgctatgtccccagggcggcggcacatcaccaagccggtctgcgagatcaccttcgggctgcgcgaagccaacctactgaccagcaccatgatactggacgcgggaagtggcgtgccccatgatgctccagctgggggggccggtaatgccttcggcctgactgacaaggaggtggagcagatgcagaagttcaaggtcatcgtggttcatctggggggcgtgaggaatcacattacatacaaggcacggctcatcctccgtaacgtgaacaagccctgcgtgattatatgtgagtatcctgtagactttgaagactttgccaaaatcggtgtcaaaaccgcaaaggtcatgcccgacgaggtaaagacggagggaaaaatcatgaacatagtgtcaggggtgattaggggacagactgtctctcaagaaaaactggatgagattatcagaaaagttcgattaacgttgggagatgcctga

SEQ ID NO: 4142 - DNA, 456 bp, synthetic construct
  source 1..456: mol_type = other DNA
atggatatcgagatattcccccacagaatcctcggcacagacacaaccgaaaaggtgctgaacgacctggagagccttgactccgtgaagaggactgtcattcaggggccgcgactcccaccccaagacgagatcgaccgcatctacggagatcgccggatcattgtggtaaatggcgaggaagtggaactgaaggttaaaacgggaaggatcttcgtcgaactctatgatgagagcgggatagaggagattcgtgccatatgcgataagcacattgacactgggtttgacattaataccagcaaggcgcagtacatccggaagcagaaaaccgtgacggatggattgaagtacggtgagaacacagaaatccctgaagaactgatcggcatcgcagacacccggagtaaattcaacgagcatgtctcaattctaagaaaagatggcctggagtga

SEQ ID NO: 4143 - DNA, 1332 bp, synthetic construct
  source 1..1332: mol_type = other DNA
ttggcaaagtttgatgataaagtcgatctgtacgacgaccggggctcactggtcgagagcgatgttccaatcgaagctctaagtccgctgcgtaatcctgccataaagaacattatcagcggcgtgaaacgcactgtggcggtgaatctggaaggcatcgagaagtccctgaaaactgcttccgtgggcggagcaaagtctaagatcctcggaagggagatggatcttgacattgtggctcaggctgattccattaatgctagcctgaaagagatgcttcaggtgactgaggacgatgatactaaatgcgagatactctcggggggaaagaggattctggtccagatccccaccatcaggctggattcttccgcagaatactccgtagccaccttggctacagcaactgcactcacccaggccataatcaaagagtttgacgttagcatgtatgacgcaaacatggtaaaagctgccatcctgggacgctacccccagtcagtcgaatatatgggctcaaatctgaaaaccatgctggacgtaccacagaagctggaaggccctggttactcacttcggaacatcaaggccaacgacttcgtcgctgccacactcaagaatacactacaggcaacggcgcttgccagtatcttcgagcaaacggccatgtttgagatgggcgacgccgtcggcgcctatgagcggatgcacttattgggcttagcctaccagggactgaacgccgacaacatggtgctcgggctcgtgcaggacaacgccaaggaaggaaccgtgggttccatcgttcaagacacaattgctaaggcggaggccgatggggtgatcgctgtggagaaggaactgacagactacaacatgtacgcaaccaatgatgccgcgaagtggaacgcatacgccgccgctggctgtacggctgcgattatggtgaacgtgggggcagcccgagcggcccaaggtattccaagcacaattctctatttcaacgacaatatcgaatttgccaccggcctgcccgggatagacttcgggagagctgaaggcgtcgccgttggattctcgttcttcagccatagcatctatgggggcggagggccgggcttgttcaatggtaaccacgtggtgaccagacacagtaagggatttaccatcccctgcgtcgccgccgggatggccctggatgccggtacccagctcttcagccccgaagcaacgtctggtctaataaaagaggtgtacagtgagattgacgagtttcgcgaacctctcaagtatgttgcgctggccgctgcagagattaaaggggacatctga

SEQ ID NO: 4144 - DNA, 1251 bp, synthetic construct
  source 1..1251: mol_type = other DNA
atgcaagtgatagctgatctcggtggaacgccggggaaagactgtagagggtattgcaaattctgctactttaggaaagtgaagccacttaccgaagccctgggctgtcagcactgccctcccaacaaggtgggatgtgagcgatgtctggaaggagttcaggaagcaggcaagccattccaacagccattcacagtcttaagcgaggtacagatggccttgatgatgaaccccgttcgggacgccaatctgaaggtcaacatcagcggggggggtgacgtatcctgctaccctcagcttgaagagcttatcgccagtctgtaccaatggcagctgccaatccacttaggctatacaagcggcaagggaatcgacgatggagacattgcaagccgattcctaaactatggcgtgaacgaggtgacatacaccatcttctcagttgacccggctctgagaaaacagtggatgctcgatcccactcctgaggagtccctcaaggcagcccagctctttgcagaaggggccgacttgcatgcggccgctgttattattcctggcgtcaacgatggacaggctctggtggatacctgcaataagctggaggagtggggtgcaaaggccctgatgatgatgcgctttgccaactcctacgatcagggcctgatcctaggcaacgagcccgtcatcgaaggcgtcgtgccacatgagccacttgagttcgaagagctggtgaaggagatcaattctgaatatgacatgcgcgtgaccggtacgcccctgggggaccctacgattggcgctccctttatcatagctaaggatgagtacgaggagttcctgggcatcctgcccgaagtgaggggagaggccactctgctcacctctaaaattgccgctcccttcctaaaaaagatctttgataagattgctcccgacaatgtaaatgtggtggcaactaaaaaggacatcgcctgccttatgacaaagcaggacctggaggcgctggacttggatgagctcaaagatgccgtcattctgccgggacgcgcgttcatccacatattggatgcggaaagaatcctctcctctgacggtaaacagcggttggtgggctttggccctgacaccctgagtgtggacggagagctcagctcggggatgagtgaagaggaggtcatcgagcacgaactcgggtcatttattgaactgatagaagccattaacttcttcgggatgcggaggctctga

SEQ ID NO: 4145 - DNA, 222 bp, synthetic construct
  source 1..222: mol_type = other DNA
atgaagattcgaaaacggataaagaaactcaaaagaatcaagaaactgaaaagaattaagaagctaaagcgtatcaagaaactgaaaaggattaagaaactgaaacgcatcaagaagctgaaacgcataaagaagttgaaaaggatcaagaaactcaagcggattaagaagctcaaacggatcaagaaacttaagaggatcaagaagctggaaaaggagtga

SEQ ID NO: 4146 - DNA, 915 bp, synthetic construct
  source 1..915: mol_type = other DNA
atgtatgaaacactgaccttcacaggtggaatccacaaaagtgaggaattaaaggagcttatagaggatctgggcgggttcgtactccagtccaacatactccagatggagctcgtcctgaacatggctgtgccgatcgatgatgttaagatcattgaggataaggcaaatgagcttctcggcgagctcagcgtggcccctatggctggcagcgagatcgcgatcgtctccccaaccctcgcacgccaccaccttccacacgccgcctgtgacatctccgagtacttgagacggtacggcgccaaggacaacatgatcggtctggcccgggggcatggaaagggaaccgctggaataagcgaaaccgaaaaggcattgattgaggagcacgacattgccatatttgccctgggaagctttaagcagtgcatcgtggataaggcttacctgtataacgacattgacatccccgtgatcgttactggcgcgccggagattgacctggaagagctgcccggtgtggatgcatatgtcccagggctgggcagaatccctcgccgactgaaacgtggggaaaacattagggcgttaaagcatctggtgcaaacaattgaagacctgcttgagaaacggaaaaaggaattggctcaagacccccccatcgtcccctcgattctagtgaaaaacgagatcgaaaatcaggtccctgccatcgaaggggtgttctctccaacgcctgtgacgagccagctgagcggcttgagggtaaaactggattacgacaattatcatgaagagatcgagaatgtggtcatcggcgagcagaagctaaaagacattgccaacattaaaaagtcacacttctacgattacatactggtggaactcctcactgagagttcactggttgactga

SEQ ID NO: 4147 - DNA, 1665 bp, synthetic construct
  source 1..1665: mol_type = other DNA
atgggtgtgaacatgtacgctgaaaacaacatattggtgggcgccaatgagaacacagaggtgtacttactctccaaattggcgaatcggcacggcttgatcgccggggcaaccggtaccgggaagactgtgaccctgaaaacccttgccgaggcctttagtgacatgggcgtgcccgtgttcctggctgatatgaaaggagacgtatcaggactggcgaagataggggaacctagctcaaagacaactgaacgaatggagaagtacaacctggcagataagggattcatcttcaagagctaccctgttgaattttgggacctttacggcgagaaaggcctgccgatcagagtgacaatctctgaaatgggtccccagctgctaagcaagatattgaaccttacggaggcgcaggagggtgtcctgaacattgtcttccgggtggccgatgatgaaaacctcctgctcattgacattaaggacctcaagtcgatgattaaccatgtgagcgacaatgccgaactctatgaatcaaaatacggcgcagtggctaagaagtccgccactacactcctccgaagcttgctggcccttgaagagcaagggggcgacatgttctttggcgagcccgctctggagctggaagacttcatgcagtgcgacgatgagggaaagggcataatcaatatcttagattccgtaaagctgtctaccgcaccggaactctattccaccttcctgttatggatgatctccgagctctacgaaaagatgcccgaagttggtgacatggacaagccaaaatttatcttcttttttgacgaggctcacctcctgtttgacgatatggctccagcggtccagaagaagatcgagcagattgtgaaacttatccgttcaaagggagtgggcctatacttcattagccagagcccatccgacatccctgacagcgtcctggcacagcttgggaacagggtccagcatgcactgcacgcctacacccctaaagagcagaaggcagtaaagactgctgccgagaccttcagaccaaaccctgctttcgatacaaaagaggtcatctccaatctgggaactggggaagcactggtttccgtgctggaagagaagggggctcccagtgtggtagagcaggtggacatactccctccccaaagctatatcggggccatcgaagacaatttcagagccgaactgatgagcatttcgccgctacgcggcaaatataaggaagctgtcgatagggagtctgcctatgagatgctattgaataagattgataacaacccaaacatccaaacagagatccctccagaggcccccattagggatattccgaatcaggccgagcaagcgccaagtcagccacaggctcagcaagccccccaacaggcacccagtcagccccaggctcagcaggcccctcaggaggaggcccccaaacagaaaggcctgctggatgatgtgatcggaatagcggtgggcaccgccgtcgaccagatgacaaagcaaaacaagaccacccggtctcgcaaaaccacgaagcagacaactgttgagaaagcaacgagtactatggtcaatacggccgcccgggaggttaccaaagggatcattcgcggactgtttggaaatatgaaatga

SEQ ID NO: 4148 - DNA, 369 bp, synthetic construct
  source 1..369: mol_type = other DNA
atggtggagttagatcgggaagaactttaccgccaactggaggaaatggagaacgacctgaggctgtatcccattgaggaagggcttgaagatgatatcattgactatatcaatggaaaagaactgagtgataacgagaagtgggacctggagaaccgactggaagacttcttctacggtgccaagctcaagtgcaggaagccaacctactacttcacggacggctttgagttttatgtcactgagatctacatagactttagaatcctggagcacgtgcggaaatccttcccgaagttcaatcagctatccgtaagctcagagatagagcagggcttttctaccctcagcgtgaaattgacactctga

SEQ ID NO: 4149 - DNA, 798 bp, synthetic construct
  source 1..798: mol_type = other DNA
atgaagttgaacattaataaagagacgtgcactggatgcaaactctgcgagactgtctgcattagggacaacatcatcgtggtggataaaaaggccgtggaagtggacaacggggactgttttgattgcggccactgtctggccatctgtccctccaactctatcagcctgaagggctttgacggtcagaaagaccgagtcggcgagtacaatccgaaagagattccagtatcaagcgaggactatctgaatctgctgaagcagcgacggagcattcgctggttcaaaaagaaaaagatagacaaagagacctttaataagctcttcgaagcagcatattacagtccctccgcgcagaatgcgcaagacgttgaatttgtggtacttgataacgaactggacgagttcatgcatctggtctatgatataatcagtgctgaagaggataagttctttagaatcaagcagttcggcgagtacttgcgcggagaaggagactacaagaaccaccctcttctctgggagggccatcagatgatcttagccttctctagaaacagcgccaacgccctcatcgcatcaacaaggctggagctatttgcttacaccatgggcctgggagggttctactcccttttcaccctgaaggccgatgagctcgatcacgacaggctaatggaatttttcccagggatagattcgcacaagcatatgtatagcgctttcgttatcggttaccctagagtgaaataccggcgcacagtgccccacaaggggattgacgtctactatcggtga

SEQ ID NO: 4150 - DNA, 540 bp, synthetic construct
  source 1..540: mol_type = other DNA
atgtccatctacgatttcgaggtgaaggacatcaacggaaatatggtctcccttaaggagtatgaagggcaggttctgctgatcgtgaactcagccacagaatgcggtttcactccccagtacaacgaactgacgcagatattcgatgagctcaacgaggagggctttacaatcctagattttccttgcaatcagtttggcaagcaagctccaggaacaggcgaggagatcgcagaggcgtgtcgcgcaaccttcctggtccagtaccctatatttgaaaagattgaagtgaatggggaaaacgaagagccgttatacacctatcttaagtctgagcagcccttcgtagacattaccggggaggatgccgagaggctgaaaggaatcctggaaagcatcaatccagactatatggacagcaacgacattaaatggaacttcaccaaatttctcgtggacagagaaggcaatgtggtggcccggttcgagcccactcaaagtttggatgacgtcaaggctcagattaaagagctgctctga

SEQ ID NO: 4151 - DNA, 459 bp, synthetic construct
  source 1..459: mol_type = other DNA
atgtcgattctggtggcttattactcaaggacaaacgtgacaaaaaaggtagccgaatccatcgccaatcagctggatgcagacatcgaagagattgtccccaaagtcaagtatgacggcaagataggttacatgcgcggcggtaaggatgcgattagtgaaaagatcatcgacctcgacagcctgaaatacaatcccgcggactacgacctaatatatctgggaaccccggtctgggccgggagagccgcaactcctgtgattagctacatcaagcaaaacgagggcagcttcaacgacgtgaagttcttcgtgacggccgggggaagtggatttgagggcaccatcgagcagctgggcaaatacgtggggaaggctccattgaagactctctctcttaccaccaagcaggttaaacgggatgaatttaaagatgagctcgcttccttcatcgagtga

SEQ ID NO: 4152 - DNA, 1113 bp, synthetic construct
  source 1..1113: mol_type = other DNA
ttgaccataatttcaaaaaaggtggaactgattgagctcttctatgatttaattttcgtgtatgccatcagccgactgacttcgatcataagcgagcccgtcaacggcggcatcgctccattcagtctctttgcgtacattatcacttcctttgtcattcttcaggcatggctctacttcacgaactacgtgaaccggtatggccaatggaagtggtacgaatacgtcattgccatcatcaacatgattgccgtgatctacatggcaaataccatatcctcgacatggaacaattattttgtttttaatgtgtccatgctgataatgctctttacggtggtatttttgtacagcgtgcacgccatcaaggagaaatcattaaagggggctgcgggtaacagcatcaccattctgctcgtggtatgctccatctatattatatccacactgagtatcctctttgggcacatggacgttgtcatttggctcaacgtccttgctatcctgaccggagcctttctgccctttttcctgaagggaaaattcgacaagtcaattatcaatttccctcacttgatcgaacgcttcgaattgctgacaatcattaccttcggtgaggcggtggtgggcataacccatttctttaacgtaaacaacttcgattttgtgccaatccttgtattcctgatcgtcataggcatgtttggaagctatgtgcttcagatccactacctagtcgaccaccatagggaggagagaagcctaaggctgatgttcagccattacttcatcgtgatcagcattaatctggttactgtggcctttgaactgatccacagcggggagatcaactattggataccgagcctgatggtgatcatttcactgattgtcttctacctctccatcatggccaataaggagtactactatgacggcctggagctgcggaaaaaggacatcgcactcatggttttgattagtctgataggaagtatcgctattctcctatctgttggcagcatctatgggttcttaattggggcactgatcatcacacttgccaacttcggagtgctgctgaataaataccagaagttcaatgataactga

SEQ ID NO: 4153 - DNA, 351 bp, synthetic construct
  source 1..351: mol_type = other DNA
atgttattcatttactacccgcgatgctccacctgccagaaggcaaagaaatggctcgatgaaaatggattcgactacgatgagcagcacatcgtcgacgacaacccagactacgaacagctgaaggccctgtatgaaaaaagcggtttgcctctgaagaggttctttaacaccagcgggaaaatctatcgggagatgcagctgaaagacaagctcgctgacatggatgaagaggaacaactaaacctgcttgccactaatggcatgcttgtgaaacgccccataatcgagacagaggatacatgtctcacgggctttagacagaaggagtgggaggagaagctgaagtga

SEQ ID NO: 4154 - DNA, 831 bp, synthetic construct
  source 1..831: mol_type = other DNA
atggattacatcaggcagaccgaagttatacagtggaatgacggagcttaccagaccatcaatgaggaaagtgtcgaagacgaatacacctacctgtttatcgactacttgcctccacgtaagtttagcacatatccaaaggatcttgaggacttcgcggtgggctactgccttggtgagggcctgatcaaagattactcagacatcaaatccatccagctggacggcaccaacatcttagtgaccacgactctctctcacgaccccgaggaggacctggagcaggaagggatagtgcaggagaaaaaaggcaactgcgaacacgcctgtgtctgtcgactattggaatatcagggggtcaactccgataatgctggaggcattaggtctgagctgaaaacaatcgagccaaacaccagcgacctgaagattgacgccagccaaatcatcaaggatatagagcatctcactgacgaggccaagatttggcaacgcacggccggagtacacgtggcccaactcaagtacgaggataagatcattattcgggaagacgtaagtcggcatgtggccgtggataaggtgatcggggctgcatccagagaagggtatgacttctccaaatgctatatttcgtatagcgggagaatgccggcagacatgctgattaaggtcatcagggtgggcatccccataatcctgagcaatgcggcacctgcagcctcaggtattgatgtggcccagaccggaaacataacaatgatcggcttcattcgcgataagcggttcactgtttttacagcgcccgagcgcgtcaacctcgatgcttga

SEQ ID NO: 4155 - DNA, 1206 bp, synthetic construct
  source 1..1206: mol_type = other DNA
atgaaatacaattttgaaagcatcatcgatagaaaaaacaccaattcactcaagtgggacctttttggggacgagtacccaatgtgggttgctgatatggacttttatgcggctcctttgatttacgagtccgtgaaccgcaaggccaatcatggcgtgtatgcctactcatttgtgaacgaggacgtctacgactcgtatattaattggtggaagaaatacgggctggacatgaaaaaagaggaattgctgtttgccacgggcgtcatgccctcaataacaagcatcatccgggccttcacagagattggagataacgtgctgattcagactccagtttaccacgtcttcttttacgtcatcctcgataatggcaggaacgtggtggagaatcagttgatttataatccagactctgacgacgtggaaaccgcatatgtgatcgactttgacgatttggagaaaatattcaaggaccctaagacaaagctgatgctactgtgtaatcctcacaaccccgtagggaagatctggaaaaaggacgatctggaacggatcgctgtgctggccaagaaatatgatgttatcgtagttagtgatgagatccattgcgatctgacagatcccgacatgacttacattccgttcgcgagtcttgatgacgacctgtccaagaacagcataacgtgcatttccccaagcaagaccttcaatatagcaggtcttcagagctccgctgtgttcactcaaaacaagggtttttatgaggtgctgaaaggccagctcgcaaccgacttcttcagccaccccaacatattcagcatcgatgccaccatcgcctcatacaagagcgaagattggctgaacgagctcagagaggtcctgttcaacaataaaatgatcgtgaaagaatttctcgaggagaatatccccgaaatcaggctggtgcccgccaacgccacctacctcctctggctggactgcagtaaacttaacaagaacgaggacattgaaagctccaactacgaattttcgaagaccttatctgagttcctgcgcgaagaggtcgggctgttcctatccccgggagtacaattcggccagaacggagacaatttcctacgaatgaacattgcatgtcctaaggatctcctcattgaaggcctgaacgctttaaaggagggaatcgacaagttcaagagttga

SEQ ID NO: 4156 - DNA, 519 bp, synthetic construct
  source 1..519: mol_type = other DNA
atggctgacttcgaagagatcatcaaaattaggcgctccataagagagtacgaggataaggaggtggaagatgaaaagattgaaaagatcttacgagccgggatgcaggcgcccggtagccggttgggtgcagagccctgggagtttcttatcataaaaaataaggaggtactgacaaaaatcggggaaatcaaacctagggtgaccaatgctccagtggccatcctgctgattgccaacatcgagcgggccttctacaagaccgtctggcaacaggacatgagtgccgcagctgagaacatgctgctggaagcggtcaacctcggcctgggaggcctttggaacggagtggcccctgatgaggagagaatgggcaagattgccgacatcgttggactcccaaaagacgataatctaaagcccttctgcattataacgctcgggtatccggcagaaggctgggagaacaagtttatggacaagttcgacgaaagccgcattcactatgagacttactga

SEQ ID NO: 4157 - DNA, 573 bp, synthetic construct
  source 1..573: mol_type = other DNA
ctcaacaagcctgtcttctacgatgctgactgcttggagtgcttcctcttcgtggacgccacatacattcttgaagagctatttagcaagataattatcccagagcaagtgtacaacgagatcatggaggaaaacacgccctcactggtaaaacgcaattttaaaaaactcaaggagggctttgtcgagattcaggaaatgccatttgggtcttcccagtacctggcttacaagtccatcgaaaagggattctggagtaaggcagggcagatctgtgggagtggtgaatcagcggcgatggctctggcccacctgaataacggaatcatcgcctccaacaatctgagtgacgtggaggaatatattgagagcttggacataggcctcattaccagctctatgattttaactaaggccctggaaatggagatcatctcggaggataccgcatccagcctgtaccttgccatgatagagaggggcatcaagctgccgcaggacagcttctgggagtatttcgataaactctatgaaatcgactgcaaacggttcctgaagaacgattttccctga

SEQ ID NO: 4158 - DNA, 723 bp, synthetic construct
  source 1..723: mol_type = other DNA
atgaacagcacagtgttagccgaaatcctgaggcacgaatggggcattgaaagcttcgcttcagtcaacattcgctctctggtctacaataacataagaaatctgactgtgctctggtttccaatgaaagccaacatctccggctgttgctcaaagacgaatgaggacaaggtaatattcatcaacaccaaccatagcatcggacggcagaatttcacattggcccacgaactgtaccacctgctctatgaggacatcgatgatttcatcgtgtgcggcatcaatatgaacacgccgagcgaaaggaacgcagacgaatttgctagtacattgctgatccccgacagtgccctctattggtttagaaataagaaccagattgacgactggtcggtggaggatctcatcaagtgcgagcagtactaccaggtcagccgttccaccatgcttaaccgcctaaaaagcctgaactggattagtcaagaccaatacgatgaatttggacttaatgttgtggcggaggttaatcggttgggctatgagaccgggctctacaagccttccccccaggaccagaaatactccagcattggagagctagtgcgactgactgagaaggcatatggtaagaaaaagataaccggggggaaacgcaaggagatcctgctgaaatgtttccggaatgatattctgtatgataacgaggtgaacaagcttgagtga

SEQ ID NO: 4159 - DNA, 327 bp, synthetic construct
  source 1..327: mol_type = other DNA
atgattgatgtagtcgcgaagaatctcaaggacctgaggaagaaaaacggttacacccaggagcaggttagcgattatcttggcatcacgcaaagcaatctgtccaaaatcgaaaacggagagcggaacttcaacatgacattgctggacaaattgtgtctgctgtacaactgctcccccgagtatctcattggggaaacagacctatacgagaagtcaaccatagcctttagaagcgatgaaaaggtggatcttaatgtggtggcaaaaatgaacgagatcactggcttcctcaagctgctgcgcagtttagacggggtcgactga

SEQ ID NO: 4160 - DNA, 822 bp, synthetic construct
  source 1..822: mol_type = other DNA
atgaaacggtcaatcatattcttaaccattatactttccctgttcctcgtcattggctacgccagcgccgggctttttgatttttcaagtgatgacgctggctccggggaaaatacggatgatgtgtttgtggtaggattcaacagccaattcccacccttcggctataaggaaaatggggagtacacaggattcgacattgagctggccaaagaggtggcccgacgcaacaactggaccttcaagcccgtgccaatcatcgattggaacacgaaacgcttcgagttggacagcaacgaggtggactgcatctggagtgaatttaccattgacggcagagaggacgactatacctggagccagccttacttcaacaacacaaagctggtcatcgtcagaggggattcggatatcaacgacctggacgatctcaagggcaagaccctggaggtgcaacagggtagctccattctaaacacaatcgaaaagaatgagactctgaagaggaaatttgccaagattgagcaggtggacggctatgacacggcattcatggacttggaatctggagtctgtgatgtgatcatcatagacagtggtctgggacggtacctggttagcgaaaagcacaatgacactaagatactcaatcagaccatttccaatgagaaatatggtgttgcatttgaaaaaggaaacactgaactcagggataaggtacagaagacactggatgagatgtacgcggacggcaccgtggagaaaatcgctcagaagtactctaaatacggcatccccgacggggtcatctatccggagtga

SEQ ID NO: 4161 - DNA, 444 bp, synthetic construct
  source 1..444: mol_type = other DNA
atgtttataatcttcccactctttagcgctaacctcattagtatcattattggaatcagcgtgctgattttcggcataggattggcatactcctcattcattacacacgagatctccggggccctgtcttcggtgatgggcatcttcgggattgtgatgataatctttggtctgtgcttcatctttgcaatcaatgccatttccttcctcgtgggactccagttctacatcgtggcctttatgctgattatgatcgcggtagtcggattcctgagtgacagcaatgtggcccggaccggcgccctgctgtacctcgtcctagggatcgttatcttgcttattgcgatgtttgccgctgaaaaccccatccttattacgatcatcttaggtgtcattctgatagcacaggggataatgggcctgatctatggcaacgagatctga

SEQ ID NO: 4162 - DNA, 1278 bp, synthetic construct
  source 1..1278: mol_type = other DNA
ctcctggatataaaactatttcgagaaaatcctgatctcatatttgactctgagaagaaaagattccggagcactgaaaatgccgagaaagtgattgaatacgacaccttatggcgcgagggggagagccggttgaactcgctgcgagccgagaagaacaaattgtcaaaatcattcaaacaggctaaaaaggacggcaacattgaagaggtaattgcccaatccaaggccgtcgctgaagagatcaaggaactaggtcccaagattgaagagtataagcaactccgtgaagattacaggtacaaggtgggcaacatcattgacgaggatgtgcccgtcagtgacacagaagatgacaaccttatagtgcggaccgtgggcgagttgccagactttgattttgagcccctgaatcacgtcgatctgatcgaaaagattgacggggctgacatcgaaactgcggccagcattgcgggggccaggttctactacctcaaacgcgacatcttgcatctgaacctcgctctgatccagttcgccctgaacgagcttgaggagcggggctacattcccctgcagactcccttctttgtcaaaggggaagtggcggctgagacatccgagctgggcgagttcgaggaaaccctgtacaaggtggagaatgaagacctgtacctaatcgcaacagctgagcagacactggcggcactccacagggatgaaatcatcaaccctgaggatttgccaatgagatactgcgccctgtcaacctgctttcgaaaggaggctggaagccatggtaaggacacgctgggaatcttcagggttcaccagtttgaaaagattgaacagttcatcttctccactccagaggaaagcaaaaacgagcatcaccgcttactggaggtgacggaggacatctataagaaacttggacttccgtatcaaatcgtggccatagtgtccagtgcactcaatgacaatgctgccatcaagtacgacctggaggcctggttcccgggtagcaagacctatcgcgaactggtctcctgcaccaattgtggcgactatcaggcacggaagaccaagacccgctatgggagggcaggatctggagatgcccagacactccacacccttaacagtacggccatcgcaacggaaagaactatgtgctgtatactggagaactatcagcaggatgatggcagcgtcaaggttccagaggttctcgtgccttacatggggggcaaaacagtaatcgaggccagaaagtga

SEQ ID NO: 4163 - DNA, 582 bp, synthetic construct
  source 1..582: mol_type = other DNA
atgatcgtggtaactacgccaatgtgcaagcagatagtggaatgggctggactcaaggaatttaaagttaacaagttcccggatgaggaggaaggcgacctggccattctgctgtctgagagcaaggtcaaaatgaactctttaaccctcaaactgaataccttcagccagattagagaaagcattctcaaagtgtccaactattgttttgaacacgatctgacagatcatctcctgagtgacgatgacatcgacgatatctttagcagttacgacttgaagtacgcaaatcttggcgatgacgactttgacaaaatcagggaatcaaactctaataagaaagtgaaggtctactccgagttcctaaaggacatcgtgttggatatcggggccctggtggttgatgaggactactcatatgtcgtgtatcccgactacctgaaggacatcgtggataagaacgaggacttcaccgacagctccattgtcttcatcgagatgcccagtcacggtaaggtatcgaaaaaccctcttgagcggacagaggagcgctacagcattctgataaattccctcatatga

SEQ ID NO: 4164 - DNA, 783 bp, synthetic construct
  source 1..783: mol_type = other DNA
atgcagatcatcaaaaccagcgaaacagaggccgaaaaagtgatcataaacctgagccaggaaaaaagccacagcaaagacgtttcaattatggtagatgctctccgggcaagtacgaccgtgactatagctctggactacttcaaggaagtgattcccgcattcactccagaggaggctcgcgagctgtccctcaagcacaacgcggtcctggccggtgagcgaaagggcgtgaaacttgagggctttgatattggcaactcgccgggtgagattaaggagtttgagaccaacaagaagtccatggtgcttacaacaagcaatggaatcatgaccatggaaaatatgcagaaccccaaacatgtcctagtgggggggttcattaatgccaaatccgtggccaaggcggctgtagagctggccgaggaggagatcgagattgtcatgggcgggtacaaccacgaatttgccattgaagacttcctggcagccggagagatcctcttctatatagaaaaggagctaaaggagaggaacatgactcctaaagaaaacgatggatcaaattacgaattgaaggacagggagggctttagtgaatatgccatcagcgcgatccttgcaagcagaaatctggagttaaccaatgaacaagttttgaagtccaagtctgggaagcgcctcagttatctgaactactctgatgacgtcgagctgtgcatgaagcggaacatcacggaaaatgtgggcatcctgaaagacggaaagatcgtgctctactga

SEQ ID NO: 4165 - DNA, 1167 bp, synthetic construct
  source 1..1167: mol_type = other DNA
atgcgcagggaatgcttaaaaatcataggaactgcacacgtgtcgcaaaatagtgtggaagaggtgaaagaagctattctggaagacaaaccagaggttgtcgctattgagctggatagaggacgatacatcagactgatgaacgaacgcaatggcattgtagaggacgaccagatccacattaccaaaatcatcaaggagaacaaagtcggggtgttcctggtgacaaccatcctgtcctatatgcagaacaaaattggggatgacctcgacatcaagcccggctctgaaatgatcggcgccattgatgccgctgaggagacgggttcccggatcgccctgatcgaccgggacataaacatcaccctgcagagggtgctaaaccacatgagcacatgggaaaagctaaaattcatttatggcatcatcggtggcctgctcagctccgatgatgaggaactggatgtagaggccttgaaggagcagtcggcaatcgatgaggccatgggttacttcaaggaaatatctccaggagcctatgaggccctcgtaaatgagagggatgcctaccttgcgaacagcattctgcacatccccgaggaccatgtcattgcggttgtcggtgccgggcacaaggagggcatcaaccgttaccttgataacccagaaacaataccgcctcatagcgagctgattgacatggacaagaaaggcggcatcccgtggctgaagataatcctggcattgattcctatctcatttgtggtgatattttttctggcttggatgaatggcatccatattgagggagacatcgtgcaattcattgtcataagcatgattatggggttcctgggcagtattctcagtgggtcaaagctagcctccgcaatcatcgggggattagttgctcctctcactatcatccaccccctcctcgcggccggctggttttcaggacttgctgaagcaaagttccgcaaggtgagaaagcaggacattaataatatagggaagatcgagagctttcgggacctgtggaacaacaacattttccgaatccttctcgtcgtggttggaacgaatctgggagtgagcttggcaacccttgtgattttgccctcccaggtcttcatccccctctttatgaaaatcttcgggggctga

SEQ ID NO: 4166 - DNA, 276 bp, synthetic construct
  source 1..276: mol_type = other DNA
atgtatgtcattttccggtgcgactgcgggcgggtgctgtacgcaaagcaaggggtgaagaccaggaaatgcacctgtggcaaaacgatcaaagtgaaaagccgccgcatcctccagaaggtagaaacagccaacgacgccagcctagccgtccagaagatgcaggaggaaatctacggcggaacagcattcaagactgctgacgagtacaaggcgaataaattcataaaccagctggatagacgaatgaaggagtatgaggatggtgacttttga

SEQ ID NO: 4167 - DNA, 1347 bp, synthetic construct
  source 1..1347: mol_type = other DNA
atggagatggactcgatcatcataattagtgagattctcatcatcatcattctgatcgtgctgaacggcctgttctccctggccgaaatcgcagttgtctctgcccgacgcatccggatgcaaaagattgccgatgatggagataaaagagcgctgctcgtcttagactctatggaccacaccagtgagtttctcagcacggtccaagtgggcataacctttacagccatcatcaccggggcactagggggcacgactttctcagagcccctgggaaactacctgagccagttcataccgtacagctatcagataagcttcattatcgttatccttctcacgtcctactttacaatattggtaggggagatcgtacctaaaagaatggcattgaatgaccctgagggatatgcattgagcactgccaagttcatgcagataagctccatcatttgcaagcctattgtcaagctcctggactcctcaacaaatctggccctgcggattgtgggcccatcacccaaagaggatgtcgttactgaggaggaggtcaagctccttatcgaagagggcattgaagacggaacaatcgccgaagaggaggaggacatcatcaaaagggtattccgacttgatgaccagaaggtggatatgattatgaccccccggaacgagatcatctggctagacctcgaagatgagattgaaattaacaaggctaaaatcattgccagtaagaggtctattttcccagtggctgatgcggaattggatgacttcatcggggtggtgcaggctaaagacctactcagtaaaatatttgagggcgaagatgtggacattagggctaatgtcaaatctccattagtggttcccgagaatatgctgtccatggacttgctgaaggaatttaaggaaaacagagagtatgtccatatggtgctggtcgtggatgagtttggtagcgtggtgggtctcatcacactgaacgacctgcttgaaggtattgtgggagacattccagggatcgatgaagaggacgatcccaaagcggtggagcgcaaggaccacacttggctcattgacggccgcttctcgatagaagactttaaagacctgtttgaaatcgagaaggagatgcctaatgaggtggaggacggctacacaaccattgccggcttcatcctttcacatgctgggaagatcccggagaccggtgaaatcttccacgaggacaagttcacctttgaaatcgttgacatggatggaaaccacatcgataagatcctggtgaccataaacgaagaggattccgataaactggacctggaaagcaaggaagactga

SEQ ID NO: 4168 - DNA, 942 bp, synthetic construct
  source 1..942: mol_type = other DNA
atggaactaatcattcaaataatcctgctgattatcggatttgtgctgctcattaaaggcgccgatgtctttgtcgacggggcaagtaatgtggcatacaacctaaagatcccaaccataatcgtgggactcaccatcgtcgcgttcggcacatctgctcccgaagcggctgtgtcaattacctcggcatttgccggcacaaacgcgatttccctgggcaacgttgtagggagtaacatcttcaacatcctggccgtggttggtgtctctgccctgctcggcacattgacggtggataaggtcttgataaagagggatttcccattcctggtggtatccagtatcggcctcctgctaattgccaccatattcggagagatcagccgcctctgcgggataatcttcctgattatcatcattgcttatgtctacgtccttgtgcaggaggcaagacaggacaaggaggccatgtctgaagagatcgaggttaagctttcaatacccaaagcggcaatctacatcgtcatcggtatcgccggcatcataatcggttccgacctggttgtggactccagcagctatatcgctagcgtgttcgggctgtccgacgtgttgattgggcttaccattgtggctatcggaacttcactccccgagctggtaacttcgatcactgccctgaagaagggcgacaacgggattgtgattggcaatgtgctgggaagcagcattttcaacatccttttcattttaggtatcagcggagctataatgcctctccctatcgctccggaaatggtatgggacattctgttaatgacagtgatcacgatcattggcgcagcctttgcctacaccaaaaatgaggtggataaaaaagaaggggccgttctggtggccctgtttattctctatatggcctttgtcattttgcggaattga

SEQ ID NO: 4169 - DNA, 504 bp, synthetic construct
  source 1..504: mol_type = other DNA
atggattcaaagaaactgattctcgtgactgcattggctttcctggccatcgtttccattgcgtcggtaagcgcctgggacctgtttggcacagcggacgagacgagttccacagccaagacgaccatcgccgggcacgatttcaatataccagacggatatcagaaaaacgagagctatgtgctggacaacgaaacaaccaactccaacggggctatcttctattcaaccgcagagagctactacaagggtgccgacgacattatctacatccaggtggcagactacagttacccggggtatgaagctaacctaaccactgcccaacttctcaagtctggcctgggagataaagagaccatcaatggtcacgaaggactgattgccgagaatgaatttgacggcttaaaggtccatgcattcttctacgctgaggacggcgattgcataacagtcatcactagcgatgataacctctttgaacagattatccccgaggcctga

SEQ ID NO: 4170 - DNA, 1356 bp, synthetic construct
  source 1..1356: mol_type = other DNA
atgaatgtgaataagaaaatctttctgcttgtaatcttcatcatatctatttcaatcgctggcgtatactgcgccgacatccatcaggatagcgacctgaccgccattttaagcaacgaaaccgatagtggtctgaccgccatcatgagcaatgagaccgatagcttcggctgctgttcaattgtcctccaactggatggaaatgagtccatcatgtgctaccggcgtgactccaactatacagcggacgtgtttattgaaaaggtcaattggcatgggaagcctgccatcaagcagtataagactgacaacaaatacttcaaccacgtcatcatcacaaacgacggctggatcatcggacttggtgggattgacgatgggatcgacagtgagatctgcgagaacatcacggcaaagatgattaccaaggactacagcatctcagaggattatctcacgcagatccaggagattaagaagaagtacggacgcggtcacgtggtgattaaggcgcctaacgggaattacggctttgctacacctaccaagctcaagaccgggacactgaacgttggcgagtacatctccatcccaaataactatgagctgtcccggcgcggatacgtcagcctggatgagcccgataagatagaggctatgataaatctatctaggacggacctgtacggagacgaccgacgtgaaataattacttatgacgtgcacttaaatggcaacaacaataccaccgacatttacatctccaacgaagatggaagcctgattgggaaagactatacgggctgtgtggacaacgtgatcttcaataacgtgacaatagaaggcaaagacattcccatagctcccaactacaaaagcctcggttcaatgtcgtttgaggtggacaaagtcaatctgagcctcacagatctggcattcatcgttgtaggcgtggttttggttattgcactcctgttcgtcctgttgctaaggctcatccgcttcattaaaacaaggcggtccagaagaagcgccccgagaagaacccggcgcgaaactccccgcagctcccgcggcagcgccccaagtcgaactcggcgggagagtcccagtcgtacgcggcgtgaaactcccaggccaaatcttagaaacgccagacggcgagataccgaggaagataggcggcgcaatgaccttagacggaacgtgttgcaaaacatagtggaagataaacgcagatcggagcctagaaggaacgtgcgccggaacacaaggaacaaccgaggaagacgccgagggcagaatcgaggcaggcagcagactaagaggccgccaaccctgtataggaaagagtga

SEQ ID NO: 4171 - DNA, 858 bp, synthetic construct
  source 1..858: mol_type = other DNA
atgagcatcaacaaggaagagtttaacgaaaagatcttcagtagaatcaataatctaatagacgattatcaactgatcaaagagggtgagaagatagccatcgccctgtccggcggtaaagactccgtgttaacgcttcacgcacttaaaaattataaggatagcgcggactttgacttcgagctggtggcaatcctcgtcgacgagggaatagacggctatcgccagcacggcatcgatgctgcagtaaataacgcccagcttctcgagatccccctaatccagaagtccttcaaagaagaggagggcttcgctttggatgatatctactcctacttcaagagcgcttgcattccatgcggggtgttcaggcgcaacatcctgaacaaaaccgcttacgaaatcggggccgacaagattgccacaggacataacctggatgacgagattcagagctttctcatgagctttagcaggggagacactgtgaagttctctaaattcgggccggagctcgatcagattcacgaaaaactggttcccagaattaagccattgtggaacacacctgagaaagaagtcgggatgtgggcgattctgaatggggtggagatccatctggacgaatgtccttactcgaacctgtctttgcgggccaaaattaaggaatttctcaacaagaccgagtcaaagcaccccggcaccaaggagaatgtgctcaactcatttataaagaccctggacgtggagaatgtccggactgttctgagtgagtgtgaacggtgcggagagccaacaagcggccgagtctgcaaagcctgtgaaatcaaggacattattagtgaaaaccgtgattga

SEQ ID NO: 4172 - DNA, 276 bp, synthetic construct
  source 1..276: mol_type = other DNA
atgggtattgaagagagcggcgtcggggagtacgttagtaaggcagtccagataatcgaagagagcgggctgaactaccaaatcaccgctatgggaacccagattgagacagacaatctcaataagctgtacgaagtgtgcgccaacgtgcaggaagccatcttcgaaatgggcgtgccccgagtgtatactgtactaaaaatcgacgacagacgggataaggagaacaggacgctgaaagagaaggtcaaatccgtggaggatcgcataaagtga

SEQ ID NO: 4173 - DNA, 474 bp, synthetic construct
  source 1..474: mol_type = other DNA
atggcccctgtggtggagcaacccgtcgaggaatgggacaaagacatagcgatcgacctgacaggggtgttctactgctgcaaagctttcggagaatatatggtcaaacaggagtacggtaagatcatcaatatgggttcaatccacagccgggtcgcactgaccggaggcctcatcaccggctatacctctgcaaagggaggagtgtacaaccttaccaagacactggcagccgaatgggccccctataacattactgtaaatgctatcggcccggcctactttgagtccgagctaacagccgatgttgtgggcgatgagcagttcgacatgttgattaaggccttttgcccaatgggcaggtgggggaaggaaggcgagctggatgggattgccatctacctggctagtgacgcgtccagcttctgtacggggcagctcattaacatcgatggcgggtggactgctatatga

SEQ ID NO: 4174 - DNA, 1104 bp, synthetic construct
  source 1..1104: mol_type = other DNA
atggctgatatcaaagtgagcatagccagccccatcattgaagaagaagagatcaacgccgtggtcgaggtcatgaagtcgggaatgattgcccaaggtccaaaggtaattgagttcgaaaaggagtttgccgactttgtcggtgcaaaatacgggattgcaactaattccggcacttctgccctgcacgtggcgctcctggctgccggaattggcaaaggggacgaggtcatcaccactcccttcacattcgccgctaccgggaactccatcttatacactggcgcgcggccggtgttcgttgacatcaacgaggacaccttcaccattgacccctgtaaaatagaagaggccatcaccgataagaccaaggctatcatgcctgttcagctctacggtcaagccgcggacatggaccctataatgaaaatcgcaaaggagcacgatttgatcgtgatcgaggatgctgctcaggcacatggggcggagtataagggcaagaaggtgggcaacctaggtgacatggcctgctttagtttctatcccacgaaaaacatgacgacaagcgaagggggcatgatcaccaccaacaatgaggagtttgccgaaaacgctcgaatctatagggcccacgggtcagctaccaaataccatcatgacgtactgggatacaacttccggatgacggacattggggccgctatcggcatcgagcagctgaagaagatagacggcttcaatgacaagagaatagagaatgcaaaatacttgaatgaaggactcgccgattgcgatctggtggaaacgcctgtggtagaggatggatataagcacgtctaccaccagtacacagtgaaggtcaaagacggcaagcgcgatgcccttagtgactatctgattgaaaacggcattggcaacggaatttactacccaatcccactgtacgaccaggttctgtatacagatatgggatataatcagagcctcgaggttactgataagacagtgaaggaggtgctgtcacttccgattcacgcaaagcttacaaaatttgacctggatctcatcatcgaaaaggtgaaaaaggcatccaaagagctatga

SEQ ID NO: 4175 - DNA, 1218 bp, synthetic construct
  source 1..1218: mol_type = other DNA
atggaagagtataaagacaatttcccccaggaggagctgaaaacctacacggaggatgagctcaagatcatagaggaaggtaaagtcaagataaaattcccagactttgataaggtctccagcgatgctcccgtcttctataatccaaagatggaatttaaccgagacaattccatactcgccctgcaagcctatcagaaggaagtggaccgtgagataaacatctgcgacctttttggcggcagcggcattaggggcatcaggtataagaaggaaatagaaggagtgggcgaagtatctgtgaacgacatcagccctctggctaacgagtttactcgcatcaatgcagagctcaacgatgttgaggttaacatcgaccagaaggaggcgaacatcgagcttcgcaccaacatgggactcttcgatgtgattgacatcgacccattcggaactccttcccccttcgtggactcagcagcgtacaatctgaaaagggatagcctgctctgtttgacggctacagacacatcgtgcctatctgggacttacccagagccctgcattcggaaatacaacgcaaagccctacaaaagcgagtactatcatgaaaacggcattcggatcattatcggatttgccgccttgaccctggcaaagtatcagaagcatattgaggtaaagatgtcccactctacagagcactacatgagagtctacctgaagatcattaaaggttcaaaggccacggacaaatccttaaaaaacattgggtacatcagccactgcaaaaactgtctatacagaacagagtcccatgggcttgcaacaagtgtgcccgacatctgtcctgaatgcggtgaaaagctggttactgccgggcctctttggctcggaccaattcagaataaggagttcattgagtcaatgattgagatcgcggatgagaaggaactcaataccaaaaagaaagtgctgaagttgctgaatagttgcaagatggaagccgatgctccggccaccttctatgacatccacaagatctgtcgctcgctgaaaatcagtgcccctaagctggatctggtgtttgacaagctgaaggaaaacggcttctacgctgtcaagacccactacagcccgttggggatcaaaaccgatgccagcagtcgggaactgatagaaatcgtgaaggagttagctgaggaagtggagaataaatga

SEQ ID NO: 4176 - DNA, 480 bp, synthetic construct
  source 1..480: mol_type = other DNA
atgtgtgcgaaagttaacgaagatatcatccaactagatgaaactgacatcagcatactgaaaatcataaatgatgacgtgagaatctcataccggcagatctcccgcgatctcggaatcagtgtcggcacggttcacaataggattgacaaaatgctgaagaccggcgtaatcgagaaatttgcacccgtcctcaaccataagaagctgggatacgccctgacaagcatcattggtgtgaacgtcaaaggccaggaattagaacagtgggagcacgacatttccaagaacaagaatgtggtgggcctgtatgacgtgaccgggcagtacgatgccatagtgattgccaagttcaaggacacggatgagctggacaccttcctcaaggagttgctgaaaacagggtgcattgagaagaccatcacacagactgtacttaacattgtgaaggaggacgtcgggtctgctgacatcctttga

SEQ ID NO: 4177 - DNA, 942 bp, synthetic construct
  source 1..942: mol_type = other DNA
atggttgtgtgtctccccgacacacaggatgatgcaccccgcatacctatccatttgagtagagtcggagtgaccggggtgaagaagctgctcacgctgaagaggaaggaaaaacgcccaatcatactacttcctacttttgacgcttttgtagatttgcccagcgatcagaaaggtacccatatgagtcgaaccccggaagccatcagtgaggtggtcgaagaggttgcccagagctcccaaaaaggcgtggagtccctttgcgccgacatcgtcacacggatgctggagaagcacgaatacgcgaagcgtgttgaagtgagcatggtcagcgactacatgttcatgaaggactcccccgtaacggacaacaggtcccaggagatgggcaaactcatagctaacgctgtcggcatccgggaggacgacgacacaatcagcatccggaagagcattggtgcggaagtcattggaatgaccgtatgcccatgtgcacaggaatctgttagggaggtggacaagaacaacttactaaaattcctggatgaagagacctgccaaaaggtgttggacactgtcacgttcgcctctcacaaccagcgaggagtgggcaccattctcatcgaggtgccagaggatgagtatgtcgatggggaaaagctcattgagatcatcgaatcatcgatgagctcgcctatttcagagctgctgaaacggcccgatgagaatgccgtggtgatgaatgcccacaagaacccggtgtttgttgaggattgcgtgagaacaatgaatgagaaaatcgtgaaagagttctcacatctgccagacgacactcttattaccacaagacaggaaaatcaggagagtattcaccgccacaatgccttcgcagagaaagtgtccactctggggtccctgaaggaggaactgaacatcaactga

SEQ ID NO: 4178 - DNA, 282 bp, synthetic construct
  source 1..282: mol_type = other DNA
atgattttcatggaaaacttcgaaaatcagaagttctgtcagagctgtgccatgcccatgacggaggaactctacggcaccaacgcagacgggagcaaaaacgatgagtactgcatctattgctttaaggacggagaatttacaagtgacatgaccatggaagagatgatgaacttctgcatcgagaagatggtggaggtccacccagagatggacaaggaggaggcctccaaaatgatgaatgaggtgtttccgatgctgaaacggtgggctaaggattga

SEQ ID NO: 4179 - DNA, 1185 bp, synthetic construct
  source 1..1185: mol_type = other DNA
atgaacgtcttagtttgcagcatgagcgctatggctgagacagcaggtccctacgggagggcaagagctcttgtggaggctctcaaggcatccggtattgacgtagccacttgcatggcggaagacattaattacaagcccatcgacgggataaaaaactattacttgaatgtgcctatgcctctaggactacctaagccaattgccacgaggacctttccgattgcccagaaactgggcatcattgagaggaagaacgtaggcagcttcgaggatgttctccattttaccggaaacatcgactataagtatctgtgtgagagtgtggcgaacatacgtaaggccatcaacgacttcaaccccgacataatttactctgaatttaatatcagcgccatattggcctccaaacttgaaaacaagcggctgtatgccactatcagctatcccacacaaaccgagtatgctagtaaccccaagtacgccaaaggactgaagaagtttctgagagaaaacaatctgcccgatgtcaattcctcactggatctcttcaattgggcggacaagtcattcgtgccaagcatttacgaattggagccaatcgacaaggacaatgtgactttctgtggcacctggaagaaccttaacgagggctctgtcttcaaggaaaacgacgagaacatggactcgacagatgagcgcaacgccatcctggtctacatgggcagtgggaccatcagcccaaacaagatgttcaaagaaatcaaagatgcattcatcggaacagagtaccaggtgtacattgcatccctcggtctggagaagagcgatttcgataacatccacatcgataagcgctgggacttctccaagctgttaaatgaatctgtgctctttatcaatcacggcgggcagaacagtgtggtggatggattcatctacggggttcctcagctcatttgcccgggccgggtctttgaacggatctataatggaaaatcagtggagaaggtcgatgccgggaaaatactggagattacggactttaaaggggagattatcaaatctgagagtgaaaaaatcattaaggatgactcgtttcgaaataattccaaatcaatcggcgacaagctgaaaagcctcaacggtatcgatctgattatagactccatcaagaaaggctga

SEQ ID NO: 4180 - DNA, 1344 bp, synthetic construct
  source 1..1344: mol_type = other DNA
atgaagatgtataaaatcaacgtttccaacattagtcgactgaggacgtatactgacggggatggtgtgtcaactctcatcgggtccatggggtgccctctgcggtgtgcgtactgcttcaatccatttagctgggacggttcccttgagcctaaaacgtatgccgtggacgaactgtatgaggaggtgaaaagagacaacatctattttctctccacgggcggaggcctcgtgtttggcggaggggagcccctgctctaccatgagtttatcaaggagtttattaagaaatacaagagtaccggttggaagttcaccctggaaacaagccttagtgtgaagaaggatatccttagggatatcatcgactacattgacttttttatagtggatacaaaggacatgaataaaaataggtacgagctgtacacaaagggagactacgaactcttcctgagcaacctgaaattcctgatcgataaagttggatctgatgggattagagtgcgggtgcccaagatccccaagctcaataccgtagacgacgtgaaaaccaattaccggaccctgaaagatatgggcttctctaacatagacgtctttaactatgtggagatcgccaagcacagaaaaatcagccgagtcgctctggagaataagaaagacttcgacgaacgcctctatgaaaacaagatcaaattcgtagaggattatatcctcagcgagattatgctgaaggttcccccgatcctggatttccacataaagaagttcccaaactcctttaacaaaaaatttgagttcttattcgagtacgactcgatatttaatgacgacctgttctttctaaaggaagtcgttatttcaaaattgcaggagtgttacgactatttggacctcaaatatggcttcttcgtcattttctaccctgtgggctacttggagaaccgcctggatgattcttgcttcgatctgagtatcatgaataacctagtcaaaagcttcgaagggctggacgagattgataaggaaaagcacgcattggagctgtgggaagagaataaatgggagtatattgaatttaagtacttctgtcacgacttgaaccacttaaagaacttttacgtgaacttcaaggatcatggctacaaactcgactcaaagtacattctgtcgaacgcctacgacgtgtgcccatccgactttgtagtccatatcaatctgcgcaagactggcaagacctacaatatagtcgaggaagattattcaacacaccttcttgtgcagaagttcgataaggatatgaacctaattagccaaagcatcttcgaaaagggaatctga

SEQ ID NO: 4181 - DNA, 270 bp, synthetic construct
  source 1..270: mol_type = other DNA
atgaaaggaaaggataagtgtgagctgctcaaaaacattcggcaaaagatcgcagatgagaataacatcgagtataccgccgtggagtgcacattccagggtgactgcaccggcacgtgccccaaatgtgaaagcgaactcgaatacctggacaaggagctggagaagaaacagaatgcgggggaaaacatcaacattaagaacatatttagcagtgacgacttcgacaagtccgagtacgggctattggatgaaaatatccttggctga

SEQ ID NO: 4182 - DNA, 426 bp, synthetic construct
  source 1..426: mol_type = other DNA
atggtagacgaaattgaccgcttcgatgggaaatacctgtttctgagcaacttctacatctgcgacgttgagtatgacggaatactctatccgcacacagaggcagcgtttcatgctcaaaaggtcttcgatgacgagacgaagatgaagttcactaatgtgacccccaagcagagcaaaaggctggggcgcaaggtgaaactccgggaagattggaatgaagtcaaggacaacattatgtacgaagtgtgtaaggccaaatttgagcagaatccagacatccggaaattgctgctcgagaccggcgatgccaccctaatcgagggaaacacttggaacgatcagtactggggtgtgtgccgtgggaagggcagaaaccagttaggcaagacactgatgagaatcagggaggagcttcgagaatga

SEQ ID NO: 4183 - DNA, 1533 bp, synthetic construct
  source 1..1533: mol_type = other DNA
atgaacgagactaaaaaacaagtatcctggatgccactgatcctcgtggcttttgcgtcattcattattgctctggacgccacgttcatgaatgttagcatctccccccttgtgattgacctgaacacagacgtggggaccatacagaccatcatcagtttttataccctgattaccgcttcattgatgctgatatcgtccaagatgcaggatgtctttggtaagaaaaagatcttcctaactggggccctggtctacggcctgggcgccttcattgcctcgatcagccagaatgcgatcatgctctttatcggctggtccctcttggaaggtattggcggggcattgatgaccccggctacaataagcatcatcagtgggacatatgacggccagatgcgtacgacggccctggcaatcagcagcgccatcgtcgggattgccgctgctatcggccccctgtttggaggtgtggtgaccaccttcctctcctggcggtacggatttgtgttcgagctgttaattattcttataatatttatcttccgcaagcgcatccctaacttcgcgtcaactgcctccaaaaaggacctggacattacgggatcactgctctcagccatcggcctgatcctgctggtcctgggagttttaatgattagcgggaagacaatcggcttgagcataggcctcatcattgcgagcatcatcgtgctgattggcttcggcctcttcgagaagagaaggaaggccaacggcaagatgcctttatttgatgtgagcctcctgaaggacaggaatttgtcccgcggcacattgattcggctgattactgccattgcaatggggggctccctgtttagcataagtatctaccttcagacggtgctcaagctctctgccttcaacaccgggattgtcctcctgcctctcacctttggaatgctgatattctcgatcatggcaccgaaattcgcgatcagactgagccacaaatacgccatgatcatcggtttctcaattgctattgtgggctgcctccttctgtcttaccagtttacactaactacccgattcatcgatctccttccagggatgttcatctatggtgccggacttggttttccaatggcactgtccgtggatacagcccttatcaacaccccccccgaaagccaaagcagtgcctccggattcgtcagtaccggccagagtctgggaatgtctatgggaactgcaatcattggaatcatcctaatcgtgggtgccgttgggggcatgcacgatgcaataaatacctacgctcccgacaaggtcacaaaccaggaatttcacgataacgtgcagggctacttcgagaaactgggaaatgttaatacaaccgagctcaagcatgagaacagcctaaaggaaaagattgtgagcaaggtcgtacaggacgctatgcggttggtaatgtatgtgactgcattgctgcttgctatcgggggggccctgactttcaccttaaaaaaacaaaaaataaaaggatga

SEQ ID NO: 4184 - DNA, 1590 bp, synthetic construct
  source 1..1590: mol_type = other DNA
atgggcaataaagaggaaaagaaagctgcgcggcaacgttttgatgagatcatcggcgtggccaaaagacaccacctggccaagctgttaaccaataacgaagatgatgaagactttgaagtgagcgacctacgatacgccatggaagagctagggcctgccttcatcaaattggggcagcttctggctacacgccccgatatggtcggcaatgatattgccgatgacctgaagctgctgcgcgacaacacgccagccactccctttgaagaaatgagaaaggtcattgagggtgagctcggaaagccactggaggaggtatactctgaatttaatgaagaacccctgggctcggcctcaatcggccaggtttacagggcgacgctgaaggagagcggcatggaggtggcagtcaaggtgcagaagcccggaatctatgacgttatcgttccggatgtcaagatcttgaataacctcgctgggactgtagacaaacatgtatccgggagcagaacctataacctccctgcaatggctaaggaatttgaacggagtatattcaaggagttggactacatggaagaggtgagaaacatcaataagataacaaataactttaaggatgtggagtacattaagatacctgaagtctatcccgagtactgcagtagcaagctcataaatatggagctcattgacggttacgaggttacagacctgttcgacaatgagattgaaggcatcaacaataccgagatcgcccaatatggaacccagtcctacctcaagcaggtcctgattgacggattcttccatgctgacccccacccagggaacctctttgtgacgaaggatgctaagctttgttacatcgactttggtatgatgggagtggtgaacgacacattccgctcaaacttcgcccagctgatattgctcctcctggatggcaactcgcaccatctgatcaatcaactgctctatatgaatatcatctccccagaacagaacactgacgagttcagggaagatgtggatgacctcctgaacagctacataggcgtggacctggatcagatggatggcatcttcgataaccttatgaatgtcatgatcaaccacaatatcatccttcctcgcgagtttatcatgatcggtcgaggcatactgctcatcgaggatgcgggaaaccggttagacccccatttcaaccttaccgccgaactggaggagtttgctaagaaaatgattaggaccaaattcgagccgggaaacctggtgggcggaggattcaactatattgtggagattgagcacttgttaaaagacctgcctgacaggcttaacagcacccttgacaaggtggagaaaggggagctggagctgaatatgaaccacacagggctcgatgacttgaaaaaccagttatccattgccctgattgtctctgcactgctggttggttcctcaattgcaattctagcagacaaagggccaaaagtgtgggacatcagtgccatcggcttcttcggttttctattcagcgcgatcctgggggcatatttggtgattaagtacattcggaaatga

SEQ ID NO: 4185 - DNA, 468 bp, synthetic construct
  source 1..468: mol_type = other DNA
atgtacaagaaactcatgatactggccctattctgcttcatcgtcattggctcagcaagtgcggccgacttcaaaatcaatgatggctttaacagctcactgtctgactacagcttctacaatgaggaccaaaacatgtacattaacatctgggattatgacgacgagattctttccgaagcctatctggaaaacagcagcagctaccggatcgtgtccggagaaaacaacacgtataactttgtgtttgactcgtataacgatatggaccacgtcatctcctacattaccaaaggatacgttgccctcgactgcggggtactggagatcgctgaggtggatggcaagaagcagatcattttggtgtctaaagaggggaccaatgtggacagtctgaagacatgttatgatgaactcatgaagttcaatcagaacaataatatagagcccatcgcagatgctatatga

SEQ ID NO: 4186 - DNA, 1938 bp, synthetic construct
  source 1..1938: mol_type = other DNA
atgcggatcaataagagtctgctgatgatctcactgctccttatctccatcctggcgataagcgcagccagtgcggccgatgacatggtagacgcagacattgacctggccagttcagaaatttcggaggtaagtgttgacgatgtgcaagctacagataaaaatgttctgtctgatgccgatgaggtgtcagtggtgacacagaatacaccttacaatgaaaatgcgaccattgatatctcagtcaacggcactctggccgatgacagcaccataaagctgttcattgacggtgaggacaaaggagacctgaatctctcagcagagggaaaagcaagttatgtgatcccagcttcgacgctcgacgtggggaaatacttcatcgaggcagtggtgcataatggcacttcctcatttggcggcaggtccaccctcaacatcactaaggtcactcccatcgtgagcgttagtgacgttacggtgaaatccggggattatataaccattccatttaatgtgactgatgacaagggtaaagcaatccctggagatgtcatcgtgacaatcgtctgggaaaatgatgtaatcagcaaacacattaagctaaacgacaattcctctgccggctttaatattgctgatatcattggaatatttggcggaaactccacaggtaacgggacaggaactgggattggggacctgttcaaccgaaacggaaccaacggaacaggcaacggaaccggcataggggacttgttcaatcgcaacggcaccaacggaacggggaacggaaccgggataggggaccttttcaaccggaacggaaccaacggaacggggaatgggacaggcatccccgggatcggcggaaacagcacaggtaatgggacgggcaatggcaccggcgacttcgatattgcctccatcctcgctatgctgatgggcggaggcaataataccggcgctaagtttgcctatgtctttgaaaagggagtctataatgttagcgttgagtacttaagcaaccgcaactacaatggcgccatcaacgacactgccaaactaaccattactccgctagaggatgttctgatcaatgccaccatcgagacggctaagaacatgtctgacaacacaacagtgtccatccttttaaccgacggttatgaaaaacccatagccggcggagaaatcaatgtgttcctgaacggggaggacaaaggcaaggtcactgccaatgaggaagggaaagcctccattgcctttagcaacttgctgaagggggactatgaactcctcctcaactataaggagaccaacaagaccttcgacttctttgtgaatgtggagaggatgggcaccgtcattgaatatgaggacatgaacaccacctctgtgaacgaaaaggtcgatggcagaatcggggagtacttccaagtcactctgaaagacaacgagggaaaggcgctggctaaccgtttcgtccagatcggtttcaacggtaaaatctacaacagaaccaccgacgataagggtcagaccaaattgcagatcaaccttttctacacgggtgattacacctttgcggtgtgctacctgggcgacgacgcctataacgcatcgttcattgtggcaaagatcaaggtaagcaaacagactccaaagattacaacaaaggatgccacatacaaagcagatgccaagaccaagaacattaaggtgacactgaagtctgctaaggacaatgctattaaagataagaagatcagtgtgacggtaaacggcaaaacctacactgctaaaacagatgagaagggggtggccactgtgaacgtgagcctctctaagaagggcacttacagctttacggctaagtacgccggtgactccggctacgcgcaggtcagcacaaaaggtatattgacccttaagtga

SEQ ID NO: 4187 - DNA, 246 bp, synthetic construct
  source 1..246: mol_type = other DNA
ttggagcttgtgatcttcaaggcagagaacaagctggaggagatcttcctgaatgcccagctcaagatgcaaaaggccaaaaatgagctaattaaaaacatggaaaaagacatcgagaaggcaattgagctcgctgcgatcgaagtcgaaacacagataatcaaggaaaacatagatattgctgtggacgccctggaggaaaccatcgaggaggaaaaagccgacctggccgaacggtttgagtga

SEQ ID NO: 4188 - DNA, 462 bp, synthetic construct
  source 1..462: mol_type = other DNA
atgtccgagatcttaccgaaaatcacaggacagatcataggccatttcaatgcattcaaaggctcaaggccagccttccacggtgagcacaccctcattgtaagaggaatcagccgggacaagattgaaatcgaagagatggagcctaagctagcagagctggaggacattctgaaggcgcgcgaagtggacgtcctgtcggatgccgggaaaaactttgtggagaaggtcgacagctacatacgagatgccgagtccattgatacagcccccgacagtggcgggctccttcggatgaaagagcagctggaaactatgggattgcacgtggagtacaagctgttcctgatgccctatgctggggcgtttgtggctatctggaaggacaaaagcggctttggtccactctacgtggaagttaccgcctctgaaagggaagagacggacaacgatatgaagtga

SEQ ID NO: 4189 - DNA, 1092 bp, synthetic construct
  source 1..1092: mol_type = other DNA
atgtctaatctttccaacattgattttgagaacctgagccgcaacgacctcatttccatcttagaatgcaaaaaggaagacattctaaagatcatggacctggctaattccaaacgggaaaacactttcgtcacctattcgaagaacgtctttatccccatcaccaagatatgtaaaaatgactgcgggtactgtgcattcaagcagagccccgatgatcctgacgccaccatattgctggaaaaggaagagattctcgccacgctgaaggaggccgagaagtacggctgcaaagaggcattgttcacaatgggagaggatgcagacgaggagccggctgtgaaaatcaagctggagaagcttggctacgagaatatgccggattacatttatgacatctgtaaaatgacagtggaggaaacagacctgctgccacacaccaacgctggtaacttctcatacgaggatatgaaaaagctgaaagaatacaatatctctatgggcatgatgctggagaacagctcagagcgattgatgaatactattgcccataagaagagtcctgggaaagatcctaagatacggctggagacgatcgaaaatgccggcaaactgaacatcgcctatacaacgggaatcctcattggaatcggtgagactaaagaagaaatcgcggattcgctactgaaaataaaggaactgtgcgacaagtacgggcacattcaagaggtgatcattcaaaactttaccgtcagtcctggcatcgaaatggagagccacgaagagcccagcctgctcgacatggtgagaaccgtggccgcggcacagttgctctttgatgaggacgttagcgtgcaggtgccacccaacctcaactatgagacaagccagatattccttctctgcgggaccgacgactgggggggagtttctccactgagtgaagactatgtaaatccctcctcaccctggccaacccttgaaaggctggagaagctcactaacgacgctggctaccagctaaaggaaaggttagccatttatgataagtacatcaacgagaaatatatcgagaagtcctacatcaattga

SEQ ID NO: 4190 - DNA, 1323 bp, synthetic construct
  source 1..1323: mol_type = other DNA
atgactaatgaagacaataaaaatatgaccatcattggagctagcagagggctcggcaaatggattgcccagcacctcaaagaggactttaatatcaccatcacatcgcgaaaccaagccgaagggcaggaagtggccaacgagctaaaggttagctacaataatgacaacattgacgccataaaggacgcaaacatcatcatcttcagcgtgcctatcgagcatatggccaccaccataaaggaagtggctccccacgcacctaaggggtcgttactgatggacgtggcatccatcaagaaagagcctgctgaagcactggaaaaatacgctccgaaagacgtggagatcctgccgtgtcatccaatgttcggtcccagggtccccaccctgaaaaggcagatagtggtattgacgccaattgaaaaccggagcaatagttggacacttgtaaaggaatatctggagaaaaaggagtgcgaaatcgtcatcacatctcctgatgagcacgacaagtacatgagcatcgtgcagggacttacccacttcagtttcataagccttgcttcaacgatcaagaagctcaacattaatgtcaagaagagcagaagcttttccagtccagtctatagcctcatgctggacatgatcagtcgtgttgtctaccagaacccctacttgtactatagcatccaaaagaacaacaaggagactgcctacgcccgcgatgcactgattaaagagagtatgcgcctcagcaaactgatagaagagggcgacgaggaagactttgtgaaggccattgccgagtcagcggagcatattgatgagatcgaggaggctctggtgcgctccgataaggcgatctccatgctgaaccagaaggccaacatcctcacaaaattaattggggaggaggtgggcctggaagatgcgttctccaaaaaggcctacataggcattgtgcggaaggtcagctcacagactgtaacaatcgagaacgagaacaatgaggagattgagctgaagatttcatctattgacataatggataaggatgagctcttccagtggaaaaagaagaacttgaagctggaatcctttgacctgaccgccaaattcccctccagcgctaacgaagactatttgcttaagatgtttaaaaggattgaaccagtgatcgatgcaaacatcatctttaaagacaaagagattgaaaaagatctgcggacgtataagttccactattccctcttcaataagcaagaaaaggattacgttgagaaatacatccagggcattggtggaatcctaatcaagtga

SEQ ID NO: 4191 - DNA, 771 bp, synthetic construct
  source 1..771: mol_type = other DNA
ctgaagtggaaaaagataggggacatcctcatcattgacgacaacttcgacctggacctaaacgacgagaagacgctgaaagatcttgcccaccgccacaaggtcaaatccatcatccggatcgaaaagatcgagggccagaagagagagcccaccatcgatatcctgtacggtgaggacacagagaccatccataaggagaacggatgcctgtttaacttggatttgagtaaagtgatgtgggctaagggaaataacaatgagcgattacggatagccaagctcgtccaaaaggatgagaccgtcctggacatgtttgcaggaatcggctacttctcaatcccaatcggggtgcacagccaggccaagcagatctattctattgaaataaacccaaatagctaccatttcctaaaaaggaatattgagctgaataaaatcaacaaaaaagcagggtatgatcggatgattcctattctcggggattgtgcaatagaagcccccaaatactccgcggacagggtccttatgggttatgtgaagacaactcatcacttcctccacccggcgatggaatgcgttaaggacggcggcataattcactaccacgagaccgttcccgataagctgattgaaactagaccttacgagagggtgaaggaaatggcctggaactgcggagaacgcgaagtggaggtgctgaacattcagcgaatcaaaagatatgctccaggcgtagagcatatcgtgctcgacgcccgcatttactga

SEQ ID NO: 4192 - DNA, 624 bp, synthetic construct
  source 1..624: mol_type = other DNA
atgagcaacaagaacacgtttgaggggactacaaccgtgggtattacctgcaaggacggtgttgtctttgcaagtgaacggagggcaagtatgggaaacctggtggcgcacaaggtggcggagaagatattcaaaatcgacaatcatattgccgccaccatcgccggcagcgtcgcagatgcccagaccctgatgaaagtcatcagtgctgaaacgagcttgtacagactgcgaaacggcaaggacataagccttgaggccgccgctgcggtcagctcgaacatcctccactcctcacccgcatatgttcagacactgatcggcggagtagacgacactggagcttcaatctacagcctcgatgctgccggggggatgattaaggataccttcattagcaccggctccgggtccacatttgcctatggggtgctagaggaccggttctacgaagatatcacggtagaggaggccacagaagtggccatacgcgcaatcaaagccgctacagaaagggataccttctccggcaacggcttcctcgtggcaaatgtgactaaggacggatttaaaatgctggagaaagaagaggtggacgctattattgagaagatcaatagctga

SEQ ID NO: 4193 - DNA, 1911 bp, synthetic construct
  source 1..1911: mol_type = other DNA
atggcctccaatgtgctggagcagattaaagaagagattacgaagaaattgccagaagaggttaagctggccaacattgaatttgaaggtccggaggtggtgatctatacgaaaaatcccgacatcattgccgacaatggggacctaattaggaacctcgccaaggacctgcgtaaacgcatcatcatacggtcagacaagtccgtgctggactcctacgaggacgccatcaagaaggtagaggagatcgtcccggaagatgctgaaatcaacgacataaagttcgatgaagtgacaaatgaaattgtcatagaggccaccaagcccggcctggtcatcggcaagtatggggtgacctccagagatatcgtccggaacactggttgggcgcccaaaatcctgaggacccctcccatgagatctgaaattatcgaccggatacgtaacaccctgctgaacaacagcaaagagcgaaaaaaattcctccaaaccctgggggcacgaatccaccaggggggaaaatatcctagcgactgggtcagactgacggccatgggtggttttaaggaggttggccggtcctgcatgctgctacagactcccaacagtagggtactgcttgactgcggcgtgaacgtggcaggccaggatgacaaaacctcattcccaatgcttggtgtgcctgagtttagcattcaggacctggatgctgtggtcctctctcacgcgcacttggaccactgcggattcatcccttacctctaccactatggatacgagggccctgtgtactgtacaagtgccacaagggacctcatgacattactccaaatggattatatagatatcgcgcacagagataacaatcctctcccattcaatgctaagcacgtgcaaaaggaagtgaagcatacaatcacactggattacggagtggttacggacatttccccagacatcaagctcacactgcataatgccggacacatcataggctcggcaatgtgccacttccacattggcgacggcgcacataaccttctatacacaggcgactttaaatacgaaaaaagccggttgcttgaacccgcaacgaccagattcccccgcgtggagagctgcatcatggagagtacctatggcggacacgaggatgtcacccccagtcgcaacaatgcagagaaggagttgatgaaaaccatctacaagaccattaagcggggcggaaaagtcctgctgccagtgtttgcggttggcagggctcaggaactgatgattgtgctcgaggagtatatgcaccatgacataattgagaccgtacccatccatcttgatggtatgatttgggaagccacggccgtgcatactgctcgcccggaatacttaagcaaggagctgcgcgatcagatcctgcatatgagccggaacccattcatgacagagagcttcaaccaggtgcagaacaatgccgaacgcaaggaaatcgtggagggcgagccttccatcatcttgtcaacttcggggatgatgactgggggaaactctgtggagtacttcaagtggctctgtgaagacaaaaagaacactcttatctttgttgggtaccaaagcgaggggtcactggggcgaaaaatccagaagggacataagcagttaccctttgaggatgaagatgggaagaccagggttttcaatgtagagatggaagtcaagaccattgagggcttcagtgggcactccaatagacgacagctgatggagtttgctaaacgcctacaccccagaccggataagatcattacctgtcacggagacccttataagactgttgacttggctagcagcattcatcggagctttaaagtggagacaaagactccagtcatactcgatgccgtcaggctgcagtga

SEQ ID NO: 4194 - DNA, 1020 bp, synthetic construct
  source 1..1020: mol_type = other DNA
atggtgacatattccgagtccggggtggacattgaccttgaggcattgaccgtgtctaagctggcctcgaagctgaaacccacactcgagtaccgaaacatcattacggacagtggccactttgccgccctcgtcgagcttggtgataaggccattgcaatgagcactgacggtgtagggagtaagatcctcgtggccaaaatgatggagaaatacgataccgtggggatcgacatgattgcaatggttgtgaacgacatcctctgcgtaggggctgagcctatagcccttgtggactacttggcagtggaggagccagatccaaaggtggctgaagagattgccgacggcctggtcaaaggcgctaccgaatccaaaatcgccataatcggaggggaaacagcctccctgcccggtatcgtcaaggatttcgatctggcggggaccgggatcggcttcgtggacaaggacaaaattatcactggtgcagacatccaagaaggcgacatcctaatcggactgcgcagtagcggtatccactctaatggcctgagcctggctaggcgggctatattcgaagatggaggattcactgtcgatgacaagatgcccaactcagacaccacaatcggggaggaactgctgaagccaacccagttatacgttaaggccatcattgacctgctaggccagggctttaatatcaaaggactggcgcatatgaccggtggcggagttaacaacctctcaagactcaaggatggcataggctttgaaatcacggattatcccgagcctcaggatattttcaagttgatttaccagcagggagtgcctttagaggaaatgtacaaggtcttcaatatgggaatagggtttacagtgatcgcaagcccggaggaggcggatgctgtcctggaagccctcaacaaaaatattgagagctatattgtcggaaaggtgatcggcgaggagaagattgttgtaaaaaccttcgaaggcacggaaataacttattga

SEQ ID NO: 4195 - DNA, 990 bp, synthetic construct
  source 1..990: mol_type = other DNA
atgaatatcagtgttaataaggagcgagagctagtcaaagaaattctaacaaagatcggcgtgaaggagaaccaagctgacgtggttaccgaagccacaatcgacagcgatctgaaaggattcacgtcacacggcctgggaagattcccacagtacatcagaggcatcaaacggggccatattcagattgatggggaatatgacatagtccaggagactgagtcaatcgcactcattgacggtaagagtctctttggccagtacatcgcccacgaagcaatgagcctcgcaattgagaaggctaaaaagacagggatcgcggccgttgggacattcaatgccaaccacttcggcataactggatactactcggatctggccattaggaatgataccatcggtatcgtgatctgcaataccgagcccggagtagcaccgcttggcggtaaaaaagccattctggggacgaaccccgtggcgataggaatcccgtccgacacgtatattgcggtagacatggccacttctgtcagcgctcggggaaaactgttggaagctcaacgcaagggggaagagattcccccaaacaccgcaatcgataaggatggaaacccaacaaccgatcctgaagctgccctggagggttccatcctgccatttggcggagtcaagggctacgcactgagccttatgattgagatcatgtctggccccctcgtgaacgctgcctttgggaccaaggtgaccgggactgccggtgactataaggaaaactgtaacaagggcgacctgttcgtggctatcgatcctagcaaatttgtgcctatcgagcagttcaaggccgacgtggaagaatttgtgaccgagatacgcgaatccggggacacattcatacccggcgacctggaggtgaagaggattgccgagaacgaggtcaaggggcttgacatcgatgagaaactctacgacaccttagagaacaatttgtga

SEQ ID NO: 4196 - DNA, 393 bp, synthetic construct
  source 1..393: mol_type = other DNA
atggtcaaaccggtaaaaattcacgacaacaacctttgggataagttcgtgaaggagaccgaatcctattgggctgttttgagtcccggcaccgtgatcgccatctttatcggggaaacagacaagaattttctgctgattgagcggaaagagggaactgtcgagtctaaattcaatataaataactcgttgaacatgatggatactggtctctttttcacaatcacggaagaggatgcctccgacctcctcgacgacagctcactgctaaccaccttcattaaggaagggaagctgggcatattctgcctggtggacgattacgcaatggcggagaagggacttgatacactgttaagcgacctgggctttgcaccaagctgtgccatctga

SEQ ID NO: 4197 - DNA, 384 bp, synthetic construct
  source 1..384: mol_type = other DNA
atggaggaaaaaatcgctctcgccgcttgcagtgggatgtcaccaaatgggctcgtggccagggtggccgtgcacgatctggcgatagacgatcatgagattctatctatttgtatgggtagcaccagcgcaaatgtggaaggattcacacgcgtgcttgataaatatcccattctggcgatcaacggatgcgaaggcaactgcgtgggcaaaatcctgaaggagaagggggttgacatcgtaggagaactgaacgtcggcgacatcctggccgaaacggagtacaaggctaacgacgccgcacggctcgacgatgagggcgagatctgtgtcaagatcgtcaaggacatcatagaggacaaaattaatgagttgtccgagtga

SEQ ID NO: 4198 - DNA, 1917 bp, synthetic construct
  source 1..1917: mol_type = other DNA
atggtgaaaaggaatatcgttcttttagatattgattatataactcatgacgagaaggctgtcatccgcctattcggcaaggttaagggaggagagtctaatgacatcatcgctatagacgactctttcgtcccctacctgtacattctgcctctggaggatatagataaatgcataaaagacataaacggtctcaaagaggaaggagaaattgaatttaccaaactggagaaggtaaacaagaaagaccttcaggtgcctaaggaatttatcaagatgaccctcaaccatccgcaggatgttccaaaatacagagacaaaatttgggacctgaactctgttaagcagctgagggagcacgacattccattctatcgccgctacctgatcgataatgccttagttcctatggcggaattggagctcgaaggcgagcttatcgactcattcgagacagtcgacagcgacgacgaatccctggaaatccttaagctaagctgcccccccaagactgcaaacactgattttcaggagtttcgaatgatgagctttgacctggaggtgcgaaaccctcacggaatgcccaatccagatcaagatgagatcattatgattgggatcgacagcaacgttggtgtgagaaaggtcatctccacaaaaggggatgaatttgatgacgatgaggagatggacttcatcgaaatcgtggagacagagaaggagatgatcgaacgcttcgtgcagacggtcaaggatgccaatatcgacatcataattggatataactcagataatttcgacttcccctacctgagggatagggcaaagcggtgggaagtggatttggatctcggtgtggacggcagcgggctcaaattcctgcgccggggctacgccaactcggcggccttcagaggcctgctccatgtggacctctatctcgtgatgagaagatacatgtcgctggatcggtataccctcgagagggtctatctggagttctttggcgaggagaagatcgatgtgccaggggagcgaatctacgagttttgggacaacggcggggatgagctgaagaatctctttaagtattccctagacgacgtggtcgccaccttaaagatagcgatggaaacattgcctctaaaccttgagctgacccggatcgtgcgacagcccttcttcgacgtcacccggatgagcacaggccagcaagccgagtggtttctggtgagaaaagcttatgaggtggacgaggtggtgccaaacaagccgaacatgacgatgaataacatccgtgaacgcggcagcaactcaggaggctatgtaaaggagccggaaattggtttgcacgagaaccttgtgcagttcgacttcaagagtctgtacccaaccctgattatttccaaaaacatcagccccgatgttctggtaactgataatatttcctacaatgccaagtttgaagactttgagacaggctacgatgaaatcgacagtgtgctggaagagactccaagtgaggacctggatgaggaggattactacgtctgtcctgaacacttctttaagttcaaaaaggagccccaagggttcattccctcagccatcgaggacgtcctgaacgaaaggttcagggtaaagaatcggatgaagcaaaccgaagacccggtcctcagaaaaagtctggacgtgcagcagcaggccttgaaacgtttggcaaataccatgtacggcgtgtatggatttctccgcttccggtggtactccttcgaatgcgctcaggctatcacggcatgggggcggcagcacattaaaaaggccatgaaggaagctgaggacttcggatttaaggccatttatgcagacaccgacgggttttacgcaaaatacgtgcctgaaatgaaaaaagaatga

SEQ ID NO: 4199 - DNA, 1086 bp, synthetic construct
  source 1..1086: mol_type = other DNA
atggtccttctgggggccatgatcgcatacggcctgacacccatcgctaataagattcaaaccaagattaaatatccctcgatttccatcttcttagccttgatccttgtggtcatcccattgatactgctgttcgcatacgtgttttatgaaatcacagtttttgcagacgtgttcttcaattcgagtgacctcgcgggcatggatatcaacaacgccctaaacgccttcgtggggaatctgccagtggagttgcagggcttcatcaaaccttatatgggttctctatccactgggctggagagcgctctctcctatgtattggcttacacagtgaagctggtgaaaggcttttccaacgtgctcattcagctctttgtcttaatctgctcaatctactacttcacccgggatggcgaccttatctgggagaacatctttgtgttcatccccaacgagcataaggctttctttgataggactttctacgagatcgcgaatgtcctgaagagcatcttctacgggcactttttgacggcagtgatcattggtgtgatgggcggtgtcggatactacctgctgggctacaagtttgccctgtttctgggaataatcaccggaatattccagctgattccgatattcggcccttggattgtgtactgggctctcgccatttacgccatattcgtcgccggagacattgtgcaggcagtcctgaccgtgctgtggggattcgttctcagcttaagtgacatgtatatacgccccgtactagccagcaactatgctgacatgcctagcctgattcttctcgttggcttcatggccggcccgtatgtgtttggaattgtcgggtttatcctgggtccactcatcctgggggtgtgttatgcggttatcaagtctctcaaagaagagctcgaaaaggacaattggaactccggcgacgaagaggggagcgatgatggggatagtgaggacgtaaaagaaatctctgacaaccttgatgaagtttcagatgataagaaggacagcaatgaagactcaaaagacctggacctgggaattgaggagaaaatttga

SEQ ID NO: 4200 - DNA, 810 bp, synthetic construct
  source 1..810: mol_type = other DNA
atgaacgtgccacaggttctggagattaaacggatcatagaggaaactccctcgatcaagacgtttatttttgattggaccatggtcggtgaaaacattcccactccaggccagttcgtcatggtgtggaacttcaacgacgagaagcccatgagtatcagctacattgacatcgctaaaggcgaattgggaattacagtaaagaatgttggggaatttaccaatcagctccacagcctggaagttggagaccgccttggtctgagggggccatatggtaacggcttcgacacggacctgcgggacatgaaagtcctggcaatcggtggcggcgtgggaatggcccctatcgccagctttgctgaggaggccctaaaaaacaaggcgatagtggatgtggtgtgtgcagcccagaccaaggacgagctcctgttcgatgaaagactgaaggaaaaaggggcgaccgtgtacacttgcacggatgacgggtcctgcgggttcaaggggtttgcaacccatagggctatagagctcatggccatgaagaagtacgattgggctgtggtctgtgggcctgaggtgatgatgaagccgttgtacggcacacttgagtcaaatatgattgacggagagtactccatggaaagatatatgaaatgtgccatcggagtctgcggccaatgctgcgtggacaatacaggctggcgcatctgtgtggagggccccgtattcagtacagatcagatgagcgagatcatcgaatttggcgagttccaccgaaccgcctccggattaaaagagttctattga

SEQ ID NO: 4201 - DNA, 837 bp, synthetic construct
  source 1..837: mol_type = other DNA
atgctcaagaccaaactctgcggaattagtctgaaaaatcccctgatgctggccgcaggtgtgctgggaagccacgcctcttcgcttaattggatcttaaatagcggggccggtgccgttgtgtcgaagtccttcagcaaggagccaaacgagggatacaagaacccaaccactgtagcggtggagggagggatcataaacgcgatcggcctgagtagcccgggcgtcgacgccttcatcgaggaactcgaatctgtaaacagaatcaagggccggtcaatcgcttcaatctatggcgcaactcccgatgagttttcctatgttgccggcaagatcgaaagtctggtggacatgatcgagatgaacatatcctgtccgcatgcaatggaaggctacggggcttccatcggtcagaaccccgatctgacaagggagtttgtctccgcagtcaaggatacggtcagcgtgcccgttctcgccaaacttaccccaaatgtcacaaatattagcgaaatcgccattgctgcggaggaggggggagctgacgggttgaccctgatcaactcactgggccccggcatgaaaatagatattataactggaaatccaatcttggccaacaagttcgggggaatgagcggccctgctattaagcctattgccgtgcgatgcgtgtacgacgcttacgaggcaacagacatccctattgtcggggtgggaggcatccgcaactacacggacgtggtggagttcctatacgccggggccagtgcagtgcagataggcacctccattatgtatgaaggtcctgaaatttttggccgcatccggaaatga

SEQ ID NO: 4202 - DNA, 1281 bp, synthetic construct
  source 1..1281: mol_type = other DNA
atggagtactatattacccagtttattgcagggttcattgcttttgatgaggacctgaaaattgccaactataagctctttgacgatgagaatattgttagtaataacctgaagattgaaaataaggaactgctggaagaggagatagaactcatcaacgagctgtcctctgatgactctaccatcatcatagaaacacggaagagacgctcccaatacaaagagctggacaattacgagaacattatcgtggagacgccaaataaagggggtgagcacttacgtaataacttggagagcatcctattggaaattggctttctgaacgacgataaagagaatatcgatgacgtggaggaaaatatcagtaatttagaagagccaaaccaggagaaatactcggaaattacaaaaatctatgaggacatagcgtccctcaaagtaaaggagtcctcacaagaagaggacaaactactcatccaggcaataaacaccgtggacgacctggatgagtcaatcagcaaacttgtggaacggattcgggattggtacaccatctacttccccgagatggacactatcggatctaacgaaacatatatcaaactgatcgccgagagcgaaaacagggaggacatcatcaagaaccataaggagcactttgatatcgacctggatttcagcacgggagccgacatagaggagtatgaccttattatggtgaaaagcttcgcagagtctatctactcactccagaggtcacggaaggacctggaaaagtatatcgatactaagatggaggaaatcgcccctaaccttcgagatctgttgggccctacactgggggccaagctgatcgctcacattggcagcatcaagcgcctcgccacttatcctgcaagcaccgtgcagatcatgggcgccgaaaaggccatattcagacatctcaagaccggcgagcgaccgccaaagcacggcttgatattccagcacccctccgtcaggggggcgaaatggtggaaccggggtaaagtcgctcgcaacctcgctctgaaaattacgcttgccgttagaaaggatgtcttcagtggagaatacgaccccaagatcgctgaggactacctgaagaaggtggaagagattgaaaaagagaacccgttccccaaaaagaccagcagtcgacgcaagtcggaaaggcagatggagaaggataagaagtccaaaaagtacaagggaaacaagaaaaataagaagaataagaagagaaagaaaaggaaatga

SEQ ID NO: 4203 - DNA, 651 bp, synthetic construct
  source 1..651: mol_type = other DNA
atggagatatttctgaaagatcaagacattgtcacaaggaatctaaggcccggaatcaaggtctacgatgaaaagctaatccaagaagaggggagcgagatcgagtatcgcagctggaatccgcggcgatccaagttagccgcggcactgctgaacggtctcgaaagcctgaagctggagaacgactctaaggtactgtacttgggagccagtaccgggacaacggtgtcacacatcagtgacatcgcgtacgacggcttgatttacgcagtggagttttcacctgtgagcatgaaaaagctcattagactctcgaagcagcggccaaacatcgctccccttcttgaggatgccaccaagccaaagaactatctgaacaaggtggaaaaagtggatttggtctactgcgacgtggctcaggagaagcagagcgagctcttcatgaataatatgaaactgttcctcaaggaggatggccagggcctcattactataaaagcccgcagcatagacgtggttcagaaacccaaaaaaatcttcaaggaagaggagaaaaaactgaaagccaacgggtattccatccttgaaaagattaagctggaaccttacgagaaggaccatatcgcttttctggttgaaaagtccttctga

SEQ ID NO: 4204 - DNA, 1221 bp, synthetic construct
  source 1..1221: mol_type = other DNA
atggaaatcgtcctgtgcgtaaccggcagtgtcgctgccgtggaaactgtgaagttagccagagaatttaaacgtcaaggccactcagtcaaggcattcatgacccaagaggctacaaagatcatccacccaaatgccctggagtttgcaaccgggcaggaggttgtgctagagctcacgggaaagatcgagcacgtgaaatatagccaggcagacctcatcctcgtggcgcccgccaccgcaaacacaataagtaaattcgcgtaccggatttcagataaccctgtaaacacccttctgataacggcctacggccatgacaccccgatcgtctttgtgcccagcatgcatgactcaatgtacgacgctgtgagtgagaatgtggccaagctaaaggaagagggaattgttttcctgaatcctcgcttggatgagggcaaggcaaaattcccagctatcggggatatcgtcctcgaatccattcgcacggtgaaccttgaccgagtgaaaaagaacctcacagacgacagtcttgacgaaagcgagattgaagatctgaacatggaaatgctcagcaaaatcgccggtttaaatgtactcataagcttggggggtaccttcgaggagatcgacccgattcggggaatctccaataggtcctctggtaagatggggctggaattggccaaagaggcttataggctgggagccaatctgaaaatccttgctgcccaccatgaagtggagatacccaaggtcttcgatgtgattgacgccaaatccagcagcgtgatgagcgaaaagacaatcgaactggtgccagactttgatgtattcattgccactgctgccgtcagcgacttcgcgcccattgtgaaggaggattacaagatttctagctcgctgaacctgtccttggagttcgaacctgttgccaagatcattcaccagataaagaagattaacccagacatattcctggtgggctttaaggctgagtataacatccccgaggaaagaatgatccagtgtgctaaaactcagatgcaggacgcaggcacagacctggtggttgcaaacgatgtttacaagaagggctgcgagtttggatcggattccaatgaggtgatcctggtcagtgatgagattaaaaaagtcgggctgaactccaagtctgagatcgcgaaatcaatctttaaggagatcgccaataaaatttga

SEQ ID NO: 4205 - DNA, 564 bp, synthetic construct
  source 1..564: mol_type = other DNA
atgaaaaagattatcgggattatcttcatcatcgtaattttggtcatcggagggtctctggtgtataaaaactacaaggactctcagaatacggtcgataagtcccaagagtcgatagagatcagcaaaaacggcattaccatgctaattcccggcgattgggtggaggcgaagagcgagtccaacactacggctatcgcagcggcagacccggcttctaaggactccgccggtttcagcagtgtgaacataaacattgaaaagaaaacaagttataactccctgtcgtatgagtttaataacaattacaaagccctgggacgggactcaagctacgatatcctctacgaaggaaatgtgtccattgccggcaccgaaggtatggaggccggctacacctcaagtaagaccggctttctgaaacagcacaaggccatctggttcaagcagggggatgacctctacgttatcctgtgcactgccccacagagcaagttcgcagaggaagaaagcacatttgactttatcataaataaccttaaattcaacaattcaacaaactga

SEQ ID NO: 4206 - DNA, 735 bp, synthetic construct
  source 1..735: mol_type = other DNA
atgaatcaagacaagatgaagctgatgcagattctgaagaacctagagagagattacaacgatgggctgatctccgaagagaagtacatctacctctcaaaccagtacaggcataagatcgacacaatcgatactagcaaccgaatacggaccatgcagggcaaaaagaaggtctctccgcgcccttattcaaagtacgaggacgctaattaccagaaaagcagggacgaggacgaaagactcgtggaaaaatacatccacaacccagaatcttataatatcaatagccggggcaagaaaaccaaaagcggaggaactagcccctggtacattgccctggccgtgattttcttgcttttcgcgtttggggctggcattagcttcggcatatttagcgagaacacaaactccgatgtaggagatatcataaccgcaagtgcaaccattaatgacacagccttccccgaggtcaaacagacctacaagtacaatcgcacgtcaaattatacgaaatactcctcaaactcttattcaagcgactacagctccgggagctcttataactcctacaactcctatggcggcagcggttattcaagtggaggctctggttattcgagcgggggtagcggctatagcagtggaggctccgggtactctagtggagggagtagctactccagtggaggctccggctattccagtggtgggtccgggtcggtgtcgatcgactga

SEQ ID NO: 4207 - DNA, 828 bp, synthetic construct
  source 1..828: mol_type = other DNA
atgataaacgacaaagtggccttcctgggccctcagggaacattctcccacgaagccgcaagcctgctcagcgataatctgattagctactgttccatccagagcgtaatggatgcagtcgagcgaggggaatgccggtacgggctggtaccaattgaaaactctatagaaggccccgtgagtctaactctggatagtctcatccataattttgatctgaagattagaaatgagataatcattcccatcaatcacaatctcttggcggcctctgatatctcagtggacgaggtggagaacgtctactcgcatgcgcaagccctcgggcagtgccagccttatctggagaggcacaatatggtcgcccattacaccctgagcacagcagctgccgctaagcacgtggctgaaaccggggaggacgcagctatcggcacgctcaaggctgccgaactgtacgacctgaaggtcatagacacaaacattcaggagaattataacaatgagacccggttcgtggtgttggacactgaagattccccaatcaccggaaacgacaagacgtccatctccttctcactgtttgaagacaagccgggcggactttatgagttactgggttactttgccagtgagaacattaacttgactaaaatcgagtcgcgcccctctaaagagggactcggccactacattttctttgttgacctggagggtcaccgcctcgatgagaacatcgccaaaatcctaaacaaccttgaggacaacacctcattctttaagatcttaggcagctatccagtttatagcagggaacttttcgactga

SEQ ID NO: 4208 - DNA, 819 bp, synthetic construct
  source 1..819: mol_type = other DNA
atgaagatcaaaaatatcatgtcagagaatgtggtcagcatagataagaacctcaatatctgcgactgcctacggatgatgtacaaggacaacttgagcagaataccagttaccagtaccaacgaaaacaaaaagtctctggtgggcatcatcagcgagaaggacatagcgaacaagctgggaagcgtcaaatatggtaatctggccccctcgcatttccacgtatcgaccgtaatggtaaaagacctgattacggtcgacgccgatgatgacctcacagatgtggcgaatatcctaattgagaagaacatcggggccattccggtgctgagcgacggcgagatggtggggattgtcactaaatccgatttcatatacctttgtaaggcaaaagcctatgagaaggttagcgtgaaagatattatgacccccgacatcatctcaatctccgccaatgaccgactgattcacgctcgcaaggtgatcatggactctggcgtcggacggctcctcctgactgaggacaacgaactcgctggcattattactagcaaggacattgccaaagctttggtgtcctttaggaagcacacgcccgagaagcatatggcttccaagattaaggaactggtggcaggtgattacatgtccacaaacgtgcagacaatcagtgaagatacaagtatcccagaactggccgacgcaatgttggagaccggatacaacgggtaccctgtcgttgattcaaacgatcagatcataggcatcgtgacgcagagcgaccttttaaaactgatctatgagatggaaacccaatga

SEQ ID NO: 4209 - DNA, 885 bp, synthetic construct
  source 1..885: mol_type = other DNA
atgaatcgggggtctgttgagcacgaaagcaaggtggccgaaaatgagggcgagatcatgactcttgctaagaaagaagtcatcagcatccctcagaccaagacaatcaaagaggcggccgaaatgatgatagagcatgaatttcgccgactcccagtgactcaacccgggagcaataaactgcttggtatcgtcacagcaatggacattctcgatttccttggaggcggaagtaaatttgacataatagagaagaaacacaatgataatttcctggctgccatcaacgaccaggtcaaggagataatgacgcgtggcgtgatttcggtgggccccaaggccacgattagggaatccgtcacaaagatgaccgagaacgggattggatctctgccgatcgttgataaggagggcaaactggtgggcatcgtcaccgagcgcgactttgccctggccctagcaggctccttgaccaacgagaccgtgggggacctcatgatcaaagacgttatcacaactacttgcggcaccccaattgagtcctgtagcaagattatggtgcggaacaacctcagacgcatcccagtggtggaagaggacaagctggtcgggattgtaacaagcaccgacattctgcggttcttcggggacaaggagatgttcgcatccatgacctcaaacagtggtttggacgtgttgaagaggcagatcagcgatatcgtgaaacctaatatctcagtaacggaaagctacgtgaaattaggagatctgtgcgatctgctagctgagaagaacattggtggagtgcccgtagtggatgataacaagctggttggaataatcacagaaagagacatcctcaacgcggtcctgagtaaaaagtga

SEQ ID NO: 4210 - DNA, 1113 bp, synthetic construct
  source 1..1113: mol_type = other DNA
atggcggaaataaaaaaacaggtgagaacaagggatttcatcattagtactgacggactgttattcgcgagcactaactacattcatcccgaggatcgcatcatttcgttcctgcgctacattccagacgagaacggggaccgcgaaaaggatggcatcaaatacagtaaggtgggcagcgatgaggcttatgcctacctgagggagaaccacccggattacctgtacttctgcgatgtgacaaatgttgaaatgatgggggttccgatcgataaggtcgaacggatcatcaagcccgaggagagacttaaaggtctgagggagacctacatcccaattatcaatgagaagctcgagaagggggaggatctcgattataaggaggaattgatgagcaagctaatcgatctgtccgacttttttcactatatggctagcattgactacaacgaccttggcattagcggctcaatactgcctggcctgcagaaggccgggacctcagacctagacttcgttgtgttcggtctggagaaccatcggaacgcaatcaaggcctacaaagaaaacaaggacaaaccagtctacattgaggagctcgacaaggaaatcacactgaaccgaatcaatgacgacttctgggactttgtctacgacaaacgaataaaggacgatagcctcaccaaagaagagtttgcttggtacgaagagcggaagagtaatcgcggcctgatccgtgaaaccctcttcgatatcttggcaaccaggaactatgatgagatcgaaggaacgtggggcgacacagtctatgaacccgagggatttgccaaagtcaactgtacaataaaaagcgcactgggggcctttgacaatcctgccgtatatacgatcgaagatgtggaaatccttgagggacccgacattgaaatttccgagctcgcatccctgacgcacacctatgctggggaggtgatcgacggagaggaagtggtggcccggggaaagatagaaaaggtgctcaagaatggtgagttcgagaaatacagaattttggtgggcaccactcgggagtccctgaatgagtatataaagttaagagagagccctgtatga

SEQ ID NO: 4211 - DNA, 4497 bp, synthetic construct
  source 1..4497: mol_type = other DNA
atgaagtacaaaaaagagctgatcttcatctgctttatcatttgtatgttaagtatggctagtgtgtgtgctagtgacgtgaatgacacatacataaaccagaacgacctcaagatcgataatcaagataactgtattaattatgaaaaagtcgtgtatacagaggagaacctggagaacaatctgatttcaacggaagactctctcgaggatagcaactcaattgagccgtcggactccttcaagcagaaaaactcccttaatgaaggtaactccgatgaacgtttaaatccagagatagacgtggctttgaatagtatccacgttaacgaaactgctgaggtcaatgtgaccgtgagaaatgcgagcggatacgtgctggtctcagtggacgaccagtccttcaataaggaccttacggactatcaggctcgattcaatatcaccggcctgggctttggaaatcacaatattgcagtctattatgggggggacgacaactacctgccaggatttaaattggaaactatctctgtggaaaagtaccaaacccaaataagcgagattgaaatcggtgaagtgtactacggggaagatgccatcatcgaggtcagcgttcccaatggcgttgagggggacatcacaatcaaaatcaacgacactctccagacagtgattacggaggccattcatgatggtatggccttattctcagtgtctggtctggctgtaggcagctattctctggacgccacctataatggaaatgactactacgagaacgatacggcgtccgccgagtttgaagtgaaaaaagccgatccgaatctgagcgtggtatcctttgaatgcacggtgtatgacaatgcgacaatactggcgtccatcaacgaagagatccacgacgagttcgtcaacatcaccgtgggagatgagaagtacgaggactgtcctattgaagactacggtatgatcgcattcacagggggcgttctctcaaacttttcctcttaccgcattctcatagagtatgggggcaatgagaacttcgagagcgctatgatcgaggccttcgtgactccgaaaaagatcactacctatggcctcgatatcatcgcccagaatatttccatcaatgatgatgagatcatttccgtggtcgtgcccgaccacgtggacgacgtggtcgtgtgggtagacgggcagagctaccgcaactgctccttcgagaacaacgtggctgtctttaacgtcacaggtcttggcgagggggtgtatacagtgaccgctacagtcaacgacaccgagttcgaccataagaacttcacaagcatctttaccgtaagcaaggttctcccttcaataggcatctcaatcaacgaaacggagatatacgtgggggacaatgtgaagatcattgtaagccttccgatcgacgtatctgaaaatgtctccattgtctttgacgaccgagaactgtcccagaagccagtggatggcaacgccaccttctacattgattgcctcagttatggcaacaagtcagtgccagctatctactatggtgatgagaagtaccggaccgcggtggaatcgattaacttcacagtcaacaaagtgccttcatttctaaatgtggctgtggagaacatctcaattagcgacaacgaagtgatcaacttttcactggccaatgacgccagcggcaacattacagtgattgtcaatgacgaaacttacatcgttgcggtaagcgggggaaagggtacccttacagtgcccaaactgaatcagggcgtgtattctgtgaatgctagttataatggtgatggcaaatacctcccctctctaaacaattcggagagcttcaaggtgctggtcaacagtgggcaaatggagattatcgacgagcggaacaacaccgttagcgtctacctctgggacggggccacaggaaatctaagcgtgaagatcgatggcaaagtctacaacgccacggtggtcgatggctttgcccaggttgtgatcagcaacgcaagctatggggctcaccatgcctatgtgctgtacgaggacaacgaaagcgacttgaagctcgagtccgtcgttgacgtgtttgtgccaaaatacctcagccccattggcataaactcctcaatccttaaggtgggggacattggatacattaacgtgaccgtgcctatgggggcaagtgggaacataagccttgagatcgacggcaaatcgtacttaatcgccatcgacaatggaattgccgagtttgaggttgagaacctgaccgcaggggataagacaatattcgtcaagtactccggcgataaggtctatagccaaaattcaacctctgaaagcctgaccgtattcaagcaggagtcctcgacccactgctctattgaggatatctctgtgggcgacgtggcgcagatcaaaataaccggcccaagtgacgtgctggggacagtgattgtcatcataaatggaagcgagtacactgcaagcattagtaatggcgagggaatactcaatgtctataatttgcagaacggtgactatgacatcgaactgagctatctggaaaactcaaaatacttgtcctcggaatacagggacaacctcagtgtgtctaagattcagacagccatctccagctctaacattgtgtgccagtacaattatgaaggatatctgaatgtcagcttaaaggacattaagggcaatccaatatcctgtgcagagctgtctatcgatctggatggagtgaagaacctggtttccgatgtcaatgggcaggtaaagatcccaacgaaggatttggacgcaaatgactattctgtgctgatcagtttcgccggcgacgaaaaatacctcccgtccaatgctaccgtgaacgtgactgtaaacaaggacattcctcagatcatcgcttccaacctaatcgcagactataaatcagacgattacctcattattggattggaggacagtcaaagcaatcccctggcgggcttcgatttgtctattgccctgaacgggatcgacggggattatgatgtgtactcaaccgattccaacggtattgtgaaagtgcctatcaaggatctggctgctaacgactacatcgcctcgattgtttttaagggcaatgcaaactacgatgctataaattccactgttaaggtgactgtggaaaaggccctttccagcctttttgccctggacctcgtgacggtgcatgagtcggatgattacatgatcatcgctctgaaggattcttgcggcaatcccctggtcggcttcgacctgtctgtcgatctgaatggtatcgatggggactatagtttcaacgaggtgtactcgaccgattccaacggtatggtgaaggtctctacaaaggacctggacgccaacacttatgacgtaaaggttaagttcgatggaaacgaaaactacaccgaatcaaacatcactggcagcatcatcgttcgcgaggacataatcatagttcctaatgcaagcattgcctttaccgccaatgatagttctgtctcagcgattctgtccaacctcgatggagtccctatctccaacgcctcgctggatatcagtgtcaatggcgacgagtccacactgattactgatgcaaacggcagggttgccatcaaaataaacggaaacagcacggtgattgcaagctacaaagacgaaaacaacctaagcacgaccgggtacctgaacgtcatcgtcaaagacaacataactgtagtcgaaaagaacaacaccatttatgtaaatcagaccgtggaggtgcccgtctacatcaaccagactgttgaggttcccgtctacatcaatcagactgttgaggtgcccgtctacgttaacgtaacccctaacagaactgcaaccatgattgtttacaataacatgacgaccgttgccgttgcgaaggtggatggaagagtgggagaatacttctacgtgagcttgaaggatgccaaaggaaacccattggcaaataaactggttcagatcggattcaatggaagggtttatgatcggaccacaaacgcgacagggggcgtgggactgcagatcaaccttggtaacgaaggcaagtacacgtttgccatttgcttccttggcgacgataattataccgggtcctttgaggtggccctcattacagtcagcaagcacagtcccaagctcactgcacccgccaaatcattcaaggccagtgctaagactaaatccttgaccgctaccttcaaatccagcaacggcaaccccatcagtggcaaaaagctaagttttactgtaaatggtaagacctacaccgggacaacaaacgccaagggagtggccactgtcaagatctctctgaacaaaaaaggcacctatagttgtaccgtgaaatatgccggagataccatgtacaaggcaactacgacaaagttcaacgtaaaaatagtgtga

SEQ ID NO: 4212 - DNA, 939 bp, synthetic construct
  source 1..939: mol_type = other DNA
atgctgagtatctcaacaataaagacatatatgttttgccctctgaaactctactttcagagcgaaatagacgaaatctatgacgaggaagagtacttcgttccaaagaccttgaaagacctccgtatcgacattcaagacctgttgcacaagaacctcagactggtaaaaaaggatatggagctgaaagagatcgaagagaccctgtccaagggagtgttcaatcagattgaaacgaccttcgagataatcgaggagctaaacgaaaccaaaaaagagaaggaacggcgggaaaagtctagcatctacaaggattcgaacatcgagtttcttgacgaagaccgacagattctcaatgcatccctggaggataacgacggtacgctggaggacctggataatgaggaggatgagatcaagaagctgaaggacgaaatcatcgatgaggtgaacctgaatctaaaaatcctcagcctgaaagcctcacaagctatgaagaacctcgagaaggacggaaacgaaatccagaaccttttcttccagagctccatgtacaacactctcattagggatttggggatagatctgattggcgtcatcgacaagatcgaggtggagaagggcaaatatttcccaattttactgaaaacttccaatcccccgagcaaaggggtgtggcagagcgatgaaatcgagctcattgcaaatgccttgctggtcgagggggaatttaatacatacattactgtgggattcgtcgagtatttaaagatcggcgaacgccggcccatagtcattgacacctttgccaggaaaaagttctttaagctgcttaccaaaattaacaagatcgtggaggacggcgagattccccatgtgaaaacaagtgttaagaagtgcagaaactgcgaataccgcgagctttgtgaaaaggcgtga

SEQ ID NO: 4213 - DNA, 660 bp, synthetic construct
  source 1..660: mol_type = other DNA
atgtcctcgatctcactcaccatcacaacgaaggaagagaaaggagtgctggatgagatcactgatgtgctcaccagccacggagtcaacatatcctacgtgcatctttatgtcaaggaggacgtgggaacactgaacctggaacttgagaatatcaacgagctcgatgaactgatccgggacctgaaatcaaaggacttcattttggacatagagatccacggcagcctaaacgacattttcggtaagagggttctcatctttgggggcggggcacaggtctcccaagtcgcggtaggtgccattaccgaggccgatcgacataatatacggggcgagcgcatcagtgtggacacgattccgctggttggcgaggcaaatatcacagaagctgtggaagctgtgagccgcctgcctagggtaggcgtattggtgctcgcagggtctctaatgggggggaagatcaccgaggctgtgagaaagatcaaagaagaacacgaggacattatcataatcactttaaatatgccaggcagtgtgaccaaagaggcggatctgattgttacagaccccattcaggccggcgtcatggccgtgatggccgtggccagcactgccgttttcgatgtcaagagactgaagggaaacaacaaattttga

SEQ ID NO: 4214 - DNA, 264 bp, synthetic construct
  source 1..264: mol_type = other DNA
atgaaattcgtgatacgcccttatcatatgatgagtctcggagggtatattgtagaatacgattttccatacagggacatcatcatcgtcaacaagacatccgagcacattaaattcgagattccggtcttcgatgagagctggatcgaagaaaccagagcactaggcctggaggtgatccccgtgcgaaaggaggacagctacctgaatatgtaccggaaggcgcacgctgatctcgacgcctttaaggccaaactggactga

SEQ ID NO: 4215 - DNA, 999 bp, synthetic construct
  source 1..999: mol_type = other DNA
atgtcttacgaaatcagccttatcagtattctcgaagtcgtcctcacactgataatagccctgttcatcggtgtgttgattcctggcatcgaaagaaagtacgtgcaggcacgcatccagcaacgcatcggcccccccgttaccagccccggactgtgggccagcatcaagttcctgtacaaggagaatatccagccaaatagtatggcgcccggcctttataaggctatgccggtgctttgctttattgtcgtattagccatattcctcgtcctgatgccttataactatcaattcatggcctttagcagtctgatcgccattgtgggatttctgaaggtggaggaggtggcctatgtgcttatggggtccttgtctgagtctgtgatgtccgctaacctgcggttccccgatcacataaagggggctgcccggccagactcactcgtgtcatccattgaagacatcagttcaaagagatccctgaggatgattgtatttggtagcttcccactgtacttggctctctttgtcccggcagcgctgagcaaaagcatctacctggccgacattgtcgcctaccagcaggccaacggccctttcctattcacgctggcagggattatcggagcagtggtgttctttgtcgggtatatgatcatcctgaatgagtacccgtttagctacattaaagcaaaatcggatgttattgaggggccctatatggagcttgcttccaaatatcgaagctttgtttacgtgactaggggctttctcattttcaccttgggcctcgtattttcagtcctattcctaggaatccctccagttctcttctcttggaagtttatcgctgctgtgatcgtatccctgatcttgcccgtgataatggcctccatcagtgcattcagcccaatattcacaaacaaacagctgtaccctaccatcttactcgtttcggcgatgggcgtgctggcgattgtgattgccctgttctga

SEQ ID NO: 4216 - DNA, 1176 bp, synthetic construct
  source 1..1176: mol_type = other DNA
atggaggaaaagaaagccaaaaagcaggagattatagaaacagagattcaaatgggtaccgtgcacccggccgctttggagccttatcgggtgcggtttttcgtagaagacgagatcatcaaagatgccgagatcactattggggtgaaccacaggggcattgagcgggtcatggaggggctccctgtcgaaaaggctaatatgctgactgagaagatatgcggcatctgttccaattcacatacatggaacagtgtgcgaacggccgagaagggtctcggagtcgaggtgccagatcgcgccgtgtatatccgcgtgatcgtcggggagctggaacgcctgcatagtcacctcctgtaccttggtcacgggtgcgagaccttggcgcatgagaccttctctatgcgggtgttctacattcgtgaaaccattatggatcttctcgccatgatcggcggaaaccgtgtgcagtacggctgtagcattatcggtggcgtccgacccagatgtgaattggacgacaacagaatccaaagaatcctcgacggcatggacctagtggaaaagaacgttctagacttcgcaaatcgcttcgtcaaggacagcgtggtagcaagccgcatctccggcacaggatacattcctcaggagcaggctcttaaactcgcggtcagcggccccactctgcgggctaccggggtcaaacgagacttaagaaccgatatgtatgaatacgataactttgactacgatataatcacccaagatacctgcgatgtacaggcgcagctgctgatgagagtgtttgagatatttgaagcaatcaaaatcgtgcggcaggccatcagggatctgcccgagggcaaaatcacagacaggagctgggaaatgattgacaccgacctgattgaaagctacatcgaggttccaagaggaacactgtaccactcctatgccattgaggacggaagggttcgccattgcattatcaggacgccctcaatgtccaacattggagccatgcagtatgcttgtatcgacaatcacataactgacgggcagctgtgtatcgttcagtgcgatccatgcttcacgtgctctgatagggcaatagaggtgtatgatacaaactacaacaagttagacaagagtatcctgaagtcgaatatccactga

SEQ ID NO: 4217 - DNA, 447 bp, synthetic construct
  source 1..447: mol_type = other DNA
atgagccttaaaaccctctcaagaagtaaagccatacacatcatgctggtttacacgggaggctgcaatggctgtgacatcgaaatcgtcaatgcggtgttatctccgaaatttgatatggagcagtatggggtcttcctgacttggaacccgcgcgaagcagatatcctcgtcgtgacaggacctgtaacctacgacaacaggaagccactcgaagacatctacaacgcaataccaaaccccaagctggtggttgccgccggctcctgcgccctaatggggggcgtctataagaactgccacggagacattcctagcgaggagattgagggccccgtggagaacgtgattcccgtggatgctaaggtgcccgggtgtgctgtacggcctcaggacgtgctggccggtgtcgtggcagccttgccacatctgctgaatgcggattga

SEQ ID NO: 4218 - DNA, 669 bp, synthetic construct
  source 1..669: mol_type = other DNA
atgaaagatgtaattaaaatcatgctgaacggaacctataccaactttaaacgcatcctctttgccagcgacagggtaactgatatggagctccggaatgcgatcctgaccggcacggtggaacctgacaagaaggtggatgagcaggcttgcattggctgtggaggttgtgccaacgtctgcccgactggcgcagttacaatgaagcccctccagacgccagtcaagattaaggaggggtgggtcaagacagaagtgccagagctggacccctttaaatgtgttgtgtgctactggtgccatgacttctgcccaatatattccttcttcgaagaggccgggaccatccaccccgggaatgtgggggagatcaacatcgacacagctgaactgcttagcgaacctattaagatctcgcaggaaaagatctcattcattgcccaatacctgtctgacaagagcctattgagcgagaacatcgtctcagacgcagatgagatcgagaatgtgggagccggcctggaacgagtgtccaagataaaggacatacaggataatattaacgagaagtacgagaaagacgccaaaagaagttctgcattagcggatgacagcaacgagagttctagcgagtccgatgaaagttccaaaaatgagggcggtgaatga

SEQ ID NO: 4219 - DNA, 1461 bp, synthetic construct
  source 1..1461: mol_type = other DNA
atgtatctgacaacgaataagtgcgatgggcaaggagactgtatacggaattgtccgactgaggcaatacgctttgtagataataaagcctttagctgcatgtgttgtggtgcttgcttcgaagcttgccccaaccatgccatatttaaaaataaatacggaggttacgtggtcgatagggcgaaatgtaatggctgcggtgtgtgccagttcacatgtccaattgaaagcattcacattgataacggcatcgtgaaaggcatctgttcaagatgtggcgtgtgcgaggacgtctgcagtcggaacgccaggaccgacactgacaacctggtgcttgacaagcagaaagtcttgctcaactccatgaagatggttgctaacacggtcggatatcgcgcaggggtgaagaagatcgaaaacatgaagctccccgtaaagtctgataagtctgcagaccgggtgtgcgtgagcaccgacatggagaaatgtgtgaagtgtggtagatgcgcctattactgcccgacccgggccatagaggtcatcatccaggatgagggattctgtgtggggtgcaagatttgtgaggacctgtgcccaacgggcgccctaaaggatggccaatatgataaaaacctctgtaccctctgcttggcttgtgttgaaaactgcattaatgatgcattaaaggttaaggactttaagattgtgcgaaacataaaagacagctcgatggacaatcctctgtgctcaaacactaaagggaccattgtcagttgcctcaactgcggcctgtgtagggaaaagttcgacagtcccgccttgattaagaaggagaacgccctgagatacgacccttcacaggacaaggactccgaagagaataatgagaaacgtcttgaagcgatctacaactgccccgttagcaccctgagcgaaaatgaggacaataagctcttcgggtactgcgtgtcctgcggcaaatgtacccaggtgtgtaacgagcaggcccgctctttccagaccatctcttgggatggggaagtcagtgacgattgtatctcctgtggtatctgcgccgagctatgccccaaagaggcaatctcccttaaacgcggaacaatcaacgttgatctggacaagtgtatcatgtgcgagacctgtggaatccactgcccaactgatgctattcctaagacaactagcacaaaatacaagatctccggcggattcaactacatcgacgagaacctgtgcgtgaaatgcggcctgtgtaaggacatttgcggcgaagaggctatctacacagtggacatatcaaacgaggatgtcaacctggggacgaagaataaaaatctgcgatttgtagtagacgatgataagtgtatctattgcggggcgtgcatgaatatctgcccatcgaagagctttattttcgaaagagagttcaatagggtgaactga

SEQ ID NO: 4220 - DNA, 279 bp, synthetic construct
  source 1..279: mol_type = other DNA
atgttcgtcctcgcgaacctcttaattgggccgataatcatctcagtgatctttgggttcgtactaggtagccgcatccatctggacgagaaaaacagtttcaagtttaccgccagcggaatcatcgcccttattattggggcactgatcgtgtcctacggcatcggccagttcccctactataatgatctcccaatagccacgacatttctgggtgctttgttcggccttctgattggcagcgcactgctgggaggacgggctaagggcgaccactga

SEQ ID NO: 4221 - DNA, 525 bp, synthetic construct
  source 1..525: mol_type = other DNA
atggctgaggacaaggacctcaagaccacaaagaaatctcccaactggaataaggacgagagcagtcccatactgaagatcatggtgttgccgatctcattcattattgccagccttggtatcatggtgatcttgggcggtcacataactcctgggggcgggtttcaagggggagccatgattgccggcgctatcatactgtccgtggttgtgtacacggtcaatggaagtccactgaaactctcgcatcggttcatcagcctgctggaatcagtcggcgctcttgcttatgtgctcctgggtttggccggactcgcactcaccggcagcttcctgtacaatgtgggcggcaacctgtacgggctggttccacaggcgatcgccgcaatcttcaaatatcctgatttaacaaacgccggaatggtcccctacctgaacatcgcagtcggactaaaggtacttgtagggctatccgcaattgtgattgccttttcccagtttaaaaagctggcggaggaggaatga

SEQ ID NO: 4222 - DNA, 396 bp, synthetic construct
  source 1..396: mol_type = other DNA
atgtccgacaaaaccagcatcaggtcgatactgatggtagtggccacaattatcttcgcctccagcctgttcgacgccctgtacggattcaagaacctcattcagcccggcataagtttggtgtataccgctattgggacccagcttgctccaaacatggttacacttgtcgtctttgactggcggggattcgatactctgggggagtcactgatcctcgtgactgccgtgctggtcgtgttgctgatctttggaaaaggcaagatcctcgataagaacgtgaacgcagacaatgggacggccgatagcaatctcacccacgaggcagatctggaaatcggcgattctgacctggaactagacggtgcggacttaaatgagggcgatgacgagtga

SEQ ID NO: 4223 - DNA, 336 bp, synthetic construct
  source 1..336: mol_type = other DNA
atgaccttgtatcagaagttcttagactcggtgaaggagctcaaatccagtttcagcaaagatcccaccacgatgaacaatgtttcaggagccatggccgccgaatttcttattctggtgggcctaatcctggctgctctcttctttcggcacatcaacatcgcggcatgcattgtggtcgtcatcctcgccgcaatattgttcttcacaaacatgccactggccagcaagataaagagcgaacagtccgacagtctggagaagatgctgttttacgtactcatcgtgctgggcatcctgatttctgtgatttactgggggcttaaatacgtctga

SEQ ID NO: 4224 - DNA, 1482 bp, synthetic construct
  source 1..1482: mol_type = other DNA
atgaactacctgattccactcatggtcgttattccaatactcgctgctctgattgtgaacatcctcggcggtaaagacaagacggtgaaggctttctccattatcgtaggactcgccattcctatcatcgcgatcctggccgccattggggtgcagtacttcggcggccacgatcccggcctgctggcaaactcactgcccagcaatctagtgggaacccttgtggcaagctacaacaccggtatcgtgtatatcttcgacaacatagaaagaatattcatcttcctcatggggatcgtcgcattcctgtccatctttacctacttcacagagaagaaggaagtcagtgggccgtacttgtacctcatctttatgggccttgcctccgtaatcgccctcctgctatcgaacgatatcttcaacatgtatgtgttctttgagataaccgctttgactcaggtggggattattgtagccagcagcacggaggacaattacgaaatcgccctcaaatacctgatcctcgggtccatcggcgggccgatgctgttactgggcgtggggtttgtgctgggaacaataggtagtgtgaatatcacagacatcatctatgccatcagcaataacttcgtagatccttactcgccaggcctggttatcgggtttgccttaatcttgttcggctggctatactccgcaggattgcctccgttccacactataaaatccgcggtttacagtaaggcccggcctaacggtagcgccatactgcagggcttctcagtgctctgcatgctggcgtttggcatcgctatgtataagatatttgcttacatccccggcttcaataccgccataattgtgttcgccattctggcgatggtgttaagcattgccatgtctgcaatggaggtagacttccggcgaatgatcgcctttctggctgtcggggaactgggattcatcgctctcggttttgggattgggactcaaatgtccattgcagctgccctcttccaggccgcgaacgaaatcgtcatcacagcaatgctctttattggattcgggtcaatctattatcttacaaatacttcagatacccgcaaactaggcggactgattggagtggacagccttatgggagttatgattttgctgggcggctgcgccttggcgggtgttccacccttcaatggctttgtcagcaaactgatgcttgtgcaggccgctctggaggcaggctataccgagcttgccatcctcgcagttattgtgagtgtggtgatcttctttacatttgtcaaggccttccatagcgtcttcttagagcctaaaccaaaggacctgaagtttgttaatgagaagattcccagggtcaccgtctttagcgtggctgtgctgcttataatctgtctggctctgggtctgttccccaacattgtcacggatgtgtttattccctttgcaggaggattgatctga

SEQ ID NO: 4225 - DNA, 369 bp, synthetic construct
  source 1..369: mol_type = other DNA
atgatcatggatattcaactggcttccctcttcgcctcaggcgcccttattatcatcgggctcattgccgcaatcttcattgacaacatcataaagaagataatcggcattgcctttatcgaggagggcgtcaatctattcctgatctgcctcggatacaaggccggaggggtggtgcccatcttcctgcctggcatgacggcagactggtttgcacagaacagtgcctatccactgccgcaggctctggttctcaccagcattgtgatcggtgcctctaccttggcggtaatgctggctctggcgatggtcctttaccggaaacacggaacattaagcgctaaggaaatattgggggacgaaaaatga

SEQ ID NO: 4226 - DNA, 231 bp, synthetic construct
  source 1..231: mol_type = other DNA
atgattgaatacatcataatcattgtcgcggtgatcagcgccatcatcgcactgctgcaggaggacctgctgaaatccgccattctcgttggcataagcggcttcttcatcgcagtgctattccacctgctccttgcgcccgatgtggccctcacacaggccattgtcgagggtgccatcgtgccagtatttatcgctttggctgtgtataagaccaagggaggggcttga

SEQ ID NO: 4227 - DNA, 567 bp, synthetic construct
  source 1..567: mol_type = other DNA
atggcgctggggctcgagggcatgaacctgatcaccatcatccagtcaatcctgctgattattagcgccctgatcattatcattgccgcaatcgggattctaaggatggataaagacatgcccaatgtggtgtacgcacggattcatatcctggggatgatagatgtcgccggaataatcgcattcatcggactcggccagccgttatttgccctcatctatatattcttggctccactactggctcacgcactcgcgaatgcttacttccacgccgaagatgacctgaataacccagtccttaaccctaacctgctcaacgaagaatctgacgagtccgagttggaggagtcggttgatgtggccgagcaggacggcgaggagcccgaagaaagcgtggatgtggccgaacaagacggtgaagactccgactccgaggagacctcagagaatgtagaggaggacagtgatagcgaagaggaagctagcaacgaagacgtggataataagacgacagaagaggatgtcgagaaccttaacaacagtgagggcgacgacaatgactga

SEQ ID NO: 4228 - DNA, 267 bp, synthetic construct
  source 1..267: mol_type = other DNA
atgataatggaactgttgctgattagcgagtgtttcctcatcatcgcactggtagtgttcttatttgcctccatgcgcatcattacatacaaaactgtctcaatggggcttataggtaccagcagtctgaccctggccattaccctcattctaatctgcgtgggcatgatgtggggcatcgagttcttcaaggacatcgccctcgtgctgcttttgctcggaatcgtcgggacgatcgcgtatgcaacatttctgcggagggcttga

SEQ ID NO: 4229 - DNA, 315 bp, synthetic construct
  source 1..315: mol_type = other DNA
atgttcctgtcccgcatttattatgcaattgcgtacctagtcgtgcttattttggagattatcaaagccacaatagatatggccggacggatcttcaagggcgaccagtacgatcccatcgtcatcgatattgacaccgaactgaaaaggccaatatctcaaacaatcctcgcaaacagcatcaccctcacgcccggcactctgagcgtagatctggactcagagagtcaggtgataaaggttgctgtgatcgccccaagagacgtgaaggacatcattccgtttgagccttacatcaaggggatgctggaatga

SEQ ID NO: 4230 - DNA, 738 bp, synthetic construct
  source 1..738: mol_type = other DNA
atgtcatcctacaagggccacacaatatttgcctttatcctgagcttgctcatgttttatgacccctttgcaatcgcactggccgttatcggagcaaacatccctgactttgaccatgagtttaagcgcaaccacgtgctcatcattatctccattggaatgatcctgagcatcttcctgtacctgctgaacctgccaatttacctcgggttgataatcgccttgctcgggctgattttcctcctgtcctctcatcggggctttacccactccatcttaggtgccgtagtgataagcattgccatattcctactggtctactttggcatggatctgtcttcttactttaatctgaacactattacgaatattccccttaactacgtgatcttagtcggcatccttatattcctggcggtcctattcttgaacaagcagctcgcctcgattttcatcctgctgatgcttttcttcatcaccctcgtttatttcggaatcgtgcccgtgttcaagatcaacgtgtatagcctgattttcagcgtgttcttaggtctattcagccacatgatcttggactcattcagtccggctgggatcaagcccttcagtcctttcagtgataggaaatgctataaaaaactgggcctcctgctctttgcgctgataattgctctttacttgattctgtttccaaataaacttgatttctaccttaatctgctcccacacttttattga

SEQ ID NO: 4231 - DNA, 747 bp, synthetic construct
  source 1..747: mol_type = other DNA
atgacccaggaaaagaacaatctcgatctggatcatatttcttatgagaccggcggattcatcagtgcgaacaagaacatccttaataatctgaatctaacaaaaaacaccaaatatatactgaaagagtcaataaaaggaacccctataatcaaactgggaactaactatcccaaggtcatgatggtggccggcatccacggaaatgaactggctcctcagatttcggccctgaacttgatcgaccagattcatgacttggacctgttaggaactgtgtacatcgtgccatttgcttgtcccaaggcaagcatgctcaattcccgctactttgacggtaaggacctcaacaggacaagccacatcgaggggtccgtgggggaccttatcctgaaaaaagcagttgagcttgaggtgagcgccatcggcgactttcacagcagtgcccccaacagtaatccaggtaaggaaggggtattttgcacggaagttcccacgatggccagctttagactcgccgatttcatctcaaaggtgacaggcagcgagaagatagtctactccagcgcgggcatcccgttcaagggggctctggaggatgaggccaacctaaagggcattccagctgtgacctgcgaggtcctctctgcaatcggctatgcaaacgaacggatttgctaccggtccattattcagatgaaggccttcctgcaatacttcgggttcttcgatcgatacatggaatga

SEQ ID NO: 4232 - DNA, 1176 bp, synthetic construct
  source 1..1176: mol_type = other DNA
atggaaaaagtggtgctggctttcagtggtggcctggacacaaccgtgtgcgtgaaactgctcgaggaggaatacaactacgaagtagtgactgcgtgcgtggatgtagggcagccgcaggaggaattggaaaagagccaaaattctgcagacaacataaacgcaggaaagcactacatcattgatgcaaaagatgaatttgccgaagagtatattgcccgagggatcaaggctaacgcggagtacgagggctatccactgagcacagctctggcacggcccctgatcgccatgaaaatcatagaagtggcggagaaggagggggccacggctattgcacacggctgtacagggaaaggcaatgaccagttccgcttcgaagcaatcatcaggtccatgtctgactttaaggtcattgctcccatccgggagatgaacctgacaaggactgaggagcaggcctacgccaaggagcatggacttaacctatcctatgataagatctactcgatcgatgaaaacctgtggggccgggccatcgagggggatgttctcgaggaccccgccaatgagccacctgaggagatttatgagtggaccaagtctgccgaagatgccaaggacactcctaccaaagtggcgattgagtttgaagagggtgtccccattgccatcgacggagagataatgggtctcgtcgacctcatcaacaaggctaatgagatcgcaggcgagaacggtgtgggccgagtcgacatcatagaaaacagaatgatcgggcttaaaagccgtgaaacctatgaggtgccgggagctaaactgttgattgccgcccaccaagctttagagcagttggtcctgaccacggacgagctcaggttcgcccagtacatgagcggactgtatgccgacctcgtctactcagcgctatggcaggaacctttaagagaagacatcgatcaggcaattgaccatatgcagcggcgcgttagtgggaaggttgtgatgaagctgtttaagggctccattcaaccactgtcccgcgagtcacccttcagcctgcacagcattgagcagataaccttcgaagataaggaaacggaacagagtgaggtagagggaatgatcaagtaccacggccttcaggctgccaattaccaaaaactcaatagatga

SEQ ID NO: 4233 - DNA, 663 bp, synthetic construct
  source 1..663: mol_type = other DNA
gtgccaaatacaggcagatgcaaggagttgctcgtcgaagacgcagtggtataccttaggcccagcgacaaccccaatcggaagacgaaatacagcctttattatgtggaaaacaatggtgccctggttgcgatgttctctcaggaggccaacaaaatcgtgttcgatgccattaataagaataaggtgaaggaactgtccaactactcaatcatcgagagcgaaaagaccatcggaagcagccgcatagatatttacttagcgaaccataagagcaacttcaaggataatgccgactccaaatccatcggcgaggactccaaagaagatattattgatgagacttacgtggaggttaaatcagtaaccctcatcaaggatggggtggcccagtttcctgatgctccgacagacaggggccgaaagcacctggaagagttgatctcgctcaaaaaggagggaatacgggctgtcgtgttctttctagtcgagcaccctaatggaaacagtttcagaccaaattgggaaaacgaccccaagtttagtgagaccctggtgaaggcatacgacgagggggtcgagattctggtctataaaactcgcaacgacttcgagggcatcgaactcgttggggactgtctggactttaacctgaacaaatga

SEQ ID NO: 4234 - DNA, 1569 bp, synthetic construct
  source 1..1569: mol_type = other DNA
atggaccctatcgacatgatggccacagattataactgtgagtacctgggcctgtcacgcctgtgcctcatggagaacgcagggaaaagtataagcgacgagatcgccatcctgagcacctacaaatacagccggccagtgaagatagtgatcttcaccggcagcggcggaaacggtggagatggctttgtagccgcacgacaccttctgaaccgcggctttgaggtggatgtctatgccctcaacactgcagaccagatcaagtctggtgacgcattggataaccttaagatcttaatgaacctggagccgagggtctcccgcctctctgtccaattcattaaggattcggccgatctcgataaaatcaagcttgacaacaattccccgtgcattgttctagactgcttgctgggaacgggcatcaagggaaagctgagggaaaaggtgagaaagacagtcgaactgatcaatgccatcaacggcctgagagtggccatcgacgtgcccagtggtctggaccccctgactggcgagatagccgacattgccgtcgatgctgattataccgtttgcttccacaaggtcaagaccggggttaagctggccggtgaagggaaggtggggggcatcataacctgtgacattggaatccccatcgaggctgagctatttgtggagggcggtgaccttctgcggctgaataatcggccctccagctctcacaaaggaaacaatggtaaaatccttattgtggggggcagcctggactactacggggctcccgcaatctccgctaaggcctccatcgccacaggagccgatctcgtttatatttacaccccaaaaagcgcagcccttccaattaaatcattctctgaagactttattgtaaaggaagctaaaggggactacctctcaattgatgacctggacgatattctagaaatggcatccaaggtagacgccgtgctaataggtcccgggagcgcgcaaaatgaggacacaatgaaattattcaatgttttggctatgaaaatcgacaagcctctcgtcctggatgctgatgccctcaaattggtggacttttcgttaatcaacaaaaaggaagatattatcataaccccacattacagcgagttcaaatccttctttaagaaccagattccacgagacattgagaggaacctcgataatattgtaaatctgaacgatgacagtgattttgtgaaggtgaacgacaagatcgatgctctgcagagcataacagcgtccttcgacggatcagtgatcctcaagggccagtatgatttcatcttcaacaagaataagctcaaaatcaatagaaccgggaaccctggcatgacggtgggcggaacgggggatgcactggcgggaatcgctgtcagtctgctctcacagggccttgacagttggacttctgccattttggctccttacctgaacggaaaagcaggcgacttggccatggacgctcaggggtacgggttcggagcccaggacctgactcagtatttgggcgcggtgatggcgaatctgattgactga

SEQ ID NO: 4235 - DNA, 1161 bp, synthetic construct
  source 1..1161: mol_type = other DNA
atgaaaaatagaaatgtatggcggatcatcatgagtgagattaaaaaatatatggaggatttaaagaaaaataaaaccggactgaaaggaatcctcgtcattatcctaatattcgcgtacggaatactggggagctactacataatgaacctcaacataaacaattctatctactatacaatcatcaccatcgccactgtaggctacggcgacataatccctgtgaccccgctggaaaagttcttttccaccagcttggccctaactgggattggactgatcgcatacatattcaccattatcattactagctttgaagaaaacttgcacgacatccgcagtggtcgtcacatggagaagaggttggccaagatggaggaccactatatcctctgtggtttcggaagggtgggcaccgcagtgtatgaagaactgatgaaaagaaaccaaaaggtcataattattgagaagaatgaagacaagctggaggacatcgaagagacggagaacgtggtcccattcaacgccaacgctacagaggacaagacccttaagaagctcaatattgacaagtcactgggggtgattgtcacaacgggcagcgacgtagacaatctcttcattgtgctcacaacacgggaaatgaacaaggacgcttggatcatctcacgcgcgagcaaaaaggagaacatcaaacgacttaagcacgctggcgccaacaaggtcatctcccccgaggtcagcggcggcactgacatttactttgccgcagtgcagccaaacctggtgcatatcactcagaagcacggcattgattatcttgagagggagtttgaaatcctgaaaaagcacaattgccatctggaaaacatcgaataccacttcccagggatcaagacacccgttacccggaccattggggtgttagatgaggaagagaaggatcacttcatcgatatggttaaaaacaatcccgaggtccatgaatcgatggatgtgatgtacgagaccgtgaacggagtgcattcccactggatctccggtcctgataaaagtcatgttgatatggtgattgaggagctgaagaaagaaggcaacctgctgggggttaatctcgactttaaggagattaatgagtttacgaaacagttcaaggagtga

SEQ ID NO: 4236 - DNA, 567 bp, synthetic construct
  source 1..567: mol_type = other DNA
atgaaggagtacctgagcgagaccaaatccatcgattacatgaatccgatcatccaggagaaggttaaagaactcaaggagcaatcctcagacgacgcagactacataaaacgcgcattcctcttcgtgcgggatgaaatcccacacagttgggacatccagaccaacacagtctcgaggaccgcctccgatgtcctgaaaaacaagacaggaatatgttggactaagagctgcctgcttgcggccctgctccgagccaatgagatcccctctgggatcagctaccagctactgaccattggcgaagacgacagcttcggccacatgattcatgctctcaacactgtgtatatggatgacctagataagtggattagaatggatgctcgcgagaatgtaggtgatgacgacgaggaatttagtctggataaggactatttagccttctcaccccgggaagaatttggggaggtggattatcaggacaataaccctgacctggacgagaaattgattaacctcctggagaagacggagaaccttttggaaatggagctggacttttga

SEQ ID NO: 4237 - DNA, 888 bp, synthetic construct
  source 1..888: mol_type = other DNA
atggagattaatggcgtggaaataaaagaaacatacgccgaaggcttcggaataaaggtgacaagaatacttgtcactgccgcaacggctaagcttgcaaaaattgccgctacagaagctaccgggtatgccacctctgtaatcggctgccctgctgaagcagggattgactgttttgtccccagcgaatgcacgccagacggacggccgggctacgcaatcatgatctgccacgccagtaaaaaggctctggatcacgagctaatggagcgaatcgggatgtgtgtcttgactgctcccacagctgcagcattcaacttactcgaatctgaggacgagctgaaaaccgctttcaagctcaagtacttcggtgatggcttcgagaaggattgctgcattgatggacggaaggtgcattcgatcccaatcatgagtggcgacttcatagtggaatccacgtttggatttaaggccggcgtggcgggcggcaactttttcatcctcgcgaaggaccaaatcaccggcgtgaaagcggcgcagatggccgttgccgctattcgcaatatccccggcaccatcacccccttccctggagggatggttgcctccggtagcaaggtgggatcaaacaagtacagcttcctgccagcctccaccaatgagaaaatgtgtgtgactctgaaagaccaggtggacagcgacattagggaggatgccgagggtgtatttgagatcgttattgacgggctggatgaggagtccgtcaaaaaggccatgaaagccgggattgtcgccgcctgttcagtggacggagtgctggagatcagcgccgggaactttgacggtaagctcggggcatatatcctgaacctgcacgatttgttctga

SEQ ID NO: 4238 - DNA, 1272 bp, synthetic construct
  source 1..1272: mol_type = other DNA
atgaaaaacaagaaactgataattttcctgatctttgggctggccatcatggccgcaatgctatacttcatcgggatagatcaggtagtcgacgcgctcaaatactcgaacctttggtttgtgttgctggccgtgttattacagattttcacgtatttcctctacacatggcgctggcagatcataaacaagagtgccggcatgaccttgggaatctggaagctgctgcccatggtgctcgtaagcctggcggtgaacaacatcactcccagcggacgtggtggcggagagcctgttcgggcttatctcctggccaaggaggggcactacaagttcgaagacaccttcgctaccgtaatcgccgatagggctctcgacacatttccatttgtcatcctcgcaattctgaccatcatcgccattattttcagcgtcagcttacccgtctactggatcgtcatcctcgttctgtgcgttgtgggcatcactgcaatcgttatcctactgctttacgtctgtatcaatgaggcattcggcgtgaggctgacagaatggatactaaagattaccaaaagattctataagaattataacgatgcccttgaaaaacgaattgtggaggctgtggctagttttcagtcgacaatgaacgcattgatccgggataagaatattatctactatgcactgcctctctccttcattatttgggtgtttgagatcctgagagtttacgtggtctttctagcctttggtgccaaggtatcccctataatcatcggcgaggtgtttatactcgcttcccttgtgggaatggttcccctgcttccgggcggcctgggggccattgacggggtgatgattttgttctattcccgctcaggaatcaccgccagcttgagtgccgccgcaaccgtcgtggagcggtcaatcagtttcggaatgacgacaatcctgggtctgatcttcctcatgaagtacgggactagcattttggacgcgtcattcaaacttgctgagagcgagaaagctgagaatctggaagagatcactgaagacgagcagaagatactggaccaactctccgaagatggcgataaatccgaggactctgacgaaaatagggaagaagcggtgctggaagtgctggacggcgagccaagcatcgaagtcgtggacgaggaaccgaccattgaagtcattgacgacgagccaacgattgatgtgctggatgagaaggaggaggccatagatgagaaagtgaagaactga

SEQ ID NO: 4239 - DNA, 1491 bp, synthetic construct
  source 1..1491: mol_type = other DNA
atgaagaggaaatacattacgaaggccgatttgttcatcgtgctccactaccttggatacattatgcagggacttggcgtggtacttatagtcccaaccctggtggcgctgatctacggcgagtacgaccccatcgctccctttatgatcccttgctttgtgagttttgtcctgggcacggctttcagtaagaaattcaaggactataccaagctgaggctgaagcacggtatgctaatatcatcctttgcatggctatgggcctcccttatcggcgccagtatcatggtcctgtcactgggcatccccttcgtcgacgccatctttgagaacatgtccgcatggaccggcagcggaatgacttttttcgtgaacgttgaggtattgccgaaatccatcctattcttacggagcctcgagcaatggctcggggggttaggaattgtgattatctttatcggtattttaatccgagcagggactgccgcctcccgcctgtacaaatcagaagctcgcgaggagaaaatcaagccaaacatcacaaacaccctgagaaaggctctcgaaatctatctcatctacaccgcagtgggcatattccttttcatcctcgctgggctgcccatctttgatgccattaacatcacattcacaagcatcagcacgggaggcatgtcgattaagaatgcgaatgtgggcttctaccaggacagcatagtctacctcatcagcatgtttctaatgatcttgggtgcgaccagctttaccatccactacaagattgtaaagacaaagggcaaagccctctttaaagatgtccagttccagctgctgattaccttgatcatcgttgctggggccttctttatagcgacgaataagatggtccctatcgaagaactctttaccattgtttccgccgtgaccaccacaggggcaaatgtggttgacccccatgtgctggccacatggaacgggtccacattgattgttctgatggtcttgatgctgattggcgggagctcaggatctaccggagggggactgaagctcatccggattattaccgtgctgaaaggcatgaacctgactgtgactaacctcgtgagccctgaagggcgcgtggtcaataccagaattggtggaaagaagataaatgagcgggagatcaaggaggcctctgcatatatcgtgacgttccttatgttcctggtattcggctggataattatgacaatgtatggctatgacccattcactgctctgttcgacgtgatttcgattcaaagcaataacgggctgagtactggaatcgtgtatggcggtctgccattgccgctgaagctcactctgattttcctcatgtggataggcagactggaaatcatacccgttctggtgctgttccgtactttttatggtcttgtcaaccctaagcgaaggattaagcagatgaaaaaaacaaacggaaatgataaaaaaaccaactga

SEQ ID NO: 4240 - DNA, 675 bp, synthetic construct
  source 1..675: mol_type = other DNA
atgtacattgtgattatgggtgggggtcgggtggggctctccctggccgaccggttgatcattcatggctacgacgtcacgatcattgaaaataatgacgagctgtgtgaccacgcaagcgaggagctcgacgcaatgattatctgcggaaatggcacggatacaaagactttggaagaggcgaacatcgaggaggctgatgtttttgtggccaccacagggaacgacgagagcaaccttctgagttgcatcctggttaaggaatataccaatgggaagatcatcgccagagtcagcaatcctgaccacgaggaggcctttaaaaaggtgggaatcgataaggtcatcagtccggagcgaactgcggcaggattccttgaaaaagtcatcacaaggcccaacgtggctgacctgatggccttcggagccggcaacgctgaaatactggatatgaccatccagaaccccaaggtattcggcaagaaggtgtcggagttttccccaaccaaggattacataataatctcaaaaaacaacgacaatcacgaactagaaatcccccagccagatgatatattaagcaacggcgacaaaatttccattctggtgaaacgcaacgccttcgaaaaagctgagaagaaattcatgggggcaggcggcctcttcggattttga

SEQ ID NO: 4241 - DNA, 648 bp, synthetic construct
  source 1..648: mol_type = other DNA
atggagaaaatcaagaacgtctactgtatcgaaggactgatggccgattcaaactcgtatttgattgataacaatgacggcgatggggactacaattatatactggtcgatacaggcactggacagtccaatgcgttcctgttctcacagttaggtgaaattggcgtcaaacccgaggatatcgacctgatcgtgaacacccactgccattttgatcacgttgggggaaatgactttttccccaacgccaaaatcgcaatccataaaaaggacgctgtggcactaagggacccagacagcgagctcacagtgagcagcctctttggtgccattgtgagaaagcacgatgtggacattgaactggaagagggagacaagatagctaatttcgacgtcatcttgacgccgggccacaccagtggaggcatctccctgtgggacggcgagatcctcatttgcggcgacaccatcttcgccaacgggggcgtgggccgcatggacatcggtgggagccccattgatatgaaggacagtctgatgcggcttaaggagtttgatgttgaatacctgcttccagggcatgggccttgggtaaagaacggtaaggagcacgtgaaaatgtcctgcctcaacatgggaatacgatga

SEQ ID NO: 4242 - DNA, 339 bp, synthetic construct
  source 1..339: mol_type = other DNA
atgcgggctccagccagcggcggcgccactaaaaaacccctaccggacgtggtggcgggaaacggcaagatttacctggccatcgaggtaaagacaacgactaaagataagatttatatcgaccacccccagatcgacgccctgatagagtttagcgatattttcggggcaaccccatacttgggtatgaaattcaagtataccaaatggctgttccttgcacctgaaaacatcctcaagaccaagaatgggaactacaagatagagaaggactactgtctggaaaaggctctcgaactggacgagatctgcggattcgatacacaggtcaaattttga

SEQ ID NO: 4243 - DNA, 1032 bp, synthetic construct
  source 1..1032: mol_type = other DNA
atgaactttctgaacgaaaaccactaccgggactccatgaacgagatagacagcatcgagactctcgagctcatcaataaagccaactctctgtcgctaaagaagggctatacggagataagtcttgaaagggcggtttttctaagctggtggtgcgataagggagactgcaaattctgctatatgtccacccagaaggataaaatcaaagatcctaagaaggcccgacgtagagtgaacaacatcttggctgaagcggagatgtgcagtcgcctcggttggaatattgaatttctctcaggcggctacaagtcattcaccacaagcgaaatcaaatccattgctgaaaacatccactcaattacaggggatggggtttggttaaacaccgggatcactgacgagcttgaggagtacgggaaggaaatcaagggcatcaccggggccgtcgaagccgccaatcctgaatttcagagggaggtctgtcctagcaagcccttgaatcaaatctccaatatgctggacaaagccggcgacctggggttcaagaaggctattacgatcatactgggtcttggagaatcgctggaagatgtggagtatctgaaagactacattaaagagcataagatagaccgggtgatcttctactccctgaacccccacccagagacaatctatgtaaacagttcccagccagcttctctctactatgcaaatgtggtgagtagcattcgcctggcattccccgacattgagatcatttgtggaacatggattgacaatctggcaaacattggcatcctcatcttaagcggcgccaatggaatcaccaagttcccactgtttaagatgttcggcacaaaatacggaaagagggtggaggaggaggtcaaatggactggaagaaccctgaaaggcacctttacggataaagataagctgggtcccgaaaagagccagataaatccggagttcgaccaatatatcaagcggtacattaaagagtctttgaagaacaagtaccagtga

SEQ ID NO: 4244 - DNA, 1356 bp, synthetic construct
  source 1..1356: mol_type = other DNA
atgatgtgtggactggagattcacgtccagctggaaacggacagcaaactcttctgcaactgccctacaaactatcaggaggcccctgccaatacaaacgtttgtccggtctgcctcaaccagccaggggccaagccctttcccaccaatgagaaggctattgagaacgccttaatgatttcgctgatgctaaattgtaagatcgataagaatttcacctatttcatgcgcaaacattacgattaccctgatctgccttgcggatatcagaaaacatctgtgcccataggatatgagggcgagttgaatggcgtacgaatcagagaaattcatatggaagaagatccaggccagtacaagcctgaccgaggtattgtggactttaaccggtcaggcatccccctcatcgagatcgttacggaacctgacatgcactctccagaagaagctcggaacttcctcaaggagcttatcagagtactgcaatacagtggcggcgcacggggagaggggactatgagagctgatgtgaacgtgtccatcaacggcggcaatagggtggagatgaagaacatcaattccatcaaaggggcgtacaaagcactcaactttgaagtcatccgacagaagaacctcatgaagcgcggagtggaggtcaagcaggagaccagggcgtacctggaatcccagatgattaccgtgtcaatgaggatgaaggaggatgccgatgactaccggttcataccagaccccgacctgccacccatgaaaataagcgacgagcagatcgacaaggtgctggatatcatgcccgaagcgccgcacaataaggtgaagcgctttgtaacagactatggcatagatgaggagagcgctaaggtcctgacctccgagctggacctcgcgcagtgctatgaagaagtggctaaggaagtggaccccgtgtttgccgccaaatggatgagggacgagcttaaacgtgtccttacatacaacaaactggacttcgccgacagtggaatcctagcagatgacctgattgagctgttcaacatgttgcaaaataaggaaatcactaccaaagcaggtcaaagagtcatagagcagatgccaaatagcaaacagaccccgagggaaattgccgaggagatggggttgattggggtggtgaaggatgatgaagttcttgccgctgccaaacaagccctcgaggagaaccctaaggcagtggacgattaccacaatggggagaaggctagcttaaacttcctgatgggtcaggtcatgcgcctgacgaaaggtaaggcagacccccgcgagactgttaaaatcctacgggacttgctggaggaatga

SEQ ID NO: 4245 - DNA, 852 bp, synthetic construct
  source 1..852: mol_type = other DNA
atggagggaaaaactatggagcaagagaaggccgctgtgcgggattacatgaccaaaaatgtaattacagtcaggtatgactcgctcaacaacgacgtgatcgccctgatgaaagaaacaaagcacgacggttatcccgtggttgatgaagagggacatattgtggggataatcacggcgtacgacctactcctcaaagattgggagaccgaatacgtcaagagcataatgtctcaggaggtcatcgtggcccgggaggacatgcacatcaacgacgcttcccgggtgatgtttcgccacggcatcagcaggctgcccgtcgtagacaaggagagacatgtcaaaggcatcatgaccaacacagacatcgtgcgctcccatatcgagcgtagcactcccactaaagtcagtgcattccgcgagacgatggaaaagctttacgatatcaaaaccaccctgacacgagaacaggtcccagttgataagatcaaaccaacacaggacagggtttatgctgatgaacttcagggcagaacctacgagttggaaaaggggctggcggagccgaccatcgtggtgaagactggcgaccgatacattctggtggatggccaccacagagccgtggcaaccgtacaactgggactggataagatcgactcatatgtggtggacttcaaccaggacattaccttaggtatggaaaagacggccgagaagcaggggctcaagaccttcaacgacattacaatcattgacgatgatcagcaccctctgattgccttgactgaaaccattaagacggcaaatcagaagcaaaaaataagtgagataacaaagaataaaaattga

SEQ ID NO: 4246 - DNA, 288 bp, synthetic construct
  source 1..288: mol_type = other DNA
atggacgaaaaaatcttgcgggaggtctataacgtgctggaaagtcggagggacagccccattgattcatacacgtccaacatcatgaaagacagcgataagaaggcagaagacaagattctggaaaagattgccgaggagtgcggggagaccatcatcgcgtccaagaacgatgagaatctggtgtacgagtctgtggacctgatattccacacactgctccttctagtctacaaaggcgtagagtttgacgagatcctcgaagagttcgatcgacgcagaaaatga

SEQ ID NO: 4247 - DNA, 648 bp, synthetic construct
  source 1..648: mol_type = other DNA
gtgtttatactcatctttcgagatttcgacccagagattcatgatgtctacaaggtggcagaactgatctacgatgtggactatagaacctttgttcacgtcttcaaatcgaaggaagagggtgtggaagccattaaaaacagactcacgtttgaatttgctgaggacagggaggatgaaaatgagctgttctatctattctttgatgatgaggacacagaagagaaggaaatcatcggaatgttcaatggaggtaaaggagttcagcactccctgttcaaggatatcctcgagcaattcaaacacctgaagttcagtgaggccttagggctttcaaaggtctcttttatggataacttcgtcctcgtagacgtaggggacgacgacttctacatttgcgagttggccatctgctccaatcagcgtggcaagggctatggcaccgaggcccttgaccagttgattcagctggcgcgggacctgaactgtaagagggtggtgctggacgccgacttccggaacgacggggcatttcgcctctacagcagcaaagggttcaaggtgtttaacaagaaaagcttcggattccccggcaaaaagaggggcatgcggaatatggaactgatactggataacgctcgcgagtga

SEQ ID NO: 4248 - DNA, 816 bp, synthetic construct
  source 1..816: mol_type = other DNA
atgatgaaaaagattctcaaacggctcgccgaaggcgagatttcaatcgaggagtgcgaaactctgcttagggcggagaatatccgtcaactggatgacatcgccaacattgatatctcccgcaaggacaggaccggtttccctgaggccatccttgcggacagcaaagactatgaagatcttctagccattgtcaagggcttctttgacgacgaatttgacctaaaggataacattatcatcacacgactgtccaaggaacggtacggcctgctgagtcaggatttgtcgtacctcctcgataatggcatcaaatttgactacaacccgcgcgcaagaatcctggtgatatataaggacaaactcgtggacttcaatccagaatacggtaagattgggatactgacggccgggacctctgacatacccattgctgaggaggccaaggtcatcgtagagcaggggggatgcgaggtcctgagcagctacgatatcggcgtggctggaatccacagattgtttcccaaaatcgcctacatggtggaagaggacgtgagtgcattcatcgtctgcgccggaatggagggggcactcccatccgtggtagctggactggtggacgttcctgtcatcgccgttccaacctctgtggggtacggcgtgggagcagatggcaaggctgctctgtattccatgctgcagagctgtgctcccggattgtcagttgtcaacattgataacggcttcggtgcaggggtgtatgcgttaacaatagtgaaaaacattgccaagaaggtaaaaatgagcaaggagtga

SEQ ID NO: 4249 - DNA, 2448 bp, synthetic construct
  source 1..2448: mol_type = other DNA
gtggagagtattaaggtcctggtggagggcatcgtccaaggagtgggctttcggcccttcgtgtatagaatcgctaccgagctggagctggtagggtacgtgagaaacctggggaacgtagtggagataattctgcagggcactgacaatcaattagctgactttatctacaaactccagaacgagctgcctccaatcgcgaagataaataatttgcgtactgaagatatcgaaatcgactccccatatactgattttacgatcaaggagagttcagacagcttctctgggacttcggttatcccgcctgaccttgccatatgcgacaagtgcctagaggaaatcaacgacccccagaaccggcgctacaaataccccttcaatgcctgcacggactgcgggcctagattcacagttatcgagaacgtgccctatgaccgggacaagaccacgatggatgacttcccactctgcgatgagtgcgagatagaatataaaaacccactggaccgccgttatcatgccgaagccagctgctgtgaggtctgtggaccgagtttaaaactaatgaaaaacgaaaccgaggaaggcatctccaccgataaggagggaaatgaaattaaggccatgaaacgaacggccatcgataccgagtccaatgaccccttaaaggacactgccaggcttctggatgaaggaaagatattcgcaatcaaagggattggcggtacccacctggtggcaaacgtgaaggatgagaaagctgttagcaccctgcgtgaaaggttgggccggaagaaccaggcgtttgcagttatgagtcccgacattgagactgtgaggaccttcgcaattgtctcagatgaggaggagaaaaccctgctttccaaggagcgccccatcgtaattctgaaaaagtcaaaggattacgactttgcagagtctgtgtccccccgacttcacaatatcggcgtgatgttgccttacgcgcccctccatcatctgctctttaatgaaacagacagccctgcctacatcatgacatcagctaatgtccccggtgagcctatgatgattaccaatgaggaaatcttgcagaacctggatgaaatagccgattattacctcattcacaaccggagaatcctcaaccggtgcgacgacagcgtggcccgattccgcaacaacgaactggctttcattagacgcagcagaggatacacaccagagccgtatgacctgaagggcaagtacaccgatatcaatccagacttcgacaatctgaacatcctggcccttggccctgaactggacgtcacctttacaatcctgaagaacagtaaggcctatgtctcccagcacatcggaaatacaaacaaataccggacctatgaatttcttcaggaggctataaagcatatgatgaggatcaccaagacagacagcttcgatgcaatcgcctgtgatctccacccccaattcttcacgacgaggctggctaaggagtatgcggaaaagtacgactgcccattgattcccgtgcagcaccaccacgctcacggaatctccctgctgaacgaccattatgatgataatgatctcaatgaaatgattattatcgctgccgatggggtgggctacggtgctgacggcaactcttggggtggggagatcctctacaccgacattaagggatttgaaaggatggcgtcccttatgccgcaaaagatgccgggcggcgacttatgtaccaagtatcctgcacgcatgatggcctcgatcctcagtaacccagaaagcgactacgagaacgagaaatacacaaaggagtacatagaggagttgctgaacaacaattacctggactcctttaagcatggctcggtggagataaagagcctatttaggcagatggagaccaacctgaatgttgggattaacacaagtactggtagagtgcttgactccgtgtcaaccgcactccatatctgtgatgagcgcagctatgaaggggaggcttccatgaagttggagagctatgccttcgagtacaaaggtgaaggctctctggatgacttcccaatcatcgtgaaagagtatgaagatgagaatggaaaacggttgattctcgatactacagctatcctacgatacatcatagacaaaatagaagagggggaggacctccacaagattgcagcggcaggccagaaggctgtcagcattggactggccaaactcgccatcgaaagcgccaaagagaaaggtattactacaatcggggccacagggggagtcttctacaacgaagccattaccgattacatcaaaacgtacattgaaaaggaaggcttcgatttcattcagcacattaactcatgtcctggagacggttctgtctctctcggccaggccatcgtagcagggactaatctgaataacttttga

SEQ ID NO: 4250 - DNA, 498 bp, synthetic construct
  source 1..498: mol_type = other DNA
atgaagcggaaagtgattatgatacttgccattttgctggccgtgggaatgaccctaacagccgtgagcgcggaggacagttggagttttaacttctccagcgaagagaactccgacggcggatcaattaactttgagaacggcaaactgacaatacaggggatcgagtttaccatcccagacggttacgaaatggatgaaagctcaaagaaggtggctgaagacgctgaggatttcgatgcaaaatattccgcatgcaaattcaccaagggcgatgacgagatcgtggtgaacgtcttctttacggacggggacttcgagaacctcagcgcgaataatgccgaccaggtcgagaagaccctgaacgacattaaaggtctctacgaagaaaataagtacggcgacaatactcccacattcacttatatcgaggatgggaaggtcgttaagatcaatgccccgaacgatgaaatcatcgagtcggtaatgggaaagtga

SEQ ID NO: 4251 - DNA, 843 bp, synthetic construct
  source 1..843: mol_type = other DNA
atgaaaaaatcgtcaataattattttttttgcagtcttcgaaataatagccatcctcctcttcattaccctgaatgatattttctacctattcaacttcacatacatcggcgcctgtctcagtatcgggctctatttgtacaacgtagacagcaagtattccaaatacgctagaaactttatccagttggccatcggactctatatgctggtgtatctggggattatctcccgcgaaaacatgatgatcgagggattctggtattatctctttctgggggtcttcgaggccgcagtgatccactatctcgttgccaagatcctgggcccattcctctttggccggggctggtgtggatacgcctgctggacggcaatgatcctggatcttttgccctacaagactccaaacaaaaaccttgaccatgagcgcaagaacttcggtttcatccggtatattctgttcattgcttccctgattggtgtgggattgctgtttatgatgaatgtgccgaatctgagcaccgtgatgttctacctgttcatagcgggcaacatcgtgtactacaccgtgggcatcatcctggcctacgctttaaaggacaatagggctttttgcaagtacatttgccccaccactgtctttcttaagataggggcaagatactctttacttaaggtcaagtacaagcgagaaaattgtatcagttgcaataaatgctatagggtatgtcctatggacgttgatatctgcaacaatgataaaaacaagaaaaacgggacagagtgcattctgtgcctgagctgtgccaaggagtgtggcaatgacgcgctgtttctatga

SEQ ID NO: 4252 - DNA, 516 bp, synthetic construct
  source 1..516: mol_type = other DNA
atggaaaacgaagggcagaatcaacagaacctaaatgacgtcgatatggaggccatccttgatgtgatggggtgcaagacgagacgtgacatcatggacctcctcagggaggagccacggttcgttagcgagatatcccaggagctccagatcggacagaaagcaattattgagcatctgcgcgctatggaagacattggcatcctgacttcgtccaccaagaaggtagtgcggggcaggccccgaaagtattacgacatgcctaacgatgtgaacgtgaacatcacaattaccaaaaacacatttaatgtggccatcagccaggatatgctgaatgccaatcacgtcccgcaactgccctcaggagacgaatggagcaagttgctggacatcgaaaagcgcatagatcagggccacaccgaggcgatcgaggagttgaaaagtcagatacggctgtacgacaacctgaaagaaagagcagagtacattttagaaaggacttacaacaagtattga

SEQ ID NO: 4253 - DNA, 693 bp, synthetic construct
  source 1..693: mol_type = other DNA
atggctaacaaaaaagaagaggaaaaggaggaagagagcgaggatgctaagaaaagcacaaaagacaagatcaagtctaagatttccaagtcttcagatgattccagcagtgacaatgaggaatccagtagcgataaagaggaaagctcgaaggacgacgagaaagacaaggagttagccaaattgaatgaggacctggaaaagaaggatgaagagataggagaactcaaatcccacatccagcgactgcaggccgacttcgacaactttagaaagcagaacgacaagcagaagcaagacctaatccgctttgccaacgagggcctgatcgtgaagttcctggatgtctacgaggatatggagagggcgctggaaaattcaaagaccgaggaggagcttcgggaaggtctcgaactgatttattctaagatgaaaggcactctggaaaaggagggggtcgaggaaatccccgccgtaggggagaaattcgacccgttcaagcacgaggcattgcttaccgtggacagtccagatcatgagaacaacgagatcgttgatgagctcatgaagggctacacgctcaagggaaaagtgattaaatacagcaaggtgcgggtgtgcaagaaggcaaaaaaagccgaaataaataaggctgaggaagcgaaagacgacgaggataagaaagaggaatga

SEQ ID NO: 4254 - DNA, 1896 bp, synthetic construct
  source 1..1896: mol_type = other DNA
atggcggatgccaagaaggagaaaatcattggcattgacctgggcaccagtaactctgccgcttccgtccttgtcggaggcaagccgacggttatcccaagtgctgaaggggcaagccaatacgggaaggcatttccaagttatgtcgcctttactgaggacggacaacaactggtcggtgagccggcccggcgtcaggccgtgaccaatcccgagaacacaataagtgccatcaagcgaaagatggggaccgactataaggtaactatacagggaaagcagtacactcctcaggagatctctgcaaagatcttgcagaagatcaaaaaagatgcagaaagcttcctgggcgagccggtggagaaagccgtgatcacggtgcccgcgtactttgacgataatcaaagaactgccaccaaagacgccggtaccattgccggcctggatgtggtgcgcctcgtgaacgaacctacagctgcaagcctggcttacggaattgacaagcaggatgacgacgatgacgtgaacatccttgtattcgacctggggggagggacccttgacgtaaccatcatggagtttggcggaggcgtgtttgaggtgcagtccaccagcggtgacacacagctcgggggtacggacatggacaatgcaatcatgaagtacttggccgatgagttcaaggcggaaacgggaatcgacctaatgaacgatgatcaggccgttcaacgcttacgggaggccgccgagaaggctaaaattgaactgtccacaaccctgaccagcgaagtcaacttgcctttcataagcatgggcgccgacggcaagccacataacctgataaataacctgaccagggccaaactggaggagctcgtggaccccatagtgaacaagtgcggtcagcccatcaaacaagcactagacgatgctaagatgaccaaaaatgacattaataaaatcatcctggtgggcggaccgaccagaatgccagttgtgcagaaattcgtagagaactatataggcaagcctgtggagaggggaattgacccaatggaatgtgtggccatgggtgcagcgatccaggggggggtgctcgccggcgaaatcaaggatctggttctcttagacgttacgccactgtccctggggattgagaccctggggggcgtgagcacaaccctcattgaacgaaacactacaattcccgctaaaaagtctcagattttctcaactgccgctgataaccagccctccgtcgatattcacgtggtccagggtgagcggaagatggccgcggacaacaccacactgggacggttccagctcgtgggcatcccacctgcacccagaggaatgccccagattgaggtcacattcgacattgacgctaacggtatcataaacgtgaccgcgcaggacaagggcactggcaaagaacagtcaatcacaatcacttcctctacaaagctctcagatgaagagattgagaaagcggtgaaggaggccgaaatgaatgcggaagccgacaaaaagaaacaggaggaaatcgaggttaggaataatgcagattccatgatctacacggccgaaaagaccatcaatgaggaggagatcaaagacaaagtctcagatgaggagcgcactaacattgaaagattggtcgctgagcttcgcgagctaatcagcggggacgacatacctgctatcaaggataagacagatgaactcactaaagtcgttcaggacattggggcaaggatctatcaggaagctgctgccgcccagcaggcagcacaaggggccgctggaggcgccggccctgacccctcggccggaccctcgaatgatgatgatgacggcacaatcgatgctgaatttgaggaaaaggattga

SEQ ID NO: 4255 - DNA, 1176 bp, synthetic construct
  source 1..1176: mol_type = other DNA
gtgaggaaattggccgagaagagagactactatgaggtgctgggagtagataggacagctgacgaaaaggagatcaaaaaagcttaccgtaagctggcacggaagtaccacccggatgtagcggaagaggacaagaaggaagaggctaccgagaaattcaaggagattagtgaggcgtacgccgtgttatccgacgaagagaagcgacagagatatgaccaatttgggcatgccggtatggatggcttctctaatgaagacatatttcgaaacgttaactttgaagacatcttccagggcttcggcggtggcggaggctttgaagacattttcgacattctgttcggcgggtcaagtaggtcccgccactataatgcagggcctcgcagaggcggcgacatctacactgaaacaacaatcacgctggaggaagctgccagcggcgtggaaaaggacatcaagatacgacacgacgtcttgtgccccgagtgcggaggtagccgcgccgagcccggatcggaggtggagacgtgccccgtctgtgggggcaccggtcagaggaagcagatccggcaaagtctattcggacaggtgatgaatgtggtccagtgcggcgagtgcaaggggaccggtaaaattatcaaggagccgtgtcacaactgtaaaggaaaaggaacggtcaaggaggacaagaccatcagcgtgaaaatcccagcaggggttgaaacaggcaaccggctccgcgtttcaggagaaggccatgcgggagatctggggggaggcaacggcgatctctacgtcgagattaatgttaagccccacaaagatttcgagcgcgatggcgccaacctctactacgagaagcagatctcctttgtgcaggccagccttggtgacactgtggacatcccaaccatagatggggccgtggagctcaagatcccagcagggacccagtctgggactgtgttccggctgaaggagaaaggtatgccccagatgcggagaagcaccaaagggaacctgtatgtgacaataactgtcgtagtgcctcaaaagcttaataaggaacagcaaaagctgctgagaaaattcgctcagattagcggcgatgaaatctccgtctataaaaaaggaatttttgataaggtcagggatgccattaacaacccttga

SEQ ID NO: 4256 - DNA, 771 bp, synthetic construct
  source 1..771: mol_type = other DNA
atgaaactgatgatgtacagtatcaaaatgcggtcggctaagggagggccccacgaggagggtggcaaacacatatccggtgccgaacgtattctgcgggaagatgaaattgaggaagagctaataaatgtctatagacgcgcgatcacacacgagaagggaaagccggactttatcaacctcaagatcgaggccatcgacgaggacaagatcctctataagaagcggctaaacatcattcagcacaaagtaagcagcaaggaggagggcctgaagctggcaaaggaacttctgataaagaacactgtgagcgaggaggccgctaaagagggcatctcatccattcagaagctcaaggaaagcatccatggagccatgctccttgacaaggacagtgggaaaagaattgatgacaagggtattaaaggggtccgagtgaccggaatagccagtgcagacattaagaaatacaaagaatccctgaagagggacggcagggaaggcctgcacctggaggaggcactcatccttgctagcaagatcgcctcctgtaaggcgatagtggccgaactgtgctggtcagatgatcccagctacgtgattgggtacgttggcacgaaagaaaactatcatcgcatccctatcctgaaagataagggaaatccagtggggggcagggttttcttcgtggatacaagccagttgaatgacaactacaccctggaggacttgatcgattacttggagaaacaaattgtcttaatcgaatga

SEQ ID NO: 4257 - DNA, 1245 bp, synthetic construct
  source 1..1245: mol_type = other DNA
atgaaccccaatctggagatgaaactaaaggaagagctggaggagctgaaaaacaacaatctcaatcggaccatcgatgacctgcggtttatcagctctacaaaggccatagacaaggacggcaaggagttcctagtgtttgggactaacaactacctgggcttgactcaccagccggatgtcattaatgcgtcgaagaaggccagcacatacggaacgggctccaccggtagtcgcctcacaaccggagcgagctttgaggctagggagctcgaggaaaacctctccaagttcaaatccaccgaatcaactctgatctttaacaccggatatatggccaatctggggattatctacactcttacaaaggaagacgacattatcttcagtgaccagctgaaccatgctagcataatcgatggaacgagaatatccaaggctaaagtgagggtctataagcacaaagacaccaaggatttggagaacctgattcaaactgagatcaaagaattaaaagagaaaaacatcaactcatccaatttcttcattgtgaccgatggggtgttcagcatggatggtgacatcgcccctctgccagagctcgtggagattgcaaacaagtacaactgctgccttatcattgatgacgcccatgccacgggcgtcattggcaaaaccggcaaaggaacagttgagtattacaaggacaaaactgggatagacttaacggaatctgttgatttgcagatcggcaccctcagcaaggccctcgctagtgaaggcggtttcgtgtgtgggaagaagacctacatagactatctcataaacaaatccagaccattcatcttctcgaccgcactgtccccctctacaatcgcgagtgccaacgctgcactgaatctcttgaagaaaaacagcaacgagtacctgactaagcttcagaataatacaaaacttatgcgtaatctgctcaaggagggcgggttgaacgtgattgacggtgagacccccatcattccaattatcatcggccctgcagaccttaccaacaagttttcaaaggaactggaaaaggagggaatcctggtctctgcaatccgcccgccctcagtacctaagggggaaagccggctgcgactgacggtaatcgccacccacacaaaggaagagatcacttttacagccaaaaccattattaaaatctggaatgatctgaagaagaaactagaatatgagaatcactga

SEQ ID NO: 4258 - DNA, 9531 bp, synthetic construct
  source 1..9531: mol_type = other DNA
atgaataagcgaatttttctctatatcgccctgatctttatcatttccctgctgtcgttttctgccgtcagtgctaatgaggacatttcctccgacaacctcatcctggatgagaatgtgtacgacgagaaaatcatcctcgacgatgtgcaggacaagaacatcatatctgacaatgattacgacgacgtcatccccgtggaaaatgcgaatgataatgccattttagcgggaaacgatgaagaacttatcttagacgagaataacagtgagataagcgaggataataaaaatgacaagaccaagctctccgatcccaacacctactcttttacccggctgaatcaagccataaacagtggagctagcgtaataaatctgacggacaactaccagtataccgagggggatgaatcattcattcacggtatcatgatcagtcgcagcataaccattaacggaaatggcatgaccatcagtgggagcggcgttgcccgtatttttgaagtttttacctcgaatgtgatcatcaataacatcacttttcgagatgcctatgcggaaggcgacagtaatcggcagaactatgggggggctatctttatgtacgggagcgacagcattgtccagcactgtaagttcattaacaacaacgctaataacgctgggggcggcgctatcgtgctggtgggttcaaacagccgcgtggaatattccgacttcaccggcaacaacgggcagaacgggggagctgtctatctgtatggtaataacaccaaggcgatttactgtaacttcaccagcaacaatgccagcgagaaggggggagccgtgtatacctacggaagcgatatcacagtcgagttttgtaacttcaccaacaactctgcttacctagagggaggcgctatcgattgggagggtgagagggggaccgtcaaacactccagcttcgccaacaacacggctaacaataacgggggggcgatctcgtggtacacggccaacgggacggtggagcactccaacttcatcaataaccgaatggctacgtttggtggcgctatctggtggtatggggaaaagggaaccgtgaaacattctaacttcaccaacaacagtggacggaatggtggcgctattcagtggtctaagaatgacggaactgtagaaaattccaatttcactaacaacactgccattctcgccggcgctgtgcggtgggtcgctgacaacgggacaatcaaatattcgcgcttcattaacaatcatggttatagcgctggggctatcgactaccaccttacctacgccaacattagcgggtgtttatttatcaacaatactagcgactacagagcaaacgtgtacgaggacctgtttgagagcaaatcgtattcgaattttaacaacaacatcttgctaaacaatggaggcaatgaaattaactttaataccagcgagggcttcaacgcagactataactggtttggagacaactcactgaattacctggacaagcccaacatttatagtaatacttggctgtttttacagcccatcgtgaaccatgacagtgtgttcctgggcgaaagttgcgaaatcacttttaggctgtactcctacgatggaaccgaggtgcacgagtacgacaatgccctggtataccccattaaactgactctcaattcgaactacggcaacgtcaatgacaccgtgggactggaagaaaaggccatattcaccccccagactctgggctacaccagcgttgacgtgtatgcagagggctcctacatcggctcagttccaatcaacgtgtatgtgccaagctttagcgacttgaacaggaccataaacggcaacgaggactccatcattactctgaataaacactacatctttgatccggagaccgacgctgctttcataaacggagtgatcataaaccgcactgtgacaataaacggaaatggctttaccattaacggttcgaacaatgcccgtatcttccaggtaacggcctctaatgtcgccatcaacaatgtcacgtttgccaacggatatgcaaatggcagcactgatgaggacaaagacgggggtgcaatccactggtcgggcgcaaatggtaatattgaaaactctacgttttataacaaccacgcaacaggggctggcggagcaattatctggcaggcccagtacggcaatgtcagcacttgcctcttcattaacaacactgccgacgatggcgccaacgtgtaccacaacaactatccatctgattcccactcgaacttcaacaataacattatgctgtacaacggaaacaatgaagttcatttcacagtctacaacggctccaacgccgactacaattggtttggccacaactccagcaattacaatgacgcaacaacgggcatcattggcgatatctggctctttctgaatgccaccgccaacccagacacaatcctgatctcaaacagtagcgagattagctacaagctttatgcgtataatggacgggagatccaagagtacgacaatcaccttctgtaccctatcacattgaccttgagttcgaccaatggaatcgtcaacgataatgtcgccctggaggaaaaggtcatattcacccctcagaaccttggaacggccacagtgacagctaaggcagccggcacggacatccagaccatatcaatcaaggttttcgaagccagtttcagtgacctgaaccgaaccatcaacggcaacgaaggctttgagataattttggataaaaattatgcctacatacccgagatagacgctgctttcattaatggaatcaacatcacccacacagtgaccattaatgggaacggaaacacaatcaacgggctggacaaggctcgcatcttccaggtaacggcgcccaacgtcacgatcgataacattacgttcatcaacggatatgccaacgacgacggtggagccatcaactggcagggccccaacggaatcatcattaactcagagttcatcaacaaccatgccactagtgccggaggggcgatccgctggtttgctcagtacggaaatgtctctgcctgcctatttataaacaatactgcagatgatggtgctagcgtatattataatgattatccgtctgactcccattctaattttaacaataacattatgttgtacaacggaaacaatgaagttcacttcactgtgtatgagggctccaatgccgactacaattggtttggcaacaatctcagtaattacaatgaaagacctacaggctttgacggcaacgtttggctctttcttaatgccacagccaacccactgacaataagcatctcagaaagctcggagataagatataaactttatgcctacgatggacggaacatcctggattataataggactctgctttaccccatcaacctgaccctcacctccctgaatggcaatatcgaggacatcacagaggacaaggccatattcgcgcccgagaatcttggaattgccacagtgaccacaaaagcagagggcattgacatccagaagatctcaataaatgttctgtacggaacaatcttctatggcagtttcagtgacttaaacaggaccataaatggcaatgaggacgcggaaatcaccttagacaaaaattatgcttataatccggagattgacactgccttcatcaatggcattgtcatcaacaggacactgactatcaatggaaacggttttaccattaacgggtccaacaaagcacccatttttcatataaccggggacaatgtgaccatcaataacattagctttgtgaatggctacgccaatgcatacgtgaatggctatgacggggaagatatgagggggggggccatctactggcaagggagaaacggcaaggtaacctactcgaacttcaccaacaacaatgcaaatgatggtggtgcaatctactggtttgggacagacgggatcgtagaatacagcaatttcattaacaacaacgcaaacgatggtggggcaatttactggtttgggacagatggtattgtggaatattcaaacttcattaacaacaatgccaacgacggtggcgcaatttattggtttgggcagaacggaaacgtcgaaaattccgtcttcacccaaaaccacgcgggctcttacggcggggcgatttactgctcgggtgctgagagtatcgtggagtactcaaacttcaccaacaataacgcctacaatgggggcgcaatctattggtttggtcagaacggcaacgtcgaaaattccgtcttcacccagaatcatgctggctcttacggcggggcgatttactgttctggggcggagagtatcgtggagtactcaaatttcaccaacaacaatgcatttaatgggggggccatctactggttcgggcaaaacggaaacgtcgaaaattccgtcttcacccagaatcacgctaccttcgcgggaggtgcgatttattgctctggtgcagagagcattgtgaaatatagcaatttcaccaacaacgacgccattaaggggggtgccatctactggaatgggcgaaacggcaatgtcgaaaattccgtcttcacccagaaccatgtggacaatgatggcggtgccctttactgggatgatagtgaagggaaagtcacttcgtgtatatttgtgaataatactgctgaaactaagcacagcggacaccttattttgcctatgggcagaggtggtgcaatctattggaacgggcgaaacggcaatgtcgaaaactccgtgttcacccagaatcacgttgacaatgatggaggtgccctttactgggtggatagtgaaggggaggtcacttcgtgcatatttgtgaataatgccgcagatgtggaggccagcgtttattacaacgagcggggtgcctactccaacttcagcaataacattatgttgaataatggcaagaacgagattaagttcaagattttcgaccgctccaatatagattacaattggttcggaaataatctcagcaattacaacgagaagccaggcgggtttgagggcaacatttggctttttttgaacgctaccgttgaccccaatatgctcctgcttggtgaaagttcggaaattacgttccgcctgtacgcctacgatggaacaaatgttatcgagtatgacaatgatctgatatatcctattaaccttacgctgatctcatcaaacggcaacatcaacgagactgttgggttggaggaaaccgcaatattcacgcctcagaacgtgggcactgccatagtgacggccaaggcggagggctttgacatccagaccgtatcaataaatgtgcgggcagccagcttcagtgacctaaacagaaccattaatggcaatgaagatgcggagataactttgggaaagtactacgagtttgatccagagaccgatggtgctttcatacatggcattatcattaaccgcacagtgacaatcaacggaaacggcacgacaattaacgcttcaggcaaggctcgtatcttccaggtgatcgctgataacgtgacactcaataacattacatttaccaacggcaacgcaagcggcgagggggctgacaggagcggaggcgctatccggtgggagggggctaacggtattatttcatactccaacttcacctttaaccatgcatacttgactggaggggctattatctggtccggtgagaacgggactgtcaagcactcctccttctctcaaaatgatgtagatggcagcggtggcgcgattaggtgggccggggccaagggcactatcaccgattccgatttctacctcaacagtgccacagacgcaggggccatctggtggcttggggcatacgggacagtgaagtactccaacttgatcaacaaccatgccggttcccgggggggagctatcatgtggagtggggaaaacgggaatgtgacatactccaacttctccctcaataatggcggcagtggaacggggtacgatggcgggggcgcgatcttttgggatcatttaaacgggactgtgtcatattccaatttctccaacaaccacatcaacggtcatggaggagctatcgcctggcacgagcagtatggcaatgtctcctcttgtctgttcgtgaacaacactgcaacggacggcgccagcgtataccataatgatcactcagaatcatactccaatttcaacaacaacatcttgctaaacaacggggagaatgagattcattacgacgtgtatgatggctccaacgccgactacaactggtttggcaacaatggaagcaattacaacgagaagcctgcaggcagcgtgggcaacgtatggcttttcctgaacgccacagccgacccaaaccccatcagcatcctggggagcagcgatgtgagctttaagctgtatgcctatgatggactggacctgatcgagtatgacaataatctcctgtatccgatcatattgagcctcagcagcagcaatggcaacataaacgacactgcgggcctggacgaaaagataattttcactcctcaaaacattggcaccgccacggttacggcaaaggccgaaggcatcttccagaccctaagcattaacgtgtatcctccaagctttagtgacctgaacagaaccattaacggaaacgatgatgatgagatcacgctggacaaatattatgagtttaatccagagctggattcagcgttcatacacggcatcatcattaaccgcacagtgaccatcaatggaaacggaagcacaattaacgggtcaagcaaagcacgtatcttccaggttatcgcgcccgatgttgtcctcaacaacattaccttcgccaacggaaacgcgaatggtgagaacgaggggggctacgggggcgctatcctgtgggagggcgataacggccgggtcgaagacagcaccttcatcaacaacaatgctagcggatacgggggcgcaatctttggaggcaactgctctgacaatgtgattttccaaaacaaccacgccggcatcgagggagatgactggtatgtccctaagcctgtgatctccgtcaatgacttcacatccacatataagtcaggagagaagctatacgtcaatgtgtcctatgtgggtactcagatagacggaatcaacgtgacaatcagcgtatttgacagctccaaccagttaattggcaactactcctgcctcagcggggacggctggacggtggatctggatgctggcaactataacgctttggtgtttgtagattcagatgaatacggctatggagaggagacaattgccctgacaatcaataagcgcgcttctcaaatctccgctaacccattgaacacaacatacaacggaaacgagaacattataatgatcctgaaggacaattataatgaatccattgccaatgcaacggtgctggtggactttaatggggagaaaaacctcacaaccgacgagaacggtcagatcgttgtgtccgctaatggaattgtgcctggagaatactgggcccagttcatcttcgacggcagcaagaactacgatgggtccgatgagaaggtgaaggtgattatcagcaaggcttctacaagcctaagctcagagaatatgaatgtgagctataacgagagcaagtacctgattgctacactgaaagatcaatattccaatcccctggccgaaatcagcattgaatttaaatcgaactcatcaactgtgaaaaacgagaatactgacaataagggccaagcgaagctcttgattgacttcaacccaggcacgtataatatcgatatcagtttcgccggaaacagcctgtacgatgcctcatatgcgactgtgactgtggtggtgaacccatctgacgacagtggcaatggcacggagcccagtggcaatggaagcagtggaaacgggactagtcccgaaggaaatggtacttctccaggtgggaatggaacctctccgagcggaaacggcacgtctcccggtggcaatgggacttctccctccggtaatgggactagccccggtggtaacggtaccgacccggggggtaacgggacttctcccagcgggaacggtaccgatcccgggggtaatgggacttctcctagtggtaatggtaccagccccggcgggaacgggaccgatcctagtggcaatggaacctctccgggcggaaatgggactgatccgggggggaatggcacttcttcaactgttaaagataccctcattggcattagcacatccaccgtcatttatggaaatgacgagctgatcaatctgacccttaccaccgccgacaaaacgcctattgatggggtgattgagctaagagtgggcaattctatctacaacgtaacgattaccgggggaaaaggctccaaggctctgtccaatctgacgataggcaactacaccgttacggcagactataaaggagattctgaatacaattcatccaccgccagctctagtttcaccgtgagagaccggatcgaaaccagaatcatctataacaatatgaccactgcccctgttggggccaacgatggcagaattggtaattacttcagggtcaaactggtggatgaaaacaaccaagccctcgcaggagtgcctatccagataggcttcaacggccgcatctacaacagaacaacagactctgaaggcggagccaagctacagataaacctggcaaaagaggatggctacacctttgcaatctgcttcaaaggagacgacaactacaacgcctccttcgaggttgcaaaaatagacgtgaacaagaaatatccaaaaccaaacagtgcaaattcagagtccgccgagccagctaacaaaacacagaagaacacaaggctcgaaacctccatcctctacaaggacatgaagaccgaatcagtcctcaaggcggaaggccgggccggaaagtacttcgagatccaactcgtagacaacaacaaaaaggctttagccggagttcctatcaaaatcggcttcaacggagtggtctacgaccgaatcacaaatgccacaggcggcgccaaactccagatcaacctcctgaaagtgacccagtacacattcgctatcgcatacctcggcgacagcaagtaccaggcctcattcgaagttgcaaagatcactgtgaacaaacagaccccaaaaatcacagccccgcagaagacctttaaggccaaagcaaagacaaaaacagtcactgccacactgaagtcacagaggggcacactgctcagcggcaagaagatcaagtttacagtaaacggcaagacctacactggaacaaccaattccaagggtgttgcctccgtgaaggtctccctcagcaagaaaggaacctacacagctacggccaagttcgacggagacgccaataccaaggcaaccagtgttaaattcaaagttaaaattagttga

SEQ ID NO: 4259 - DNA, 342 bp, synthetic construct
  source 1..342: mol_type = other DNA
atggcccgccacaaatccaacaagcggctgaataaaggggaagaggaggacccaatgtcgggagcagcgaaccttgtggatgctatgctcgtgatagccgtgggcctcctggtctttctggttatcagctggaacatgcagggaatcgtgttcaacgaggacatgaccccggaggagaaacaggaagtaatgcaacagatgcaacaggtgacggaactagaagaggggcaggaattgaatgacacccccgatgtcagcaatagtagcggtaagggctatacagagatgggcaaggtctacaaggactcatccactgggaagctgattatggtggagggctga

SEQ ID NO: 4260 - DNA, 645 bp, synthetic construct
  source 1..645: mol_type = other DNA
atggtcacagtgattcctggaagcgacctgctaacgtccgcactgaatgttgtgtctcagagcttacagattccagtgatagtctttctgctgattttcgctgtgtacgccgtaattacggtcggggggcttatctcagaatacagttctcggaagaaagtacccgtgaaagtgatcaaggacctgatctacgccataagtagaagcgaggatgtgacagagctggaaaacatccttaagaacgcacgcatcccaaagaatcagaagagggtgctcatcaacatagcgcggagcggagagctgaagaaagactcccgcgaggctctggccgaaaaattgattgagaatgaagaggacatcatcgagaaaaaactacaaaagacagatatcgtgaccaagattggcccgacccttgggttgatgggcaccctgatccccatgggtcccggtctcgccgccctcgggagcggcgatgtgaccaccctctccaacgcgatcatcgtagccttcgacactactgttgtgggcattggatcaggcgctgtggcatacgttgtctccaaggtccgtagacgatggtatgagcagtatctgagtaacctcgatgctctgtcgaaggccgtcttggacaggctcaacgaatga

SEQ ID NO: 4261 - DNA, 726 bp, synthetic construct
  source 1..726: mol_type = other DNA
atgttttgcggggagaaaatggatacaattagtatgctctggcagttcggcatattggcagccgtgcttgtatttgggatcaagctgggtctggccgttggcctggccaacctctccaagaagtatctggcgacggtctgcattggatacggggcaggagtgctcatcctggcgcagatttcctcctattttgctacggagatcaccgagcttatctacacctacaactctctgttcttcattatcatggcggttataatgattctagccggtatcttcacaatccgggaatggaaagtctttgagaagaatactaccgccgccacttgtgctgccgtgatcgccccttgcccatgctgtttcgggtccatcatcgtcagtatcttgctggtggccccaacagtcggcttaggggctgtggaccttagcgtatacgtggcagcagccctcgtgctgaccattatagttacctactttgctagtagcatattcgtgaggtatgttgacaaaccctaccccattgtactgggaaacttcatgttcttcctcggaatttatttcctcttgtctgccctggtcattccgaacattgcagcaatcatgaataagtcaatgggcagcatcagcatcgtgagcatggaatcgctggctggctctatagtggctttagtgctgctggtggtgatcggcatcgtcttttcacgcaaaaacaatatcctaagctga

SEQ ID NO: 4262 - DNA, 5628 bp, synthetic construct
  source 1..5628: mol_type = other DNA
atgaaatacaacaaaaagatcttctttctgtttttactgttgtgcctcatcattccccaggccatctatgcaggggatgtggacgacttatcggacgctggtaactacacgcgcgacaattcacccctcacaataagttccacttaccaaagttctacttacggctcagatgggggctacgacgacaaaaatgagaatatttatattctggataaagttagtgacggggataaatctaaaacatgctgttctaaggaccttagccttgataatgcttgctctatggataaaagctcgtgttctaagagcaactccgcttgttctaagggcatatcttccgacaaagattcatcgaacttgtctaatacatacctggtgtctgaaaataattacaacgactttaatgtggatatcgacctgaacgataaactgtcagatctggatctgaacaatgacctgagtcttaacaaagatctgactcttaacctcaattcaaataacgatatggattatctaaacctggaggaagtgatccagacagatggaacgttaacttatgagggcgacttggatcagacttatcttaacgacgagagcctgaaccaagatgtgcaaaatgatgattctctgaacaaaaacgatctgaaatccccattaagtgatgaaaacacatttaatatttttataattagtgataataccggaaataatctgtttgatgcagtggcatgtgaaatcttggacaattccaatttttccaatgtcaaattcaacattagaagcggaaaccagatcaacgctatgagcgaggatgagatctacgaactgatggctccctgcgacgccttcatcggccagtgggtaagctccaatgtggatgcagtattaaccagtcttttaaacaaccatccggaactgtcaaacaagaaactgttccttatcctggaaccacctacgggaaacatcaattcaagctccagtagcttgaacttggttagaaactctaccattgactacaagaagatcttcaatggaatttccaatgacgatctgataaactacttcaaggctaccaaaagaggcaacaacttcgaaagcattcaagaatacattgacaatgaaggaagctcgtttaacagcatctttaataatctggttctctataaggacataaacgacaaggccaacctgaaaaacgaattgctctatatcctttacctactgggccacggctgttcctatgagtcggcaaactttacaggcgtacaggcctctggaatattccgggacaggtggtacagctttgacgaatacgtgctcaccttcttcaacgagtccagaaacagaaccattgggatcttggagagtacaatgtatatccagtcccaacagctcgatttggttaacgagatcacagaacgccttgagtcaaagggatataatgtcattcctatttactgtccggctgggaacgccgagcagctaaatatcatggtgaagtattggaccagtgcctgtagcaacatcagcggcttcctggagaacccacaggactttgacatttacgtggatggaatcatctccatggtggcttatggtgtcgggggagagaacttcaccaatgccacaaaattctttgaagatgctaatgtgcccatattccgagcggtgcactctgagtacattaccaatgagcagtgggagctgagccctgtaggtctctcgaccactaaaagtgataaatggtggcacgtgaccattgcagagtcccagggaatctttgatgcgacatatgttgggggtgtggactcttacatttcaaacaggacaggcgcaatcatattgacttttgttcccgttcatgagaatatagaactcctgactgacagggtggacgcttgggtggacttgaagtatacgcccaatgaggacaagaacatatccatcgtatactacaactacccccctggcaagcagaacatcggtgcaagctacctggatgcaatcaccagtgtctataatatgctctacaccctgaaggatgaaggctactatctcaccgacctgccaaacaacgtgtcggaactggaggacatgatgattgcctgcggtatcaacgtcgctaactgggctccgggcgaagtcgagaagctggctaaccgatcaggtgtcgcccttctgcccgtggacgaatacctggaatggtttgactccttagacgatattgttaaagtccagattaccgaaggtcctgtggcctacattggccagatggtgaggcgggcggttctaatcaactacaccgatgaggtggagacaatggtcaacgactggtacaatcagatcaaggcactgctgcccgagaatcagactgtggccgccaccaatatactggataagctggtgaacagcctgaagctctacgctaacgcgtcgtccgatggcgacgagaatgcctccctctactatgatgaatttctgcggtactatgacgagtttaaaagtttgaatgtttctggactcaacggatggggtgaagctcccgggaatatcatgctggtgaatcggaatggaaccgactactttgtaattccagggctgacattcgggaacgtcttcatcggccccgagccccagagaggttgggaggccgacattgagaacctgtaccactgtaccgctgtagcccccacgcaccagtatctcgccgcttactactacatgcagacccgccaaagcaatgccatggtctttgtcggccgccacgccacccacgagtggctgccaggcaaggaagtgctgttatcatataacgactatgggtcgattgttgtcgggaaggttccccaagtttacttctatattactgatgggctggctgaggccatacaagcgaaacgacggggctttgctgtgctgatctcccacttggatagccccaagagctatactcatctgtatggtaatctaactgtactggcaactctcctggaggagtatgacaataatcatatcattatagagtctgattccgataaagacaatcaggctatcacgtaccaggtaatcaaggacaaccagactatcacgtatcaggtgatcaatcaagagctggaggacaatctcaccagagccatcaaggacttggtgatcgcaaacaattactaccttaccattggcttcacggcagaggaactgaacaatactgacatgttctccctaagcagcactctgaatgctttcctcaagaacactcaaaataccctgtatccactgggacttcatgcaataggtcagaagtggaccgacgaggacctggcgaacaccgtggccatcatcgtctctcatgactttgaatatggcggcaagaagaccaatctattcgatcagctatccttgtattactacggggagaaatattccaacctgactccactgaagcgtgactatatcctcaacaggtccgtggatgtctgcaaggccctgatctattgggacaccgagacagtgtctgacacaattggtatcggcagtccagagttcattgagtcactgaacatcgccaagaaatacattgacctgtacaatcagtgtatcagccttgagctggaagagatggtttccgccttaaacggagggtatgtgccagtcaatatcggcggggaaagtgtgactgtccctcaagtgctccctacaggcgctaacatgtaccaagaccagagctctgagcttccgacgcagaaggcctgggattacgctaagacactctccctgctaaccttggccgaccttaatgacactacagaaaagataatcatggggatctggtgcgtagagactgcaagggacgacggggccctcgtctccacagtgctctacctgcttggcatggagcctgtctggcacaacagttccagtgccggatttgacgaagagggcatccctacaggtaagaaagtggaggacctccctaatgtcatcgcactggaaaacctcacccggcccgacgggtgggcgaaaaagcgaatcgacgttacggtgattaccagcgggttgttccgtgatctctacagttcacaggcccggcttatggacaatgcctacaggatggcgttagcctgctcatactacacgatcgtgaacaacaagacaatcatggacagcgagtacgggcctcaggtctatgatgccctgcggtccatcatgagaagcatcagcttcaaggggatgtcaaacgaatcactggaggacaattatgtcgcgaagcactggctcgaggactgcatctattatctaagcctcggctacaactctaccgtctctggcgagtacgcaataacccgtatctttgcccccccaaacggggactacggtgcgggaatatcaaagctggtgtcaatgtcctggacctggaacgacacagacgagcttagcgagttctacattggcagaatgggcaacatgtattcaaaatattactggggcgacacaaaccctgtcgtgttcatgagggcgctctccgataccgaccacattgtggtgagccggaacaccaaccagtacggcgtattggacaacgatgacttctttgattactggggagggctcagcatgaccgttgaatacctctccaacaagacgccgaccatgaacgtcctgatgtacgcaaacaaggacaatgcttatgtggccacattcgagaatgtgttctacaacgagctgaatacaaggtatctcaacccggaatggatcaagggaatgatgcaggagggctacagcggttcccggtacatgtccaacaagttcatctccaacctatggggctggcaggtgacccgcccctcatctgtctcggaaaccgtgtgggatgacgtttacaacacctattataaggacaaatacggacttggagttaaatcctggctccagtcggggaacaatgcctattcattgatctccatgagcggaacaatgctcaacagtgcttactccgggtattgggatgccgatgacgcgacactgagtgatatcgccaacacgtgggcccaggccaccgtggccaatggggtagcatgctgtgactgcagctgcggcaatgtggctatgatgcagtgggcattcaagtacgtgaatgccgatctgcttgctaagctcatgcccaagttgtatgacgccacgcagaacccgctcttctacacaaatagcagtgacatgcctaccaactcttcgaacattgaccgccgaacgacaaacagcagtgccgagagcaacaatactgaaactgtgcagactaactccagctctaacagtcagcagagcgccaacggaaacactaatattccaggagcaagcggcggctatatggtcgggaccgaagcggatgcccagtcagacatggccagtgatagcgatgccggcatgaacgatgcaaatggagaaggccgctctgtggaggtcacgaagagcaccagcacgccagtggcgccaaaggacgtcagtatgcctatagctattattgtgtgcgtgatttgcctggtggccctgattggattcggttacttccgcaaccgcaaagacgacgatgactattacaacgatgatgacgacgatgattacgaatacaaatga

SEQ ID NO: 4263 - DNA, 5418 bp, synthetic construct
  source 1..5418: mol_type = other DNA
atgaaaacaaactacaaaatcatcctcatttcaataattcttctcggtctggtcatgtcgtttggagctgtcagcgcagctgacctaaacacagtccagtccggtgaggtgtcaggtggcgtggacatcgccagctcaaatcctggagtcgagaatggcgaactgacttacgagatcccagatagtgttgaaaacattcagtacgccgggctctttgttgacagctacacggccggatcatctaacttggtgtatggatctgaagctaacatcacgttgacaaaaaacggcgagagcgaacagatcgcaagtgaacgtctggttgccagtgtggggagtgctgacggtgaggtctatgtcattaacgaccacacaacaaaatgctttgcagactatatgatgacctataacctcacagaccgcctgcaggatgcaaagggaaatatcacaatcactgtaaatgccactccgatcgaagggtacaccttctacaataaaatcaagctgattggcctggtgtttacctatgatgatggcgatggcgaccagttccattactgggtgaacgcaggttcatcgtgggtaaagacagatagcggagagaccagcaaagctacatttaagcttggcaacgtgaactacgacccaactgtagccaccctcgataacttcgccctttccagccaggacggtgtctacaccttcaatggcaaggagatggatgagtccatcgtcactgagaccggggtatactattatatccatcacaagtttgacattctggataagattaagaacatgacaaacaccttggtgtacactcccggggaaggctcctactcattcagaaacgtgctgtcagtggtcaagctggtaaaaaccgtgccagtctacgcgaaagtcaacataagctctgaatacgatgacatcgtcttttccggaacagaaaatctgctcaaggtgggcataaccaataatgggaccggctcggcctcctacctcctggacctgtacgccgacgggaaaaaggtcaacagttctcaaatctctctggctgccggccgcgaagctgtgatatccctcatcgacaacacaatccggccctccgccgctgacacggtgagcggggcggataacaagaagatcaactacactgtggttgttagcgataagaacactggagaggtgctggacgagtccagcatcttccccaatctcctctataacgggtatttgggcaagggcttggcgtatcccgccgagaagatcagttcatttaagaacatcacagttaacggaggcatgatcattgagagtctaggggattccacttatcttgacgctagcatgacgggcaaaaccgattcttggactatcgacctgcctgacggcgctttcttcactgatgcctttgtctacgtgccatataatctggacaacggaaacgtgcccatgttcacaagcaccttcaacggggcggcagtgaatcccatagctagctacagggaccagcccaacataggcgaaaatgctaaaaacggatacgggttgttagtgtacgatgtgggggagctcatcaaggccggggtaaatagctttgccctgtcaaaggaagccggtatcgctggagtttacccaagcaccctcattgcattttacaacctcaccgattcagacctgctaaccagcgcattcatattcaatggggcagacctcctgtccaacgagtacaattcccttggaagagatgtgtccagcgataatatattatccatcggcgcttttgatggattggtaagtgctaagcttcacgtatttgctgccgattgccaagctggagagggtgacttgactgtgaacggcaaaagctataagaacgtctgggccggtaccaatcggagtgtcggcgattacgtggtggatctgggaaaatccactaacgcatcaaatgaggtgagcttcatttccacagccagcaatattctagcccttcagcaactggctgttgttcagtataacgtcccttcagtgaaggcaagtctggtctccgaatacagcaacgcggtatttgcagggaccaacaatgtcctgtctcttaacataacaaacaacggtaaatttgattcgatctatactgtggacttctacgtggacggcaaaaagcaaaacagcacggaaatttccctaaaatcgggtgccaacaagggattgtaccttatcgacgataccataaggcctattgatgccagcaccgtaaacggggccgacaatcccaaagtcaactacacagttgtcatcatcgacaaggagaaatcaatggtactggatgagattaccattacgcctagcctcctgtacaacgggaatctcggaaaggacctggcgtacccggcagagaatatcacgtcctttcgcaacattactgtcagcggtggcgtgattgtcgataccttagacgattccacctatattaactctcaggccacaaaccgcaccgatatttggaacgtcaacgtggcggacggcgatgtgtttaccgacgcctttgtgtatgttccctacaattgggataagaccaacggatacatgccagtgtggaatgccagattcaacggtgtggctgtgtcacctctcgtctcctaccgggaccagtcaaacataggattcttcggcaagaacgggtatggcttggtggtctacgacgtgagcaagctcatcaaaagcggggaaaacactttcacgctcgagaaagaagcgggcatcactgcggtctaccccagcaccttaatggcattctacaatgccactagttccaacagcctgaagaccatttacatctataacggggctgacctcctggccaatgagaacaacttcctaaacaggacggttgcctcggacagtcacttggacatctcctcttttaaggaagttatcagcgctaagctatacgttttcagtgccggtgctcagaaaggggaaggaaatatcatctttaacaataaaacatacaaagacgtgtggaatggtactgtgaacagtgtcgacagtttcatcatcgatctgggcaagtctccaagtgtgtccaatgacgtgtcctttgtctctaccggctcaaccattatggcactgcagcagctcattgttcttgactattatgtatcctctgtgaaggccaacgtgtcctctgagtactctggggctgtatttgctgggaccgacaatgtgctgaaagtggacctgaccaatgacgggcagggaggatcggtgtatgtgctggacttctatattgacggcaagattgtgaacagcacagaaattccgcttgatgcaggcaaaagcactgaaatctttctggttgatgacaaaataaggcctgttgatgccagcactgtcaatggtgccaataacgccaaggtcaattacacaatcacggtaacggacaaggccagcggacttgtgctgtacgaggccagtctcaatcctatcgtgctgtacaatggcaacctcggaaaggacctggcgtacccggccgagaatatcagcttctttgatgccataactgtgaacgggggcgtcatcatcgatacactggacgactccacctatctgggagcaaaaaccaccggccggacggatgtctggaaggttgaaatccctaaagacgggaagatcgtggatgggttcgtttatgtgtcatacaactgggacaagaccaatgggtctatgccgatttggaatgtaagtttcaacggcgtctccgtttccccggtggcccactacagagaccagtccaacatggggacgtacggcaaatacggatatggactggtcgtgtacgatgtgggggagcttatcaaatcagctgagaacaagttcaccttagagaaagagaatgggactactgcagtgtacccaagcactttgctggcattctataatcgtacagaaagtaataatcgcacgaccgtttatatgtacaatggtgccgacttactgtccaatgcaaataacttcctgggtcgaaccgtggcaagcaacgccgcgctggacctggccctgaatccaaatgatgagattaaaagcagcaggctgtatgtgttcgcggccagcggccaatctggggagggcaagctcattgtcaacaacaaaacctttaacaacgtctacaatggcagtgcaaatagtgtggacgcctacattattgatttaggcaagtcccctagcgcttctaacaatgtgtcattcatagcgacaggctcaaccatccttgcgcttcagcaattcgttgtggtggacgccattcaccagtccagtgaagagttgcagaagatgatcaatagcgctagggccggctcgacattgaatctgggaagcaacgtgttcaaggatgtctccaacgtgatcatcaacaaggacctgaccataaccggcgggacaatatatgccagagagggcgagaccatcttcgtggtcaccgaccgctctgccggaggtcctaaggaggtgaatatcactggcgtcaagttcgtgttagacaacgccaacacaattttgcaggcacgggccgtgaacggctccacaccaactagcattgacgtggcttccatcaacatcaaaaagaacaatatctcttttgtggatgacgatgtggtgccagagtcaattaccgttctcgacctgaagtcccaacggagttcaattgcccccacgagaaacctcaccatcagcggcaacaatctaattgccggtatctgtcccttcatgtttgaagtgaccagcttcaatggaaaggactctgtggttgtgcccgaggggggcaatatccccgacaaaaaagcttcggtgattcattatgaagacatggttacaactgccatcaacaccaatattgagggacgagtgggcaaatactttgaggtgaacctgacagattccaatgggaaccccctcaaggataagaaggtccagatagggttcaatggtgtggtatacgatcgaaccacaaatgccaccggaggcgtcaagctccagatcaacctgggatacaagggaacatacacctttgctatcgcattcctgggtgacgactattataacggcagcttcgttgtagcgaaaatcaaggtgaacactcagaagacaaagatttccacgtcgtcgaagacatataaggcaagtgctaaaaccaaagccatttcggccaccctgaaggatgcaagcagtaaccccataagcggtaagaaactgagtttcactgttaacggaaaaacctatagcgctacaacaaattccaaaggcacggcaacggtgaatgtcagcctgagcaagaagggcacttatagctttacggtaaagtatgctggcgacgatatgtatgcgggggccacgtcaagcagtaaggtggtgataaaatga

SEQ ID NO: 4264 - DNA, 10356 bp, synthetic construct
  source 1..10356: mol_type = other DNA
atgaagaatcgcaaatttctcatagtgagcttaattctgattgttctaatgctggccctcggatctgcgtacgccgcagatctgagtccagtgacgaatggaacggtgtcaggaggtgtggatgtggcaacggccaatccatacgcttctcagacaggaggccaggaaatacagtctggggagctgagctatgatgtcccggaggacgttagtgatgtccagtatgcaggcctctttgtgaatgtgtatggagggtcggcacagggcgactatggggcccagtccaatgtctcaattacatccaacggtgagacaagtcagattgccagcgaaagtctgaattatacggatggcagtggcgacggcactgtctacatcgtaaatgaccacatcaccaaggtctattccgactatcagatgatttataatatcactgatagggtgcagggggccaccggtcaaatcaagatcaatgtgacaaacaccaaacttgaggggtatgctaactttgacggccgcatcaagctgatcgggttggtctttgcgtacaatgacggcagcaataatcgctttgattattgggtggattccggtcaggcctggtcaaatagtgcggattcagtgaccaaagctaatttcactgtgggaacggtcagtcctttcctgagtgctaacatacggaatattgcactttccagcactgacgggaattattcattcaacaagcaggagctgactgggggggaactcatctcggactccatgttcaagtaccacaagtgggacgtaactgacctcttaaaaaacaagacaaataacctgacttttaactcaaccaagtcttttaagaacgtgctttctgtcctgacagtgacaaagaacctggaggagatattcgtgagtcctgacggtactggaactgggactactgccgacgaccctaccacgatggataaggccgctcctgccctcgcgaataatggtataatccatgtgctggatggtacctacacccagtccaaacggtacgacattagggccaactactcatccattgttgccgttaatcccggcaatgttatcttcgatggcaacaattcggttgcaaacatccgcgtgtatggtgccaatgtcactttggacggcttgacgtttacacatgggaaaggaactggggggggcgtgtacttcgattccgatgcgaacggcggcctggtgacaaattgtatcttcaaagacattaataataccggagcgggaggcgccgtttacatctccggttcgaaaaatgtgatgattgagaattgtaaattcattaacaccacgtccacaggtactggaggaggcgccatctacattgctggcgacaacgccaccgtgaaggaatgcagctttgaaaacgctactggaaaggatggtggtgcaatccgtgtcaattcgagagactttgcggttgtgcgcgactctaacttcacgggttgcgttgcaactaccggcggcgccattagttgggtaggcaaatatggaaatgtgaccaattgtacatttaccgacaatcaagctactggttcaagcaatggtgggggagctatctattggcaggagaactttggcctgatcaataactgtacattcataaggaataaggctcaggtgtatgggggcgctgttaattgggctgcagggaagatcaacgggaccatagtcaactccatcttcaaggaaaattccgctggacgagatgggggcgcctattactccgccgccggtgcaaatgagatgctcattatgtactgctcatttgaagacaatgaggctgatgcaaacggaggggctatgggcttccgggccgaccagtgctacctgcttgattgcaacttcaccagcaaccatgccaaacagaacggaagtgctgtcatgctctactccaatgtagccaatttccttggtatcggaaactgtaattttgtagataactctgccgacgtcctgaactattccattgtgaacaatgccggaaaattaaaactgtctgagaacaacatcacaaccaatgatctgcgtgatggaatctacacaaacgggtcaatattgactgacgtttatttatatctcattgtcaatgagaccaacgacgccgcctccaatgtagtttatgccgacatcggcgacgaagtgcctattgacgtgtacctggtggatgacaacagcaatctcattaacggcattggcctgagcgtggagatcaacggaaccaacatcactgaatttgatttggatggatacacatataagacaagctacacacccagtgagataggtacgtattatgtgacggggaactattccaaggctgagctgagcaatatcctcacaggctcaatcgttgtgggagaggaaccggtgtctgcgatagaaatcgctttccgaggcgaatacgtgaacaccacttatgccggggtggagaaccttatcgcagtgtcattgcacaacaccggctcgctggatggaaactatctggtggaattttatgtggatggcgagctggcaggaacggaagagtctaaggtgaatgctggctacacaagcgacattaactttattgatgagaaaatcagggacctaaacgagtcaacgatactgggacacgacaatctacaggctaattacaccgtaattgtgaaggataatgagacccaggaggtgataggggagtcctcctacttcccatacgtcctatacaacggttatctgtcgaagaaatacgagtattcggatgagtttataagctcattcagaaatgtcaccttcaatggaggctacttcattaacaccacgggaagctactctgggaatagtaaccccggactgactgacatttggacgcttcccgcgctgggcgagggggcaagctttgcaggggcttacgtgtatgtggcatatacctgggataagacagaaaacggcccctcggactgggcctccagttttaatgatgagtccatccctattgtggctcagtaccgcgaccagtccaacatgggtacaagcgggtcatatggatacgggctggtggtctatgacgtgtcctcgctgattaaggaagggcagaacaagtactcactgactaaaggggacacagcgatatatccccggacccttgtggccttctataacgtgactgaatcaagcaccgtaaagaccatgtacatgtataacggtgctgatctcctttattacgggagctataatgttttggagagacttgtgatgacagactctgtactgaacattagtacagagggcaatgtcctcggatctaacctctatgtgttcgctgccagcgctcaggccggggagggtaacctgctggtcaacggcgagaaatatgaggatgtttggaacgggaccaccagctctgtagaagagaaggtctttgacttgggggacaatccccttgcctccaatgaaatctccttcgtatctaccggatctaccattctggcactgcagcagttcgtgctggttgaatatgaggcctactctgccgacgtgacaatagcttcggaatacaatggggcttgttatgccgggacggagaatgcattgaaagtcaatgttacaaatgacgggctggaaaaagccaattatctgattgagctctacgcggacggtgtgagggtcgactatgagcatgtggaaatcgatgtgggcgaaagcaacgtcctaaccctgatcgacgacaccatcaggccagtgactgaagacactgtaaatggcgccgacaatcagaaggtgaactacaccgtctatgtgagtgccgccgggagtcttctggctgagaagaccatcactcccaccatttggtacaacgggtacctgggcaaggactacgcgtaccccaatgagacaatcagctatttcgacaccatcacagttaacggtggcgttatcattgagacgttaaatgacaccacttatatgggcgcgacagtgctcaaccgaacagatgtctgggagctcgatgtcccagatgatgtggagtttgccgatgcctttatctatattggatacaactgggacaagaccggtgcaaacatccccgtcctgaacctgacattcaatggggagactgttgctccgatggagagctatagggaccagtccaacttgggcagctccggcaaatacggatacggactgatcgtttacgatgtgagtgggttggttgaagctggagagaatacattgttgatcgagaaagagtttaacaagacggcagtttaccccagcactcttgtagccttctataaccaggaggtcccggatgtcattacaacagtgtacatgtatcacggtgctgacttgttatataacagctacaacctactcgggagggacgtggagagtaacagcgttctcgaagtggagttggtggacgaccttgcctcggcagaccttctggtgtttgcggcaagcgcccaggccggtgagggtaacctcattgtgaacaatgaaacatatgagaatgtctggtctgggagcacaaacagcactaacgtgtttggtgtcgatatattggacagtctcaagcaatccaatgaggtctcctttgtttcaactggaggaaccatcctagcactgcagcagttcattgtcttcgaatacgatgtcacttctgctaaagcgaaagtgagcacagagtattcaaattccgcttacgccgggaccgacaatgtgctgaagcttgatctgaccaataacggtaccgtggacactgtctaccatattgacttatatgcggacggcgacttggttgacagcatagaagcggagatcgattgcggggagaacagtacactatacctgattgacgatacaatcaggccagtgactgaaaacactattaacggcaacaacaacgctaaggtcaactacacagtggtaatcagtgataatgccaccgatgagatcctggatgaaattacaataacgcctgtgctggtctataacggttacttgggtaaggactacgcctatcctaacgacacaattcagttcttcgacgccatcacagtcaacggtggagtgatcattgacactttgaatgataccacctatctgggaacgaaaacaaccaaccgcaccgatgtgtggaccgttgatgtgccaaatgacgccgaatttgtggaggcctttgtctaccttgcctacaactgggacaagaccaatggcacctgccccgtcttcaataccacattcaatggggaaacggtcactcccatagctcactaccgggaccagtcaaacctcggcaccagctctgcaaaatacggctacggactgcttgtctatgatgtgtcagagtacatcgctgccggcgaaaatagcttcgagctgctcaaggattacgatgtcactgcggtctacccaagcaccctggtggccttctatgacgtggaggacagtcctattctgacaactgcttacatgttcaacggcgccgacctgttatacaatgcctataatttcttaggacgacccgtggagagtaacagtgttctctatattgattcagttgacgatatcgatgaagcaacacttgtggtgttcgctgccagcgggcaggccggcgaagggaacctcattgtcaacggtgacgagtacaccaatgtttgggaggggacaagcaatagtgccgccgcgtacatgatcaacctcactgattccatagctgaatccaataatgtgtccttcgtttccacgggaggaactatcctagcccttcagcaatttgtcatcgtgtccgagtacgccccatacgcgaaggcggacattatctctgagtacaagggcgtggcctttgccggcacaaacaatgtcctgaaggtcaacgtgaccaacgttgctgaggaagatgctgtcttcaatgtaaccctgtacgcggacggcgtggaaataggcagtcaactcatcgaagtaggcgcgtacggcagtgccattgccatgtttaccgatgagaagatcagaccggtgaccgagaacaccgtcaaaggggccgacaatgagaaagtcaattacacggccgtcgtgcgggacgtggacgacctcgttgaggatgccgaggctacaatcacgccggatatcctctataacggtaacctgggcaaggacttagcataccctgctgaggagatcaccttctttgactccatcacagtgaacgggggcatttacattgagatccaaaatgattcaagttaccttgcatcgggagcgaccaaccggactgacatttggaacatcgaagcccctgaggacgccgatttcgtagctgggtttgtatatgtggcttacaactgggataagacctctgcaggaatccctgctttgaacatcacattcaatggtgtgtctgtcgcgccggttgcccactacagagaccagtccaacatgggaacctatggcaaatatggatacggactgcttgtgtacgatgtgagcgacctgctggaggccggggataacgtgttcaccctgacaaaagatgccaacatgactgccatctacccaagtgttctcgtggcaggctacgaccaggaagtgtcggacagcatgaagaccatttacatgttcaacggcgcagacctgctgtccaatgcaaacaacttcttgggacgcgtggttgcctctaacagtgttctcgacattgagctgcccgacgatgtcattgattgcgcactggggatatttgctgccagctcgcaaaaaggcgaaggcaatctaatagtaaacggagaaagctttgaggatgtttggaacggatcttccaacagtgtccaggcctgcgtgtttaacctcacagatgacatcgaagagtccaacacagtgtcatttgtggccaccggaagcacgattctcgcccttcagcaattcatcttcgtggaatacgagcttgtttctgttgacgccaaactaggctctgaatacaataacgtggcctttgccgggaccgacaatgtcttggaatttaacattaccaacgacgggacaattcctaccgcatacaccattgagttctacatcgatggcgaattggcagacactctggaactcgaactggctaacggggaaagcgacagcctataccttgtggacccaaccatcagaccagtggatgaaaccactgtgaacggcgcagacaatgctaaggtcaactacacggtggttatcacagacaattcaactggagatgtcttggacataatcacgatcactccttctgtcctctacaacggtaacctgggcaaagacctggcataccccgcgggcgaaatcactttcttcgatgtgattacagtgaatggcgatatcatcgtcataggaatgaatgattccacctacttgggctctaagaccacaggccggactgacgtatgggacctgaccactaacgaagatattatctttgccgccggatacttgtatgttgcctacaactgggataagaccccggccggaatgccggtgtggaacaccacattcaatggcgtgacggtcactccggttgcacactaccgcgaccaatccaacatgggcacctacggcaaatatggctacggacttatcgtgtacgatgtaagcgacctgattgtggctggggagaacacattcaccttagaaaaagagaatggcaccactgccgtgtatccaagtaccctggtcgccttctataatatgcctgagtccagcacttatgtgacgacatacctatacaacggcgcagacctgctgtccaacgcaaacaacttcctgggacggctggtggcctctaacagcacactcgacatcgattcgtttgacaacatagtcggcgctgaccttttagtctttgcagcgagcgcgcaagctggagaggggagtcttgtcataaacggcgatctggttgccgacatctggaatggcagcagcaactccgtggatgcatacgccattgacctcggcaaaaaccctaaggcatctaatgaggtatcctttgtggcaaccggatctaccattctcgcactgcagcagttcatcgttgtggaatacaatgttccctcagctgaggccagcctcgtgagcgaatattctaatgtggccttcgcggggaccaacaatgtgctgcagttcaacctcacaaacaacggcgccctcaacacgtcttacattgtcgacttctatatcgacggcaagaaggtgaacagcacgcagatcgcactcaactctggcgaaagctttggccagtactttatcgatgataccatcaggcccgtggacgccagcacggtcaacggcgcagccaatgctaaggtaaactacaccgtcctcgtcagcgacaaggataccgggcttatattggatgaggtgaccctcactccctctgtattatataacggtaacctgggcaaggacttagcccatcccccagaggagatcgtcctattcgacaccatcactgtgaacggggatgtgatcatagataccctcgacgattcgacctacctgggggccaagaccaccggacgtactgatgagtggaacctgaccgtgccttccgacgctgacttcgaagtggcatacctctatgtggcctacaactgggataagactgccagtggaatgcctgagtggaacaccaccttcaatggtgtcaatgtcactcctgtggcccactaccgggaccagtccaatatgggcacctatggcaagtatggatacggactgtacatttatgatgtatcagacctcattaaggccggtctaaacacattcaccttaggcaaggagaacggaactacagcggtgtacccaagtacgctggtagccttgtacaatgttaacgagtcaaatgtgctgacgaccgtgtccctgttcaacggtgctgacctgctgtccaacgctaacaacttcctgaacagaacggtggccagcaataatgtcctggaactggatttcaccgtgtttgacgaaatcctatccagccagctctatgtgtttgctgcctccgctcaggcgggcgaggggaacctcatcgtaaacaatgaaacattcacgaatgtctggaatgggacttctaatagcgtagatgcctacatcgtggatctgggaaatgaccccagcctgtccaatgatgtgtcatttgttgccaccgggtctacaatcctggccttggagcagtttgtcgttgtcaaatccaaatatcaaaccagctctgacctgcagaagctcatcgatgctgccgaacccgggtcgaccttggatctgggggacaacgtgttccaagatgtggctaacgtggtgatcgacaagaacctgaccatcaagggcggttccatcatgggcaaagctggagagaccatctttgtaatccccgcaaaatccgccaacgggcccgacgaggtaaacataactggcgtggactttatcgtggaggacgcaaatgtgattgtgcaggcaacggctgacaatgggagcagccccacgtcaatcgacactccaaacatccgaatcagtgacaacttcattgacatgatcgacgggagtgtggtgcccgaatcagtgactgtcctgaaacttgactccgaaagaggcgtcctggcccctaccggggagctcaaggtcactgacaacgctattgcagctggcatcaaaccattcgagtttgatgtcacgggcgtgtccaacggcagcgacaccaatattccagagggcggtaacattcctgctaaacaggcgtcggtgatccactatcaagatatggaaacaaccgccgtgaactctaagattgagggaagagtgggcaagtacttcgaggtcaacctgacagacaccaatggcaaccccctggcaaataaatttgtccaaatagggttcaacggtgtggtatataaccgcacaacaaacgaaaccggcggagtcaaactccagatcaacctgggctacaaaggcacgtacacctttgcgatctcctacctcggagatgactactacaacgggagcttcgttgtttctaagatcaaggtgagcacccaaaacaccaagctgactactgccgccaagacctataaggcaagcgctaagaccaagacactgacggcaacactcaagtcaagcgtgtacaacaaaccaatcaacgggaagaaggtgacgttcacagtaaacggcaagtcctactcagccactacaaacgctaaaggtgtagcaacggtgaaagttagcctgtcaaccaagaaaacctacagtttcacagccaagttcgctggcgacgatatgtacaccaaatcaagtgttacaggtaaggtgactataaaatga

SEQ ID NO: 4265 - DNA, 351 bp, synthetic construct
  source 1..351: mol_type = other DNA
atggctagacgacgctgcaataggcggttcgaaagtgaggaagaagatccgatggccggaaccgccaacctggtggacgcaatgctggtcattgccgtaggcctgctagttttccttgtgctggcctggaacatgcagagcgtgctctttaacgagcagctcactcaagaggaaaagcagcaggtcatggatgcgatgaaccaggagatgaccgaggtccaggagggccagatcttgaatgaaactccagacacaagcaacgcaacagggcaaggctataccgagatggggaaagtgtacaaggacccctcaacgggaaaactgatcatggtgcagaataactccgcttga

SEQ ID NO: 4266 - DNA, 747 bp, synthetic construct
  source 1..747: mol_type = other DNA
atgactttagccattggcaacactctgatttttgctgacgaggctatctatcagggcgccaacaatggactattcgccatcttctcaaacacaaacggaacgggctttcccttcctggatagcagcctcacggccataacccaagccctgcagatacctgtcatcatccttcttctcatctttctggtgttcgctgtcgtgacgctcgggaagctgctctccgaatacctcagccggaagaaggttccgatcaaattaatcaaagagatgatttacagcatctacgatgctcagtctgcggaggagattaaaaatatagtaaacagttccgacattcagtcctcacagaagaccatcctgtgcgagctcgctgacagtgaacacctcggtaagaaaagccgcgagaccctggcccggagactgattgataacgaagaggacaagattacccaaaatctgcagaagactgatatagtgacaaggatcggtcccaccctgggactgatgggaacacttatcccaatggggccaggccttgcagcattgggcaccggggatgtgacaaccctggcaagcgcaatcaccattgccttcaatacaactgtgatcgggattggcgccggcgccgccgcgtactttgcctcgaagatccgcagacgatggttcggggaatatctggcgaacctggacgctttgatggacgcaatattggacaatatcaacaaaagggatgaccgtctagaatga

SEQ ID NO: 4267 - DNA, 4113 bp, synthetic construct
  source 1..4113: mol_type = other DNA
atgaatagtaataagacctatgcagtgttgggactgctgctcttgttaatcttgtccatcggcgcgattagtgcagaggactcgatagatgacatgagtctgacagacattaattctgcagataattctaacattaatcagatcaatgccattgacaattctattgacaccagtaccgattcttcaattgacaccgacaattcgattgagacaaatctggacagttcaattgaggataaaaactctaccgatgccaagaacaccctttcctctaacagtcttgcctctacatataagataactgaaaaagactacttaacttactttgacaaagatggaaacatcttatctggcaaattgaaaagtggagatacgatcgatctctccggcacctttagtaaaaaggcgtttgtcataaacattccactgaccatcacaagtagcgacggcactgcaaagctcctgaactccaacataaaccttgtaagtggcgctcaaggttctatggtgtccaatctcaatatgaatacaagcgtggagaagactcccgccctgagcgctgtcaatgtgacaaaggtctcctttgtgaataacacagtgctctcgactgcaaccggctcgtatgccttgctgctcaacacggtgaacaattcagacgtgctatttaacacattccaaaccacctgctttgtggagggctgggggcatccttctgccttggtacttagcggttcaaactacaacaacatcagttccaacaacgttattgttaacgattcaaatggaatctacctcaccggatacctgggcggaggaagcatgggggattccacccaggggtcaaacacctacaattatatatacaacaacaccgtgcacagcgtgaggggggtggaatgggccaaggataaggatggaaacaagccactcccctcgtcattctgttatggtatccaggttatgggtgcctacaacgagatcattgagaacacggtgtataatatgtaccggggcataagcgctacccagactggaaataaagttgtcaacaataatctaagcaatatccatgggacctggtactctggcggtacaaatgacgatggcgccgactacaccatatatgtaactaccaactctattgtcaaagacaatagtatctcggactccaaaattggggactccactgcagcgatccacgcggcagccaacacgaatgtgactaacaatgtcctctccaatatcgaaggaaccggcgtcttgattgaagggaacaatgttgtctgcaacaagaatagcctgctgggcctcacaaacgacggaatcatcgctaaaggaaatgtgagcaacattgacatttcaggcaacataatcaatgcctcagaaaccgcggtgtccctggtgaaaaccagtagatctctcgctcctcatgacattaccgtcagtgaaaacaccatcttcactaccaaggagaaccccatcagctatgaagaggcctactcgaccaacataactgtggaaaacaaccgaataatcaaggaagcctccaatggcacagatcctagcaccgagggtaacgggacctactacattatcgattccaacttctataactatttcgacaacacaggataccttaagagcacaatcaaggagaacgacatcttgatcttcgtgggcccaatagagagcaaggacaaaatctacataaacaataaggtaaacatcacaggtattgacgccgtcttcaaagacacaaccatcattgttctggacgacggcgttgtcattgatggaatcacaatcaacaatcccaatgaggctaaaaacgaccgggaatggggtattcaggtaaacggcgcgaaggacgtaacaatcaaaaactgtaacataactatctatgatgccttctccgcctatgcagtctatctcattgactcatcggattgtaagctaatcaacaacaatcttgaagctaaaggcgactatttaacgtctgccgtgctgctgtacaatacaaacaacacagtactaagcggaaattcattaaagacaatcgggacgggtcagaattacacgttcctcaatgagtcctgcttggatggttgtctggatgggtgcctcgacggctgtctggacggttgcctggacggatgtctcgatggttgcctggatggttgccttgacggctgcgcagacggatgcgctgacggctgtctggatggggcacaaggggtcaaccacataatctctggaatattccgcacctatggcctgttcatggtctacagcagtaacaacaatgtcaccgacaacaaagttgatgtgagctctgccctggaaaaaggctatgctacgtatatcgagagtactaatgctattgggggcatctttatccaccacaacagcaataacaacatcattaaatcgaataatataacactgaatggtaacgacccattcatgtacggcgctggggtggtgggggggaacagcaaccacacggattatgtttcctcaaacaaccaattcgagtccaacgccatcaatgtgaaatccccttactacgctatcggcatcttgctgggctacaactcttccaagagcactctgaaatccaataagatttccctcagcgcaaacaattacagctacaatatcgctagttacaagagcagtgagaacactgttgacggaacggtgaccgtcctcaaagacactatagttacctccacaaacatcacggcacagtcaaacagtccgattgtgctaaacctcactgttctggatgaagacaataagaccgtgactgtgggcagcctgctggcttatgtgaacaacactcttgtaaatagtacatcgatcaagggccagagcacctccctggggattggcgcgtaccccaaagggacctacgaccttgtggttctgtatgtgaatgggggaatctacagggtaggagctggagcatgccagttcaatgtcagcgatgtgattaatactgggaacggcacaaaagatattcaaaacgctttagataatgccaaggatggtgcaacagtggacctgggaaaccaagagtataacaatgttgtgaacgtgcagatcaagaagaatgtcacaattaccgggggcaagatctctggggacgggagcaatccgatctttgtcatcacgcctaaatccaaagggggaccaaataatgtgagcatcactggggtcgagtttaatctgggcaatgggaacattgtggccctggctacggccgacaatggaaccagcccactgtccattgacactgcacagatttcaatcaagaacaatgtcttcaacgcggttgatggagcggtgcccgaatccatcaaggtcctcgagctggacagcgagcgtggcgtcctatctcccaccaacgacatttccgtcaagagcaacaccctgtcaagcgggatcaatccctttgagtttaaagtgaccagcgtggccaacaacaattcaatcaatgtgccgtcaggtggcaacctggcgcagaagcaggtgagccagatccagtaccaggatatggagaccatggctgtgaacgccaagattgagggaagagtgggcaaatactttgtggtcaacctgactgatgatgccggcaagcctctggccgacaagttcatccagatcggcttcaacggtgctgtttatgaccgcacaaccgatgaaaagggccaggccaaattgcagatcaaccttgggtacaagggaacctacacctttgccgtgtgcttccttggtgatgataactacaacggcagctttgtggtggccaaaatcaaggtgaacactcagaagacgaagctgacaacggcctcaaagacctataaggccagcgctaagacaaaatccatttccgccacactgaaggacgccagtggcaacgcgattagcggcaagaagctgacgttctctgtgaacggtaagtcctactcagcaactacaaacgctaagggggtagccaccgtcaaggtgagcctctccagcaaagggacttacagtttcactgcaaagtatgccggagacgatatgtacgcctcttccaccgccagcggcaagatcacgataaaatga

SEQ ID NO: 4268 - DNA, 3495 bp, synthetic construct
  source 1..3495: mol_type = other DNA
atgataaataaacggataattagtcttagtctgctgattatcctggtctttctcatcatcgggcttagtgcagtcagtgccgaggattcgtcaaaagctgccgatctggacctgaatagtagtagcgtgagcaatattgacttaagttctaattctgtggctattgagtctaattccaatagcatcgctagtgagagtagttcgaacattgtcttggacaacaaatcttcagacactacagacattcaaacagatagcgattctagttcagacgacaacctaaatcacgatagcaatagtaaaatcaaatcagacaattcgaaaaaggtgcatacgatcaccgaatctaactatagtctctattttgattctaacggctacctaaacaattcattagtgtcctctaacgatacgatcaatttgtctggtaacttttcttcaaagtattttcgcttctctataccgctcaccattacgagcctggagaacgatgccttcctacgcaactctccaatcattatcactggcgtttccaacgaaaactatgtatacgacgcaattgtgtcgaacctgaccattgaaagcgacctggcgaacatatcggccgtttgggtgattggttccagcaatataaaggtcctgaacaacaatatattcacgaccgggcacaacggatatccgatcgctttggatagctttgtatacaactgcattctggcaaacaatacaatcaagacaatcgtgcctgtcagcgaagcgatgagctcgaaggacatcgatgaggacaaccagacaaacaactccgacaacagcagttggcagcattcgggaatcagcctacgtgatgcccactacaacactgtcgttgacaacgacattactgttgagaactcctacggcgtctatctctgttatggggcgtccatttcaaactacaatgtcatcgcgaacaacacaatccgagccacctccgaaacgccctccttttggtgttacggggtttacatcactggaaactacaatctgatatacggcaacgacttctatcacctttaccagggagtccattcaagctacccatacaactctattgtgtccaacaatttctatgacattgacggactcgatgacaactacggtgccggcggggactttggcatctatggaggcaacaacacactgatcgcaaacaactccatctataacgccaaattgtacaatgcaggcattcttgtggggacaaattctgaagtttatgggaactacattcaaatcaacagctccggggagggcatccgcattggtgataaggagggggggtcatactcaaaggtctataataatacggtggacttccttgacgggaaaggcatatgcctctacggcgagccaaacagcactctggtgtatgataacatcctcaattccatctcgtccattgatagcctggacctgagcgctgaatctaaagggtcggggctcggcatcggtatctattcacattaccagagccgggccaaaagaccctacaacattagcacctgcaacaatacaatatacacgtcaaatgactacgcaatagacatctcccagagctccactaaggcctacacctgctatggcaacctggtctttggaaagggcatcatctatcccatggaggtggtgtacgtgcccgattacggggagggaaacgtatacgaggtgagcgaagataacttttacacttacttcgactcttccaataagcttagcgataaggtaaaggacggggacagtctcatctttgtgggagagttctccccgaagggcaagatcaccttaaacaaggaagttaacctgtttggctacggtgctctcctcaagaataccacggtcttcatcaacgctccaaactgccgggttcacaacttcaccatcgtcaacaacggcattgatgaatacaacctgtggggagtctatgtgtttgaggccgacaatgcaagcatcgtgggtaacaatataagcattttggataagaacacatcctatggcatctatctctgcgattcctatgacaataacgtttcagacaataccatttcctgtcaaggggacaacctggtcttcagcctcctgacatatgaggcttacgacaccttatttgaaaacaacaagatattggctatcggaacagatgagctctacccctattatgagaccatctgtatcgacggcgttcacagtatttctgagctatcaaagacctatggggtgattctggattcctcctctagaaaccagttcatccacaacgacattgaggtgacctccaccctggaaggcttccatgtgccttacaacccttcagtgaacatcctcatcggcctgtacatctattacgccagcaactacaataacataagcgaaaacaatgtgtacgtgcacggacatgatcccttcctgtacggagtcggttcctcgggcgacgacacaagtaaaagcgtgacctacgcttgcgagaacatattctcccacaataatatcaccgtggaaggtgactactttgtgatgggtatgattctcaggcacaattcaaaggacaccatcgttgattccaatcatttcagattgaacagtaataattacacctacggaataaccctggagatcagcgaaggggcgaaggtcacaaataatgtcctgaacagcactggaaatgccgggatctatgccatggagctgtatgcctccaataataacgatattaaaagcaatgagatttacgcctcggcaagctacagcagcgtggcactttatgcctcaagcaacaataacgtgactcacaatgtgatcaaaacctacggaaataaggtgcaggaacctgcgcagggccctgagcaccccgactctgttgatctgttcaatacaggaatcagtctccagaaattttccagcggcaacaacatctctgataatattatcgaaaccgatggagatgctgccgtggacttcgatgagacttccaccgggaatacagtgggcaacaacgagcttagttctacaaaaggcgggggaaatgctgctgtaaatgacaggaccggcaagaacatggtgtatggcaatacgggaagccggtacgtgcccaattccaatagttcctcaaactccaacaaccagaatagtggtgagaggaataccgtcccaacgaatggcagctccaaccgatataatgatggcggagaggaatcaggctcaagcgccttcgggcaggtggacctgggcctgctggccactgcaatgtctagcgtaggggaaggcactggagatgtcggggaaactggtgacggcgagtctgacctgattgtgagtgagttggaagaggtggcctccaaatccatggccggtggactgtctgtaccagtagcagcgttacttttggtgctgatgttctgtttcagcttcctgaatgccaaggacgaggatgacgagaacgacgatgagaacgaggaatga

SEQ ID NO: 4269 - DNA, 5055 bp, synthetic construct
  source 1..5055: mol_type = other DNA
atggatttcaagaaagccatccccctatttgctttgttgctcttgattctgtttatcatcggctcttcaagcgcagcgtcaagtgatctaagttcaagtcctgccgataatgaaaacctcgaaattgacagtttcgactccaatgaggacctcacagtgaatacgaatacaaactatattgagagcggcaacaatttggagattgactataaatccaactcgaaagagtccgtgaatgcaaccaacgatataaaagaagaaactgtggattacaatgaggatatcagcgttgaaaagaataatctaaagtctagcaaattgagttcggtgtataaaataaccgagtcgaactactctaactacttcaataaaagtggcaacatcctctctaatgtgaaccccggggacacattggacttttcaggttccttcaacaataaggacttcaaaatagacattcccttgaccgtgaccagcagtgacggtgctcaattcatcgactgcagcttcaagttcaataagggctctgacggctctaacatatccaatctgaacattaactcctctcgcctccagagtccgctgatctacctggattctgtcagcaacatgaatgtcttcaacaacaacctcttctcctgcgcctcaaaatcctatgccctgtgttttagcaatgtaagctactcctctgcttatcacaacaccctgcagactacagcatttgttgtgggatggggacatccctctgcctttgtcttggccggggcaaataacttaaacatctcctcaaacaatgtgatcgtcaacgattccaacggcatctacttcaccacatatgttggagacacaattagcgcgaacctgatcaatgagaataattacatcttcaacaacaccgtgcacagtgtccgaggagttgaatgggccgttgacgaaaatggaaccactcctctcccatcctctttctgctatgcgattcaagtgatggggagcggaaataaactgctgaacaacacggtctacaatgcgtacaggggcataagtgcgtccgggagtaatagtgtcgttgccggaaacgtggtgtacgatattaaggggaattattacagcggaaacacaaaggatgacggcggagactacggaatcaatgtagggccaaattccattgttgagaacaataccatttataactcccactttaacaagaactctggggtggccatttcggtgggttctaacacaacggtcaggtataacaacataacaaacatcaatggcaccggggccgatctgtccaaaaacttcatagaatttagccataatcgcattgataacgtgtcagataacggaatcagggtgaaaggccaatatggtaacaccaatatctccgataacttcatcaattccacagacagttcaatcactctgctgagaagctcaaaggacaaatacccgtcccggatcaatatcgagaataatgatttctataccgacgtctcccctatctactacctggaagggtatattggcaagctgacagcaaaggacaatacgctcaatgggtcctccatcagcgacattagtattgacgtgccgagctccagcgaaaccaaggtgtctataaactcaaccaaaattgatttcaacgaatctgtgctcattatgcccactgtcagcgcctacggtctgtcacttgaaggcctggtcgacattattgtcaacagccagaagattgccactgtgcctatcggatctaattacacgttcacgccaacggaggcaggaagttttagcataaacgctaacttcacaggtaatgaagagtataagccatcggagtccgcggtgctcattctgactgtgacccccaaggagactaccacttccatcatcataagcccaagcacggtggagcttaacgatactgttgtcattagtccctttgttcggtacaacggcactctgctggaggggttcgtggacattctcctggatggggaaaagttagataccgtagagatcggctctgactacagttatgtgcccaatagttcaggcagtttctacatcagcgccagcttttctggcgggaatgggtatggggcttcggtgtccgacatgctcatccttactgtcaatgagtccagctcaatcgaggacccggatgaccccacgaatttgacagtctcgtccatccttatcagccctaacacggtggaggtgaacgatacagtccttatcagtccctttgttcgctgcaatgggaccttgttagagggtctggtggatatcctgatcgatggggagaagttagattccgtggtgatcggctctgattacgcttatgttccttcgactgccggcactttcaacatcagcgccagttacgctgggggaaatggctatgagccatcggtgtctgatattgtggtgctgactgtaaatgagaagcaaatcatcgataacggtacagacaataatgggacagacaataacggtactgatacaaacggcacaggcactaacggaacggacaccaacggtacagacaacaacggtactgatacaaacggcacagatacgaacggcaccgagaacaatgggaccgatacagatcagatcaaaataatcattaatgacgacaattactccgactacttcgataacggctatcctatcgacctggatgtggatggcaactacacgctaatcatcgactcactcaacaacaaggacataatcatcccatccggattcaacattaacatcatcggaaaggagggctctggcaccataaacaacggtacaattcaacttggggacggcacagatgaggtcggtgacgtgaagatatccaatctgacctttaacaattataacaaggacgctatcgtcattaacgaaattgcctacgacctcacggtggagaacaacaagatcatcatcaataccgaagccagtccgggaaacctatactttagcgtgtatggaatcaatgccaagggctacgtggactcactggctgtcagagacaacgatattttcctaaacggttccgccccctacctgtatggtgttagtttgggaggctacggggccatcgctaacccccagaatatcttcgtgcagaacaatacaatcaatatcaacagcacggccagtatgggcatggctgagggcatttacttagacaaccctattaatgcagctgtgctggacaacaaaatcaacatagagtcaatcaatgatgtatatgtttacggcatgcagatcgcggactcggccttcagcgccataggggagggaaagaccggtgtcaaatccccttatgacataatgatcgagagcaatgacctgaacctgaaaagcaaatacatggtgtatgggatcaccattctggactacggctgtgacggcagcctgaacgaactggggcagcctatgaccaatatgatggacctggacaccacaatccagaacaacaatctcgtggccgattctgagaaggcagtgatgggaatcgtgggaaagacctacaatatgtctgtgctgtgtaacaatctgtcggtaattggaggaagcattgagggcgttgcatcccacgatgcattaggagtggataactacgctcttggagtccagtactctggaaaggattatacggtgctggtcaaggacaacaccgtgagcacaaatgtgctcgcggagtacctgaacaataaagactacgaagcctatgtttcatttgtgaacaataccatataccatattgacggcccatctagtgggaatgacactccagagaacggcactggggacaacggcactaatactaatggcacagatatcaacggtacagacactaacggcacggacaacaatggcactaataacggtactaatggcactaacggtaccgataccaacaacaccgacaacatcactaaacgaacagttaaagatctacaggaacttatagacaacgccactagtgggtctgtggttgatctcggcaactttgaatatcttgacgtatcgaacatcgacatcagcaaggatatttctatcgtggggaacaataccgtcatccggaccgctggtgacggcaagccagtcttcaacattaaggaaggcctttcctcagtgtcaattagcggaatcgaatttatggcaaataacggggatgtgctgatccgggcgaaagcagtcaactccacgagccgcttggctatcgaaacccctgaaatcaacataattaataacaccgtaatcaagtcagacgacggggttgtagccgagtcagtcaccgtgctcgaactcgattcgtctcgttgcattctggcccccacaaatgacatcaaggtctccaacaacaccctggagattggcatgaacccctttaactttgtggtggagagcgtcattaacgctgcggatgtgaatgttccagtggggggcgaccttcagagcaaagtcaaatccgtaattcactacgaggatatggataccgttgccgtggccaaggctgacggcagggtagggaaatactttgaggtgaatctgaccgacagtgatggaaatcccctctccggcaaattcgtccagataggattcaacggtgccgtctataatagaaccaccaacgaaacagggggggtgagactgcagattaacctcggatacaagggaacctatacatttgctattagctacctcggggacgagaactacaatgggagctttgtcgtggcaaaaatcaaggtgagcacacagaacacaaagatcactagctcatcaaagacctataaggcaagcgcaaagaccaagacgctcactgctacccttaagtcctcagttaacggcaatctgattagcggaaagaagctgaccttcaccgtgaatggcaaaagttacaccgccaccaccaactccaagggcgtcgccagcgtaaaggtcagcctgtcaagcaagaagacctatagcttcactgtaaaatacgcaggagacgacacctactcctcttccagtgccagcggtaaacttacgataaaatga

SEQ ID NO: 4270 - DNA, 8907 bp, synthetic construct
  source 1..8907: mol_type = other DNA
atgaagctgaaaaagttttcagtcatcctggcggtcttgcttgtcgcaatacttgctattggggccgtgagtgctgagtcagtctcagatactgatgtcgccgctgttgccgctgtggatgatacagccggcacagtgtctgtggacgactctatagatgatgtgtccgtggacactacggacaacgatgttaagaacagtctgagtgctgttgccctcgaagacggggagagtgtgagctacgagatcaacgacacttcttactccacatacttcaaggacgacggtactgccactgatgaactcagtgaaatgggtggctataccctcaatataggaacccttactaataaggacattcagataatatctggttccgacattaatatcaccgccaaggatggggaaggattcattaacaacgggaccatcattctggggggcgatgaatttcccgggagcataatcgtgtctggcttgacttttaccaataccaataaagacgctattcaggtgctggattataccactgatgtcagtatctatgacaacaatatgaatattataggaatcagctcgctgtcatctgatcccaatttcagtgtttatggtgtgagtgccaatgggtttatttcaggcctgtatatcgagaataacaccatgtctgttgaaggcgatgcgctgtcatatggcatcgaggtgggagcctattcggatggggcctacgctctatcaaacccgcaggacatcctgatatctggcaatacgattgatgtatctacttccggagccatggctgagcccatgtacctctctgatgtgtgggatgtaacagtggtgaataactttgtgacagccgaatcagtgaatgcgccagcgtatgggatacaggtggccgattccgccatgtgggcatcctacatggacccaaactacgacggtgatttatcgtctccgaacaatgtactcatcgatggcaatacatttattctgaacagtgactttatgatttacggtatcacgacaataaattacgggtgggacggtatagagatggaatcgtatgctttgcctttaaacataaccgtttctaacaataatgtgtatgccaactccaagaaaggggtgatgggcattgcagggcagatatataaccttactgtgatagacaacactgttattgccatcggcggttctgcggagggtttgtatactggggaccttcttggcaacgggacgtatgccctctatattgattacgatggcaattacgctgaagatacgtactatgtggttgttaaagacaatgatgtgttcacaaatgtcacgaaggagtatgcattcaataatgattatgagagagtaattttcgagaacaatgaagacctcaagaccttcgtgatcgacgacgagacttactccatcttcttcaacgatgatggaaccagtgatgtgctcgaggacatggaagattacaccctgatgatcgggcctctgaacaacaaagacattgtgctcgactcaggttctgagatcgtcattctggggctggatgaaggctacatcaataatgggaccatcgtccttgacggtgtttccgacgtctatgtgtcggacttggtcttcgtaaatgtcaataaggatgcattttacattggagatgaatcaaacgaaattgtaatcgtggacaatgctattgtgctggttgggaaggctgccgagtccacgaacccttacttcagtctgtacgcaatatccgccaacggatacgtcactggattgaacattacagacaattccatctatattacaggggatgccccctattcctatgggatctctctcagtgcatacgccgctgagttcaaccccgaggatattacaatctataataacactattgagatgagtctgtccgagggatcaagtatggcggaggctatttacctcgattgcccgtcagatgccactattgaggagaacaatattaccatagaaactgtgggaaatacctttgcttatgggattcaagtggccgacacactgcccgccgcctatgagtatgcgagttatcgaggggagttaacctcccctgagcttgtgactatcaaaggcaacaccctgaacataagcagcgagtatatgatttatggtattaccgtacttagtgaaggggcgctggtgaacggctctggcgatctggccctttgccagtttgagttattcctaaatgtcagtgaaaatacaatctatgcggactccaccaaaggtgttatcggccttgcagggaaggtgtacaatattaccatgaacaataacgacctctacgtcacgggcggcgacgctagcgatgtgttttcctatgacgacctgggtgtgggaacctacgcggtcggcattaagtataatggcgattcagaggacggtaactactatgccgatgtgtttgagaacaatatctttaccaatgtatctgccgaatacataaacgacgagaccgtgctggacgaatacgtgttctttaataatttcatcccactagacctgggaatcgtcctcgaagctgataaggacgctctggagataggcgacctaatcaactacacaatcaccgtggtaaacaacgggccaaatgctgcttcggatgtgtatgtttcctttgagctcagtgacattctcctcctggtgacggctcctgaagagtatgatgcggagtttgagctcctcaatgtttccgacctggctgtcggtcaggagaaagtgtacaatatcgtcgctcaggtaatcgacggaggatatctcttatctacagcttatgtggattgctacgaggatgacacctatatggataacaatactgcaagtctggatatgatcgccgtgcctatagttattgatgatagcaactatgctaattacttcaatgaaaacggatacttgaaagacgacgtgattgccaccggcacagttgtgttgtttgggaatctgaccaataaggacttgtttattaatgcccccctgctgatctctgattgtaaagacacgaagctggtcaacacgaccatcgccctcgtggagggggcagacggaacattgatttcaggtcttgtctttgattacaccgccaaggacagcggattcgctatcatctctgtgaatgacggggtgagcgatgtgctcatccggtctaacaatatcacggtgacagacattcctgattatgtcactgccgtggctattggagtgtacggagcagtcaacggctctgaggacatcactatcgaggataatttcatcaacatgaccggtggcaacgcttacacctatgggattaacgtacaaaactatgatcaagggtgggttccaggcgagggggcgtccggcgttgagatcctagagaataccatcatcttaagtgggaccggcatggaggaagcgattttcctgtcggggctggaagatgtctacgtttacaagaacacaatcgtttccgcttcgttcggcgagaatactggttgtgacgcctatggcattgccgcagcgaatgtgagcgaactgataatcgaggaaaaccaaatgggggtcggctcaaatcagatggcctttggaatagctatcaccaccaaatctaatgatgtggacgtcttcaataacagcattgacgttgaaggtacaggggcgattggcgtgggcgtgcaggatagtaccgacgtttccgttacattcaataccatctgtgcctacggggatgacttcaccagcatccaaacctacgacagtttgggaactgccaatgcagccatcctagatgagaccggagaagcactcatagaaaacaataccatctacgagtacttccctataaccattagcgatgacaactatgctacgtacttcgatgagagcggcaagatcaaaaatgattccggcatcgcagggggcgatctgatcttcctggacgagctgaccaataaggccctgacgatagacatccccttaaccattaaaggggtgcctctcaacgccttggtcaacactacaatcaccctcctggccgatgccagcggctcaaccgtcaccaagctgaatatggagtttacgggggacgagaacaccggatcggtgggcattatctacgtccttggtgccagcgacgtggagatcacggataacgtcattattgtccccgcctttgtagacaagactggcgccaaatacgggtccagcctgtacgcgattgaggtggagagcggggccgacggatgcagttacatagacatctcagacaacgtgattgacatcatcgggtctgcaaggtacctgtacgggattgacgtgttccagacctggggcagcgaaaacaaaaacagctacgtggctatctgtgataacttcataagtgtggtaggggcgtccaggatgtcggaaggaatctacgcaagtggggttgacgaattagaaatcctgaacaacacaatcacttcagtaggtcaggctgccgcatacggtatcggaactgacaccctgacagactccatcatctccgacaacggcatggaggttaatgccggaacccaagcgtatggaattaccaacacctacagcgacggcgtggaaatcacagcaaacgtcatcagctccacgggtgaaggtgccatcggtatcggcacaaactccgaagatgtcaccatcgccaaaaaccagatcacaatcaacggtaatgattacaccacaatcacttcagcagacacgctgggcacggataacgcagccatcctagacacaactggcgaggccacaattgagaacaacacaatcacggagaattgtccaataacaatcaatgacggcaactatgccacttacttcgacgagaacggcagtcttaaaaataattccggcattgcagatggagatctgatcttcttcggtgaactcagcaataagaaattcaatatcgataattacctcatcattaagggtgctaacaacaacaagctggtaaacactacaatcgcgctaactgctggcgcaagcgggtccaccttaagcaggctcaatatggagtttactggcgacaacactacaggctctgtgggacttatctatgtcctgggcgcaagcgatatcgaaatcagccagaacacaatcaccgtgattgactttgtggataaggcaggagccaaatatggctccagcctgtacgccatcgaagtggaaagcggcgagaacggctgcagcttcatagacatttccaacaacataatcgacattacagggtcggcccggtacctgtacgggattgacgtattccagacctggcaggctcccatgcgcaacagcgacattgccattacaaataacttcatcatgatcgacccggcaagcagaatgtctgaggggatctacgcaagcggaattgacaacgccattattgccaacaacacgattatctctgaaagcgacgctgctgcatacggcatcgggactgacagtctggccaactccacaattgctgacaatgtcgtgcgggcagcggccgccacgcaggcatacggaattaccaacacctatagcacaaatgtggatattgtcaacaacactgtcaatgccgaggggataggggccgtcgggataggcttcatgggctcggagggtgttactgtggctgacaatctcattgccatcactgggggagactacacgtcaatcacttcctcagacagcctcggaaccgccaacgcagcgatcttggacaaagacaacaaaggaactatctcctacaataatgtgactgaaaacatccccgtcaccattaacgacggcaattatgacaattacttcaatgaggatgggtacataagaaatgactcaggctttaatgatggcgatctggtcttctttgagaagctcagcaataagaacatagtgctggatatgccgttaaccgtgaaaggggcgcccggaaataaattggtcaacactacaatcacggtcctggatgatgccagcggctcgaccatcacctgcctggatatggagtttactggcgatgagaacacaggctctgtaggaatcatctatgtcctgggcgccagtgatgtggagatcagctacaacaatattaccgttcccaatttcgtggataagaccggcgctaaatacggctccagcctgtacgctattgaagtggagagcggccaggacggctgcagttatgtggacatttcaaacaacataattgacattacagggtcggcacggtacctgtacggtattgacgtattccagacctggcaggctcccaacaaaaacagctacatcgccattgccgacaatgagatcagcatccagagtgcctcccgtatgagcgaaggcatctatgccagcggaatagagtttgcagaaatctcaaacaacatcattaattcagtgggcgaagcagctgcatacggaatcggaactgatacgctgtccaattccataatcgaagacaatgacatcgtggttctggctggaacccaggcttatggtgtgaccagcacctacagtgacacggtgaacctaacaggaaataacatctccgccgtgggggtcggcgcgatcggagtgggctcaaacagcgacaatgtaaatatcgataagaacgagatcagcattctgggtcaggactacactgccatcacgtcagcagactccctcggaactggaaacgcagccatcctggataagggaacgaagacgacaattggaaacaacacaatcgaggaagtggcgcccataatcattgaagacaacagctacgacaaatacttcgatgaaaacggacagattaaagaggacgctccgataggctcgggcgacgtagtctatatgggtgtgttgaccggcaaagatatggtcttcgacattcctgttgcaatcctacccgccgacaacagcaagctgaccgactccaccattaaagtggtggaaggtgctgatgggaccacaatcaatgggttggacatcgagtataccggcgatgagaacacgggctctaagaacatcatcaacgtcgttggcgccagcgatgtgaccatttccaacaacaacataatagttccagactttgtgaacaaggccggatcaaaatatggctcctctgttgcagctattgccgtggagagcggtgcagcaggcactgacaatactacaatcacaggcaacaacattgaagtaaacggctctgccaactatctctatggcattgacgccttcacgacatggggagccaataccaccaactctaacctaaagatcgagaacaacaacgtttccgtgaatggcggagcccgcatggcggaggccgtctatgttagtgactctaagaatgtgacaattgataataatgatgtggaagcttcgtctgaagccgccgcttacgggattgcgaccgatcaattgtcccatgccaaaatcactgacaacgatgtggcagtcctggctggaaccactggatacggaattaccgctacaacctctggcgaggatgtcctgatcgagtccaatgatgtggaggtgcttggtatgagcgccatcggtgtgggactgtccaaccaagacgctgcaatcgtcaaggacaatacaatcgacatcatcgggggggactacagttcggtcacgtccgccgacaatttgggcacggctaatgccgcgatcttggacaaagacaacaagaacaccaacctggtggtagaaaacaacaccatgaccgaaaacggcaaagcagtcaacaccacccacagcgggaacagctctgccgagcttcaggcaatcattgatgcagctccagccggctccactgtggacctggatggcgtactctacgccgacatcagcaatgttgtgatcgacaagaacctgaccattaccaacggcaccattgtaggtaaagcgggagaggcaatctttgttatccctgccaagtccgagaacggtcctgatgaagtgaacatcaacggcatggagtttctggtgaatgatgccacggtgatcgctaaggccactgctgacaatggaaccacccccacctccattgacacgccggccatcagcatcaagaacaataccatagacatggcaaacgacgacgtcgtgcctgagagtgtgaccgtgttggaacttgacagcgaacgaggagttctcgctcccaccagcgagattgcagtggagggcaacacaatcgccacaggtgtcgatccattcgaatttaaggtgaccggggtcgccgacgatagcggaaacgtggttgtggagaagggcggaaacatcccagctaaacaggcttctgtgatccactaccaggacatggagacaactgccgtgaactccaagatcgaaggaagggtgggcaaatacttcgaggtcaacctcaccgacacaaacggcaatccactggccaataaatttgtccagatagggttcaacggtgtggtctataaccgcacaacaaacgagaccgggggcgtcaagcttcaaataaacctcggatacaagggaacttacacctttgcgatctcctacctgggagacgactactacaacgggagctttgtggtgtctaagatcaaggtcagcacacagaacaccaagctgacgacggccgccaagacctataaggccagtgcgaagacaaagacactgactgcaacactcaagtcaagcgtgtacaacaagccaatcaacggcaagaaggtaacgttcacagtcaacggcaaatcctactcagcaactacaaacgctaagggggtggccactgtgaaagtgagcctttcaaccaagaagacatacagtttcacagctaaattcgccggagacgacatgtacaccaaatcaagtgttacagggaaggtcactataaagtga

SEQ ID NO: 4271 - DNA, 534 bp, synthetic construct
  source 1..534: mol_type = other DNA
atggagattattgaactgatcgcgatcatcatcctcgtggccgccattgtattcctgatctattattacttccagaccgtcaatggaggcagttttgatatagatgacctgaaggaccacctcaccatatcaaagagggaggccgccacggccacagtgaacctggatgatgatgaagcggaagaaaaggtgtctgtcgggaaaaagattaaatacacctttaaggacatcgataaatcatactccaacacgacagatgcattttccaaaagactcgacgccttcctggacgaacggagcgaagagttaatcgagaactggtcgttggtgaccactgacgacttggaatccctggagaagcgctgcgttacagcttgtgacagcattgatgacctcgagaagcgattcagtgaatacagcaacgtgaccaatgagaaacttgaggacctggacaaacggatcaaggcacttgaggaagacagcgagctgctagaggaggacgctgaaactatagagaaggaggcagatgagtga

SEQ ID NO: 4272 - DNA, 405 bp, synthetic construct
  source 1..405: mol_type = other DNA
atggctaacgaaatcataccatccgaaattttcatcctgattctggtggtgatactggcatttgtggtcattatcattgccctgcagtggaagaaggtgcgccagtcagacaacacactcaagctcatggagaaagagatcgagctgaaaaagatcgcgatggttgaaaaggaccttgagaataaacgactgatggaaaatccgatcagcttacccagcgaacagcaagagcagctaacccaaatcagggactccacggctaaggtcatgagcgatgtaggctacctgcacagtgagatcaacgagcggctcgcaagattggaggcccagaccgagcttaagaaattggagaagatgctggccgaaattgaagataaagagaagaaactcaacaaggggaaatga

SEQ ID NO: 4273 - DNA, 930 bp, synthetic construct
  source 1..930: mol_type = other DNA
atggtcgacgaaattaaatcttatgaagaggctggcaagatcgtgtccaaagtcagaagcgatgcatcaaaaatgattgagaacggactaccaatcctggaccttgtggagtttgtagaaagcgagatcctgaagagtggggcaggaatcgctttcccatgcaatgtatcgataaatgagataaccgctcactacacctctcctgccggagatacaaacaagatggtgaccggggaccttgtcaagctggacttgggagccgaagtcaatggctacattgccgactctgccgttaccatcatggtgccaggcgacaacctggaggagctctttgatgaggacactctagaaaagaatcagaggatcatcgacgcctcagccgccgggctggaggctgcaataagcacggtgagggcgggcgtgaaagtctgcgacgtgggacgcgctgtagaagaggccattgctgaatacggtctcaatccggtgcggaacctgacagggcacagtcttgagcactggaacctccatgccggcatttccgtgcccaactatgacaacaacgatcctaccatcctggaagaaggccaggcagttgcaatcgagcccttcgcaacggatggtgagggcatagttaatgactgcccctacgcctacatctttagctttatgcaaagcaagccgttcaggatgaaaaacactcagcggatgctgaatcacatcgaaaagaactatagatacttgcctttctccgggcgctggctgacagagagcttcaatgagcgtcgagtcaacacaggcctcaagcagttaggagatgcgatggcgatttacccctatgccgctctcaaggagcggaccggggcctgggtgtcccagaaggaacatactatgattgtggagagtgatggttgtaaaatcaccacgctgtga

SEQ ID NO: 4274 - DNA, 4416 bp, synthetic construct
  source 1..4416: mol_type = other DNA
atgaaagtgtataaaatgatcctgatatccctgattcttgttatcttgagcatctcctgtgtgagtgctaatgatctgaccaatgacgctattcagggcgatttgagtgacattgactattctttcactatcgatgacgacctcagcaattctgacaacagcttagacgtgtcgagtgatttaaaagagaacagttgccttgatgaaatcgacctggataaggagtctaaccagaacacgacaaagatcctcagtagcaaccagttggactctaatttgctggactcaaaccaacttgaatcggatcagctgagtagcaaccagttggattcgagtctgctcaatagcaaccagctgaaccttagcaacacctacaccgtctcccagagcacgtattcaaaatactttgataagaacggctatgtgaagacatccgtggtggccccatatgatacgatagacctgagcggcaacattatcagcaaaaacttcatcttcacgattccatgccacattacaagctccaataatgcaaagctcaccaactgtatgattaagtttgaaaacatgactgctgacggccgttcaagtgtctccaacctatacattcgcaacagcgtcgaatggtgccccggagtgtttctggaggggtccaccaatgtggacgtctacggcaatgacatttattgtaccggggctaacggcaacccagtccgggtgatctactccaattactcaaacatctttgggaacaagctggagacatactttaccggctacatgaacctttcctggaaacgagccggtatcctgctgggagactcgcactacaataacatcttctcaaacgacgtaaccataaaggacagtaaccctatctaccttacaacctacggatttgaaaagtccaatcacaacacaatatacaataatactgtacgtagctcggccatcagtgaagacagcggtctctccaacccctcggcctgggcttatggcatacatctgatgggcgactataacatcgcgctcaacaacacgattcacaacgtgtacaggggaatcgactctgaaggcagcttcaacatcctcgccggcaacattattttcaacctcacaggcgggtatttcgaggggaacgacgggacagagggtggagactacggaatccacgcatcctacgacaacatcgttgcaaacaatacaatattcaacagcaagctgaccggctctgccatctatctgatgcccaataatactgcctatgggaatattgtctacaatatcagcggccataacggccttgaatttaattattacgccgataactgtaaggtatacaacaacatcatcgacgtgcctgtggagagcccgatttatgtgttcggacggatgaacaacctgctcatcgaaaacaacatcctaaccagtgtagactcctccagcatcctggtgaagaagcagtccaactcaaagtaccccaccgacgtcaccataagaaacaacctcatcatggggtactcaaagaccttcaaccagagcccgatcgactacagccagatcaaaagcgacgcaaacattatctcattcaataatagtattgccgtctataacgacacatacttcaactacttcgctgagataggcaacgtgagggattactccgactggatcgacctgaacaacaccataaactactcagactcctataattacaatgcacttgtctttgtgggaaacttttccagcatcacagacaacataaccaaaaccgactacattattcctctgaaggatattgtaaacagccggatctcagacgtctatcgcaatgtgccgtacaacgagtacaaaagcatgatggaaactttgaacgagatctatactgacatcgtgttcaatgggccatctcctgtagatctcagaggagtggacagcggaggcaactcctcagactccaaccaaactcccatggatggcaacggcagtatgaatgaatcctctgacaacggttcagataacagcaccaatagcagtttggacaatctggatgatgaggtgaaggattcctacgagaatctcatcgataatatcaactcaactgagaatgcgtcagatgtttacgtcataaatgacgctaactacgccctctatttcaatgaagacggtagttttagagacgatttccccattgagttcgggaatacactccggttcgccaatctcacaaataaaatgtttaaaatagacattcctctgaagattatttccgatagcgaagacagcagtttgctaaattgctttatttccctggaaggtgagagctccaacactatcatttctaatctgaaattcgaactggataatctgagtagtaacattgactttatctcgataaaggatggagttagtaacgttttgatctacaacaatacttttaaactggacatcgattcctctgattctcttattgattctcctctgtctgacgatgcatccctgtctgccataaggctctacggtagcgattacatttcccgaaacattttcatagagaacaatattattgacttcaaatctaattttggccaactgtatgggatttacttatctaataagatggattaccttaattcaaaaaccaacccaagcgggtttatcatccgcaataacgtcttctcgatcgatagcaacgggctgatcaacgcaatctattcagattctgttaaaaatctcctattggagaataatttgttcaaccttagctccaacggcaacctggaggattcgtcattgatctatggcttggatctagtgaaagtggacaacctcaccatgattaacaaccagtttagcatcaattccacttacctcgcctgcggaatcaattcaagcgatagttctgggtttaatctcagcaacaatcaattttcagtggactccgcctacctggcttatggcctgaatctgaaaaatacaaataatttcaatcttcataacaatgatttttatatcgatagcggcagtttcgcccatgcgctggacctggacgattgcaataacttcaatattgcaaataacctgatcaatgccagcggtgcagatattaagagaaacctaaacgcctccaatttagcggtgttcatccaggacgacctgaacgacaatgtcctgaagaacggatatctttacatcagcgagctaaacgggtccctgaagggcaatgggctttacgaaaacgattttaagtctcctatcgtccatacggataacagcacacgggacctgcagaacttaatagactttgccgtggaaggagacaccgtggagctcggaaacatggtgttcgctgacctggacaccattaatatttataaaaacctgaccatcaacggcggcatttttgtgtctggcaattggaggcccctcttccacatcctccccaatgacgagttattgaatcacagttcctctgacagttacaattcgtaccggtcctttgactatctcaacatccagaatggggcctactacctcgataatgccgatctgctgatactggcagaggcatgcaacggtacagacagtctttcaatccaggttccaagcttaaacatttgtgataatgagttcatgctgctggatgacagcacagtggctgagagcataaacatcctgaagctcctatcatcccgcgctatactggcgcccaccaacgacatctccattgaaaacaacatcctggtcagcgggatgaacccgttcgtattcgaagtgagctcgataatgaccggttcggacattgatatcgctcacggcccattgaaccccaaaaaggcctctaagataatcttcgaagatatggttaccacagccttcgactccaatgttgagggaaggattgggaaatacttcgaggtgacactgaaggatgagaatggaaatgccttgtccaataaagccattcagatcggatttaacggaagaatctataatcgaaccaccgatgagaacgggtctgcaagtctccaaatcaacctggcctataaggggacttacacattcgcgatctcattcctgggtgacgagtattataacggcagctttgaggtggctaagatcacggtgaaaaagcagacgcctaagctggatgtgtccaacgtcacttataagagcagcgctaagtctaagacatggactgcgaaactcactaccagctacggctcactgttaaaaaacaagaaggtctatatcaccatcgacggtaagacttacaccacacgcaccaactcgaagggaattgctagtcttaaggttagtctctccaccaaaaagacttacaagtttacggttaagttcgagggtgatgacacgtataatagcctgactaagacggccaaactgacgatcaaatga

SEQ ID NO: 4275 - DNA, 885 bp, synthetic construct
  source 1..885: mol_type = other DNA
atgaacgagaaaaacgagtccgcctttcccattcgatgtgaccccgaggatgagatattcgtgaaatgcatgtcccggattaaggagttcccccagtatatcacagggtacgacgacatcgagggaccatatgagagccgctttatctcttcaggataccggaacctcaatcttgattccgtcaggatcagatcggacaaaagcagcatcaatattgagcaccacagctcaataagccaggaggcaatgagacggaactacgaatacgctgtcaatgtcttcaacgccactggccaggccgtttatccatttatcttttacacgggcgacctgcccgttgacaaaattacctacatgaaccagctgaattacttccatccgcagtggtttatcttaaaggaaaaggatggcatgaagagattgaacaatattaaatataagactgataatgatatagacatgcacattttcgagttcctagattacatttggctgccaaaattcaagctggaaataacaattgaggagtgcatcagggagcttgtgaagctctataacaagctgtctgcggacgaatttatcttgaacttcaccaaggaatgtctcgccctgtgggtggggcgttatataaaagaccaagacgaactcaaatacatggctaggtgcctgaacatgtccaagatcgaagaacgcccttttgaggagtcactgcgcggggtaatcttcgcacgaaagctagaagaggccgaggaaaagggtgtggaaaagaatcggatcgacttcatcaccaaggcgctgaaacagatgagtcctcaagaggtgtccgatctcttcgatattcctatcgacagtatcctgagtgtgcagaaccagtacagcaagtga

SEQ ID NO: 4276 - DNA, 846 bp, synthetic construct
  source 1..846: mol_type = other DNA
atggcattcggtacatataaagacgtggtgtcagccagggccacggataaggccatccagaaggtcgcacaggatgggggaatcgtaaccgcactgctgacatacgcgctggaggaaaacataatcgaaggagccatcgtggctggcaatactgaagacccctggaaacctgagccgacaattgccatgactccagaagagatcattgccgccgccgggaccaaatatacctttagccccaacgccatccggctcaaggaggcggtgcgccagtacgggctggaaaagataggcactgtcggcactccgtgccagattatgggacttaggaagatgcaaagctacccctttgctacccgattcgtcgccgacaagcttgcattgattatagggattttctgtatggagaacttcccaagagattccctcaagaccttcattgagggtaagatgaatagctccttagagggcgtcaacaagatggacatcggaaagggcaaattttggatcacagacgtggaaggcgaatccggcttgcccctgaaagagacccacggctacgagcaggcgggctgcaatatctgcctagactatgttgccgagctggctgacgtgtctacaggatcagtagggagccctgatggctggtcgacggtcttcacccgtacagacagtggtgcagacatctttaccgcagctgtggaggctggagtgatcgagacgaagcccatggatgatgttaaaccaggtctggagctgctcgaaaaactggctaacgggaagaaagacaaagggcggaaggaaattgagagacgcgtgaacatgggactcccaagtcctttctga

SEQ ID NO: 4277 - DNA, 960 bp, synthetic construct
  source 1..960: mol_type = other DNA
atgctggctcgcatcaagaacagcatccgcaaatttttgggactggaagccaagccggacgccgaagatgatgaagccaaggctgagactcaggacaaactgaaacaggagattaagaaggaagtggaggctcagtcaaagccagcagaagaggcgaagaaagaggccgatgcgaaagctgaggaagaagcccaggcgaaaaaggaagcagagtcatctaaggccctgaaggagagctccacacaggaggttgaaaaagtggctgacaagccaaagataggatatatccatatgagtgggtgcaccggcgacgggatgagccttacggagaattacgacattctcagcaccctgctcacagatatggtggacatcgtgtacggcacaacgctcgtcgacctctgggagatgcctgagatggatttggcccttgtcgaagggagcgtctgtctgcaagatgagcacagtgtgaaggaactgatggaggtcagggagaaagccggactcgtgtgcgcattcggcagctgcgcaatgactggttgcttcaccagatatgcccggggtggccagctagcccaacccaaacacgagtcctttgttccaatttcggacttggtgaaggtggattgcgctattcccggatgccccgcatcccctgagatcatcgctaaagtggtggtggctctgatcaacggggacatggattacctacaacccatgttagacatggccgcctgcaatctggcgtgtggctgcgacctgcagaccaacgttgtcagtaaggccctgtgttgtggttgtggaacatgcgtattagcatgtccaacccgagcccttgaaatggtagaggggcggccgtcccataataaaaacagatgcatcaagtgtggcgcatgtactacgcactgccccaggacctggttccctgccgagcagataaagaaggacctcggcctgtga

SEQ ID NO: 4278 - DNA, 474 bp, synthetic construct
  source 1..474: mol_type = other DNA
atgccctacgatgccgggcggctggttgtaggttgcggaaacgtcctgtttaaagatgacggcttcggtccaatggttatacacgccctagaggactactttaaggaaaacaatctggagatgcccaaagatacccagttcattgacgcgggaaccggcgccacacatttcatatttagcatgcctgacgacaattggaagaaggtcattgtggtggatgtggtggaatggaacgccgaacctggcacactcaagatcttcagcccgtacgacatgcccaaagggaagtatgaaaacgctcacacgtggcccgtagaggagcctctccacgatttggtggacatggggatcgaagtggtcatcgtcggatgtaagccaaaggagatcactgcaccggacgtggatatgggcctgaccgagccagtggaggccgcaatccccaaagctattgagatgatccttaatgagctgtga

SEQ ID NO: 4279 - DNA, 1158 bp, synthetic construct
  source 1..1158: mol_type = other DNA
atggagatcgacgatgaagggatagtgaccaaaggtcgctactttagcatcacaccagtccgaggcctcgagaaaatggtgacaggcaaagcccctgagactgcccccgttctgtgtcagagaatctgcggggtctgccccattcctcacacactggccagcgtcgaagcgatggatgactccctcgacatcgaaatacccaaggctgctgccttgctgagggaactgacaatttcagcctctaacctgaacagtcatgctattcaccatttcttggtggctcctgattttgtgcccgaggatcttttcaagactgcagtcgacagtgttggaaccattaggaagaacgcccagtatgtggtagatatggtggctggcgaggggattcacccaagcgatgtgcgcatcggcgggatggcccggaacatttccgagctggcgcggaagaaactgtatgcccgactcaaagccctggtccccgtggtggacaatcatgtggaattgatgacgaacctcatcctagaaaaggacataccggagggactcggtgtcatagacgcgcctgtgtttgctagcgatgttgtttacgggaagagagacttctttgaccttgaccggtttactgagatcgttccggaggcctggtatgacgaccctgaagtcggcaaaagggcctgcaccaccatcccattatacgatggcgtaaatgtggaaaccgggcccagggcccgcgtagacaagttccagggctacaaagagagaggggtggtggcacaacacctgtcacgagcccgtgagatgaagacgtacctgtcccgggctatcgcgatcctggatgaactggacactgccgctaatacccttgcagatttcgatccacgcggcaccaacaagctaggcattggtgtcatcgaagcaccaaggggaacggacgtgcacatggcacaggtaaaagacggaaagaccgctttctatagcgcattagtccccacaacgtggaacatcccaaccatgggtccggccacagagggattccaccacgagtggggacctcacgtgatcagagcctacgacccctgtctctcgtgcgcaactcatgtgatggtggtggacgatgaggataagtctgttgtcgagaataagatggtgcggatttga

SEQ ID NO: 4280 - DNA, 555 bp, synthetic construct
  source 1..555: mol_type = other DNA
atggacaactccaatatcataatctcagtgattattgttctctgcattgccgccggcgtgactgcatacgggatatccgagggggacaacgcagtcttcagtgacctgacggggttttccccttcgagtacagatagcggagataccgggataggaaatacaacaggaaacaattctcagggcggcggaatcaccgcaggtcagaccaacgtggctaccaacacgggcggcagctcaagcggaggctcaagtgggtccggcagttcaggatcgggttccggcagcgggagcgggtcctctggctccggcgggtcgtcctccgggaatggcggagggaacaccaacccaagcccgagtcccagcaaaatcagcgccgcccaagctaagaacattgcggctggcgccatcgccgaagagggcgcttatatcagcagcgtaagtgacactggatcagcctacgtctgttatattagcaacgcagagggtacaaatgtgggttacatcactgtgagctacggtggagcgatcatcgaaggtgccggaggcgcgccctga

SEQ ID NO: 4281 - DNA, 603 bp, synthetic construct
  source 1..603: mol_type = other DNA
atggataactcaagcattctgatctccgtgatcatcgttttgtgtattgccgccggagtgaccgcctacggtctaaccaacgacagcaacactgtattcaatgacctgtctggatttacgcccgacgaatctggagacaccgggatagggaacaataccacaggtggaaacggaaattcagggagtgggattacggccggcacaacagactctggcagcggcactgggtcgagcggcaccgggaccggctcaagcagcagttcaagctcaagctccagttcgtccagcagttccagctcctcctctaacacccagcagaaggcttggaagcctaaagtcagtccagagaaggccaaggcactcgccacaagtgcagcgaggaactccggttggcccggcgcatactgctactcggctacctataattctggcggatattacgtctgccttctgaaggatgatgctggaaacactggttacgcgcacatcgggtctggcacaggccggttcctcgagggctcctggagcaaacaagtgactaaagagccgaatgaagtggaggacgattataaagaaaatgaaacatccaacatcacggagtga

SEQ ID NO: 4282 - DNA, 1194 bp, synthetic construct
  source 1..1194: mol_type = other DNA
atgctggtgaacgcagacctgcacattcacagctgtttttccatggccacatccaaagacatgctgatcgagaacatcgcgccaaaatccctcgaaaagggcttgaagctggtcggcaccggcgacgcattccatcccaaatggctggacatcattcggcagagcacagaatacaagggcgatgggatctactcacgcggggactgtgacttcgtcctcacaactgaggtggaaggcaagcataaggtacaccacgtgattatcattccagatctggacattgctcacgagctcagcgctaagttagtgtcctctaacaagttcatagacggcagaccgaagacacccctggggggagctgagctcttggagctggtgcgggaatatgactgcatgatcggacccgcccactcatttacaccctggacgggaatgtataagtattacgatagcatctacgactgttacgataaacgtcctgatttcgttgaactgggcctatctgctgacactgatatggcggattgcatcaaggaattgtctgatttcgtctttctgtccaattctgacgcccacagcccttggcctcacaggttaggcagggagtttaaccagatagagatggatgacgtttccttctcatcactaaagaaggcctttaagcacaagactgtaaaagcaaattatggaatgcttcccaatctgggcaaataccatatgactgcatgcaccaaatgttataagctggttgaccctatcattgccaaggagaacaagatgatttgctcttgcggcggtcggatcaagaaaggggtggactaccgcatcagcgagatagccgactttagccagccaaagcacccgagccatcgaccaccttatgtccatctcatgcccctgggagagctgatcagtatggtctacgataaaggggtgacaaccaagaccgtgcaggggatctggcagaagatggtggataacttcggtccggagattgacgtcctcatcaagaccccccttgacgagatcgaaaaaatagatagtgatgtgtcccttgccattcaaggattcagagaaaaaacgctcaacataacgccaggtggtggcggaaagtacggggaaatctcgttcagtgaggattttaataaaaccgagaaaaaagagagtgtgaccacccttgactcgttcttctga

SEQ ID NO: 4283 - DNA, 564 bp, synthetic construct
  source 1..564: mol_type = other DNA
atgagcaagaagcgctgtccatgggccgaagacgtagaggaaatctatgtgaaataccatgatgaggagtggggcgtgcccacctacgacgaccgggagctcttcgagatgctcgtgctggaatcatttcaggcggggctatcctggatcaccatactgaaaaaaagagataactttaaggaggccttcgataactttgacgttgtgaaggtcagtgaatatgacgatgccaaggtcgaggagcttcggaacaacgcaggcatcattaggcacaaggggaagatcaatagcgccataaacaacgcaaacgtctttattgagatccagaatgagttcaaaagcttctcgaactacatttggggcttcacagacaataaggttctgaaggatacggaagaaaactataagacaaattctccgctgtccgataagatcgctaaggacctgaaaaaacgaggtatgaagttcgtgggaactaccattatctactcctacttggaggctattggagtgatagacaatcacatccacgaatgcttcaaatacaaagaggaaagtgactga

SEQ ID NO: 4284 - DNA, 477 bp, synthetic construct
  source 1..477: mol_type = other DNA
atgaagtccagcgtgctcctggaggaaatcaaagagaatattcagaattatgacatcgaccacataaaagagaacctgaagaaagaggatataaaccccatctcgaagcaggtcagcgagttcaacttgaagaactacgacgagattatggagaccaagatctcagaggaagatgactttgagattagtgacgaaatgatctactcaatgaagaatgaaatcgaccttttcttcaagggatgcagtcctgaaagcgaggactcctttaaaaagttcattgaatccatttgcctgtacctaagcctgatcgccaaaaagccactgcatccggtgggtatggatttcaaaaacggcaacacggtccacgaggagatcgaggacgggaatactgtatattactgcgatctcaaggaatactttggcaagcaagaaaaggattactatacctgtaaattttgcgtgtgtaaaacagtttga

SEQ ID NO: 4285 - DNA, 1008 bp, synthetic construct
  source 1..1008: mol_type = other DNA
atggccttcaaagacatatttaaatttaaacaaggagaaaccaccttcatcttcgtaggcggaaaagggggcgtgggaaagacaagcattagctctgccaccgctctgtggctcgcaaaacaaggcaagaagacgctgattgtcagtactgatccagcccattcactgagcgactcacttgagacaaagataggccactatcctgtggagatctgcgaaaacctctacgccgttgagattgacccggacaaggctatggaagaaaagcaacgcgccttggagagccagaaatccatggccacggccgaccaactgctcgggcttgattttctaggtgagcagatggatttggcgtctgcctcccccggcgcagatgaggctgccgcctttgaggtgttcttaagcgtgatgacttccaacgaatacgatgttgtggtctttgatactgcgcccacaggacacacccttcgactcctgtccttccctgaagtcatggactcgtgggtgggcaagctgatgaaggcacggtccaagctgggggctgccgctagcgcgctgaagaacatcatcccatttatggatgcggagaatgatatccagtcctctcaggagctagaggagaccaaaaagcagattaacgaggcaaaggccgtgctcagcgaccccgatcggaccaccttcaagatggtggtgatccccgaggagatgagtatctacgaatcggaaagggcaatcgaggcactgaacaaatacgacattacaacggacagcataattgtcaatcaggtcatgccagacatctcagactgcgacttctgtcactcaaggtatatgctgcagcagaaaagactggctctcattgatcagaagttcagtgaccaggtcgtagctcaggttcctttattcaaggacgaagtaaaaggtaaggagaagctgctgaagctcgccgaaatcttgtatgaggggaaagataatgacgaagtggaggccagtgtgatccagctgtga

SEQ ID NO: 4286 - DNA, 132 bp, synthetic construct
  source 1..132: mol_type = other DNA
atgttcgtcgaagagatccccgaagagaaattctacagcaaccgcatcagggacgagtttattgaggaggtggtggaaaaaatagaaaacaacatcctccagaataagtatcggaagtacctggattactga

SEQ ID NO: 4287 - DNA, 150 bp, synthetic construct
  source 1..150: mol_type = other DNA
atgttctacgaagagcgagtggaagatcagttcagcacctaccgcaacagagaggaatttattcgggaactgctagatgtggtcgacaataagataacagacgaggagatggaggacatctatcagctgctcgacatccccaggaactga

SEQ ID NO: 4288 - DNA, 762 bp, synthetic construct
  source 1..762: mol_type = other DNA
atgacaatctgcataagcgcaatctgtacggagaacaatgaagagcatatcgtgtttgctgtggaccacatgatcaccacgggcttagggcagttcgaacacagtatcaacaagtacaacgtgctgaacgagaacgttgtcggaatgatggccggcaacgcccttttgatggactatttctttgacgaggactacagcgagaatagcttctcagagatccttgacatattcgaggaaaagttcaaggagaagaggctgaacattattgaaaaggaaatcctcgatgtttatagcatcgacctggacttcatacgcgacatcctcaaagggcccattacaaatgatttccaggcggctatcctgaagaagattgcaaaaaccaaactagagtcggccatcctgctcatgggctttgagaacaataaggcgagaatcgccgaagtgtccgactacggcattggaaactttaatcggattaacttccataccatagggtcaggttccattcaggcccaaaacactctgatgttccagaaacactccaaaaaagatgatctgcgaactacactgtacaacgtgtacaaagcaaaaaagaatgccgaggtcatgcaaggggtagggcaggacaccgagattggatttctgaacaatggaagtatcgtcatgctcgataagaagaatatgggcatcctcgataatgtgtatgccctggaattgaactggggcaaggagcacaaggaagtgggtgctctagatttttga

SEQ ID NO: 4289 - DNA, 1080 bp, synthetic construct
  source 1..1080: mol_type = other DNA
atgctggagatcaagcatacaatatgccctagttgttccgtggggtgcggcctcaacatcgtctccaaggacggcgcagtggtaggcacgtacccctacaagaggcacccaataaatgaaggaaagaactgttctaatggtcgggggtccattctgcagtttgagaacaagatcaatgctccctcactggttcagaatggagagctggtggagtcagatgctgactcgatcatcgccgcaatcaagaaggagctggatgccatcgatgccagcgagctcgcaatcatctgctcggacaagaacacaaatgaggaaattgatgcgattaagaagttcgccgaagacttcggaaccgataagatcggattttacggctacaatttccccaagttttccggagagatagcaaattataacgatatcaacaacgctaaattcattttggcaatcggtgacatctatggcgagaatcctttagccgctcgcagaatcgtgctggccaaagacaaggaggccaagttctttaacatagatgacgttgaaaagtccataactgccctgaacgccgacgagtacatccagtttagtgataaggccacgttcgctgacgctatcgccagtgtgaagggcgagcttaacgaggaagcggtaattgtcttaaacaagatcgccgatgctgaagacttcaaactcgtggaggatctggccagcgaaacaggcgcgaaactgctcccgatcctcaacgggccaaacagcaagggagctatggacaaaattgacccattgaccaaagatgaaattatagacctaattgacggctcaaaagtgctgattgtcgtcaacgataacttgctcgactatctgtctgagagtgacattaaagggaaagcattcattgcaaatatttccaatttcgaggacgaatttaccaaatttagcaacgtcgtgctgcccgggaaagcgtgggtggagaaggaagggactttcaccaatgctgaaggcctgacccaaagctttgccgccagcgccgaccttggtgagggtctaagcgaaatcgagatcttcgagaaacttgcgtga

SEQ ID NO: 4290 - DNA, 1155 bp, synthetic construct
  source 1..1155: mol_type = other DNA
atgtcagagaatctcatgcttgcaaaaagtaaagaaaatgaaataactgatagcggagcctgcgggggcgccgtatccagcatttttcagtatctattaagccagggaattgtggacggggtccttacgcttaacaaaggcgaggatgtctacgacggaatccctagactcctcaccgacgctagtgaggtcatcgaaacttgcggttcactgcactgtgcgccgacaatggttggcgacctgatttccagttttctaagcgatcagaagatagcggtggcagtgaagccttgcgatgccaaagctgtgaacgagttggttaaacggcaccgcatcaatcctgagaacatcattacaatcgggctgaactgtggcggaacagtacgccccgagacggcccaggaaatgatagagaaattctatgaagtggaccctgctgacgtggtgaaggaggaaatcgataagggtaagtttatcattgagatggccgacggaagcgagaagggcatcaagatcgatgacttggaggatgaaggctacggacggcgtgacaactgtcaaagatgcgaactcaaggtgccccggaatgcagacctggcctgtggtaactggggctcggagcccggctggacctttgtggaagtcaataccgaaaaggggaatgagattatcgagggcgccaaggccgagggcttcattgagaccaaggacccctccgagaaggccctggaaatgaggggcaaggtggagaacatcatgatcaagatggggaagaggaacactaagaaacagctggaggacgaggctctgacactggaggagtgggaaaaccaatggaacaaatgcatcaaatgcttcgcatgcagggacgtgtgcccaatatgctggtgtcatgaatgtgagctcgaaaagtcatacttcaaggatgacggacaggcgccacccgatcccctgagcttccacggggtacgactgtcccatatgagcccaagctgcgtcaattgtgggcaatgcgacgatgtttgtcccatggagattccagtctctaaactcttccacaagttgcaggtgaaatacgaagggcagaccggatatgtggctggtgtcggcgatgaaaaacctccgctgtactccccacagaaggagaacttctga

SEQ ID NO: 4291 - DNA, 402 bp, synthetic construct
  source 1..402: mol_type = other DNA
atggccgacgatattaaaatagtggggttttgttgcaattggtgctgttacggtggggccgatactgccggaaccgcccggatgcagtatcctcccaacataaggattatcagggtgatgtgcagcgggcgtatcaacccgtcaatggtcttcaaggcatttcgcgaaggagctgacggtgtattcgtgggcggatgccatatcggcgactgtcactacgacgctggcaactacaagtggaatagacgggcactgatgacaaaggatatcattgaggagtttggcattgacaaggagagattccgcttcgagtggatcagcgcgtccgaaggggaaaagttccaacggaccatgaaagagttttataatacgatcagtcagctcggcccacgaaacaaatga

SEQ ID NO: 4292 - DNA, 2874 bp, synthetic construct
  source 1..2874: mol_type = other DNA
gtgacgaataatgagatagaaaagaaatggcagaagaaatgggctgacgctaagctattccagtcagatcccaatgaaaaagagaagctgttcctgacggtggcctatccatacccaagtggggccatgcacataggccacgggcgtacatacaccgtgcccgatgtatttgccagatttaaacgtatggaaggctacaatgtgctgttcccaatggcctggcacgttaccggtgcaccggtcatcggtattgctgatcggatcaagcggaaagatccctggaccctggacctgtacgaaagagtgcacaaggttcctcatgatactctgcccagcctcgaagaccccattaacattgttaaatacttcagtaatgaataccacactgtgatggatgatatgggctattcaatcgattggaggagagaatttcgaacgatcgaccctacctacaagaaattcatcacatggcaggcgaaaaagctgaagtcccttgggctaatcaagcagggggagcacccggtgaaatattgccctcatgatgagaaccctgtgggcgaccacgacctgctcgaaggggaaggcgttggtgtgaacgagctcaccctgattaagttcgaggtggagcctggactgtacatcgtcccggccaccttccggccggagactatctttgcagccaccaacgtatggctcaacccagaggtgcactacattgaagtggaagtgaagacaggtgccaatgcccgggaaaaatggataataagcaatgaagccttcttaaatctcagcaatcagcatgatttggagattgtgggcgatattgaccccaagccactgatcggcaaatatgtcaaaaaccccctgaacggagagccattgcccatattccctgccagctttgtcgatcccgagtatgggtcagggacagtatttagcgtgcctgcgcacgctcctgccgactatattgccctgcgagaccttaaggagaacgaagagctcatcaaggacttcgatatcaaggaggaggtggcgaaagcggagccattgaacgtggtgaccgtggagggctatggagagttccctgcggtggaggtggttgagaggatgggtatcgaaaaccagaacgaccctaaggtgcaggatgctacggacgagctatacaaggctgagcacagcaaaggatacatcagcgaccatatcgagaaatatgccggcaaaagagtcgccttcatcagagatgagatcaaggccgacatgattgaggcaggcagcgcagacatcatgtacgactttgccgagcgcccagtcatctgtcggtgcggcaacaaatgtgtggtcaaggtcatggatgaccagtggttcataagatacggcgatgaggaatggactgaaaagacccagaaggtcctggcccaggagacaattatcccagaggagatacgctcaaacttcgaatactatctcgattggctggacgactgggcctgctcccgaagggtggggctgggaacaagggtcccgtgggacgaccaatggctgattgagcccttatccgactctacaatgtacatgtcctactatacgatcgccaagtacttgaaggatatggaccccgaagacctgaatgaagcattctttgaaaaggtcttcctgggggtagacagcgatgagatcacagtccccgaggagaccgtgaaccaaatccaggaggaatttaactactggtacccactagactggcggttatctgcaaaggaccttgtcggaaaccacctgagcttcctgatgtttacccatgcagctatctatccggaggagaaatggcctaaaggaactgtggtcttcgggatgggactgcttgagggcaataagatgtcatcctccaaaggaaacgtcattctcttggctgatgcgatcgaacagtacagcgctgatgtggtaaggcttttcctgatggcaagcgcagaaccctggcaggactttgactggcgcgaaaaagaggtccgcgggacccaaaggcgtcttgagtggtttcgcgagtttgcacaaaaggttgaagacatcaaaggcgagaagctcgacctctccaatattgaagaggtgcccctggagcgcagtatcgacaagtggatgatcaatcaactgaacatccacatcaaggaggccactgaagccctggaagttttccagacacgccaagccctccagcatgctttgttcctcctgaaaaaggacctggatcactatctgtaccgagttcaggacctgattgaagccaaggacccggccgtgatctatgtcctctcgaccttgctcagcaattggatcaggctgcttgctccatttactccacataccagtgaggagctctggtcgaaatatggcggggagggattcgttagttttgcgaagtggcccgagtacaacgaggatctaatcagcaaggagatagaaaggtccgagtcccttgtgcagaacatagtaaaagacataaacgaaatcaagaacattgtagacacagaccccgaaaagatccacttatacttggctcccgaatggaaatgggagctctataagatagctgatgaagtgggaaaaccagacatcggccagatcatgggcaaggccatcaaggcagacatttacgataacaaaaaggaaatcgccaatgtggctaaacggattagcaaggaaatgattaagacccggtacattggtaagattgatgaggagactatcctgaacgatgctaaagacttcattgaaagtgaggttggtagcgagattgtgattcatacggatgactcgtatgatcctcagaataaggcaagaaatgcgatgccctataagcctgccatttttatggagtga

SEQ ID NO: 4293 - DNA, 1374 bp, synthetic construct
  source 1..1374: mol_type = other DNA
atgaaaaagaacaaactcgagaaaggctgtgagaaaatgtccgccgacgataagaagctagaccagataattaagacaatcgaagccaatgacattaaatttttgagactggaactcgcagacatacacggcttgcccaaaagcatggccgtgcctcttaaaaatgcaaatgatgtagaagatattgtgaatgacggactgctgtttgacggttcatccgtcgcagggctcgctagcatcaatgacagtgacctgctcgccaaaccagacataaacaccttctcgaccatcccctggaggcctgaaagcaagggtacaagccgcttcatctgtgatatatataccacggagggcaccccttatgatggagaccccagaggaatcctgaagaagaccctggagaaggcggagaaacggggctaccagtacaatgtgggtccagaaccggagtttttcatcatcaagaaggatgaaaacgggaactacgtccctgctgacgaagccgagtactttgacgtggagccattagaccaggggacggatatcagacgcgaaatcgtattcggcctggaggagcttggtttcgatgttgaggtgagccaccacgaagtggcagcaggacagcatgaggtggacttcaagtatgcagacgctcttaaaacagccgatgctgtcattacctttaaggaggcggtgaaggccgtggcgaataacctgggcgttaaggcgactttcatgccaaagccattcattggaatcaacgggagtggaatgcattgcaaccaaagtctattcaaggatggcgagaacatcttctatgacccgaacactgagactcaggtatctcaggaggcgctgtacttcattgggggccttttgaaacacgcccaggctctctcagccatcctgtccccgacagtgaactcttacaaacgtctggtcccagggtatgaagccccctgctacatagcctacggatttaagaaccgcagtaccttgctcaggattcctgcctcccggggccttgggacgcgaatcgagtgccggtcagctgacccctcctgcaacccctacctagcatttagcgcactgctggaggctgggttagacggtatggacaataagctcgaccccggagaacctactgaggagaacctgttcgccttttccgaagaggagattgccgaaaagggcatttcgaacctgcccacaagcctctgggaggcctatcacgccctggaagaagatgatgtgatcattggcgctctcggcgataaggtttttaatcagttctacaatatcaaaagggccgagtgggatgcttaccgaatccaagtcttcgactatgagcgggatgaatacctgaacgtctga

SEQ ID NO: 4294 - DNA, 918 bp, synthetic construct
  source 1..918: mol_type = other DNA
atgtgtggaatcgccggtgtgatttacaaagataaaaagactcaccctgtgggggaggccttaaccagcatgctggagtcactacagcacagaggccccgatagtgcgggttacgctatctacggcagcctggatttccctgaaaattactatcagctcaatattgaggtaaagcggcgacgcggagccctggacaatctgaaatcgcttctgaaccagatcagtcccatatacgaggaggaaataattaagtccgtaggcgacagcgatgtgtataagtgcaaaatcgccctcgatgagttttccctcttgcagccgtggatcagggaaatagacgagctcgaaaatgtgagggtcatcaacgggtcacacagcttcgagatgatcaaggacgtcgggaaagtcaaggacattgccgagcggtttgacgttcagagccgcatgggaacgcacgggataggccatacccgattcgcgacagagagtggcgtggaccgctaccatgcacacccatatcaaagctacatcatcccggacattactgtggtgcataacggacagatcaccaactactggaaaatcagggaccccctggaaagaaagggacacacttttgaatccttcaacgatacagagtgcatcgttcactatatggccgacaagctgaatcaaggctataaactggaagaagccctggaccaggcagtgattgacctagatgggcccttcagcatcctggtggggacgcctaacggcataggcattgctaaggacaagctcggccttagaccaggagttatggtggaaaccgatgaggtctttgcaatcgcttccgaggagatggcattgcatgatgtcacagactctaacgagatcgaacagattgccccaggtgagacacgggcttacaccatttga

SEQ ID NO: 4295 - DNA, 648 bp, synthetic construct
  source 1..648: mol_type = other DNA
atgaaagaatacatcattaatgccaaggatatggaagagaaggaactgaaccgcgctataaaggaacaggctgcacatcacgacaagctcattattaacaatcccgagtccagacacaatatttgcgccggcttaagtgaggatgtggacattgagatcaacggttctgccggatacttcgtgggtacgatggtgaacgggccaaagatacacatcaacggaaacgccggctggtttgccggagacaatatgaccaaaggggagctaatcatcgagggcacagcgggcgacggtgcgggacagggcatctatggagggactgtcatcgtgaaggggtcgacaggcagtaggactggcgagatcatgaaagggggcaccgtgatcatcggcggcaacagcgggttcatgaccggcctgcttatgatgggaggaaagctcatcattttgggtgatgtaaccgatgacgtcggggaatccatcatgcggggaagcatatacgttctgggcgaggtcaagagcctggggaaaaacgcaattatggaggaaaccacagacgaagatctcaaggatctggaggagactctgacgaaatacggtttcgaggacatagactattcaaactttaaaaagattgtgaatatccaatga

SEQ ID NO: 4296 - DNA, 1095 bp, synthetic construct
  source 1..1095: mol_type = other DNA
atgagtgaacataaaattgcaatggtgggcacgccatgtgaaatcatggcagccagcaaactgcaagattacaccgatagccctattgaggttaagttgggcctgttctgcatggagaacttttcatacaaatactttgtaaacttcctgaaggaatacgacttaaagatggatgacattgaaaagttccagattgacaaaggatttctcttcctcatcctaaaaaccaaggagaccgtgaaaattcccctgtccgtggctaaacggatcatcaggaaaaactgcaacatttgtgtggagctgacgtccgagaccagcgatatctccataggcagtataggtagcgatgacggctggtcaacattgatcgtgcggagcgaaaagggggaggagattgttaagggagcgatcgagcaacgtttcatcgaagtggaagagctagaagaatccaagttccagctgcttaacaagctggcccagggcaagatcaaccgcaatctggagcacatagagcagagggagtttttagcccgacccgtactctaccagagggagaaggacgacgatagcatcagcaaggaaatcagcgagtcggacttttcggacctgaagagtaacgtcatagacattggggcttgcgtgctctgcggcgcctgcgaatatgcctgtccggataacctcattataatcgacgacaccaaacccagaatgaagggccaatgccctcctgactgccatgcatgctttgcggtctgtccacgcactttcatagaggaacacctgcggaatgataatgagaagcccatcggggactatatcaatgtctacacggtgagatcccttaagcacagccagggtcaggatgggtcaatcgtcactacaatcctggattatctgctgagcaatgagatcgtcacagaagcccttatcgttgataagaaggacgatttggcttggaaaccgtacgccaagctcaccaaggacattgaccaggtcgtaaaaagtggaggaaccaaatattctgtgtgtcccgtgttcaagccactcaaagagattaatgaggagtcatccactacagaagagggggtgaactga

SEQ ID NO: 4297 - DNA, 1488 bp, synthetic construct
  source 1..1488: mol_type = other DNA
atgtccttcactgtggaaaggaaaatcgaaatatgcaggcagaacaatgaccgaccagggtgctgctggtacctgtgtgacaatccaaacaagtccgcctgtaagaactgctacagctgctactctaactgcccgcacggcgtatatgaggtcatcaatgatgaaccactccccatccatcaggaaaactgtgtcggatgcaagatctgcgaagagatgtgtccgacacacgccatctacgtgaggcctttagtggatgaggggcgaggaatctggtcaaacagcaccatggttgaaatcaagcggaaaagccagaccggttcatacaaggtccggggctgcggccttacccgacgcatccctagtttcgacgacctgagcatattgcccgctcaggtcagtaggccacccatcgactcgtacagggagacctgcaagacatccgtagtccttggcgaccggtttgccgagaacccaattgaaattgatactcccatcatgattggggctatgtcatttggggctctgagtaaagaggcgaagatcgccctggccattggaagcagcaaagtcgggagtatcacaaacaccggcgaagggggaatgttacccgaggaacgccactatgcagacaagctcattgcccagtacgcgagcggccgtttcggtgtgtcagcaagctacctgaacaatgcagaggctgttgagataaagattggccaaggcgcaaagtccggtatgggaggccacctcctagcccataaggtcactgccgaggtggcacgcgtgcggaacattccggaggggacctccgccttgagtcccgctagacacatggatatcgtaggtcccgaggacctgggaatgaaaatcaatcagctacgggaaatcaccgattggaaagtgccaatcatcgtgaaattcgcctctggaagagtggagcaggatgtcaagattgcagcaaaggccggcgccgatatcattgttgttgatggtatgcaagggggaaccggggccggccctgaggtggtgaccgagcatgcgggcatccccacaattgaagctatcgttaaggccgacgacgccctgaaggagatcaatctcagaagcgaggtcagcctcgtggctgccgggggcatacgctccggcgcggacgtggcaaaagctatagctctcggtgccgatgccgtgtatgtggcgacgtcggcactgattagcatcggatgcaaggtctgtcaatcctgttcagaaggcatatgtcctaaaggaattgcaacacaggatcgcgccctgcggagaagactggaccctatacgcaaagggcagcaggtggctaattatattgaggccatgacacaggaggtgacgtccctgacccagcaggctggaaacactgacattgagaatcttgaaaggcaagacctggtggccttgacgatggaggcgtctcagctgactggcgtgcctatggtaagccagcgttattga

SEQ ID NO: 4298 - DNA, 2643 bp, synthetic construct
  source 1..2643: mol_type = other DNA
atggccgccttcgatcgaatcaaatcaggcatcccagggcttgatagtgctctggataatattcggttaggagacaacgttgtttggaatgtcacaaacctaaatgagttttcctattttgtgaatccttacattaagcaagcaaaagaggacaacagaaacctgatttacatccggtttgccaatcatcctcccttaatcgaaatgactgaagaggatttccgcctgctcgaaatcgagcagaacaatcccgaaaccgagttttccatgatagagcgtgatgggatcaagatctacctggttaatccatacaaccaattcgagacattcacgttggaagtgcacagaatcatagaaaaggagggcttcgatgccttctatgtcttcgactgcctcagcgacctgcaggcggtttggtccactgacctgatgatgggaaacttctttaaggtgacctgtccattcttattccagctggatacggtggcctacttccccatcatccgaggaaggcactcatacgatgccattgcaaaaatccgtgaaaccacgcagctctttctcaacgtatactcgaactctccagaggaagtgtacgtatcccctctcaaggtgtggaaccgatactcgcagaccatgtttttggggcacaagttcaacccccggaccggctttgtcaaggtcttgcaggacggtcaggaggtcagcaaatactacaagaccatcaatagcgataaatacatgaacggacagaccttagacagctgggaaaggtatatgctgaaagtccgcagagaatacgaagaggggaagaatatcgacgaagagtgcgacaagatctgcgagctcatgatgacaaaggacgagaagatgctgtccaaaatcaaggaatacttctcttttgaggactataccacgatctatgaccgccgcgtgggaagtgggcttgtgggcggtaagtcctgtggtatgcttctggccagaaaaatcattgagaggaactgcccagagatttacaacaatatctttgagcccgacgactcattctatataggcagcgacctgttctacacttacatcgtttccaatgacctgtgggacctgagggtaaagcaaaggacccctgaggggtactataaatacggaaaggaactggaggaagcccttaaaaacggcagctttagtgaccagaccaaacgggagtttataaagatgctggattatttcggccagaatccgattatcgtccgttcgagtagtttccttgaggatggatatggcaatgcttttgctggaaaatacgaaagcgttttctgtgtgaaccggggctcgctggaggagcgactggccgcctttgaggaggctgtgaaggtggtgtattccagtactatgaacatttcagccctcgaataccggaaaataaatgggttggacgacactgatgaacagatggccctattggtgcaacgcgtgtcaggcagttaccacggcgactatttcttccccacagcagcaggtgtaggattctcatacagcccatattccccgctgccggacatggacaacagcaagggcatgctaaggcttgtgatgggtctgggtaccaaggctgtcgaccggacaaaaaaggactatcccagaatcatcaacctggacaagcccgaagtgactatggctaaggatattaaggaaaagcacagatatagtcagcattatcttgatgttattgaccttaaggagatcagcctgcacgacattcccgtggatgaggggttgagcgtcattccacggtactctaaaaacatgttggtggagcatgacagagaggcggagaggatgtttcgcgatcggggccagcgcagggagattgtctttgtgaactgcgaggggatcgtgaaaaacgatgcattcatagaaaccatgaaggaaatcatgagcaccctccagacagcttacgactatccagtggacatcgaatacactgttaatgtgggggaggataaaagtttcaacatcaacctactgcagtgccgccctctgcaggttatggtgaacaatgaggctattgaaatgcctgaggacaagaacgtgttcttccacatcaaagaatcctctatgggaatgtccagaaagaacacgattgacacaatctgctatgtggaccctcataagtattatgaatacccttacgctcaaaaaagctctatttcacgagtaatcagcgatgtaaatgcctatctcaagagcaacaacaagacagcgattctcattgtcccaggccgcatcgggacatcatctcccgagctgggcatccctgtcgtctttgcagatattagctacttctccgcaatcctcgaggagtcctacagcgatgccggatatatgcccgagctctcctttggcagccacatgttccaggatctggtggaagcggatatctactacggtgccttgtttgagaatgagaaaaaactggagttcaataaagacatggtctacgactatccgaacatactgaaggatataaatcccaacctcagcgaggagatttatgacatgatacaggtgatagactttgatgaaaacaaggccgagctctaccatgatatgaataaggatgaaaccctgtgtattttcaaatga

SEQ ID NO: 4299 - DNA, 1356 bp, synthetic construct
  source 1..1356: mol_type = other DNA
atgaataaaagtaaaaaatgtgccgaaaaagatctggctcacatctggcaccctgcctctcagatgaaggattatgaagacttccccccaatcgtcatagaccatgctaaaggcgtccacctctacgacgtggacggcaaggaatacaccgacatcatcagctcctggtggtgcaatatcctgggtcattgcaatgaagaggtaagccaggccttgaaggaccaacttgatgagctcgaccacgtgctgtttgctaacttctcccacaagactataatagagctatcagagcgtctgatcaaggtcatgccaaagggcttgaaccgattctcctttgtggacaacggcagcgcttcagtggaatgcgcactgaagatggccttccagtattgcgctcagacggggagggcccaaaagaaaagattcatgtgtttcacagatgcatatcatggagagaccctgggcgcactgtcggtgggagccctggatgagtactccagtgtgtttgagccaatcatgattgacacaattaagatcgaggcgccggattgctacagatgtccctatgggaaaacacggaacgattgtgactgccagtgcttcgagcacgctgagagggcatttgaagaacatggccatgagacctgtgcaatgatcatcgagccgctaatacaggggagcgcggggatgaagatttatccccccctctacctaaagaagctccgcgaactttgcgataaacacgatgtccttctgattgccgatgagatcgctaccggttttggtcggaccggaaagttctttgccgtggaccacgccaatataacgccagacattatgtgtgtgtccaagggtctcacgaacggatacatggccatggctgttgcctgcactaccgacgagatttacaacgctttctatggggactatgaggacaatatagcctttatgcacagtcacacctacgccgggaatcccctggcggcaagcgttgcaaacgccacactgaaaatcatggaacgggaccgaattatcgaaaacaaccaggaaaaggccatttggctcaacaaacgcttccacaacacattcgatgaacatcctaatgttggcgagatcagacagatggggttgatcaacgcaatcgagcttgtggaggataaggagtctaaaaaaggatttgattcaagcttgcgcatcggctacaagatttaccgggaagcgctgaaggacggactcatgctgaggcctttaggcaacgtgatgtacttcaatccccctctggtcatcactaaggaagagctcgatgagagcctggcgatttgtaaaaaggccattgacaaggtactgttagactga

SEQ ID NO: 4300 - DNA, 1599 bp, synthetic construct
  source 1..1599: mol_type = other DNA
atgacaaaatttatattcctgattatcctgctgaaatttatgcggaaggaaatcttaattgccgctatcgcaatcattctcatactgtgcggcggggtcttcgcagccagcaacatgcagatagcggacatcgccacgttcagtttgaacgcaattgatctcgaggataggggaagcctgatcgtggacagcgaagatatcactgcctcaaagggctactataattcctcggcttctgacgagaacgtggtgttggtgaaaaattacagcttaagactcagcaacagcattgtcaataagaccggcgacaccggaagctcgggggacgatgccgacttttacgggatcaatagcgccgtgctggtaaatagtaacggaagtgtcgaactgtctgacgttgagatcgagactaacagcaaaggttcaaatggagtgtttgtaacaaatgctgtttctgactctaactcaaattcctcatcctcctctggcagcccgattgttgattccaccgagcggcatgatggtaagagtgacgctgaggagcctgggggggtgcctcccgaaaagcctgtggaggacggaccctcggtatatggcggttcttcagggggtaaaggtgcccttagcgatggaaaccaatcgatgcccgcgccaggcgctagctcctctgacgtggaagggagttccagtgcagacatcagtaacgtccgaatcaccacccacggggacaagtcccgcggcctggatgcaacctttggagggaagattattgcttcagacgtggaaatcaacacagacggccagagctgtgcggccctggcaacagacagaggcgaaggtgaggtccacgtgaaaaactgcattctcaacactggcgtggatgagaagagcggccgcggctctccaatcatctattcaacgggcaacatcaccgctgacaattccgaaggctgtgcccatgtctcccagatcgcctgcatagagggaaaaaacagcattgcgctatccaactgtgagttctccgcaggtgccggaggaaacagggaggacaacggagaatacgtggatctaggaggtgtgttcatctaccagagcatgagcggggatgccgatgtaggcacctcgctgttcgatgccaactgctgcgtgctgtccattgaagaggactccgaatactataagactgctccgatgttccacgttaccaatacaaaggccatcgtcaagcttgccagcacagaactgaacttcggcagcggggtgctcctcaatgtttccgggcagagccaatgggggacggtcggaagtaatggcggggagcttgagttcgatgccagtgacgagattcttgatggggacgtcttcgtggattccatcagttcattgaacatgagcctcgcttccaccagctttataggcgcagtgaaccccgacgacgactttggcgagactaacctcgtcatcgactcagattctgattggacattggacggtgacagtcacctgagctcactggagaataatggagatatagactacaacggccacaccctgtatgtggatggcaaggcgtacacggagtctaatccattcaaatga

SEQ ID NO: 4301 - DNA, 699 bp, synthetic construct
  source 1..699: mol_type = other DNA
atgtccaaagggctcttcgtactgggaactggcaccgatgttggtaagacttatgtgaccggcctcctcctcaagtacatcagagacaacggctacaatgcgagctactttaaggccgccctgagcggcgctatcagggacaatgagggcaaactgatcccgggcgatgctgtggaggtgataaatatggctggcctggaagaggatacggacttcctggtgccatacatatacgagacagcagtttcgccccatctcgcaagtcagattgagggaaacccagtggaactggacaaagtcaagcacgcgtacgaggaagtgtcaaagaagtacgactatatcgtcatggaaggaagcgggggcatagtctgccctattcgctatgacgggcaaggatgcaaaagcaacatcttgcttgaagacatcatcaagtgtcttgacttgaacgtcctgctggttgccgacgccgggctgggaaccattaactctgtaatcaccacagtggattatctgaaaaaccgggatatccaggtgtgcgggattctgctaaacaactttaaggacatgcccatggagaacgacaatctcaagatgattgaggagctgggtggtgtggatgtcattgccaaaatctacaagaatgataaaaatttatcccttgatgtgcagttggacgtgctaatgaactatttcaagtga

SEQ ID NO: 4302 - DNA, 981 bp, synthetic construct
  source 1..981: mol_type = other DNA
atgtacaatattatcgagctgaaggacaaagtactgaacaactacaaagtcactaaagaggacgcactgaacttgcttgatgtgcccctggatgaactttccgatgccgccaacgagatcagagagtttttttgcagcaacaagtttgacgtgtgtacattgatcaacgtaaaaaacggccggtgcagtgaagactgtaaattctgtgctcagtccaatcactacgacaccgatatagacatatatccattcctatcaaaggaagagctagtgggtaagagcaactccctcctggacgcgggattcaagcgaatcagctacgtggcttcaggcagaaagattagggacaaggaatttgacatcgtggtgagcgcattagagcaactgaacaaggatagaacggatgaatttcatctatgcctcagtctggggctcctcagcgaggagcagataagcactctcaaaaacctgaatgttgaacgcatccacaacaacctggaaagttcaagggactatttttcgaatatctgtacaacccactcctacgacgagaagctggataccattgaccttatcaaagacaaaaacctgatggtctgcagcggggggatcttcggcatgggcgagagcttcgaggataggatcgatctggcgattcagctgcgagatctgggcgtcaagtcgattccaatcaatgttttaaacccgatcaagggaacgcctgtggagaataataagattctctccaacgatgaggtctgccgtctgattgccatattccgcttcatcaaccccgatgccttcattcgcatggctgggggccggaccctccttggagacaatggccggaaggccttccagagcggtgccaatgcagccatcctgggaaatatgctgaccacaagtggggtggaattggaagaagactttaaactcttggaggagctcggattcgagatcacttattccattgacgcttga

SEQ ID NO: 4303 - DNA, 714 bp, synthetic construct
  source 1..714: mol_type = other DNA
atggacgaaagaggtaagaaatacctgctaaaggaagatcgggaatttcaaactgatctcggaattatcaaaaaggaacagatggagcgtgccacaattggcgacaccataatcactcatctcgataaagagtttaaagtcatcaaacctaccgtcaacgatttcatcgacctgatggagcgccgctgttccatcctcattcagaaggatatcgggactgtgctggcccggacgggcctgggtgcgggagaccgggtcatcgatgcggggacaggcgccggtgcaatcgccttgaactttggcaatgtggtgggagacaaggggcaggtgtacacctatgagatccgggaagacttcgcagagattgcaaagcgaaacattgacaattttgggataaagaacatagaggtaaaaaatcaggacatcaaggaaggaatcgatgaagaggagattgacctggttttcctcgacctgccaaagcccttcgaaatcttcgaggatgttaaaaaggccctgcgcctgggcggctggctagctgtctacgccccctacattgaccaggctgaggtggcttatagaattgccaagaaacttgatttccgagacttgacgatccttgagaccttagagagggaaatggagataaggccacaaggaacaaggccgaagaccagaatggtggggcacagcggctatctggtgttctgcagctga

SEQ ID NO: 4304 - DNA, 2529 bp, synthetic construct
  source 1..2529: mol_type = other DNA
atggtgacttacatcgaacacccgctgattaggccaaacgctgcggaagcccgaatttatcagcaggtgttagcggcgaacgtgctgaaaaatgggaacactatgattgtggcgccaaccgctctcgggaaaaccatcatcgctatcctggtcgccgccgacagactgcagaaactcaaaggtagtaaggtactcatactggccccaagcaagccccttgccatccagcatgaggagaacttcaagcactttctaaacctgccttgcacatctatcactggtgccgtcaagacagatgagcgggaaaaacggtgggatgcctcctcaatcatctgtgcaactccacagacgatcgaatctgacctgttaaatgagcgctacaccctcgatgacgtgtccctgcttgtctttgacgaatgccaccatgccgtaggcagttactcctatgtctaccttgctcaccgctacgtcaaggagtcgaataaccacctcattctgggcctcaccgctagtcccgggcatgacaagagcaaaatcaaagaagtgtgcgaaaatctattcatacaggacatcaccatcaagactgaggacgatcccgatgtcaagccctacttcaatcctatccaaatcgactgggtgagggtgcagctgggagaggagctggaaaagatacgcgatcttgtcaacaaggccttgaaggttcggctgaaaggcctgaaatcgcttggggtgatcaatacggtctctgtgacgaaacgggatgtgctcaaggcccggtcacgggtgcaacgaaagatcggtcagtctgtgaaccctccgaaggagtgcttccaggcaatttcaatcctctccgccgtaatcaacctgcagcactcccttgagctgctggaaacccagggggtagtgcccttcaacgactatataaagcgccttaggaagaagaccacaaaggcagcgaaaaacatcttactggacccgaacttttcaaaggccatctattttgctaaggaggctgaggagaagggactggagcatcctaagatgaataagctagtggagctcctcaaactggaactgggggtggacgaggctcagaccagactcacttccttaagaaacgacagtgactcttccatggatgagaaagtgaaggaggacagccccaagattattgttttcacccagtttagagacaccctggacatgattcatgaacggtgtgagagggaaggcatcaaaagtgttaggttctttggacagggaacaagcgacggcaaaaagggcctgacccaaaaggagcagaaaaagattatcaagtcattcaagacaggcaactacgatgttctaatctcgacaagcgtggcagaggaagggatcgacatacctgccgttgacctcgtcatcatgtacgagccggttccatctgaagtccgaatgattcaacggagggggcgtacgggccgcaaatcctctggcaggatgaaagtgttgatcactgaaaagacacgagatgagggctactattggaccagcatgcgccgtgaggacaagatgaagactcagctggccactcaagaggccatcgaggagctgaagctcaatgccgtggagaagatagaggtggagaagagtgcgaaagatctgggcaaacgcgagaaagtcattatcgaagaccccagagatgatgacagcagcgacaacttcgaggaggaagctaagaacgaggacattgaggagataagcttggaaaacgacaatgaagagaagcagaaggaattgatggaaaaggaggccaaaaaaaaacaatctttggaagattccattattgaggagctggcaaagtcaagtacgagcgatgaactggtggtgtacgttgactcgcgcgaaggaaatagtagggtgatacgggccctggacaccatcggagtcaaagtgaaagtcaatacaatggcagtggccgactaccaggtaagcgatgatgtggccatcgaacgtaaaacggcaagcgactttgtagattccattgtggataagaggctcttcaagcaggctaaggccatgatggaagagtttaaaaagcctattcttatcctggagggagatgacttctataccggcttcatcaatccaaatgcaatacgagggtccatggcttccattgcaatcgattacggaatcagcatcattcccacaagaacccctgaggacaccgctgcaatgattaagagaattgcaatccgcgaacagcagggtgagaaaaagagcatacagatcagaacagagcggaagcctcagaatctgtgggagcagcagctattcatcattgaatccttgccaaacattggacccgtccacgccaaaaacctcctggagcacttcggttcagtgaaggcggttctccaagccgacgaaaagcaactgcaggaagtcgatggcatagggaagaaaacagctaaaagcattaaagaagtggttgatggcaagtatttgtattttaaaaagcccgagaagaacgagaaattgatttga

SEQ ID NO: 4305 - DNA, 15201 bp, synthetic construct
  source 1..15201: mol_type = other DNA
atgaagtttgagaagatcagtatgttgatatccattgtcctcatctcgctcattgccctcggcgccgtgagtgcagctgacgacgtcgctgcagatgatgcggtggccccagcaacggtcgatgaggttcagacaatcgataatacaataacaaatgacgatatctcatatgagtcgacggacataattgtgaatgacactggcgactccgctgattcgaaggcaaaaaccacctcccttagtgcaaatgcagtgaacgaaggggagactttgtcttttacacagctcgctgctgatgtctcgtccagcccctccatgttgagcggggcgtattataagtatgatccctcaaccgacaccgcgtttgagaatgggatcaccctcaccaatggcctgacaatcattggtggcggggcgaccattgacggggataatcaggcccgcatattcaatatccccgagggcgtgagcgtgaccattatgggtgtaaccctcataaacggggctgccgacgagggtgccgcgatttataactccggcaagctgactctcatgaatgccaaggttaatgacaacacagccgtcaagtctggtgggggtatttataacaacggcggggaagtgctggtgacctccagtgagtttgatgggaacgatttaaccgacaggacagttaatggctatggtggagccgccatttactccaatggcgggtcggtgaccataacagatacaaatgtgaccaacaacctgaagaacatagtgcaccggggaggaactgggacgtacacaggggacctctccagtgccgccgttacaagtaataacgccgacctcacggtcaccaactctcggtttattgccaacagtgggtcctacggtggggcaatttactctggtgagagcacctctgcaaatctcctagtgagcggatctacctttgaggacaactttgccttcaatgggggcgcgattgatatagtgggaacttcctataccatatctgactccacattcaagaacaataacgttaagggcacggggagcaccaattctaactacgccagcgggggggccatctgcgtgcaggatgcaaataacccaggcttaatcagcggatgcgactttgaagcgaactccggagtggttggcggggcggtcaactgcgagaacaccatggttctggactgcacgtttacggacaacactgccaattcagcaaactcggagacctttaatggaaaaactaataatcgaggaggatttgccggggccatttacaatgaaggaacaatcacaatctctgattgtgagtttgatgacaatgccggaaggggcgaagggatacgggtgaaaaatgcggaaatttcggattcttccttcacaaataccaggattgacacatgccaaaattccaatgtgcttctcactaacaacacctacaataatccagatagggacgtgcaggcagcaagcggcactcaggtgacggtggacgtggccgacggtgacatccccaatgctaacacagctccttatatcgtgggagatctgactttcactgatctgcaggccctcatcgacagtggctcaagtggtatcagattgaccggaaatgttattaaaactgctgaagaggaaaccacctttgccgacggtctgaatgtggataagaccgtcaccatttacggtgccgaggggaaggttatccaggcgaatagtgggaagatcttcaatgttgcggaaggcaagaccttgacactccggaatgcgacgctgcaaggttctggtgagaccgccatcaccaattatggaacagtttatctgtatttggcggacaataatcaattcactgactgcggcgatgtgctcattgataatcacggcagaaccaccgagaccggtctgaccaccttcacgcagctaaataatctgattggcctggtaaatggcggaacagtttatatcggggagtcgaaaatcactaaggctgaagatgagaaagaagcctataaaaatggaattgttatcgataaggacctgagcatattgggttcatacaacacttattataagtatgtgaagacctccatcaatgctaacaatgacggcagaatctttacggtggccgaggggaaatctctgagcctaaagtacatcaacgtaaccaatggtgccgctgatgagggggcaggggtttacgtctcggaagacgccaccttaatcgccgatactgcaaactttattaaaaacaccgccgttactaaaggtggagcaatctactctgagggcaccgtggacttaacgaatgttaacatcaagaacaataccatcagtaaaacagatggagtgatggcggatgacaacgggggggcagccctctacaataatggcggaactgcaacactcgataaggtcaatgtgacagacaaccagaaaacatatgttatcggagatatcatggatggggtcgtggtatctaagggggctactaccattaccaattcctacttcgccaacaactctggccgttgggggggagccatcactcagactggcaccgatcagactctgacagtggaggacacaatatttgaagagaacacagccatctttggggctgccatcttcgacaattccccccttgttgtaaaggactgcaagttctacaacaacagtgctatcggtcctggaagtccagggacgtccaacagtcagggtgcggccatcctcgtgatggatgacaccgcctctgccgatatcagtggctcggagttcatcaataacaccgccgattgcgggggtgcagtgagcttagccggggtgggctctgatagttccatcgacgattgtacctttattgacaacacagcgtatgctgatggtggggcagtgtacttctggacggagagtgctagcgtgaccgtgaccgactccgagtttatcagtaacaccgctccatatgggggggccattgagaatgaagggctgggcgacctcatcgtggatgggtgtgagtttaccgaaaacactgcctcccttagaggaggagccataatctcatccggagacacatccgtgtccaactcaaagttcacggataatgaggcttccggaaacaccaatgcaatatacctttataattcggggtcatcactgtccttgtccaacaacgtgatcacggggagtgatgatgcccagatctatgtgaaagaggggattgatgtggtaaccccattgaaggttaaaatactgaacaatgagacggttaacatcaacatggttccatatgatatcacggccactgttacagatgataaaggcaacaatatcgtggacctggcattccgctttacagtaggtgatgatgtcgtcgatggaatcagtattgacgccgcaacaggggtgtacacagccacatttacgcctacacaggccggagaatttgttgtgtcaaccaaccttgcaaatgcggatgaagtgcaaacaggaacgctgaacgtctttagaaccctgactgacctgaaagcaatcatagatgccaacactaatggcaccattgacttggatgggaattacgcttacaatgccgagtttgacagtgcacttacagacgggattgttatcaacaaggatatcgtgatcaatggcaacggattcacaatctgtggtgagaacagcacaagactcttccatgtaaccagtggtttcctgaccttgaagaatgcaaccgtgtgccatggtgctgctgaaaagggggccggggtctatgtcgaccatggaagtaaattgtctaccgattatgtgactttcactgaaaacactgcggttaaacgcggtggagcaatctactctgaggggatggtgtacataggcaactctgtgctggacagcaacaacatcactttcagaagcgcaaacgatgacaacggtggagcagctgtctacaacctcaacggccagctgacaatcgagaaaagcaacatcaccaataaccttaaagacattgtgatccggaacggcaacgccggcgacctgttggtgggggtagtggtaactaccggcgacaccttgattaaagactcatactttgccaacaacacaggatcgtggggtggcgccatcagctcactgggatacatgaacaccgacgattacacattaaccgtaaaaggcactacctttgaaggaaacaacgccaccttcgggggagccatctttgtggagagttccaaccttgtggtcgatgactgtatctttaacgaaaacactggggtgggtaagggaagcgacggaacctccaacacccagggcggagcaattgtggtgcaccctactggatcaaaggctaccatcaccaattccaagttcaacaagaacagcgctaacactggtggtgccgtgagcctcgccggtgtaggccaggatagccttattgaaggatgtacattcactgacaacacggccaatgatgggggagcggtgtacctctggactggtggcaatgctattgtcactgtgaaagacagctcattcagcgacaacacagccaatttcggaagcgccatttctagtgacggtactctgagcctatcccacaatgaaatcgccaacgattacaccattactcccataggtagctatgatggaacaattgtgtcagcgatttatgtgaccacattgaatggcgagactatcatcacaggcaatccaactcagaatctgacggctacaatcactgatgataatggaaaccccatcgtagagaagggccttgtcctcgaggtctacggcgaagaggtggaaacaagctatgataaaaccaccggcatccattctgcaattcacaccttcactaaacccaacagttacaggataactgcaaagggtttcgaccaggatcacaccactccagggtatattgtgtacactggaggaactttcaatgaattgcaggacttgatcaatgcagccgaagaaggagccaccattaccctggaccacagcattgtatacgatgaggagtttgacggcgtgcccttcctggatgggattacagtgaataagaccgttacaatcgtgggggctgagggtgtggaaatctgcgctaacaatctggcacgagtgttcaaggtaacggacggagcaaccctgaccctgaaagacgctaccgtgtgtcatgggactgcccagaaaggggcgggtgtctatgtggatgctggcgccagcctgattgccgacaatgtaacattcacgaagaacacggccgtgaaacgtggtggagcaatctactcggaggggatggtttacataggcaactctgtcctggacagcaacaacatcacgttccgctctgccaacgatgacaacggtggagcagctgtgtacaacctgaacggccaactgacaatcgagaagtctaacattaccaataacctgaaggacattgtgatccgtaacggcaatgcgggtgacctgttggtgggggtcgttgtgaccagcggcgaaacgctgattacagactcatactttgcaaacaacacaggatcgtgggggggagcaatcagttcactgggatacatgaacaatgaggactacaccctcaccgtcatcggcaccacctttgaaggaaacaacgccaccttcggtggagcaatctttgtggaaagttccaaccttgtcgtggatgactgtacctttaacgaaaacgctggcgtggggaaaggcagccctggaagcgcaagtacccaggggggagccatcgtcgtgttccctagtggcaccaaagccactatcaccgattcccgcttcaacaaaaacagcgctaatacgggtggcgccgtgagcctcgccggggtggaccaggacagcctgatcgagggctgtacctttaccgagaacacgggtaatgacggcggcgctgtctacctctggactcagggagatgccaccgtcactgtgaaggactcgaccttcacgggcaacactgccggctggggtaatgctatctccactgacggggcactgaaactggagggcaacacaatcagttcaacctccgcagatgttgggaactgggcggggacaatcgactccaaagtgtatgctcaaatcctcgccaatgacacatacaactggcatatgggaggcttcgtaattaacgccaccctgactgatgacatggggaacctgattaacgaccacaacttcaactatgtcattaccaaagaaggcgccaccgattcgatttccgtgcccgccactttctacactagtctgggttactaccagggcacgttcactcccgccgacattggaacttacttgatcagcctggattatgctgttgaggaagtgaacactagcgttgtggtggtgtcccggtctcttattgacctggccaacatcattgccgctgatgaggacggcatcattgacttggacgatagctatacgtacattgaggagtttgacagcagcatcgtggacgggatcgtaattgggaaagacgtaactataaatggcaacggacacactatctgcggggatgataaggcaagactgttccatgtcacagacaaagctctgaccctgaataatgtaacgctttgccacgggaatgctctaaacggtggtgctgtatatgtggaatcagctgcgactcttaacgctaataatgcagagtttaatgagaacaccgcgacttaccggggtggagctatctggtctaccgggacggttaatgtgaaagactccagcttcgacaataacaatatcacttaccgcgcccgcaatgtggataatggtggcgctgctatctttaacaatggcaccctgaatgtcgaccattccaactttacaaacgaccttgtcggctatgtggtacggactggagacacaaacagccctcagcttatcgacggtatcattctgagctctggcgtggctgtaatcaataattcccactttgaaaacaacagcggtacgtatggtggtgccatcaccgctgtgcctatagccagtctggggtctacagctacctccctgactgttgagaattgtgagtttatcaataacctggcatactgtggcgcgggaatctcaattaatgccgacggcaacggcaagaccacgtattcgattaagaatagtactttcataggcaataatgctacaggtgtaggcagtactggctcgacaagcgccggtggagcaatatctatagcccgagactccgaggggaccattacagattccaagttctacaacaacaccgccaccactgggggagctattgatgtgagcgctacccgcagttcttccaaagtgacaatcgacaactgtgactttgagaacaacactgctacagccggcgatgggggcgccgtccgcattagcaaaaacaatttggaggtggctgtcaagaactccaacttcacaaacaacgacgcaactggggatggggccgccatttacaacaatggcgtgctgacactggagggcaacaaagtcacgtccggggaaaccgagatctatgtcgggcccaatgggtcagtggtgaactcaattgtcaaagccatcttcctgggagatgcagaggacaatacaatcctggcgttcctgggcgatgaggtacatccatatgctaccttgacagacgataatggcaatgccatatatgacgtcgacttcaacatcacagtggacggcgttgagtatgaaacatcctatgatgactcaacgcaacagtatacggccacatacaccatcttacacgcgggagacaacattgtgagcactaactatgacgcccagaagaccgatggcaagtatgatgttcccaaagccaacgccaccattgtcgtgactactgaaagcattagtgtgggcgacaaggctactgtgaacatcaacctcacaggcacagacggggtcggcttgaacggaacggttaaaatcaccatcaataaggccttcacggatacggtagttacggagaatgggattaatgttaccgaagttgagggcctggaaatcggcgaatacttcgtgtacgtctacttcgaaggcaactctgattataaccccgaatacaactacaccctattcagggtgaccggtaatgtgtcctacttcaatgtgaccattgaagatgtgacctatgacgatgccgccacgattaaggtgaccgtgcaagatggtcccatagacgaccctgacaacggcgtcacgggcattgtgctggtgacaatccaaggaaaggatgtcaactttgagaatacctatagcgtgtctgtgatcgcgggcgaaggatcatacactgtggaaggcctagcacccgggaattactcatatgctgctaagttattagccgatgagctgtacaatgaagcgtatcttgagccacagaacttcacagtgttcgagaacccctactctgaactggaagttactgatgacggccctatcgcctctggggagactgttaacattacagcgaccctcactgacttccagggcaaccctatagagggagctaccctcgaagtctatgatacaggcgtatggattgccaatattactaccaatgcagaaggtatcgccgagacctctatcgataatcttggatatggtctgcacgacatcaccgtaatcttcaatgacacggtccacgacgtccagactgagaccgtgaccgtctctgttacaccgaagaaggggacattcacagacttgcagtacctgatcgacactgcggatggacgacttgtcttgccatacgacttcgcatttgacgcagcttatgacgaacagttcttcttaacaggcgtgctggtggacgacaacattattatctctggcgctggacatatcattgacggcatgaaaaaggcaaggatcttgtacatcaatgctcccaacgtcaagatattcaatgtgagctttgtcaatggtaagtctgatgtgggggccgccatctacaccgaggccgattacctcctggtggacagctgctacttcgccaacaacgaccctgaggctggtgctgcaatctatgccgaaagcggggtgactgacgtcgaagaaacgatcttcttcaataacaccgctgtcaacggcggtgccatctatgtggagtccggggccacactgaacgtggctgattcagaatttaatcaaaacacagccacctaccggggtggcgccatctggagcaatgggaccgtgaatgtcaaggactcctcctttgataaaaatgatatcacttaccgagtgaagaacgatgataatgggggagctgccatctttaacaatggcaccttgaacgtggtcaattccagatttacaaataacctcctgaactacgtcatcaggacgggagatgataatcaccccgaactggtggacggtgtgattctcagctcgggaaaagccaaaatcagcaattcccactttgagaacaacagcgggacttacgggtctgccataactgccttacccataggcactgagctcagtgacctgaccgtagaaaattgcgaatttataaccaacctcgcctactgcggcgccgccatctatgtcggcagtgggactacactgttttacattaatgactgcgtgttcatcggcaataatgcgacaggcgtcggcagtaacggctatgtggctacggggggtgccattaagatagctaagaaagcgacgggcataattgcagacagccagttctataacaactctgctgcgaacggtggagcgatagatataagtgctaccagtggtaacactgcctcagtgctgattgatagctgcgtctttggatataatgtggccgaccagggtggagccatctacattgacaatcggaccacagtcaacctttatgacagcacactctactacaatgagggggaagccctcaattaccacatcttcctgaatggagacgcaactctgggctttgaagggaacaacttctacacaacaatacctaccatcgtggccgaggacacctacgcttacggggaaaccatcaccatcaatggtacattcgattggggagttaacaacaaacccatcaacatgatctacaccattaacggggcccccggcacggcagaggtggttgatggcaactacacaatactcattgacaatcagccagatgtcggggattacactatcgtcattactgcctttacggatgagaacggaaatgtgtaccatgtcgaaaccgcgcagaaaacaattagtgttacgaaagcaacccctatcctctcggtggagggggatgagtaccttatgcctcccagcgatgatgctaccgtgaccatttctcttaccgataaagacggaaacgggatcaagggcacagttattgtcacagttgccggcgagacctacctcgtggagactgacgaggatggcgacggcgagctcacgattaatgacctgcccgcgaccacttgggccattgacgcgaagttcataggcaacgataactataatgaggttgtgaacgacactgaagagattacctttatagctgatgtggcatacttcgacataattatcgaggacggggtgtacggcgacaagcttaccgtcatcgtggaaaacgccactgacattgacggcaatagcttaaccggaatggtcacaggcatgatttctacaggcgatgacgacatctcattcatagtgtatgtgaataacgggcagggcaccaacactaccaccaccgctggcggagttgggaaattcacgggagatgcctacttctatgatagcatgatggagtttatgtccggcccggaggaatgcagtgcatatgtgagcccagccaatgcgacactctatctagtgccctgggatgcagatgacctatcatcagacattgcctatggcgataccatcgagtttggcgccgccgtcttcggggtgaatctagaggaactgaacggtactgtgtattacatcataaccgagctcaataaaaagggggagattgcgattgtgaacggctctggggctgtgaacctcactgacattttagatgtgggaacctacacggtcataagctacttcgtcgatgacaaaggcaactacgacccagagtcatccgtgaactacacgaacttcaaagtggccaaggccacccctaccctgaatgttgagaacgctcaacaggtatatgctgataccaatacaataacattcaatgttacaggcattgacgacaaaggggtcaaaggtaccgtaattgctattaagcctatttcagaggacgtgtctggtgcaatctacgaccccgagaccggtctcggagagctgacattcaatgggctggtggtgggcgacaacccaattgtggtcaagttcctgagcgacgacgataactatgccaatgccgagaagaccatcaacataactatcactcaagccacactggcaatcgactctacaataaccacgcaggaaattgtatatggcaaagatgtggaagccgatgtcaccgttaccggcatcgtccaagaagacactgtgattgcaaatgtcagtctgtacgacaacgctacaggagagctgcttgactcctttaacatcgcccttggcttggaagacagcatctcattcgaggaccttgaggtgggcgactactactacacaatcgagtttacaagcgagctgtacgcgggagacaacttcacatctgaggtgttcacagtgaacacagccgaaatccttgacctggacagctccaatgtggacaatgtgtcctacggcgagggaatcgacataaccgtgtatgtagacggaatgatcgagggcgacctcattgaagttaacttcactgtcgttgacgcaacaaccggggacgatgtattcaatggaacgtacaacatcagcaacggggatgtgatcacagtgcccccactggatgttgggaagtacagctatagtgtctcattctatggagatgataagtataacacgggcggtgcagattccattgcggccgtcggaagctttgaggtattggatatgtcggatgttgacgtgctggtcactgcagatgaaagcatcacgtacggggagaaggtcactgttgaaatcgaccctatcgtgtcggaggggggactacccgtgacaggtactgccaccatctatgtttatgatgaccccgcatctgtagatcctgtatatgtgctggccgacgtggagctggataaagacggcgctacggcagtccttgataccatattgcctacgggcgagtactggattgttgtggactttgagagtgacgatggctactatgatggcagaggcgtcacgtcaaccatcgttgacctggctctagctaaactgtccatagaccccatcacagtgacctatggcgaaaccatccctatcaccgtgacagctctgggcaacggcggggaactattaaacggaaccgttgagtttaagatctacgggccaggatttgagggaacagtcaccgtcaagaacggcactggagtaaccaatattacagaaaggtttgatgtgggaacctacaccatcatagccgcctttggagatgatggggctaattacgaaggattcaacattacttccttagaaatcactccggccacccccatagtccgggtcactggcagtgaagttgaatatggcgaaccgagcactgtgacagtcagtgtcagtgacattgatggcatgccattatccgggaaggtcatcgtgactgttgactgggtcgttgacgggctgacccaggtcattgacctggacgattccaatgaagcttcattcgatctcagcccatatgtccatcagggaacatacgatgtaaccgtgacctacatcgcaaacggcaactacggcgaggccgtcaacgacactgagacagtgaatgtgactgcctccacgaccgccacagttaacgtggaggttccagaggacgtgtcatacggcgatgagctaacgatcaaggtcactgctgaggacggcgctggcgaacagatcccgctagaagccgtcaatgtaacggtgaacggggaaaccaaggagtacccggtggacgaaaacggcacagttaacctgggcgtcttgccggccggcgataatgagatcaccgtagcgctcgacgacggcacgcacaagcccacaaaaaccgaggctacagccaaggtggccccggctgaagcggtggtctttgttgacactgacaacgataacccaagctatggagatgtcgtggtggtcacggtcaatgctaccaacaaggacaaacccatagatgccgatgcctgtcttgtggtggacggctacctgatcggctactacgatcttgaggacggccaggtggagatctctattaaggacctggcccccggcaaacatgaaatcgaggtttcagtcgcaaacggaaactactcagaagggagctacggacgcgcaattgtcaatgtcgataaggcaacccctgtaatttcagcagagggcgagacagtcgagtggggggaagtggcaaccgttaaagtgaatgcaaccggggcaaacggcgagaaactgaacattccgctggtagtccgcgtcatctgggaggtatccggcgtcgacgagctgatcgagatcgagaacggcaccggagaggccgctttccagatctccaactatgttgctcctggaacttacaacgtcacggtcatcttcctgggaaatgatgagtattacccagtgaacaacactgaggccaagattatcctgaccgagccaaagacggttgagatggaggtgtccatcacccctgacgagtacggcaaagcgacaaatgtgacggtcaccctgaaggacgtggcaagcaaacccctcgagggctcaactgtcaccgtgacggtggacggcaaagaatacgctaacgcgacaatcggcgaagacggaaccgtaaccgtccctgtagagggcctggaagctggcaaccacaccatcgctgtcgacttcgacgacggggagcactccccggtgcatgaggaggaaaacatagccattgagccatcaactgacgcgaccgtggaagctaccgtaaacgtgggcgagaacgaaaccaccgtggatgtgattgtgaaggattccacaggggagggcataaatggaacggttattgtctatgtggacggcgaacctgtcgctaacacgacagtgggcaacgacacttccagcgtctccattggccaactggctccgggcgaccacacagtggacgttgagtttgtcaaccctaactatgctcccacaagctactccacccacgtgacagaatctacgtcactcactaacatgacagtgaaggtggacaagaagaatatcctctatggggagtcagacataacggccaccattgagtttaccagcgagggcaaagctcttgacggggtagtggaggtgttgctcaacggtgaggcacagaacgtgactgtgaccggcggaaaagcaacggtgaagttcagcgacctcgccgccgatcactacactgtggtgagtaacttcgccggaaacgctacatacgctccgtccagcgactccgcaaacttcgtggtggaacgaaaggcaaccaagttcaactacaacgacatgaataccacagccgtcaacccaaacgttgacggaaggatcggcgaatacttttacttccagctggtggaccaggacggaaaggccctggcgaacaagagcgtgtccatcggattcaacggaaaggtttacaaccggacaaccaacgaaaccggctgggcgaagctccagatcaacctgaggatcgtattcggatacacctttgccatctcattcctgggcgacgacaactacacaggcgcattcaatgtcgccctgatcaacgtcagcgcccaaaccccgaagctatccacaagcagcaaggtttacaaggcctcggctaagaccaagacgctcacggccaagctcctcacaagctctggaaacgtggacaagggtaaaaagctaacatttaccgtgaacgggaagtcctactcggcaacgaccaacgataaaggggtggcctctgtgaaggtgagcatctcccagaagggaacttacagttttaccgtcaagaacgccaaggacaatacatatgccagcgtctctaagaccgcgaagctggtgattaagtga

SEQ ID NO: 4306 - DNA, 1794 bp, synthetic construct
  source 1..1794: mol_type = other DNA
gtgttcaaattgcagagtctggagctctctggtatgtctgacgaagaactgaaaggtcttaacctggagggcaagacctttggcgtcattggagtctgtggcgtggttggtaaccttgtggctcggatcatcatggataacgggtacgaggtcatcggtacagacatctcatctaaggaagattgccggttctactcatcctttgacgactacgatattgaaatattcttcggcggccaccccgacgaatttttcaagcaaattgacttcatcgtgccccctccaagcatgagtgatgacgcgaaagttctggagcttgcaagagagaaggggattgatattcttcacctaggggacattttcaaactgttcaaggcaaacaaacccattctgtgcattagcggcactaatggcaagaccaccacaacgacgctcttaaagcatattgcctactccaacggaataagccccgccgagcacaacctgaaggggatgcaggggaacaacgagttcatcccatcacttcagacaaggctccatggggacgtggctattctggaaactggaacagacggcacgccgggcggattgaagtctgtcatcgacttgacccacccaaattatggaatcttgacgaacatcaccatcgaccacctggttgaccctgatgaccataaggacggcgtggacgaaagtctaagcgccatttcactcgatattggtgacgatgaggtatcccacatcgaccgcggatttctggaatatgcgcgtgtgaagggtgagttgatcgaggggatcgaagagaacgacggcctactgatttacaatagcgacgatcctaccattgtcgggcttttggataaactgaactacagcggcaaatcgattagcttcggggtggaaatcgatgagtttgacaatttcgagctggaaatcgacgagtttgattttgactcctccttcgattctgtttcccctatcaaaatccacacaaagccatgctggtgcggcagagatatcaagatatacgaaaccatcagcggcagcggattctatgaatgccagtgtgggataaagtatgaaaagcccgtatacatcgcaaaggacatcgatttaatgaatcgcagcttcaatctggcatctcgagacgatgagttcgaatttaagctgaccctggacggactccacaacgtgtacaatgccgtgggcgccataatcgctgccaaagagtttttaggcctatccaatcaggacatccaaaaaggcctgtccaccttcaaaggtgtggctggccggatggagatcatcgataaaatagaagacactaccatcatggtggattatgcccataatccggcaggggtcgagaccatactcgatgccatatccaagatctatgacaagacttgtgtagtgattacagtcagttcggagtcaggggttgagggggacttcgatatactggattcagctatcggaaaagtggactatattgtccccgcgtcgcacgactgcaggtacgctgccgataagctgattgagctcacaaaggagaacaggcaggaagagctgcatctgaatagtgtgtacactctcgacgagctgtgcaaaacttttgtactcacagatgaggatctgaagcaggagtccattaaaaccctcggagcaagcgaagaccaggtgataggaggtctcaaggaggccctgaaccttgacacggatatcatcctcatcatcggagaggctgcctttaagtttgagagcgccattaaagacttctgtgatagtctgtga

SEQ ID NO: 4307 - DNA, 1497 bp, synthetic construct
  source 1..1497: mol_type = other DNA
atgaatgttattgtggtcggggcaggaaatgccggtcgacctgtggcacggctgctcaattatgccggccacacggttaaaatcactgatcccaaaaacattgaggactttcacatggatgtgcagaagacactcaggctgatggaaagcgaaggggtagaattggacctgggagtgttcaagcccagtctggatgggatcgacacagtctatctctctccaacagtgcccgaaaactctccagcctataagatcatcaaggaagctgatctggacgtgttcaccaatgatgactttggcagattggccgacagcttcatcgacatcgacatcatcggaatcaccggcagcgtgggcaagaccagtaccacccatatggtgacggaaatattccggactgcagggtaccaggtgtggatctgcagctcgatgactcaaaacttagtgagcgaagtcattgtggacggcatcatcaagggaatccctgagaagtctgacatcgcggttctggagctgccgcacggaacagccggcctgatggcagagctcaagctgaaggtcggggcactcctcaacatatacgaggagcacctgtccgagttcgggggctccatggagcgctacacccaacgcaagatgttcattgccaaaaacagcgaaaacttcattacaagcattcactgcaaggacaccgtgaaagaagcccgccccgatgccatcttttacgcaatggtgaaagacctcccggcgtacgacccctccaagaaatccctcttctttgacaagatagccaactttgaggagatcgccatcggagagggccaagtatgcaacttcattggggacagtgccaaaggcgcgattgaaattggctataagtttagaaacaagtcaaatgagctaagaaaaggttcgttccagtccgagttccatatgatgagctactattatgagaacgcggtggctgctacggccatcgcaatggcctacggactgagcgtagagataatcaaggaagggcttgccaacttcaaaggtctgtccgtccatatggagtatattggcgactacaatggtagggaggtgtatattgatgcctcatacctaattgaaggtattacggtcgctttagactttctgggcgatcgaagtcttgttctgcttctggataactttgatacttccacttaccgggataagaaagaaaccgggaagctgatgggcaaatacgctaatgtcatggtggccacaggctttaatgaggtctatcagagggtagatcttgagcctgctcaggagctattggacgcagctgtcgactcagatgctgttaaagtgatagcgggaaccatgcaggagggggccgagctcgctatcaaatactcaaagccaggagataccatccttcacctgggtcctcagttgatgcaggacccagaaggaatcatggagaagatagtgacaggcctggaggaagggtgtaagaagtacaaatga

SEQ ID NO: 4308 - DNA, 972 bp, synthetic construct
  source 1..972: mol_type = other DNA
atgaaacgacccaagaaaatgtacaatccagaggacatgtttatcaaaagaagcaatacatacctgggccgggtaatgcacagtttcctgaagctcccaggccgatatgtcaacagcaggaccaaccagtaccctgacttcttcggaaaggagcgcaagaccgacgccacgatcttagtggacttggaactggaaatggaggaatctgaagtactcgagagctcctacgaagtgtttgtgtccgagaaggagactgaagagatcccgcaactggcggagtgcctccacaacgagaaaggcaagatgattatcgacattgaggatgagagttcaaaagtggataagcagactctggcaaaagatttcgagtataactatatcattcattatgagtcaggattacccgtttactctgtcataacaacccctattccactcaaacgctgcaagacatgttacatcagtggcaacaccgtcttcaagcccattataaagtcctatgatgaaatggatggtgaagctaagctgaaggagtttcaagaaaagtacgagaggggagaatatttctcggacttggaggggtacgaactcatcagcatccccagaatgtacggtgagaaaggcaatgaggtcattgaggaggtttgcatcctctttaataaaataaaaatgaaaaacgggcgcgtgaagatccagctggccaggtgtctggactgccttataaacaagtatggcgggacccttgaggaaatcaatcgcctggagggactgatcaacatgacgaagctgatcaatcttgaaaaggaatacgaggaccggctgcggcaggaaggcgaggagaaagggagacagaaggggaggcaggagggacggctagaaggcaagttggagctcgcccgtcagttcgtggaagagctaggtgtggataaagtgtccaagattagcaaaattgaaaagaacctgctgctttga

SEQ ID NO: 4309 - DNA, 354 bp, synthetic construct
  source 1..354: mol_type = other DNA
atgtatggccagaagggaaacgaagtcattgaggaagtttgcatcctattcaataagatcaagatgaagaatggacgagtgaaaatccagcttgcacggtgtttagactgcctgataaacaagtacggcgggacccttgaggagattaatcgcctggaggggctgataaacatgacaaaattgatcaacctcgaaaaggagtacgaagacagactccgccaagagggcgaagagaagggacggcaggaagggaaactggagctcgccaggaaactggtgaaggagtacggtgtagatgaggtcgtgaggattagcggcctgagcaaggaaaaaatcctgaacgagaaaaactga

SEQ ID NO: 4310 - DNA, 1236 bp, synthetic construct
  source 1..1236: mol_type = other DNA
atgtttctcactaatgaggaggaaaagatggccaacggagaatacggggagaccattcgcaaaagcatggacatactcatcgccctcggagacatttatggtgccgagaagttcgttgacatcaagtcggcgcaggtctcgggggtgtcctataagaccataggtcaagccggcctagaatacctggaagacttggcaagcacgagcgagatcatatataatgaaaacggcacaatcagcgataaaagcgggatcgcaacaatctccgccaccctgaaccccgctggtaccgaccttgacaactgggaggactttgggttcccagctgactttgcccgaaagcaggtagatatctgcaacgcctacggagccctcggaataagcacaacctgtacctgcactccatacctcatcggaaatgtgccaaggttcggcgatcacgtgtcctggtctgaatcatctgctgtggcttacgtcaatagtgtgatcggggcccgcaccaaccgggaaggagggccgggggcgctcgctgcagctattgtgggaaagacgcctctgtatggcttccacctggaggagaacagaaaggccaaccttctggtcgaagtggagagcgagctggagagagccgacttcggcgcgttaggctatgccgttggtcagatagttaaagatggaatcccttacttcaaaatgcagaacaaaccctacgaggtctccaatggcaatctaaaggcactgggcgccgcactggcgtcaagtggtgccgtggcactttaccacgtggaagacgtcacacccgaatttgcaaacgcagctatcgatgatgtggagaacaagattacaatcaccaaggacgatattgtgagtactcgggagaaattatccactgccgatggctacgcagacttggtgtgcctgggctgtccgcatgcttccctggaagaggtcaaggaggttgctgagattgttaagggtaaaaaaattaagaatgagctgtgggtctgcacgagtatcaacattaaagaggctgcgaaacgtctgggctacctggagacaattgaaaaggccggggggaagatctgctgcgatacctgtatggtagtggctcccatcgagcagatgggctatgaagtgatcggcgtgaactctgccaaggccgccaattacgtcccttcaatgtgtggactcagggtaatttataatgatatcgaggacctgttggacttcgaatga

SEQ ID NO: 4311 - DNA, 960 bp, synthetic construct
  source 1..960: mol_type = other DNA
atggatattggaaaactcgttggaaatacaccaatgattaggatcgactacgagtacgagggtaaaaccggcagtatttacactaaacttgaattttacaactattctgggagcataaaggaccggatagccttatatatcatcgaaaaagagaaggaaagaggcaacctgaaggatggccaggcgattatcgaggtgaccagcggtaatactggcatagcattctccgccatcggtgcgctattcggccatgaggtgcacatattcatgcctgactgggtcagcctcgagcggcgaaagctcatccaaatgtacggagctgaagttcacctggtgtcaaaagaggacggagggttcaagaaggctctggagcttgtagatgacttcgcagacgaaatcggtgcctataagcccttgcagtttgacaatgaacttaatgtggaagcccagtatgaaactaccggccaggagatcattgatgatttgcccgacgtgaacgccttcgtctcaggaataggtaccggcggcacgctgatgggaatcggcaaacgcctaaaggactacaacccagagtctaaagtgtttgccctggagccaagtacactctccatcctgaaaatggggatggacgaaggcagtcacctgatcgagggcatcggggacgatttcattccggggatcgtggatgaggacgtaattgatgatattgtcctcatccatgactgcgatgcaatcaacatgtccaagataatcgcccagaagctggggctcgggatcggaatctccagcggggctaacttcctggcaagcgtcatcatggataatgacgacctgaagattgctacagtgtttcccgatgacaacaagaagtacatcaccacgaaattgtcggagcccatcgacgagaaccctgaactgatttctaacaagattaatattattgactttgaggtggtctga

SEQ ID NO: 4312 - DNA, 1299 bp, synthetic construct
  source 1..1299: mol_type = other DNA
atgctgaagaagcatatcgagaatgaagacattattcgcctgatttctcacaacgatgctgacggactgtcagccgccggtgtcatagcaaacgccatcaaggaggaaggcggacagtttcacatcacgattgtgccccggctcaagccggacgtgatcagagacgtctcgaaggaaaaatatgaattgtacgtgttctcagatatgggaagcgcttgcatcaagcagctcaatcggctgaaatctgacgtgatcgtagcagatcaccaccagccaagcgagcacgagccaaaggataatctcatccacgttaaccctcacttattcgggatcgacgggagtcgccacttgagcggagcaggcagctcctacttagtggttcgtaatatgaacaagaagcacttggcctatatggcgctgatcggggcttttggcgatatgcaatgcgccaaccggttcacaggcataaatcagctaatcctgaaggacggccaagaggctgggaacttggaactgcatgaggacctgaaaatcgtctccaaggcccaagagccgctatacaaaagtattgcttacaccctgaaccccgccctccccgggttaactggcaggctggataactcccaggagctccttgagaaaatgggggtgagctatggcatttccttcctcgatctggaggacgaggagaaggatgtggttaaggacgagctcgtaaaggtcaatccacagatatttggtgacgtctacagtgttcccagcgaacaccctgtactgagggacctggaagagtattcatccattctggacgcctgtgggaagaacaaggagtacggcctggccctgagcataattctgggcgaaagggagaaatcgctggacgaggcgcttaaacttcagaagagatacagggaggacctgaccaaaggtttcgaatggatctcccgggaaggcgctcagcagctgggcagtatccagtatctctacagcgaggacaaagtgcttaaaagcattatgggtacaatcgcaggagtgggaatgtcagccaagatcctaagcgatgaaaaacccgtcatcggcctctccagactccataatgatattaaagtcagtggacgagccacccgcttccttgtggcacgaggagtgaacctcggcaaggctttggccgatgcctctgtgaactttggcgggcaggggggaggtcatgacatcgcggcaggggcgatgataccttacgaggccaaggataatttccttcatttgctggatcagattgtggaagaccaactgcagtga

SEQ ID NO: 4313 - DNA, 399 bp, synthetic construct
  source 1..399: mol_type = other DNA
atggctcggccggactggattatgtattccaacgaggaaatcgaggagtttattgtgaagttcaaacgagaggggaagactgcaagtcaaattgggataatcctccgggaccagtacggcatcccaagcgtgaaggaagtgaccggggagaagatcacggaaatcctaagacggaacggacacgctgatgagtaccctgaggatctgatgaacctcatccgccgcgccgtaaatatcagggaccacctggaagagaacccaaaggacctgcatggcaggcgaggactgaccatcattgaaagccgtataaggagattgggtcgctactatgcggcaaatggccagctgcccgagggctggagatacgatcccacaaaagccgcccttctcgtcaaatga

SEQ ID NO: 4314 - DNA, 558 bp, synthetic construct
  source 1..558: mol_type = other DNA
atgatcacattcatcacagggaacgaacataaagtaatagaggcagagaatatcttccaaattttcggggtgaagctcgagcacattgatcttggctacatggagcctcagggaaccctggaggatgtgtccaaattcggtgcaaaatacgcctgccaggaactcaacaggcccgtgatcgtggaggacgccggtttattcatacgagccctgaacggcttcccaggaacttattccagctacgtgcaggacagcctgggaaacgaaaatattcttaaactgatggacggaattgacgaccggtacgcggaatttaggtcagttatcgggtattgtgcccccaattcggagcccaaggtcttcttggggcgcgtcaagggccagatcgctcacgaggaaagaggcaacctcggctttgcttttgacccaatctttctggtgccggaagagggcaagaccttcggggagctaaccacggaagagaagaatcagtttagtcaccggcgcaactctctggagaagtttatcaactggtatgtcagccaagatgatgaatga

SEQ ID NO: 4315 - DNA, 1698 bp, synthetic construct
  source 1..1698: mol_type = other DNA
gtgatttctttaggcattgagggaactgccgaaaagacggggattggcattgtcgacagtgacggaaacgtcttggcgatggccggcaagcaactgtacccagaggtgggagggatacacccacgtgaagcggctgaacatcacgcgaaatggattccacagctaatcccacaggccatggaggaggccggcctggactacaaggatattgacctgatctcattttcacaggggcccggacttgggccggcacttagaatcgtcgccagctccgctcggagtcttgccctcagcttaggaatccccattgtgggagtgaatcactgcatcggccacgtggagatcggcaaactggatacgggggcaaaaaaccccgtcacattatacgtcagcggtggcaacagtcaagtcattgcatatgaaagtggccgctacagaatcttcggagagaccctggacatcgccatcggaaactgtctggaccactttggccgtgagaccggcctgggccaccctggaggccccgtggtggaaaagcttgctaaagatgggtcctatatcgacctgccttatgtggtaaagggcatggacttctctttctctggcttgctgtcctctgccctgcgggcccatgagaacggcgagcggatagaggatatttgcttttcccttcaggagaccgcctttgcaatgctggtggaggtcacagagcgagcactggcccataccgaaaaggacgaggtgctactctgtggtggggtttcagctaacagccgcctccgcgacatgatgaagatcatggcagaagagcattatgcgaagttctacatgcctgagatgaaatattccggggacaatggtgttatgattgcttggctcgggcagctgatgtatgataacttcgggcccctcgacattaaggacaccgcaatcattcaacggttcaggacagacgaggtggatgctccctgggtagacaaccggaaggagaagctcaatctgccagaggaactgaaggccaagggggccgaatcggatatttttgaagccaaatggctgggaatggacgccattgtaaagcagagggtctcgaaatcatacaggatacgagaaatcgacgataagatccgcaggcagagaactaaaagcgaagctaaaatcctttcagatgtgaaaaagacaggtatcagaagcccgatcctgtacgatatcaacttggacgagaaatacatagtgatggagaagctaaatggtcctctggttaaggacgtgatgcacaaactggattacgacaaaaggaaggaactgtcttacgctatcggggagaacatcagactgttccatgatggagacatcatccacggagatctcactggttccaatatgatcttgctcagcgacgattccaacgactccaatgatgatttcagtaaatcggacgacgatttcaacaatggcgttaatctagataatctggactttgcaaacaatttggctatttttgacttcggcctcggtaagtacagcgacctcctggaggacaaggctgccgacctcttggtgctcaagaaaagtttccagagcatagattatgatatagccaacgaatgctttaactggatactggagagctatgggtccgataagatcatcgataacatcgcggacattgaaagccgcggccgatacacccactga

SEQ ID NO: 4316 - DNA, 1065 bp, synthetic construct
  source 1..1065: mol_type = other DNA
atgattgaaggactgaagacctacggctcagacaagatcgtggatgaactgaaagacttgaagaaccccatttttatctgtaccatagcgacgaccgagacaagcaaaatccccggactgacaggggcaggggccactcccgagctgaccaaatacacccctgcaggggatgccgagctaatcctcgagggggaggtcaaatgcatgaaggacatcccacagaccgtcatcggcgaggttgtcactccaacaccgtccatgattacaaagggttccctggccctctgcgactgtccggttatggtgctggacgccggcagcgaaatcaaggcccaaacggatgtcttcgacattagcgacgggaagcatggcatggacatacggaccggaaaggctgtcgaggactcagaggaactcttcgaaaaagggtactctctaggcgagattttatctgaaaagcacggctatatcgtggttggcgaaagtctgccagctgggacaaccacggcccttggcgtgctggtaggcctcggatatgatgcgaaaggcaaggtaagcggttgcatgaacaccaaccctcacgagatgaaaaacgagctggtggatgaagggcttaagaatgcggggattgtgccaagcaaggacaataacccctttgatgtcgtcaacgctgtgggtgatcccatgctgcctgccgttgccggactgatcatgggttcgagtgtgcccgtcgtgctggctggaggcactcagctcaccgcagcttgcgccatcgtgaaggcattggacgacgagtttgacttttcaaacacctgtcttgctacaacatccttcgtggtaaaggatgagactgcgaatattctggatataatcagccagatcgatgatatcactgtgaatgcagtgaatcctaacttcgagatctccaaagtggaaggattgaagaactacacgaaaggttatataaaagagggtgcaggagccggcggagccatgttcttagctctgctcctcggcaacgacattaatagcattagggaatccatcgaggacgcctgcagttga

SEQ ID NO: 4317 - DNA, 201 bp, synthetic construct
  source 1..201: mol_type = other DNA
atggccaacgacaatttccaggtgaacaagcagttcgcgaagttcaaaggaaaaaacgtgctcataggcctcaagaactgggaagaggtcgaaggaaagatcatcaccattgataactttctgaatctggtcctagacgacgggaatggcctgaaagtgatcaaggggggcaaagtagcatttattagcatccaagagtga

SEQ ID NO: 4318 - DNA, 147 bp, synthetic construct
  source 1..147: mol_type = other DNA
atggcaatcaatcagctggaggccacgctgcaggccgtgacccacacactggctaagctggagaaggaaggctgcagcgatgagaaactcctcaaagaactcagggaggagcgggacaagctattgcatgaactgaaccttaactga

SEQ ID NO: 4319 - DNA, 783 bp, synthetic construct
  source 1..783: mol_type = other DNA
atgatccatatgaagatcctgctctctaacgatgacggggtgaacgccagcggaatcctcgctgctaagcatgcagttgaagacctcggcgatgctattatcgtggcaccatcgaatcagcaaagcggcatcgggcacgcgctgaccctctttgaaccactacgggtcaataaggttatcttagccgacaatgacattggatacggagtgagcggcactccgacggacgcggtgacaatcgcccttttcgagctgcttgacgaatgtcccgatctcgccatctccgggataaacaccggtatgaacaccggtaaggccgagctaaccacgtccggcactttgggagctgccatcgaaaccgccacattcaacattcccacaattgcagtgagccagcacgtgtcagatgacgacctgaagttcgacgaaggggaaatagagatcgattttagttcaagcgtcaaggtcttgagggagctggtcaaaaagataatcaaagacggcttccccaaaggcatagacatcctgaacctgaatgtacctagccacccagattcctacgagcctgtgatttgccccttgggcgatcggatgtattggccggtggtagagaaaaggcacgatccaagaggccgcgagtattattggattaatggggatgagtacgtgggaaaccctaaagacagtgatatcgacattctgaatcagaacattcctacaatcactcccctgacgctggacatgacccacaacatggactaccttcgagagtggtacggttga

SEQ ID NO: 4320 - DNA, 711 bp, synthetic construct
  source 1..711: mol_type = other DNA
atgctgtcgattgggcaatgttacttagaatttgtgaataaaatcctcaaggagggtaaagagacctacaaggacagcgatcaccatcttaaggaatatcttggcaattattactatattgacgatccactggacctgaaattcagagcgaagtaccagcacatgactcccgagctgatgctggaggagatcaagaagggacggtatgacatcgacgcctgcccaattaagggggatgcactgtatgagtatgtcaagtcttttgaaatccgggacgatcagggcttcgtctacacttaccccaaccgtatcctcgagcattttggcgtggatcagtttgaagttatgaaagagagaatcctaacagccacaggcagtaaccgagccgtggccgtaacctacgatcctaaactggaccatgaccgcgaagacattccgtgcctccagttcgtgcagatgctcgtgagggacggggaattgacgatccacgtgatattccggtccaacgacatcttcggagcattctacagcaatatgttcttcatatgctatatgggaataaagatgaaagaggaagtcaacaaggagattatgggagagaaactgaactttggcggtatccactaccactccacctcagggcacatctacaataacgatatgcgcgctgctaggaagttgattagcgcgaacaaggctgccctgaaatga

SEQ ID NO: 4321 - DNA, 1200 bp, synthetic construct
  source 1..1200: mol_type = other DNA
gtggagaagccacaactggtgaattttatcgccaaagtgctggaggattctggctttaaagtctacaagaactttaagacttcccagcagaccgtagacatatacgccgtcctcccaacctcgatgggcgattttggtatggttgtggcttgcaagaactacgacaaggagtgggaagttggaatcgatgtcctgaaggaaatggaggtgatcgggaagaaacttaaggcatcaaaggtcagcgttgtcaccagttcaggattctccagccaggcaaagcgctatgccgaagagaggaagatcaaactggtggaccgcaacgaccttgtggccttggctaaaaaatacaacaacaagaaaaaacaggagaatgagccggtaagactgcgcaaggaaagtcctgccaacatcgatagggattccttctataatagggatgtgtcgcgtgactacatagacaacgtgaatggcacccaatacgatgccggcctcaatagagtccccaacccgtatgacagctacgaggagtatgagtcggacatcgattactatgagaatcaggtggggggaattgacctgagcggctacagcgcgtatgacgatgacctgtaccgggccgaatttttgaacaggcaccctagcaacgagtccaactataatggactgctcattgccaacaaccgagacccctacgtaaactccaaacctagttccaacagccgaagtctcttctctcgcaataaggcgactgaaaagctcagcagcctaaattcaagagggtacaccaaaaacacaaacaataacaataaccggcagcgaaatagccggaccaccacggtcagtcggaacaagtccccctcaagaaacttcatctcttcaagggacaatgctttgtctaagttctccagaaatgaaagccggagcagtggcggtttaaaagaaatgattaagccaatccttgggaatacaattgtgtcaatcattgttgtgatcgttgtggcttatctgattgcattcatcctggggagcatagtgaaagtccccacaggatacctcggtctgactgagctggccgttgcactggtgttgtcttatggcctagtcttctacacggaccgcggctccgatgtgcttgtaaaggggacaatcatcttctttatttccttagtggtgctcatgatcatactgattgctttctga

SEQ ID NO: 4322 - DNA, 924 bp, synthetic construct
  source 1..924: mol_type = other DNA
atggcctttgatgaaaatggtaaggtctggatggatggggaatttgtggccctcaaagacgccaagatcagtgtgctttcccacgtgatccattatggcagcgctgtgttcgaagggattcgctgctacgaaacggagaatggtcctgccgtattccggctgcaggatcatgtccacagactgtttgattccgccaagatctataagatggacattccatttactgaagaggaaatctgcgacgccatcatagagacaatcaaggtcaacaacttgaagagctgctacattcgtccaataacataccgggggttcggcgaactgggggtaaaccctctgaactgtcctgtggagaccacaattgccgtctgggagtggggggcatacataggagaagaggagatggaacagggcgccaacattgggatttcgacatggaggaagcccgcacccgggaccctccccgttcttgcaaaggcggccgcgaactatatgaactctcagctggcaaatctcgaggccggtgagcacggctacgatgaggcaattcaattagactaccacggccacgtggctgagggaagtggcgagaatatattcatcgtggagaaaggcaagatcgttaccccggacctcggctcttccatcctacagggtatcactcgcgacagcattatgaccatcgcgaaagacctgggatatgaagtctcccaagagaccatctcacgagaaaggctgtacctggctgatgaggtgttcttcaccggcagcgctgctgaggtgacgccaatccgggccatagacaataggcagatcggaatcggatcacgcggccccgtgacgaaagagttgcaggagaaatacttcgacgctgttaacggaagaagcgaggacattcataactggctgacttatgtggaatga

SEQ ID NO: 4323 - DNA, 825 bp, synthetic construct
  source 1..825: mol_type = other DNA
atggacatcctgcaggccattatcattggactggtccaggggctgactgaatttctacctgtgagttccagcgcccacctgatcttcatccaacaggcgcttggcctgtccaacgtgccactggcctttgatgtcctcttgcatgtgggaaccctggtcgccgtgttcgtatacttcttttccgacatcattcagatgatccaaggattcttctatagcctactggacctccgagatgggaatttcatccccgaaatcagacgggacccctataagaagcttgcatggctgactatcatcgccacgatccctgttggcgttgtgggcatcctcttcaatgacattattgaggaaatgtttacaggactcaccatcccggcattcctgctcctgataacaggttgtctgttatatgtgtcccagcgcatgaacagtggaaaaattgatgtacagaacataaccatcaaagaggctctccttatggggtgcggccaggctatagccgtgttgccaggtctcagccggtcaggcaccacaatagctgccggactgtttgccggcctagacaaggagtttgcggccaaattcagcttcatcctctcaatccccgcaatcttaggtgctgcggtggtgcagttgaaagatctcagcggcggcaacattgagattggtgcctgcctggtggggtttatcgtagcagtcattagcggctacttcgcaatttcgttcttgcttaagatagtcagggagaagagcctggacatatttgcttactactgctggatcgtgggggtcattgttctggtggggagtattcttctgtga

SEQ ID NO: 4324 - DNA, 1002 bp, synthetic construct
  source 1..1002: mol_type = other DNA
atggtatacgtaggtatggatcacggaaccaccgggatctcatttgccataatggatgatgagaaagttcttgatgtgttcaagatatctagagaagacagtaaggccggacgtgtatcagctattgaagaactctccaaacgcattgatctggaagatattgacttaatgataattacctatgctatgggagatggaataagcactattctgcccatggaaaaggtggagaaccggggcatcctctccatcggaggcgccggcaaagtcacgggagggggcacatctgtctatagcgagatagagaacgcgaatctgccggtgctgatgattccaggtctgcacaaggactgcgattggctggaccccctcttccgcgccgcatattcccaccatgccagtcctgaaaaggtcagcattgtctacaacgcctacctcgagacccagtgggagaacatggtcgtggccgacatcagctccaatagcgtggacctgctaatcgaggatggcaagatcaagggcgccattgatgcctgttgcggtgcaatgggtatcgtgcacgggccattggacctcgaaatgatcagagacatcgacgaggggaaacggacggccaacgaatgcttctcacatgccggcgctgtgaagatagcgaatgtggacaataaggtcgcattgatgaaggacgagctactggaaatgtactccaaaggggacgagagggccgtgttggctatcgacacaatgatcatgaccgtggctatggagattgcagggctgatcgctgttagcaagaatgagatcgatggcattgtgcttacaggcagcatggggtcgatgaaagagcccgttgactttgaggcgggcctgaacaagtactttaagaacaaatacgagactaggattatcagttctgaatcgggcgctatcggggcagcacagatcgcgcgagacatcttcaacggaaaacgggatatcatgggtatcaaagtggactattga

SEQ ID NO: 4325 - DNA, 996 bp, synthetic construct
  source 1..996: mol_type = other DNA
atgaaaatgtactatgatgacgatgtggacgctgaggttgtggccgataagaccattgccgtaatcggatacggaagccagggccgtgggcaatctaggaacatggctgacagcggactgaatgttattgtcgggctaagggagggaggaagctcctggcagaaagctattgatgatggcatgaatgtaaaaacaatagaggaggcggctgaagctgcagacatcattcacatcttgctgcccgatgagacccaggaaaaagtgtataaggagcagatcgcgccctacgttgaagcgggaaatacaatatcattctcgcacggctacaatattcactttggcctgatccaacccggcgaggacgtgaacattgtgatgttcgccccaaaaggccctggttcccgggtgagaaccacttatctggagggattcggcatcccggggctggtcgccattgagcaagacgccactggcgacgcactgcagcttgccctcggtatggcaaaggctgtaggccttacgcgggccggggtcatagaaacaacatttaaggaggagactgagacagacctcttcggtgaacagaccgtcctgtgcggggggctcactgccctcatcaaggcaggatttgaaacgctcgtggaggccggctaccagccagaaatcgcttactttgagacctgtcatgaagtcaagctgattgtggacgacatctatgaaaacggtatggcgggcatgtggcatgacgtgagtaacactgccgagtacgggggcctaaccaggggaaaccgcgtgatcaccgatgcaaccaaagcagagatgaaagcaatcctgggggaaatccaggacggcacattcaagaaggagttcgccgatgaaaacgccacggacgccgctaacttgaaggaaatgagagctgccgaggagcgggagaccatcgaagtcgtggggaagcgattacgcatagcctgcggtctgcagaaggaggatgaatga

SEQ ID NO: 4326 - DNA, 492 bp, synthetic construct
  source 1..492: mol_type = other DNA
atgagggagaaaagccatgtgattagtaccctggttgaacacaagccaggcgtgctgcagaaagtggcaggcctgttaaaccggcgcggatttaacattgacagcatcacggtcggggcatcagaagttgaaggcctggccagaatggtattcgtggtgaaaggtgatgaaaaggtgctagagcaggtcatcaagcaattgcacaagctcgtggaggtggttaagattaaagaccttgatcccgagtatgtcctgaaacgagagctctgtctggtgaaggtaaaaacaaccaaggaaaagtccagaagcgagataatcgagtacgccgacatcttcaaggccaaaatcatcgacgtctgcgatgatttcatcactatggaggtcaccggcaatcccgagaagattgactccttcttgaggctcctgaagccgtttggaataaaaaagattgctcggacagggcctactgctatcgcgcgcgggcatcactga

SEQ ID NO: 4327 - DNA, 1896 bp, synthetic construct
  source 1..1896: mol_type = other DNA
atgcgtggcggagacgctattatcaaagctttaatggataaaggggttgacaccatattcggttaccctgggggaacggtgattcccttctatgacatgctatatgactcagacctgagacacatcctggtcaggcacgaacaatgcgcggcacatgccgctgaaggttacgcacgagcttccggcaaggtgggtgtctgcctggccacatccggcccaggggcaaccaatctggtcactgggatcgccaatgcatatatggattcaagtcctataatcgccattaccgggcaggtggtaagcaacctgattggcaacgacgcttttcaggaagtggacatcatagggatcaccatgcctatcacaaagcactcctaccagccaaaggacgccaatgacattccaagcattataaataccagtattgagattgcttcgacaggccggaacggccccgtgctcattgacgtgcccaaggaagtccaagagatggaattagatgaatacgtgctcggaaccatccctacccctggctacaagcccagcgtgaaaggaaatgataagcagatagccaaggccgccaaaatgctgttggaggctgaaaagcccataatcctggccggcggcggtacgatccttgccgacgcatcatcggagctgcggcaggtggcagagcttgtcaacgcgcccgtggccacaacccttatgggtaaaggggtcatcgatgagaaggatgacctgagtatcggcatgctgggaatgcacgggaagcaggtggccaaccagtctgtaaataaaagtgactgcctgctggccgtgggcgtcagattctctgataggaccactggaaaattggagaagttcatgcctgatgctcaagtgatccatatcgacatcgatcccgcagagattggaaagaacgtgccagtggacttgcccatcgtaggggatgctaagatagtcctggccaaactcgctgatgaattggccagcagccgctttgctgaggagtttgatgatgatgaattgtctggctccaagattatcaagggcctgatggaaaatgatctggcgaaagagctgtacaagagcaaattggtcaaagaaatcgaaagctccaagttcaaggagaattatgagtttaattacgacagttacagcccttggctcaagtcagttgttgactttaagaacgctacaatcccaagggtgagctacagcgacattccgttaaagccacagcaggtgatcaaggagatcgcaagttccattacggatgatacgatcgtgacaactgatgtaggtattcaccagatgtgggcggcccacttcctcgacatttcaaagccccgcaagttcatctcttccggcggtctaggaaccatgggattcggcctgccggcagctatcggcgccaaagtggcctgtccggacgatgccgtccttgccattgtaggggacggcgggttccttatggtctcccaggagcttgccacaatcaaggagcatgacatcccggttgtcattgcaatgctcaacaaccggaagctggggatggtgtatcagtggcagaacaagatgtacgataaacgctactctgaaactgacatgggaaacactcccgactttgtgaaactcgcggaaagctacggaatcaacgccgtgaaagtcgaggaggttgacaagactcaggaggtgctgtccaaagcactcaaagacaacgaggccatcctactcgacatcaccgtggagaaggatgagtttattccaatgttccccccaggcggagcgataacagacctgctgggtgagtataaatatgagagcgacgttaagaacgttgacctcgagcagaaggaatcggaggattctcaaaccgtggaagggggcaaatga

SEQ ID NO: 4328 - DNA, 1377 bp, synthetic construct
  source 1..1377: mol_type = other DNA
atgatatttagcaaactggaaaataatcaattgctgaagaagctcctgaacggcgagattaaaatgaaagtactggtggttggaacgggggccagagagcacgccatctgtgatgcactgaaagatgatgtggacttatacgcttatatgagcaagaacaaccctggaatcagcaagatttccacctttaaaaaaggcgatgagggggaggttgacgaagtggccaagttcgccaaggaaaatgagatcgagttggccgtgatcggacccgaagctccgctgggaaagggaatcgtcaacgcgcttgaggcggtgggtgtcccctgtgtcggtccggcccaggagagtgcccgcattgaaacggacaagtcattcatgagaaacctctttgagaagtaccagattaaaggctcgcttacatataaggtgtttgacaactacgaagacatcagcgcattcctggatacctatgagaaggatgttgtggtaaagcccgtgggtttaactggggggaagggggtgaaaatcgtaggggaccacctcaaagataatcaagatgccaaagcctatgcaaaagaagtgatggacaatgcaatggggggatttgcccaggtgatcatcgaggagaaagtggtgggcgaggagttcaccatccaagccttctgcgatggggaaaacctcgcggccatgccagccgcgcaggaccacccacatgctttcgaaaacgaccagggactgatcacagggggcatgggcagctactccgatgtgggaggcctgttgcctttcctcactcaggaggactatgatgaggcggtcgacattatgaaagagaccctgaaggctatagctaaggaaacaaccccatacaaaggtatcctatacggccagttcatgctaagtaaggacggccccaagctcattgagtacaatgcacggttcggggaccctgaggcaatgaacgtgctgcctctcctgaagacccccatggtggacgtatgcaaggccatcgtcgacggcaagctcgaggatgtcgagtttgaagacaaggcttctgtctgcaaatacatagttccagacggataccccgacactccacacgcaggtgagcttattgagattgatgaggaggctatcgaagctctgggagcaaaggtcttctatgccgccgtgagccaggaggatgacggcgtccacctttcaggctcccgggcattgggcattgtggctcagggcgatacaatcgccgaagctgagaagatagccgaagaagcctgcgggctggtggagggcaatgtctaccatcgaagggacgttggtaccgaagcgctgatccagaagcgcatagaccatatggaagctattaggaacgaatga

SEQ ID NO: 4329 - DNA, 897 bp, synthetic construct
  source 1..897: mol_type = other DNA
atgaatgagtgcgtgatcttcatgtctaagcaggctaagagcaagaatactattatcaagaaggccaagaagctggaacgacaagggaaatacataaaggccctgaaagtgtgtgactcgtatctggacaacgagagatctgaggagactttgatccagctgaagatagacatcctggtcaacctctacaacaacgacacattcatcaatgagatcaatgagaacaaaagcaaaattacggactttatcgagagggatgaagagatagagcttctcaagctgtacaacacgctggacaattacctagaattgaactcccagaacatggctgatgagcgcaaggttggaacctatctcgccggtggcctcttggtggacaacctggagaccatcctggtactcaatgaaatggcgaaggacaataaggctgagaacaaggagccatttaaagcaaactccgacttgttagagttcatatacaacgtcaagaagacaagctatcagtatctggacctgatcctgccgaactcacttgaactactggccaactccaatttcaacattgaggcaatcatctcaaagattagacagttcctggagcccaaaaaatcgaccgatagtaaggaagaaagcatcaaagaaaatgaagaggatgattcagaccagtccgatagtaaaaacgccctcaaatctaaggacgataccgagcttatcagtgattatagcattgaagatgagatgaagggcctgaaagaaatgattagctacttaaatgataagaatgaatttaaaaaagccctcatttaccaacggcgcctcgtgaaacttgcaagggaggagaacattcgggcggaacaggaccacgactccaagcagaagacactgagcgactactga

SEQ ID NO: 4330 - DNA, 915 bp, synthetic construct
  source 1..915: mol_type = other DNA
atgcggagtctgctgtccgtctgtgacatagaagaagaggtggaaacgatactcaatattgccagtgactttaaggccggcaaaatcgaggagaagcccctgaaggaccagaagctcgctatgatctttcagaagtcctcgacacgcaccagagtctcttttgaggttgggatgtatgagctgggtggcactgcgctgttcctcagcacaaatgatatccagcttggccggggcgagcctattaaggacaccgctaaagtcctgagcaggtttgtggacgtgatcatgattagggcaatcgaacacgacgatgtcatcgagctcgagcgggagtcagacgttccaattatcaacggcctgaccaaccttgagcacccatgccaagcattggccgatatgctcaccgtgaaggagcacaagggtgggttcgatggaaagttcgtttatgtaggggacggcaacaatgtgtgtaactcactactgcttatctgcggatgtttagggatggatatggctatcgcctgcccggatgaatacaggcccaacgaagaaattaccaaaaaggcgaaagaatatgccaaagccaacaattccacaatcactatcacgtccgacatcgaggaagctgtgagcggcgcagatgtgatctacactgacgtatgggtgagcatgggagatgaggaggagtctgagaaacgacgtgcagacttcaaggactaccaggtgaaccaaaatctgattgacatggctgatgatgacgtcatattcatgcactgcttgcccgccatacgcggagaagaggtgagcgccgaagtgattgacgggcctcatagtgtggtctacgatcaggccgagaacagaatgcatgcccagaaggcggtattgtattacttcctaaaagaactgtacaaatga

SEQ ID NO: 4331 - DNA, 984 bp, synthetic construct
  source 1..984: mol_type = other DNA
atggaatttaatgaccctgccttggagcatttggtgaacaagatcactgttgcgctgaacgagaacaataaggaggatgctgcccactatatggacattatcatagataagtacccagaggtggcaaatattctgatgaactctatcgagtttcagaacataatggcccaaaacgaagatgtggaaggtgaggaagcatcggatgactttgccatccagcccggcagtgctatggaactggatgaagagaaaatcattaatgacatgaatgccatgctggatatagagccaaccacggcccaggaatacattcagaaggggacagtcctaacagtcacggaggagtatgagaaggcattggagtgctttgacaaggctctggagctcgacgagaacaatctttcagccctgatatccaagggaaacaccctcgagcttatggaaaaattcgatgatgccagcaaggtatacgatgatgtgatgaatactgaggtggaggaggtctatgacctgatgagcaaaggatatatcttcgagggccaccaaagatacaatgacgccctcaaaacatatgacaaggcgctgcagaaggaacgctataacgccaacattctattcttaaagggaagttgtctcatcaagctggaacagtaccagaaagcaatcgacagcctggaggaggccatcgaaaggtatagcgaaaacccctacgagaccattttcgagctcgaaaacgcataccacaacaaaggcgtctcattgcatgctatcggggaagatgacgacgcgctggaagccttctcccttgcactggggctgaacccggaatactactactcctactacgagattggcatcatccaggaggaccgagagaagtatgacagcgctctcaagaactataataaattcctggagtacgacaataccgactctgaagttgtggaggctaaagagcgggtggaagagctcttaaaagaatga

SEQ ID NO: 4332 - DNA, 1722 bp, synthetic construct
  source 1..1722: mol_type = other DNA
atgtatttcaaaataaagacggaagctgaagaggcgctgcggaaagccgtcgaccagtttgactgcgagtttgatgaggaaattaaattggagtttccccctaatcctgaactcggtgatctggctagtacaatctcattccaactggctaaactgcttcgcaaagctcccaatctcatcgctcccgaggtggtcgaaaaaatcgagcttccagagatctttgaacgagtggaagccacagggccttatgtaaacttcttcatcaatcatgacatctttgccaagcagctattggactcggtggatgaggactacggtcagctcgctgcagtggatgagaagatcatactagaacacacctctgcaaacccaaacgggccgttgcatatcgggcatatcagaaactccgtaatcggagactcattaaggagattgttaacaaaggcgggctacaatgtggatacccagtactacgtcaatgatatgggccgacagctggccatgattgtatatgggatggaagagctgggcctgaagctcgaggaccagccagcgtccaagatcgaccacaaggtgggagagctgtacttcaaggtaaaccagatgattaaggaagacgagagcctgaacgatggcgttgacgccacgatccgcaaatacgaaggcggtccaagcgagctggatgagaagtttgagtacgctgtcaacagctgccttgaaggtgtgaaggaaaccttgaaaagaatgaatgtgaagcacgacgcctttgtgtgggaaggacagttcgttcgtactggcatcgtcgacaaccttacccaggagctctatgacataggatatgcaaggcaggaagaggtgctatacctggacttaagcgagtttgacattcctaaagagctagtcctcagaagggccgatggaacttccctgtactctacacgcgacattgcgtatcacatatacaagtctaaaaactgtgacaaaatcatcgacatattcggcagtgaccacaaactggccgcccgccaggtggagctggcactcgagattctggaggaaatcgagccaaacagcgataaaattgaggtcattttctacgagttcattaccctgcctgaagggtccatgtccacacggagaggagtcttcatctcagtggacgagctcatggatgaggccgttcggcgggccactgaagagataatttcccgccgcccggaccttgataaggagaccatcgataaaattgctgaagagatcgggatcggcgcaatccgttattacatcgcaaggctctctcccgaaaagcacataaccttcaagtgggacgaggccctgagctttgagcggggatgcgcgtcaatccaatatgcccatgcaagagcctgcaaactccttaagaaggcccaagaggaaaagggcattgatctggccgacttgacggtggaggatacttggtccctggatgaaaacgagaaggagctggtgaagctgattgccaaattccccagtctggtggaagactcggctaagattcggcgggtccaccccatcgctcaatactgtcaggacctcgccagcgcattcaataggttctataaggccgagcaggttattggctctgatgtggaaaacgcaaggctgctgttggttgaaaagagccgaatcaccctccgaaatgctcttgacctcctgggggtgagtgcgcccgatatgatgtga

SEQ ID NO: 4333 - DNA, 414 bp, synthetic construct
  source 1..414: mol_type = other DNA
atgaaggagattgctatctacctcatcctaatcataatcgtgctcattgccgcacagcacctgaatgtcgtggtcagcgggtccatggaacccgttatgtaccggggcgatattgtggtactgcagaaggcaaaccttttcggcatacatgaatttgacccccacgatgtgcaggtgggggatatagttgtgtacaacgccgcctggtatgacagccccgtgatccacagggtgatcaacactgcggagatcaacgggacaacctgcttcgagatcaagggagacaataacaacaagagtgacccttattgggtgaccccagagcagatcacagaccgcgtcattacgattaatggccaaccattggtcattccgaaaatcggatacatcaccctgtgggtaaaaggtctgtga

SEQ ID NO: 4334 - DNA, 1656 bp, synthetic construct
  source 1..1656: mol_type = other DNA
atgaatagcgataatatcaaaaaaggggtgcaaagggcaccccaccgatcacttttgcgtgcttgcggactgaacgataatgattttgacaagccattcatcggaatcgcaaacagttataccgatatcgtgcccggtcacattcacctcagggaactggtcgactatgtaaaggaaggcatccgagaggctggagctattcccttcgagttcgacaccatggccatctgtgatggtatcgccatgaaccacgacggcatgaaatactcactggccagtagggaaatcgtcgtgagcactgtcgagagtatgaccatgggtcattgcttcgacgggctggtcctcatgcctagctgtgacaaggttgtgccagggatgcttatggctgcggcacgcctggatattccctcgatattcctgactgggggtcctatggcgccaagcacgtacaaaggaaagaatgccgatctgataactgtgtttgaggcggtcggcgaactctcatcaggaaaaatcacggaggatgagctgtttgaattggaatcctgcgcctgcagtggtgctgggagctgttcaggcctatttaccgccaacaccatggcctgcattaccgaaaccctggggatgagcctgccctactgtgcaacaacactcgccctcagcgaggagaagaagaaattggccattgagaccggaaagagaattgtggaaatggtgaaggaagacctgaggccctcccagatcatgacacaggaagccttcgagaatgcaattgctatggacatggccctgggggggagctccaacactgccctgcatattccagccatcgcatatgaattggaggagaagggcgtgcatgccgatttggatctatttgaccagataagcgataaagttgcccacattgcacttctctctcccgctggccaggacactatggcggacctccataacgacgggggtatcccagcggtgttaaagacaatctcctctaaactggacacgagtgtcatgacctgtacaggaaaaaccctcgaggaaaacctgaaggatgctagtgtcacaggaaatggcgttatacacacgttagacgaccccatccacgaagcaggcgggctgactgtgctcaagggaaacctggcgcctaacggctccatcgtgaagtctgccgccgttccagaggatctgatgcaccttaagggaccggctaaggtctacaacagcgaagaggaggctgtggaagcaattttcgaccatcagctgaaggagggggacatccttgttatccggtgcgagggaccgaagggcggccctggcatgcgcgagatgctgaaccctacctcggccattatgggcatggggataaaaaatgtgggcctaatcaccgacggccgcttctcgggtgggacacggggcccgtgcattggccacgtatctccggaggccatgagcgggggtcctattgctgccctgaaggacggagacatcattgagatagacatagcaaatggaaacttatccgtagagctctctgatgaggaaatcaaagaaagaatcgagaaagccgatctccccgagaagaaggtgaaaggctggcttaacatctacagacggtccgtgtcctccgccgacgagggcgctatcctgcggtga

SEQ ID NO: 4335 - DNA, 324 bp, synthetic construct
  source 1..324: mol_type = other DNA
atggatattaagggaacaccaataaacgtcgaagacatgattcagtaccagaaggactcagtggtaagcatggagatcatcaagaaagagctggggactgtgaccctgtttgcattcgaccagggccaggggctaagcgagcactccgctcctttcgacgccatggttcagatcgtggatggagaagctgagatcacgctcgccggcgagccccatacagtcaaaaagggcgaaatgataatcatgcccgcgaatgtcccacacgccctgcaagcagtgaacatgccgtataagatggtgctcaccatgattaaaagtgattga

SEQ ID NO: 4336 - DNA, 1299 bp, synthetic construct
  source 1..1299: mol_type = other DNA
atgagtgatttcaacatgttttgttatcaatgcagccagactgcccggggcagcgcttgtacgaatgccggagtttgcggaaagaacgctactgttgcaaggctgcaggataatctgatcttttcaatgaaagggataagcgcgtacaattatcactgtaaggagctgggagtgtcggacgaatctgtggacgaatttctgacaaaagggctatacacaaccctcaccaacgtcaactttgatatcggcgacttggtccaactggcccttgattccggtgaagccaactttaaggtgatgaagatgcttaaggaagcccatatcgaaaacttcggagagccagtgccagctgaggttaaggtgggggcccaggaaggcccgggaatactggtaaccggccatgacctcaaagcattggaagagctgttaaaacagtgcgaagggaccgacgtaaaggtctacacccacagtgaaatgctgcctgcccacgggtaccctgagctcgcaaaatacgagtctttggccggtcagctaggcggctcctggattgatcaaaggaaagtctttgcggattacaacgtggccatcctcggcacaaccaactgcgtgctgccccctaaagacgcttatgcggaccgactgttcacgatggacattgtgaagatccccggtgcacaggtgatcgaggattatgatttcaagcccttgatcgacaaggctatcgaactgggggggcttgaagcggaggagctctccaccattagcacaggtttcggactgtctacgattctgtcccttgcccccaaaatcaaggagttggtcctggagggcaagataaaaagattcttcctggtggctggctgtgacagtcctaacccacggatgagctattacagagagtttgtggagaatgttccagaagactgcatcgtcctgaccttagcctgcaacaagttccgcttcaacaacctcgagctcggagacatcgagggcatcccccgcttactggacctcggccagtgtaatgatgccattgtagcaatcgagctggcagtcgcactctgcgagctctttgagatggagcttaatgatctgcccctaacaattgtcctcagctggatggaacagaaggccgctgccatcctgtggacattgctataccttggcaaaactgacatgttcattggaccggtgctgcccgcttgggccaatgatgacatactgaatgtgctggtggagaacttcaatctcactccaatttcaacccctaaggaggacattaaaaaggtgatggggtga

SEQ ID NO: 4337 - DNA, 795 bp, synthetic construct
  source 1..795: mol_type = other DNA
atggagaatattatcgaatcactggagaagttcggcttgactcggtatgaggcaaaagcgtacataggcatgaccaacatcataagcggtaaggctgaggacattgccaaggcctccgagataccgcgaagcaagatctactccacattaaaggaactggacaagaaggggttcattaccataacccacacccggccaatcgaatataaagtggtccccccaagggaagtctacaaacggaaaaaggaggagctgatcaaagagctggaagactcggaggagaaactggatgagatctacaacagccagatatctgaggtccaggctcctatctggctgataaaaacaagcaagaacattatcaataaagaagttgagattgtgaagaagacaagaaaatccctgaacatgcgcgtgggattcctcctggaaggggaaggggaggagcttatcaaggccttcaatagtatcccaagaaacattcccatcaaaattcttgccagcccctactgctacatcaaccaggaacgcatcgatatcattgagctgtttgagagtgcgagattggaaaacctcgaaatcatcaaggcagacatcccttttgtgaagattatcattagggatgaaaaggagctattccgcacgattgtaaaattcacgggaaaggaaaagtctgtgctccccgagactgctgtgggcgtgctcaatcaatattcagacatctgtaagaactttgatgagcgattcgttaatcagtttaataggattaaggccaaaaagagttccatgaactga

SEQ ID NO: 4338 - DNA, 756 bp, synthetic construct
  source 1..756: mol_type = other DNA
atgatgctcaactatctgtttaatatactgaataccaacacctttctgctgaaccccaaagagagagtgatccaggggattctgttgttcattctaatgagtgtgttttccctcctgttcatatccttcatcactctggcaagccctaacctgttcttcccacttttgatctcgttcgagcttttgatgctctttctgggactgaacattagcctgcactcgatctacaccaactactttaacatgttggtgtctgagaaccctgttctgctcagttacgagggagtcatagtcaacttactatgcctctccctgggggcttttagtttttggctgagcatcgcgattttcatcggtcccttttgggccttcttctcattcgccctggcatggctcctgcccctctggataatgttcttcaggcgggatattttcaatgaaaagagcaaggtaatcagcaaaaattcagacaagcttataggctactccccaatttggttctacctcttcgggtgtgtgagcctcttcatcccctttcttgtcatgttcaaaatcgtgtttttttccaagttcaatttcttagccctgggcctgataatcatcacgctcatcgaaacaattttaatcttctgcccggactattgggataagatcctgccatttgacatccgcacaaagaagggcacttttatctattttttgctatctattctgatcctgtcttgcatttcaattattctttacaaaatcgtgtga

SEQ ID NO: 4339 - DNA, 399 bp, synthetic construct
  source 1..399: mol_type = other DNA
ctctttgaggccggcatgattgcgcttccgaccggtctgcctggactcgccctgctggggttggggacggtgctgaccgcctacggctcgggcatgttcgacgatctcggaacagaccacccagggtatgcaaagcccgaaaaccagctgaacttcggactgtccatggggttgaacttcatcggcttaggtgctagcgagggcctggcacggggggtgctctataaagaagtgcaggaaaagctagtaacaggatttgtcccctccatcaaagcctacggaaaaaccataatggacgagtcactgggcaagggcaatgccaagattagcactgttatctgggcttacgtggagaatagtgtcatccttgcgattgagaatagcatcaacggcggttga

SEQ ID NO: 4340 - DNA, 777 bp, synthetic construct
  source 1..777: mol_type = other DNA
ctgttgaaagccatcttcaagggtggagacttccaatgctcacagggcaatgggacaatcatcttcgaattagcagacaactccagcaaattgatctttggccccgatggctcggtggcaagtttaatcagcagcgacatattggagaacaactacctgaacggaggcatggacctgggcaccttcaatttcctaaagaactccaccatcatttccaacctcaagagcatagtcaactcatcctactacgatatcaattgtttgtctaactggataatctctctcgtaaatgattcggacattaacttcacagccatcgtctcctacctgagcgaccccaagcttgtggccagcgttgtcggcggactgctgtttgaagccgggatgattgcgcttcccactggtctgcctggacttgccctgctggggctcgggacggtgctcaccgcttatggcagcggaatgttcgatgacctggggaccgaccacccaggctacgcgaagccggagaatcagcttaacttcggcctgtcaatgaccctgaactttctcggcctgggtggtagtgaagggtttctgaggggagtgctgtacaacgaggtgcaggagaaactagtcgttggattcgtgccaagcattaaagcctatggcaagacgatcattaaggagacattttatgacgataatggggtgctcgcaggtgtggctaaaagttattttgataatattctccagaatatcctctttgacactttcctgaagtggggggtacggtga

SEQ ID NO: 4341 - DNA, 1089 bp, synthetic construct
  source 1..1089: mol_type = other DNA
gtggctaaaaaagttctcatcattgtgactggccggggactgggcggggatgccgggatcgctttgaacgtgtacaatgccctgaccaaaaggggaatggagtgtgagatagcattggacgagtccgcccccggtatattgttcaaaaagaacaacatggaatggaataaggtgatcatcccacaggctggcggccactcggccacgctgaagacaactgtcaacgcggcaacacgctctgttaaggctctatttaaaacaagaagcctaatcaaggaaaagaaattcgatctggtcctgggcatcctgggagggggcgccatcattggtgctcttgcggcaaagattacccgaacccccagcgtgagccttctgatcactcctctggacaccaagatctgcggaaagatcgggacgcccataatcctgcctgaaaacaacctgttcctggagcccaatatcccagataggatggtaaagtccttcctgcctgtcaatgacaacattagtctcggggataagaaaaaggccctggataagctgaatgaacattgcagcgagctcaagaagaaaaacccagatgctatggagtttgacccgtctaagcaaacaatcgtattctcatcaggttccagcctcttcgaaaagacggcccaggcaatcgaccagtttagcaaatacagtgacagattcaacttggtcttatgtggagatcccctcgaggaggagttttataagtatattgacgaaactaagattatcaatgtgggctttatagactgggtcaacgaccttctgcaccttgcagacctggcagtactcaccaatgacggccttatgctccatgaggccatggtgtgcaacctgccggtggtcattttaaaacgggtgaaatacggccgctaccacgatatggtttccatattcaagggagcgaccattgagtgcgacctcgaagacctagatgaggccattttcgatgtggtggacaactatgatgactacgccaaaaacacagctacctacaaggaggccatcctcagtgttggggacaatatcgccgatattgtggaaaaaagctttaaatga

SEQ ID NO: 4342 - DNA, 459 bp, synthetic construct
  source 1..459: mol_type = other DNA
atgaagaactggaaaatcattggcctcatcctgatcatcctactggctgtggtgtcagtgagcggctgcattggtgatgacagctcatccgataccacaagcatcagtgcagatgccctgaatattacggaggatggtacctacgactccaaggaggaggtagccgcctatatagatgaataccacaagctgccgtccaactacattaccaaaagtgaggccaaggcgctcgggtggcatgggggcagcgtcgaaaagtatgccccagggaaatgcatcgggggagacatcttctccaaccgccagagcattcttcctataggccatgaatacaaggaatgtgatatcgacactctgggagctgacagcaggggccccaaacggatagtcttctcgacagacgactatgaggtttactacaccggagaccactatgcaagctttgagcacttgacttga

SEQ ID NO: 4343 - DNA, 240 bp, synthetic construct
  source 1..240: mol_type = other DNA
atgaacgagatcgtgctgttcggggaggacatgaaagaagatccgcacaaatacattaaggagacgctggacttccccgattactatggcgagaaccttgatgcactctttgactgcctcagcgaggtatacaacaagacaatcatcatcaaggacagcgtcttggtggatgaagatataattcagaccttcgtggacgccaatgacgaaaatccagacatggacctgatactagattga

SEQ ID NO: 4344 - DNA, 1827 bp, synthetic construct
  source 1..1827: mol_type = other DNA
atgcgggtgttgctgattcactcagattatataaaatatcaggtgaaaaacaagactcccgtggctgaagagattgaggaggctaaagaatcgaatgccttcgaggaggccctggtggtctttacagccgtggagaaggaagatgagaaaaatccgaatgccgtggtcaagaacttagttgccgaagtgaaaaagacaaatgaggaggtgaatgcggaaaggattgtactgtacccatacgctcacttgtcgtcatccttgagcggcccgaaagtgggggtgcaggtactcaaagacgcggaagctgccctgaaggaagagggattcgaggtgttcagagtgccattcggctggtacaaggcatttgaactgtcctgtaaggggcaccccctctccgaacttagccgcaccatcggtgccgaggaggaggcggaggaagaggaggaagagaaaaaaccctccaaatggctgatctttgatgatggggagacaatcgaacctaaggagtacaattaccagagcaaagaccttgagaaactggttgcctatgagctcggcgagggggccagtgacgagggcgagcctccccatgtcaagatcatgagggagaaggagctatgtgactatgagatcgcctctgacataggtaacctcaagtggtaccctaagggccgtctggtccgggacctgctggctgactacgtatacaacttcgtggtggacctgggtgctatgcccatcgaaacgcccatcttctatgacctggcaaatgatgccatcagggaacatgcagccaagttcggagaacgacaatataagactgccaccaaaaaggacctgatgctcagattcgcatgctgcttcggggcctttcgcgtgttgggagattctttcctcacctggaaaaacttgccggctaaggtgtatgagctctccacctacagtttcagatttgagaagagaggggaggtggtcgggctgaaacgcctgagggcattcaccatgcccgatatgcacagcttctgtgcagacatgccccaggcactggaggaatttgacgctcaggtggacatgtgtgtccagacaggagtggacctggacgtgaactacgaggcaatcttcagggctacggaagacttctatgaggagaacaaggagtggatggaagccacagcaaaacggatcggcaagccactcctgctagaaatcctgccagaacggaagcattactggtcctgcaaaatcgattttgcggccatcgactaccttggccggcctattgagaaccctaccgtgcagattgatgtggaaagcggcaagcggtttggcatcgagtatatcgatgaagaggaaaatcctcaaaaccctataatactgcactgctcaccgactggaagtgttgaacgggttatctgcagtctgctggagaacaccgcaaaagaggatggaaaggctccaatgctaccaacctggctctctccatcacaggtccgcatcttgcccataggcgaaaagcaccttgaatacgccaaccaactcgctgataagattgccgcggagaacatccgtgtcgatcttgacaacagcgatgacagggtcgggaagaaaatacgcagcgcgtccaaggagtgggtcccctacattattgtaattggagacaaggaggttgaaaatgatgtctacagcgtgaccgttcgcgagagcggtgaaaaggtagacatgactgctgaagagttaattgccgaggtcaaggccaagacggagggcatgccctttagaagacttccattacctcgaaacacagccgaacgaattaattttaaatga

SEQ ID NO: 4345 - DNA, 1041 bp, synthetic construct
  source 1..1041: mol_type = other DNA
atgctgaatttaaataagaaaactatcattggtgtgatcctctgctttatcttggccatcccctcatttttgctaggcaatctgtttccaattattggagggcccatcatcgccatcctgctcggaatgataatcgccagcttttggaaggacaagggaagcgctgaggaggggatcaacttcaccagcaagtacatccttcagctggccgtcgtattcctcggcttcggcctgaacctcggggtcatcgtggccacaggaatccagtccctgcccatcatcattggcaccatctccatcgccctgatcgtggcctatataatgatgaaagtccttaagatggagcgcaactcggccatcctcatcggtgtgggcagctccatttgcggcggctctgcaatagctgctacagccccggtgattggtgccaacgatgaggaagttgcccaaagtatttcaatcatattcttcttcaacgtcatcgctgccatcatttttcccatgcttgggcgaatgctaggcttttctaccgtgaacggagatgcattcggcatattcgctgggactgcgatcaacgacacttcctccgtgactgcagctgcagctacctgggacaatatgtggggactagggtcagcaaccctcgataaggcagctacggtgaaactgaccagaacactggcaatcattccaattacgcttgcgctgtcctacattattggtaagaaggataatggagaaaagagtaacgaagagggattcagtctgaaacgggcctttcctacattcatagcgttctttattctggcttcgatcataacgaccgtggccgtttttctcggtgtggacgccagcctgttcatccctatgaaagaaattagcaagttcctgattgtcatggcaatgctggcgatcggcctcaacagtgacatcgtgaaactggttaggacagggggcaaaccattgctgcttggcgccagctgttggatagcgattaccatcgtaagcttgattttacagcacctgctcgggatttggtga

SEQ ID NO: 4346 - DNA, 1239 bp, synthetic construct
  source 1..1239: mol_type = other DNA
atggtcaaaaaagacgatacaatgtttataggggaggcccttatcggagacggggacgaactggcacacgtggacctgctcatcggccgcaaggatggtcctgtcggaaacgcgtttgccaatggactgagccagctgtcagtgggccacacgccactgctctcggttataaggccaaacctgatgaccaaaccggcgacaatcataatccccaaggtcactgttggggacctggatgatgcatccaagatctttggtccagcccaaaccgctgtagggagagctgtggccgatgcggtggaggagggaatcattcctaaaaacaaggccgaggagtgggtaattaacgccagtgtcctcattagcccagctgcggaggattaccgcaaaatttaccagtacaactatgccgccacaaagctcgcaattaaaagggccctggacggatatcccgacatgaaaaaagtgttatatgaaaaagatcgtggaacccatgccattatgggcttcaaggctatcaagttgtacgagcccccttacttgcaggtggccttggaccttgacaatgaagaggctatggcacggatcatcaagcagcttcctaatcgggagagaatcctgctggaagcaggcactcctctggtgaagaagttcggggtgggaattgtcggcaaaatcagggagctcgcacccagcgctttcatcattgccgacctgaagaccttggatgtgggaagggtggaggtcaagatggcagctgatgaaacagccgatgctgtggccatcagcgggctgggtaccattgaatccattgagaaggccatccacgagacccgcaagcagggcatctattcaatcctggatatgatgaatgtcgacaacttcacggaaaagctacagcaaatcaacaaggacttaatgcccgacatagtgctactccaccgaaatgtggacctcgagagtaagcttcgagcagaaggcaagaacctcgacgacatatccgcgtggggtaatatcaaggaaattaaagagattacgggcggcctggctgcggttgccggcgggatcactcccgaaaaggccgaagaggcctttgagaaaggtgcagatatcatcattgccggcagatacatcattggcagcggggacccccggcgggctgccgaggacttcctggctcatatgccggtagatccaaaccacatgcgcgtggttatggaagatgacgagcagatatga

SEQ ID NO: 4347 - DNA, 315 bp, synthetic construct
  source 1..315: mol_type = other DNA
atgggtttttgtaacagctgtgggagaccaatggggcgcaacgactatgggaccaatgaggacggcagccccaaccaggactactgcaaggactgcttccagaacggcgagtttacagagccagatataaccattaacgaaatgatcatcaggaatgcagaacgaatgctacgccgtaaccgggacctgcgggaagaggaagccacgggaattttgtgcaatttcctcccgaacctgaaaagatggaatcccaatcccgatgatgagatcgaagacgaggatgagcctgtgcggggctacaggggcggattctga

SEQ ID NO: 4348 - DNA, 1014 bp, synthetic construct
  source 1..1014: mol_type = other DNA
atggattttgtaaagggaattgtgaaaaagtacttcaggtcgtataatcgcaccctcaaggacgggaccaaaaagacctacaaaactgagcaggtgcaggtcacaatccccaagtccgacaatgtcttcgacgataaggaggaggtgtttattctgtccaagaaccagtttgacgagattcaggacaatgaggagctgatttcagcaatggaactgttcaacgccatgcagtctgaggatatcaaaaacctgaattactccctggatgaagccaggcaggagctctactcaaacagttccaagctggagtccttcacactggagttggatgacagcaaattggaactggacaagtccaataaaaaacttctcattctgaaagaagactgctcgaatttaagagatcagctggaggagagcaagcttaccattgtgaacttgaaagaccaattggataacaagaacttcatcatcgaagacttaaatgagtacgtcaatagcctgaataataaggtggattcactgaacggagaaatcgataacctcaacacgatcaacgcagagctaaacgacaacctcaacaatctgactaacgaactcaacaacaacgaactgaacaacggcctgggcaacggcctaaatggattcaacaacggcaatgggctgaatgggaacgggtacaataatggtcttgacaataatggtctcggcaacggcttaaatggcaacggatatgacaacaataacctttacggatataacaacgggctcaacataaacaataatcatctgttgagttctacagtggacgaggacagtgaagtactgatcagtgatgtgaaaagcagcgtgagctttgactattctgattatatagagctccaacgggagtacatagttctgctccgaaagtatgaagaggcgcaggaaaacctttacaatgagaaggttaaggtcatccactaccggagcctgctagagaaatttaaggctttcatcgcccgcctggaatga

SEQ ID NO: 4349 - DNA, 17958 bp, synthetic construct
  source 1..17958: mol_type = other DNA
atgatctcgttccttataattctgctgctgaataagggaggacactttatcaatactaaaataattaactcgattctgatcattctgatactgttctgctttatatctttactggggaccgcttcggcggaagacatttacacggatgatatagcatcaattgatgcctcaaacgattttgagagcattgagatttctaatgaggaagtgtcaactaatgcggtggaaaacctcgatgtgtctgccgatgacagcgactacgtggtcaatggcagttcatccaagaacgtactcactgcaaacgagctttctgcaacctatgatctgtcggggtccagcgtgcagaatatctcggatttatttaattccggcactattcagtccggcgacgtgatatatctaggaaaccagagcatttcctcctcatgggacgaatggacaggaaatcatcttatcaatgtcaatgtctccaacatcattattagcggaggaagcagttcaaatccggacggcacatccacaatcaatgccaacggggcaaaactctttaacatacaggcatcaggggtgacgctcacaaatatcaaagtgataaacgcccatggggggaatggaccgggctgtatcaactttgatggcagcgattgttcaatcataaattgtgaatttgaaaactgccagtatgcccaaggcggcgctattcatggaaccagctctgccagcaatttgatcataacaaattgcaactttacaaataatgtagggcgatggggaggaagcgggggagccatctatctggaggggtctggctgcaaagtgacggactctcgctttgaggggaacaccgcccagaattatggggcaatttactgcgcgggtgatatcaatttgaacaactgtaatttcacgagcaacggcccgggagccatttacggcggtggaaacactgaggtcatagactgcaattttatcagcaataccggcagctcggtcactgtcatctcgggaggttcgacaaaagttagaaattctaatttcaccgataatgccggcgcttccatctacagtggaggcaataccgaaataaaggatgtcattttcaccaataacggcgccggaagctacaacaacaagaatgtgggctccgtgtacagtggaggggctacaaccgacgtgagcaactctaaattcgacaataatgctggaatagcaatctatgccaacgaaaatgcatttgtggacggttgtaacatcaccaacggtggtgtcgccatctacagtggctcagacgccaatatttccaattccatcatagagaataacagtgctgatcaggcaatagtttacatctatgggattggaaaagtcaacaactccaatttcacaaacaacaccgtgtcaggccatacgcacgggggagcactcagcctgatcggtgacaatagcgaggtctcagattctatctttgccgacaataccgccggggcgtccggtggggccatatacactaccggggaaaatacaatgatcaaaaactgcagtttcacggacaacacggtgatgcaggattatggtcacgctggggccgtggatgtggtgggcgttaacacaaagatcatagattgcaactttacaaataatagtgcgccgaacggcggagcagtgtacgggggaagctatggactaagcctgtccaactccgtatttgaagacaataacgcttcgaccgggggtgctttatatatttaccacgacgatttcgctataacaaactgcaacttcaccgacaatgatgcctcatcccagggcggagcgatctacattgcgtcggagtgccacaatgagcagatgactggatgcaatttttccggcaatacggctccacgcgggtcagccatttactgcgatggagacggcaaggttacagactgtaatttcgacgtaaaaccggacctgacagtgtccggtggcaactcatctctgacagtgactcttggatcagattactcaaatgtcgtggtaggtgatatcgaaggggtgtccggaggatctgtgacgcctctggtggatgcacaggtgaccgtggaaatctttgattctcgcgggaacctcgtggactccgttaccaacgcaacagatgagaatggcaaaatcaaatatgattactcgggcctgtcgtatggaagctacacttatcgagcctctcacatggacggagatacgttaatcaccaaagaaggtactctcaccaggcaggcttctttggacgtgcgcactggctatccagcactgacatccacactgggccttcaaaccagcatcgacggaacagccgtcgagaacgatccttttgtcaatgaggacattacagtggagatctttgattctcgcggtaatctggttgacagtgttaccaacgccactgatgagaatgggcaggtctattacgactacagcaatctccagcggggaacctacacttatagggttacctctagcgacggccaaaccgaggaagggcccctgtccatgggcgaggttgtaggggacaacttttcagccattcaagccgcaattgacaacgccccaagcggaggagtgattttcctacagggcaagacttacctaaacgatatccagggacagatggtcatcgataagcccatcactatcataggcaccgacgggacggtgttggacgcccaaggaatttcacgagtctttgagattaccagtgacgcagacaacgtaaatctggcaaacatgacattaaccaatgggaatgatgtctatggtggggctatctacctgcaatcaggctgtgacgacggcacccttacagatgttgtttttgacagcaacaccgctgagctggctggtggcgccatttataacgcagggggcaatagatggactatagataataccacattcactgaaaatgaagcccacggtgagaccaactacatataccgtggcggtggtgccatttggtcttgtgatgcggagatgatcttgtcaaataccacattcgtgaataaccaggcaccatatggcggtgccttaagaggtgcatttgacatctacgattcactgtttgacaacaacacggctaccgacgggaatgggggagctattgacgtgacaaccgaggagtttctgtacgataccctaattctggaatttagaaattctacattcgtgaacaatgacgccaaaggaagtcggggagatgaccgagcccaggggggggccattcacatctatcaccttcaggaggttaacatgtatgattgtttctgcgagaacaacactgccgataggggaggagctgttgatttctacgagctgggaaagacttgggtcgataattgcaccttcgtcaacaacaacgcttcttccgaaggcggagggctggcgattttctgcaattcatccacattcaaggactccaatgtttccaacaacatcgcagggaccgatggaggcgctatttgggttatcggccacaattccctgttcaacaacgtgaccagcgagaacaacacagcatcaagaggaggctcctcttacatcgaaggtgaaaacaccacaatctacaatagcaccttcaataacaacaatgctctctacaatgaaagccttggcagccagtcaggcatcggcggtgccctcgacattctcggtgacaactgcaaggttattggtgtcactagtgtcaacaacaccgccgagcttggagggtccacattcatccgcggtgacaatacactcgtgcagaacacgaatctaagcaataatacagccgtcttcaatgagagcagaaacgagacatctggtattgggggtgccctcgacgtggtgggcaacaattgtcagatcatcaacgtcacttccgataacaacaatgcgtatcgtggtggctcaacattcattcgggggaatgacacagtcatccgcaactccacattcgacaataacaatgccaccctgcgaggcggtggactgaacattgctggggaaggatgcaccatattcaatgtagatgtgtcaaacaacgctgctggcgaaaacgggggaggcatctacgtcattgctgacggtaccgaatttcgcaacatcactgctgacaataacaccgccgaaagagggggaggcgcattcgttgaaggcaacgacatcattatcgataatggcactttcaatggaaacaaagccattttcaatgaaagtaagcccgacgaatcaggcatcggaggggcgttggatatcaaagggcatggctgtaatgtaaccaatgtagacagcttcaacaacaccgcctaccggggaggctccactttcattcgtggcgacaacacctatctcgaaaactgtaccctggacgggaacaatgccaccctccgcggcggcgggctgaacatcgccggtgagaactgtaccatccacaacgttgacatttccaataacacggccgggctcatgggcgggggtatctacgtaatcgctgacggcactgtctttcgcaacattacggctgacaataactctgccgagcggggtggagccgtttttgtcgagggcaatgacatcataattgataatgccaccttcaacgacaataaggcgatcttcaatgagagcaggccagacgactctggtctgggtggggcactggacattaaaggggacggctgcaatgtgaccaatgtcaactcattcaataacaccgcttatcgtggaggttccaccttcattaggggtgacaacactcacgtggagaactgcaccctggagggcaacaacgccaccctcagagggggagggctcaacattgctggcgagaactgcacggtctacaatgtggatgtgtccaataacacggcggggctcatgggcggtgctatctacgtagtggccaacgggacagagttccgaaatatcacggccaacaacaactctgccgaacgggggggaggcgcctttatcgagggcaacaatgtcaccattgacaatgccacattcaataacaacagggcgattttcaatgaaaccaggccagatgaatccgggctggggggtgcattggacatcaaaggcgatggctgcaatgtcacaaatgtcaattccactaacaacaccgcgtatcggggcggatcgacatttatccggggggatgacacatatgtggcaaactgtaccctcgacggcaacaatgccacccttagaggcggaggactgaacattgccggggaccgctgtatcatcgacgacgtggacgtctccaacaacaacgcaggccttatgggcggcgggatctacgtagtctcaaacggtactgaatttagaaacatcacagccgacaacaacactgcagagcggggcggcagcgcattcatcaacggtaccggcatcacaatcagggatggcgagctcaacaacaacagagctatctacaatgagtccagacccgacgagtccgggctgggcggaggatttgacatcgtaggggacaacatcctggtggatagcgtgcactccaacaacaactccgcctaccggggaggttccacgttcatccgcgggagcaatgtgacagtgcaaaattgtaacttggacaacaacaccgccaccgtccgtggtggcggacttaacatcggcggaggggacggctgcaaggtcatcaacgtcagcgtgtccaacaacgatgccggtgaggacgggggcgcggtgtacgtgattggcgacttcagtctctttgacaacgtcaattcaactaacaacacagcccaaagaggaggttcctcgttcatcgccgggaacaatgtgactgttataaactgtaacctggacaacaacacagcttccaaccgggggggaggtttggacgttaacggttcagggtgcgtctttgagaacgtcactctctcaaactgtcacgctgacaaggagggaggcgccgtgtatgtgcgcggagacaacgtaacatttaacaacgtgacatcggagaacaacacagcagaacggggagggtcaagctttgtggccggtgataactgcaaagtgattaattgtgaccttaacaataacaacgctacctggagaggtggcgggttggacgtgacaggcacaaactgcctctttgagaacgtgaccctgtccaactgccactcagacgaggatgggggggcggtgtatatcagtggcgatgacaacaggtttgtgaatgttacctcagtgaataacaccgctgtgaattacggcggttccacctacataggaggcacaagcaattctgtagagaattgcaccatatccaataacatagcttacaacggcgggggaatatttatagagggagaggattccaagttcacaaacaacaacatcaccttcaataaggccatagctactgacgaggaccatgactttaacattatggggggaggagtcttcatcctggggggaaattccaatttcaccaataacaatatctcttccaaccacgctaaggataatggtgggggagtgcagatattcttcggacctgacacctttatggacaagatttacgcatttaacaacacggccgaaaacggcgggttcgccaatctgctctactgtgacaacctcaatgtgacaaattccaccttctacagcaatcatgctacaggcgacatatcactggacagaggggaggggggcgctttccacatgtcctatgccactaacatcgacgtgcaagggaactttagctacaacaccgccacaaacggatctgcaatatattctgacgggtccgacatccgggtacacgactcatccttctttgacaaccaggcccactcctggttcctgcttataacccccagtgacgagacctatctgaaaggccaggatgtgatcattaacatcagtcacatcggaggggataatattgcgaacgccatccacaaccgagatgcggagagcagtatcaccgtgcgcaacgtcacttatccattttacaacaatggagttcttataaacaaaacaaccccaattgatgaagatattcccatagagatcatcggatatgaaaactccgataatgggaatctcatatatatcgatgacctcgaggacaatcaggtcatatactacaacattaccaatagggacacaaatgaatccatattggtcggtttcaataaaacagacatcagcgggacagtgagcctaagactcaccaatttgcccgcgggcaattatgtcgtcagcgcatattatccggagactacttactatacggaaatccggaatgtgtcatcatttagagtgattgatgtggacatggtggcaaacaagactgttgataatcagacctccaatgtgggcgacatccgggattggaatgtcacaatatggaacgacggtgcgagcgaagctcagaacgttaccatcattgacttcctacccgacggcctgaacctgactgataatctaaccattcatttctataacggcacggggggcctatggaacaatgcggtcctgaatctgacgagcaataacctgacgttcagtgtttacaacaaggccgacggcacctggattaatggggtggccagttatgatgagtcaagcaatacctggacatattatgtcctgagtctggcggataacagaacatttgcttacagtgtgttcaatcaatccgactacactgatgcgtttggagaggccaggtactacgaggacatcaacagttggacctaccgaaacatcagctatgatgtggacaacgccgattggtattactacacatttgagtatgatgaccatacctatgtttacggcgtgttcaacgggtcgtacttcgtggatgcatttggcgaggccaggtattatgaggacatcaacagttggacctatcgcaacatcagctatgacgcaacaacaggaaattggtactattatacctttgattatggtggcaatacctttgtttatggcgttttcgacgagtctttcttcgttgatgcatttggcacagccatctacgacgacggctcgtggaattatgagaacatcagttataatgcaacagatggcaaatggtattattacagcctgaactatggggatgattccaataatgtaacttactatattttcaatcctgagaatttcgtggacgtctttggaagcaattatcactataacgccgaaaacaacacctatgtgtatgtgaatgcatattacgacgccgagaccgatagcctcatcagaaacgacaccatctacaacgtcagttctggcatttggacaattaacaaccgcctggtggtgcccgaactggtgagcattaatccaaatgtaagctacatcagcccggagaagatctatctcgtgaataagattagtcttagcatagcaaaccatactaattcgaccgacatttctctggacgttggccgctttgatggaaacggctccgtgctgatgaacctcgtcaccaatgtgacgaaacgagggaactttaccaatatcgtgaatgtgacgacagatagtccggaaaagaattacactaacaatgtggccaacaacagcactatcgtgtacaacgacctggtcatcaacaagactgtcagcgataatctaaccaatgtgtcaggcatcgtcgactggaatgtcacagtgttaaacaatggtacgttcgaggccgtcaatgtcaccatgaacgattacctgcctgatggtctggatctgactaatttgacagtcaaggtctacaatggcactggaagtttatggactaacgccacactggaccttagcactatgactctgtctttcagtgtgtacaacgagactagtggtgagtggattagcggcattgctgcctatgatcaagccgcaaagacgtggacgtactatgtgcttgcattggatgatgatgtgctgacgtacacagccttcgacgaaacattcttctctaatctctttggagacgccttctacaatgagtctagcaatgtgtggacgttcgtcaatcgcacatatgacgaagtgaccggcgacttgatcagcgaggtgaacaccacttatgacaacaatactggcatctggactatcggggataagacatttgtggagtacaaggtcaacctcaccctagttaatggcacgaactctacaaatcttacgctgggcattaatagtttagatgaaaacagtacaatggtcatgaacctggtaaccaatgtgaccaaatacgggatcttcaccaatgtggccaatgtcactacggttacccccgagaccaattataccaacaatgtggcgaacaatacgaccgagaccctcactaacattaccgtgactaaggtgtgggatgacgctaacaaccaggacggaatcaggcctactagcgtgaacattactttgattggcagtgatggcagcgaacggtctgtgctggtgactggaactggcggggtatggaattacacgttcacagacttacctatgttcaacagctctggggatagcattgtttacactgtcaatgagtctgtggtgcccaatggctatgacgtctcctacaatcaatccaactggacagtatacaacactcatgtgcccgaagtgactaacattactgtgactaaggtgtgggaagatgctaacaaccaggacgggatcaggcctacaagcgttaacatcacgctgatcggtagtgacggcagtgaacggtcggtgctggtaaccggaacgggcggtgtctggaactacaccttcacagatctgcccatgtttaacagctctggggattctattgtgtacacggtcaatgagtcggtggtgcccaatggctatgatgtcagttacaaccagtccaattggacagtatataacacacatgtgcccgaagtgactaacatcactgtgacgaaggtgtgggaagatgctaataaccaggatggcatccgaccaagcagcgtgaacattaccttgatcgggagtgatggcacggagcggtctgttctcgtgaccgaaaataacggcgtctggaattacactttcacggacttgccagtgtacaatggaactaccgaccccatcgtttacactgtcaatgagtctgtggtgccggacggctatgaagtcagttataaccagtccaactggactgtctacaacacacacattccggagctggtaaacataaccgttacgaaggtgtgggaggatgctaacaaccaggacgggatcaggcccactagtgtgaacattaccctcatcggcagtgacggcacagagcggagcgtgctcgtaaccgagaataacggggtctggaactacaccttcactgacctgccagtgtacaacggaacaaccgaccctattgtgtacaccgtcaacgagagcgtggtgcctgacggctatgaggtgagctacaaccagtccaactggactgtctacaacactcacatccccgagcttgtgaacataaccgtgaccaaggtgtgggaggatgctaacaaccaggatggcatcaggcctaccagtgttaacatcaccttgattgggtccgatggcagtgaacgttctgtgctggtaaccgagaccgacggcgtctggaattacaccttcaccgacttgccagtgtacaacggaactaccgatcccatcgtgtacacggtcattgagtctgtggtgcctgacggctacgaagtaagctacaatcagtccaattggactgtgtacaacgcccacgtgcctgaggtgaccaacatcactgtgacaaaggtttgggaagacgctaacaaccaggatggcatcaggccaagcagcgttaacatcaccctgatcgggagcgacggcacggagcggtcggttctggtcaccgagacggatggcgtatggaattacacattcacggacctgcccgtgtacaacggaactaccgaccctatagtgtacacggtcatcgagtctgtggttcctgttggctacgaagtcagctacaaccaatccaactggacggtatacaacacgcatgtgcccgagatcgtaaacattacggttaccaagatttgggaggatgctaacaaccaggacggaatcaggccaggcagtgtgaacattactctgattgggagtgacggcaccgaacggtctgttcttgtgaccgaaaacaacggggtctggaattacacattcactgacttgccagtgtacaacggaactactgatcctattgtgtacaccgtcaatgagtcggttgttcccgttggctatgaagtaagctacaaccagtccaaccggactgtatacaacacacatgttcccgagatcgtcaacattacggttaccaagatttgggaagatgccaacaaccaggacggaatcaggccaggcagtgttaacatcaccttgattggtaccgatggcacggaacgctctgtgcttgtgaccgaaaataacggtgtctggaattacacattcacggacctccccgtgtacaatggaaccaccgatcctattgtttacaccgtcaatgagtctgtggttcctgtgggctacgaagtcagctacaaccaaaccaactggacagtatacaacactcacgttcctgaaatcgtaaacatcacagtgaccaagatttgggaagacgctaacaaccaggatggtatccgaccaatcagcgtgaacatcaccctgatcgggagtgacggcaccgagcgctctgtgctggtgaccggaacggatggctggaattacacattcaaagacctccccaagtttaacggcacaacggtacctatcgtgtacactgtcaatgagagcgtggtgcccgtgggctatgaggtcagctacaaccagaccaactggacagtctacaacacacatgtgcccgaattagtgaacatcaccgttaccaaggtttgggaggatgccaacaaccaggacgggatcaggccaatcagcgtgaacatcaccctgatcgggagtgacggcactgaacgctctgtgctggtaaccggaacagacggatggaattacacattcaaagacttgcccaagtttaacggcacaactgtgcccatcgtgtacattgtcaatgagtccgttgttcccgttggctatgatgtctcctacaatcagtccaattggacagtgtacaacactcacgtgccaaatgtgacagagattaacgtcacaaaggtctggaacgacagtaatgataaatacggaatccgaccatcgaatgtgactatcgagctgtttgccgatggaaagaaggtgaacgagaccaatctgaccgccagaggcgcttggacatacacattcagcgggttgccccagtataacaacggcaagttgattaattacaccattggcgaggtgcgtgtagacggctacagcgtgctaattactaataatactgtgggaaattggactgtgacaaacacacctatagcggtgcctaacatgacagtgcaaaaaatcgctaacgataaagtggtctacatcgggaatgtgaccagctttaccattctggttcggaacacaggggactgtaacctgtccggagtttatgtagtggactctgattacagcgcaggtcttagttaccttagatacgagaacgggtcccgtgattggacctatgacggcgcaaagtggactctggtcggaaatctcaccacggataacccaacggccaactttactgtgtactttaccgtagtcgataacgggacactggttaacaacgtttcggcaggctccaatctcaccaacgaaaccaatggaactaataacacgacggcttaccgccctaacatgaccatccagaaggtcagtaatgacgaggtggtttatgtgggcaacattaccagtttcactatcgttgtgaccaacacgggtgactgcaatctgagcgacatcgtggtgacagattctgatttctccgctgggctgtcctacctgacttatgctaatggcaccaggaactggaattatgacgctgtagggcacacgtggagtttggttggtgacctgaccaacgggagttctgccgagtttaccgtgttcttcacggtgatcgacaacggtaccctggtcaacaacgcaagcgtgagatccaaccttaccaatgaaaccaacgcaacaaacaacaccacggcgtaccggcccaacatgacgatccagaagattagcaatgatgaggtggtgtatgttgggaacattaccagcttcaccatcgtggtgactaacacaggcgactgcaatctgtcggacatcgtggtcactgattctgatttctccgccggtctgtcatacttgacttacgctaacggcaccaggaactggaattatgacgccgtagggcacacttggtccctggtgggcgacctgaccaatggctcctcggccgagtttacggtgttcttcacggtgattgataacgggaccttggtaaacaatgcaagcgtgcgctcgaatctgaccaatgagaccaacgccacaaataacactactgcctacaggcccaacatgactatccagaagatcagtaacgatgaggtggtgtacgtgggtaacattaccagcttcactattgtggtgactaacaccggtgactgtaacctgagcgacatcgttgtcactgactctgacttctccgctgggctgagttacttgacatacgccaacggcactcgaaactggaactatgatgcggtcggccatacctggagcctcgtaggtgatctcaccaacggtagtagcgccgagtttactgtgttcttcaccgtgattgataacgggaccctggttaacaatgcaagcgtgcgcagcaatctgaccaacgaaaccaacgccacaaacaacacaaccgcgtaccggcccaacatgaccattcagaagatcagtaatgacgaggtggtgtatgtgggtaacattaccagcttcaccatcgttgtgactaacaccggagactgcaatctgagcgatatcgtggtgaccgactctgacttcagtgctgggctgagctacctgacttatgctaatggcacacgcaattggaattatgatgccgtggggcatacgtggagtctcgtgggagacctgaccaacgggagttctgccgagtttactgtgttcttcacggtgattgacaacgggaccttggtcaacaatgcaagcgtgagatccaatctgaccaacgaaaccaacgcaacaaataacactaccgcttacaggccaaacatgaccatccaaaagatcagtaatgacgaggtcgtgtatgttggcaacatcaccagtttcacgatcgttgtgaccaacactggtgattgcaacctctccgaaatcgtggtgactgataatgattatagtcttggcttaaaatacagcagatatgagaacagcagccggctgtggaattacaatgggggcaagttcactctggtcggtgacctggctcctggcaattccgcaaacctgactgtgttctttatcgtggtggacaatggaacactcgtaaacaacgccagcgtgaaatcgaaccttaccaacgaaaccaatgcaacaaacaacaccacggcgtacaggcctaacatgacggtgcagaaggtcagtaacgatcaacttgtctacgtgggcaatgagacctccttcacaatcattgttactaacacaggcgactgcaacctgaccggggtgtatataaaggatgatgatttctccaagggtttacagtacaacaacaagttcgttcctgtgaaaggcacctggacctacgccggaggccggtggaaccttgagggccagctgaccgtgggggataatgccagcataacagtgtactttaccgtaatcgacaatggaaccctggtcaacaatgccaccgccggttctaatttgaccaatgaaaccaatgcgacgaacaataccacggcttaccgacccaacatgactgttcagaagatctcaaacgacggcgttgtctatctcggaaacaccacgtccttcaccattgtggtcactaacacaggggactgcagcctcagcgaaatcgtagtaactgacaacgactactcagctgggctacagtacagccgctacgcgaataccagctcgaaatggaactacgatggagataagttcactctcgtcggcgacctcgctccgggcgcgtccgcgaacttaacagtcttcttcattgtgattgacaatggcacactcgtcaacaacgcaagcgtgaagtccaacctcaccaacgaaaccaacgcaacaaacaacactaccgcttacagacccaacatgaccgtggaaaaactcatctatgaggacacagtctatgtgggagacacagctatctttaccatatttgtgaagaacactggggactgcagcctctccgacgtggtgatctgcgagtattggttcagtgaagggctcgagtacaatggggtttgggtccccaacggcgaccgcaaatgggactatgacgatgaaacacggacatggaccttgataggagatctcgcccccgaaggtttcgcctcatttgtggtctacttcaacgtgaccaaaaacgggacgctctataacaacatcagcgccaagtccaatctgaccaacgagacaaacgccaccaacagcacacgggcctatctcccaaatatgacggtcatgaaagtggccaacgatgaaatcgtttatctggggaataccacaagctttacaatcgtcgtaagcaacaccggggactgtaacctgtcagaagtggtggtgaccgacacagactacagcaccggcctaaaatataagaactatattaatggctccgctaattggaattacaacaatggcgaatggtcattggtcggcgatctcacaccgggctcatcagctaactttaccgtgttctttaccgtggtggaaaatggcaccctagtaaacaacgcttcagcaagttcaaacctgacgaacaaaacaaacacaacaaataacacaaccgcctacagtcccaagatgacagttcttaagattagcaacgacgagagcgtttacgtcggaaatatcaccagctttacaattctggtaagcaacgtgggggattgcgatctgagcggaatatatgtgatagatgatgattattcaaatggtttactctacaatcgatacgagaacagctcccgcaagtggaattatgatggttccagatggaccctcgtcgggtcccttgagcccggagatagcgcaaacttcaccgtcttctttgacgtggtggagaatggaacgctggtaaacaacgtgtccgcgggctcgaacctcaccaacgaaaccaacaataccaacaatactaccgccaaacctgtctgtgatttgattatttacaaggccgtgaatgccacagagatcctggtttacgatatcgtcgagtggaagattaccgtggtaaatcttgggccggacacagctctggatgtcattgttaaggatcttctggacaatggacttgaactcatttccgtcagcggtggcaattacaataatatcaccggtgaatggaatatcggcgacctggagccaaatacgcccgtgagcttaagcttagtgacccgtgttctggtaaacgggactatcgtcaacactgctactgtcaataccacaagccacgagtccaattatactaacaataatgccagcaactttacagaagcggactatctctgtgatttggtcatctctaaagccgtcaactgcactaattgtaatgtttcagatctggtacagtggaatatcacagtgactaaccttggtccacatgatgcctcgaatgtcatcgtcaaagagatcctgccgaaaggcttggaacttattgattataatgtgtcagttgggaactttaacgaggtgatcagtgagtggtctatcggaactctggagaaggatacggcagtctcgctggtcctggttactaaagtcctgatcgacggcacgttaattaatatcgccacggtgaataccacgaccctagacaacaactacactaataacgtagcaaataacactacagtggccagtccgatctgcgacctggtcatatcaaagatcgtgaatgccacaaaagtgaatatagacgatatactcacgtggacggtccgggtgactaataacggtccttcagaagccctgaacgtctgtgtcagtgacattctgccagaaggcctgatgtttgttggctacaaggccagcacaggcaggtacgacgacgaatccggaacgtggacagtgggaaaattgtcaagcggcagctccgccaccattaatatatatacgaaggtcatcgagctcggaaatatcactaacccagtttccgtaaacaccacgacggtggagtccaattactcaaacaataaggctaacaatactacagaggtttatccgatcgttgacctcgtcattgagaaatcatctgacaaaataaagtataacgtcaacgatacaatgcactggattataaaggtcatgaatgaaggaccctgtgacgcaattgaggtgtacgtatatgacgcacttcctgccagcacaaaattcattgcctacaactcatctaagggaactttcgacgcggccaaaggaatctggtccatcggcgacctggcaaatggcgaggaagtgacattagacatatgttgtaaggcccttatctctggaaactttactaacaatgctacggtcaattgctcaataacagacaagaacacatcgaacaattttgacaatgcaacgatcgagatcgctgacaacaagtccgataatccagaccctattcctgataagccaaaacacggggtggacattagcctaaggacaggcaaccccctgctaatattcttgatggccatctttgccatctttggaggaataggactacggtgcaggaaggagtga

SEQ ID NO: 4350 - DNA, 597 bp, synthetic construct
  source 1..597: mol_type = other DNA
atgaagattctgggaatttgtggaagtccacgcgatggggcatcaagttttctgctcaaaagagcattgaacgagctggaaaaagaggaaaacttcgaaacaaagtttattagcgtgaaagacaagaacatatccccttgcacgcactgcaatttttgccttgaaagcaaaggggagtgttccattgaggatgacatgaacgaaatctacgatagcttgaagcaggccgatggtatcatattcgctagcccggtgcattttggatctatctccgcccaactgaaggctgtaatcgaccggtgccaggcgctgatcatggaggaccttgacatcttcaagaataaggtcggcattagcatcgttgtcggcggggacaggtgtggcggccaagagctcgccatccagcagatcaatacattctacctgttaaacaagattatccccctaagcggcggatcattcggcgccaacctcggcgcctgcctatggtcgcaggacgaagggaccgatggggtgaagaatgatgagtatggtctgaaaactctcgacatgaccataaaccacttcaaggagttcctgctggagtttaaacagtga

SEQ ID NO: 4351 - DNA, 1569 bp, synthetic construct
  source 1..1569: mol_type = other DNA
atgagcgaggagtcaagcagttccaaagtggcaaaaggcagcgccattatcctaatcggaaacgttatcttccgggtgggcggatatatctaccgctttctgatggctagcctcttggggcctgccgcttatggaattttgggcctgacaactcctttccaggggatctttcaggtgctctctgcggccgggctgccaccggctattgcaaagtacgtttctgaatacaatgccctggatgagaaggacctggctcgccagactatttttacgtcccttaagattatggtcttcctagggcttttcttcggcttcatcatggtattcgtagccgccccaatcattaccaactactatcacaagcctgaggctctgctgcccttgcaggccgtcggtctcatcactcccttcagcgtgatcgtgggcgggttccggggagccttccagggcgtctataaaatggagtacatcctctacacgagagctatcgagcagatattcatgattctcatggctaccgccctggtgctcctgggattatccacccttggtgcagtgctgggtagtgtgttgggttttgtggcctctgctatctctgcagtctacatcttcaaacggtatatgggcaaatacatccctccggccaacccagattttaagtttcccttgaaggatgagctgaagctggcgaagacgctgattttcttcagtattccagtgaccgtggcagcccttgctgaaatgggtatctacagtatctgcacactgcttatgggcgccttcctccccgcagcggcaatcggctactttaccgcagcagaccctatcgcaaggctgcccctggtcgtatcaaattcgctcgctacaaccatactgcctgcaacctctgaagcctatgccctgaaggaccaagtgctccttgaaaaatacgtgacagctccctataagtacggaatgttctttgtgattccaatgtgcgtcgggatagctatcttcgcgagaggaataatgggcctggtttactttacaaacgcggcctatatgaacggcgccgtctcgttagccattctcgtggtcggaatgactttctacagcgtatacacaatatccggaagcatcgttcaagggattgggaatccccgaatccccatgtatatcctgattatcggctgtgttatcactctgggtctggggtggtatctgatcccgctgtttgggatagaaggcggagccctggctacgacaatatcctcatttatcatgatggtgccaatgttcctgatacagtttaggatgaccaaaacccatgcgccttattcattcctaattaaggtgactgtggcctccttgataatggccatcgtgagcattatcgttcccaacaatgtctacggcctcatcaccggcattgtggtctgcccgattgtttacgtgatcatggtcattctccttaagaccctaagccacgaggacgtggcggagtttcgtaaatacgccaataagctcgggccaatcaggaaatatgccaacaagttattggactttattgataagcacagttccgactga

SEQ ID NO: 4352 - DNA, 693 bp, synthetic construct
  source 1..693: mol_type = other DNA
atgacagacgtgaaagcgggggtcgaatacaaaatcaacatcgatgggaactcctttctcctggatgagaagaaattcaacctgcttttgtacatcaatgaaagtgggtcaatcacagaggccgcaaaaaggactaaaatctcctaccggactgctctacactatattgagaagatagaaaccacactgaacattgccattgtaagcaccaaaaagggcgggaccgggggaggcggaggtaccaaactcaccgaagaaggcctgcagatcgttaaggagtgcaagaagatcaatgctatcatggagcttcatcgcgatgtcaacgagctggaagcggagatccttgaggtggatgccagcaagggcatcatgaagatcaagatggaagacctgacgatgaccatgcccctgaataagaaatatgtggtgggcgataagattctggccctgatcagctatgacaatattttcataatgctggagccacaagcaagtagcatcagaaacatcttcaagggaatcgtgactgagatgcgactccaggatgagatggtgcgggtcaagattgacattggcggagtggacatattctcggacataacgctatccgcaggtaaagacctggacttgaacctcggaaaggaggtttacattggctttaaggccctctcaattgccacattgaaattatga

SEQ ID NO: 4353 - DNA, 105 bp, synthetic construct
  source 1..105: mol_type = other DNA
gtggcacgggtcagcaacctgagctactgtcacgtgtgcaccctctgcgctatgaaatgcggccccgatgccatcaagatcattaggaatgccccagacgagtga

SEQ ID NO: 4354 - DNA, 603 bp, synthetic construct
  source 1..603: mol_type = other DNA
atgaatatcgaaaaaagggatatcatggagcggactgcaaaagtctcacggaagactagcgagacagacattgagattgaaatgaacattgatggaaaagggaaatacgacatagacacaggggtcaagttctttgaccacatgctagagagcttttcccgccacagctttattgacctgaacatcaaggccataggtgacatcgagatagatgaccaccacaccgtggaagatgtcggcatcctcttgggcgaggcgttcgctaaggccataggggataagaaaggaatccgaaggatgggtcatgcgattgtgcccatggatgactccgtggccaccgtagccatcgatatcagcggccgcagctattgcaatatgagtctggactttagaaacgacaagatcggagaccttagttctgacattattgtgcacttcttcgagtccttcgcctcttcggccaaaatcaacatctacgggacctgtgaaggctttaatgatcatcacaaggctgaagctgttttcaaggcattcgcaaagtcaatctacgatgcctgcaagattgagcatgacgagatcctgtccacgaaaggcgtgctctga

SEQ ID NO: 4355 - DNA, 1221 bp, synthetic construct
  source 1..1221: mol_type = other DNA
atgatgaactataactacgatatcgatatggagaatccatttgagcccggtaaatcagtgtctccggaccggttcaaaggccgggagaagaacatcaaaaagattctcagggacatgggtaaagtgcagaaggggaacgtgcagcattttttcttaacaggcaacaaaggcatgggaaagacttccctggcagaatttgtaaaggaatatgtcgaaattaactacggcatgatcggaatatacgtgtccaacaagggaaataattctctcaattcccttatcacagctataatccaagcctttttgaacaaaattcctcgcaacgtgctgtttgaaaagatcaaaaccctcttttctagcatcgagagtgtagaaatcattggcaatcgggtgagcttcaagcccagcaaaagcctgattgttgatattgagaaggacttcccatactacctgaatcagatcattaaggatctccctaccaacaatggggtgttccttataatcgatgacattaacggtttatcggagtctaaaaagttcgtggactggtataagcgcttcgccgacacgatcgaagttaataggggggacttcaacctgcccctgtacgtcctcttcgccgcctatcccgacaagtttgacagcctagtctatgaagagccatccttcggcagaatcttccactatgatgaaattgaccgtctaagcgatctggaggttaaggaattttttaaagacaccttctccagtgtgaataagcagatcaacgacaactccttggaactgctgtcgtacttctcagggggcatccctctgataatgcaggagatcgggtactcaatctattggttgtcagaaaagaccaccattgatgaggaggacgtcctgaacggcatcatggaggcaattggagagctggagtcaaagcagataagaaacatcgtgaaccagatttccagcgatgactttgaagatcttctccttaagatagcgagtcaaaagcagcaaagttacatcgagacagactttaaggagaaactcaattgggacgagtacaacatctgggatgagttcctggattgcatgattaagctgggagtcatcaagacgagcaatcgaaaaagcaatttgaagttcagtttctccaatcagttttacttcacttacttctggctgaaaagcctgaacctccacgaggaatttgctaaaatcgagtcttga

SEQ ID NO: 4356 - DNA, 501 bp, synthetic construct
  source 1..501: mol_type = other DNA
atggccagtattgactattttgaatgtgaagactgtggattccggtggaaagatcagggcccactcctcttcttcctcaacgagaacaacaaaatcgaagaatacatcctactgatctcaaacatgaacctggacagtaattccaatatcagcggtgatatcatagagacctattgcacaaattgcgataagaagatcaagatctacattatctctacgattaaaagcccctatgatgaggactcggctatagagtccatacgcaaactggcagatgagaaccagatcgacaataaggcccttaagccgttcattagatctagcgacctgaaggacaacttttacatcgtcgacctgtacaggaacttctatagcaataaggactaccactgtcctaattgtgatagtattatttccaagtacatcttatcaaaaaacaagtgccccaagtgcgggggcgagattagctccgtggacgggctgtgcttggataaattttga

SEQ ID NO: 4357 - DNA, 837 bp, synthetic construct
  source 1..837: mol_type = other DNA
atggtggtgaagataggtatcgtcaagagtggtaatattgggacctcaccagtgttggatctactgctagatgagcgggccgacaggccaaacatcgatgtgagggtctttggatctggagcaaaaatgaaccctgagcaagttgaagacgtcgttcctaagctcgaccagttcgaccctgacttctgtatttttattagcccaaaccccggcgctccaggccccgcccgggcacgcgagctgttgagcgagaaagatcttcctgccatcatcattggcgacgcacctggcaaggggaagaaggatgaaatggatgagcagggtctggggtacattatcgtaatgtccgaccccatgatcggcgcaaaacgcgaatggttagacccaactgagatggcgatctttaatgccgacatcctgaaggtgctggcagaaaccggggctctgagactggtacagaagactctcgatgcggtgattgccgccgccgatgctggcgaggagattgagctccccaaactcatagttacggccgagaaagctgtggaagcggccggatttgccaacccctacgcaaaagctaaagccatcgccgcctatgagatggccggagccgtcgcaggccttgacatgaaagggtgcttcatgaccaagggcttcgaaaatttcatccccctcgtggcggctgcacatgaaatcgcttcggctgccgcgaagctggctcaggaggccagagaaatagagaagtccaacgacacagtccttcgaacaccgcacatgaaggaaggaaacctggggtgcaaggtggatctgatcagcaagccggtggacaaatga

SEQ ID NO: 4358 - DNA, 669 bp, synthetic construct
  source 1..669: mol_type = other DNA
atgttaaaaatcttggccgcggataaaatggacaagaagttaatcgtccgctacataatgctcattgtaggtgtgatcatcatgtctatggggatcgccctgagcatcaaagcaactctcggcacctcccccattagtagcgtgcctgctgtcctctcaattgccttcccctggactgtgggcgagttcacaatagtgttcaacgcacttcttgtgatttttcagatggttctcctgagaaagatcacgatctcccagatagctcagatgttggtgtgcgtcctcttcggatacatgattgacttcagtctgctaattcttaacttcccgaaccccacagattacatcagccaatggattctctgtatcatcagctgctttgtgctagcctttggcctgctgattgaagttaagtcggatatcaccatgctgccaggggacggttcagttgtggccatcgcggaagtgacaaatcgggactttggccagatcaagccatttttcgacctgaccatcgtatccattgccgccatactggccttggtgttcctgggccacctggagggggtccgagagggaaccatattcgcagctattgtggtcggactgatcatccagttttacgacaggatcttcgggtataatattgacgcatatctggctgattga

SEQ ID NO: 4359 - DNA, 315 bp, synthetic construct
  source 1..315: mol_type = other DNA
atgaagaaggtaaagattaccgtgatgaaaaaggcccggtacgacgacctcatcgagaaatacgaaaacccactggagcacgaatgtgaggtcgagctaggagatgtcttcatcgcaaatggctgggaaaaaccggaggacttctgcagctcggcgtgggatagcatctctccctttgtgctggccctctccagcgggggtgaagacctttatgatgggtggatgaaggacaaaaagtcagccatgatatcctgcaacgatggctttcgccctgtgagtttctacctggaggcaatggacgaggacgctgattga

SEQ ID NO: 4360 - DNA, 1125 bp, synthetic construct
  source 1..1125: mol_type = other DNA
atgaatagtaaaaacatcgctattgccggggagatcaccccctcaaagaccatcattcccctcattcagaggctgaacgagctggataaggaagataaactgaacttcaaaataaacaagatctacgggctctaccatggggagagctctaaattgcttctggagccgtattgcgatgagctttatgatataggtcagggacggcgaggccaaaagaagaactcgacggctaaattggcctacctgatctcccgggacatcataaaggctttcaacgctctaaaaggcaataacatagacctcctcatcactgcaggcaatgcgggggatgtacgcaagtccattgtcgcagccaacctcctgaaaatcccgatcctgcacatagagcaggacatctacaaccccattgaagttatctcccacgccaatctcgtcaccgttcccaaagaggattacaaggactacttggagaggaaatacaatttaaagaacgtggcatctattgacggctatcctatggccaaatatgtggacaaccacatcaaagacaacaatctgattgacaaggaagagatctacggcgaatatggagtcaaggaatttgtgctggtggtgctgggcggggacctgaaggacgacgagattgagccactgatacgcagcgtggaacagttgaatctcaagactctcattgccccttataggttcgacagaaacctggtggaaagccttgtcctgtcaccaaacatcaaggttctcccacagtacgtggacctgttaagctttatgaatgcagcctcccaccttatctacgccgcgggaatgggactcacaatcgaggcgggtgtcttcaacatccctagcctaaagattgaaggctttcataaaacccacgggagcgtagacctggcacgggaacttaacattcccatcgtcaaaattgacgagatcccagatgccttcgagaagctatccgctcatcaggataataatctggtgaaaaacagtgaaatcgccattgataagttggtggatctgatcaatggcttcgatgagaatggtctgcaaaagagcggattcaagtcaacaaagcagatctggaacagtcgtaaggtgtttagatga

SEQ ID NO: 4361 - DNA, 1182 bp, synthetic construct
  source 1..1182: mol_type = other DNA
atgaacttagagaacaaaagcattgacctgttgaacccattcatcatcatcgctatggtcattgtattcataatcattgccctgcctatgtggtatgcttaccaaaaactgcccagtcccagcatggacttatttctctacatagggctcggccttattttcttcatatttgggattctcatcagcaatctactgctaaacagatttttaaaaaaggatctctctttggattcccttaaggacactatcaaaattagtataagcaaaaatccaaaaaagctgtcgatcttcgaatcctacagtcgcaaggaaatgattctggtcatcatggtgctgatcgggatcatcctgcagataatcaacatcgtgcggctgggagggataccactgttctcagccacactaaaggctgaggccgccggaaagatctggctcgcatcctacataatcttcctgccctttattaacatcctcctggccgaatttaaccgtgattcacattatctgttagtatttctgggcttgctgctgtttacgttgaccggctaccgaaccaccccgattgccatcgtgctgtctatcttgattaccctctattacacgagaaacataaaattcaagtatcaggtcctatttctcgggctcttcctggtcattgcagtggctcttctgctcgctatcgggttcatcgcggttcaggcaatctcgtggcagcactggtccctgaatcctatcgaacttgtgagttacagggcggcctttacactgaatgtgctgggccatgcaatcagcaatcagttcgccactgccggaaagcttttctactccaccctgaccggctttttcactcacacagaccctagggttctggtcggtcaggccacgttgggccgcaaccactcaatcacatctaccatcttcggcccggcccttcttgactttggcctcattggaatgtgcattcaaatgctcctgatcggattcattctgaagaccttgcacagcattcagaagcacaagaaggaggtttacagcgcattctatggaatcctgctggcacagacaataatttggatcgagacaggtcccactgatgtggtggtgtggatcttctatttgattgccattgtgctcatggcgcttttctttctgaaaggttccagccgggacctcgaggcttga

SEQ ID NO: 4362 - DNA, 16956 bp, synthetic construct
  source 1..16956: mol_type = other DNA
atgaggaacaagaagattttcatttttactctgatgattgtcatgctattatcgcttgctgcagtttcagcaaatgatctggataatcttgaggtggacgatggcaacgttgtgagcacggacacggttatcaatgatgtgcccatggagagtacgagcagtgataagatcgccctgaacgtagactcgacccagtctaatactaccgagatactgaatgagaatgaaataataacaaacaacagtacgctcagcattgatttgaatgagtcgatcacaaatgagatcagttctgaccacgaggactcataccaggccgacagtaatcaagaggattcctatttcacgtcagatggaaacatttatgttaaagtgaaaacttccatgcttaaagcggacggcgaccagatctattatatccaccccgccgggagcccaacagcaaccggaactcgcgacgaccctttggatagtatgaatagcgccctgaatctctttacgtcagatggaacacacaccattgtggtgatggatgggatttataaagatacctactatgactataacaatacagacgtagacacaaacctcagcaacctgattataaagtccgatgaaggggcaagtccacacttcaacctgagcacgtcagattaccgaaggtctctgtattgggcctttacaggagagaacatcacgatagatgggctcaagtttactgattcacagtacggctcttttaatgaggatggggtgtacaaataccatacagtgctgagattcattaattccactaatgttttggtggaaaactgtgtgtttgacaatgacggatacctgatcaatgctactgattcaagtgatgtggtgatcaagaattgtaatgtgtccaatagtaatcgatcaaatgtgtttaacgttttgaacagtagcttcactgtgcaggattcgaatctttccaagattcgggacagctacattaccaactcgtccttcaagctaatcaacaacaccatctgtaacaatgtaaattcaaacctgttcaccgtgaaaaactcatccctggatattatcaacaacacgttcaaggacagcaattattcatcatattatgtgttccggatttataacaataacgaaacctacgcgaatttcactggaaataatttcaccaacctgacaggcacagattacctgctgcaggtcaactactacgtgaacgataataccactgtgtcatttgtcaacaatagcctgaaagacgtgagtttaggtctcaatattagatactccaatctgactatggacggcaactcctttgacaatctgagtctttcgtcccggccctcttactctggcatcagtacaagttactcaaatgtgtccttcaccaacaacaatttcaccaactctgactcttacatctaccttggctatggagtcaatgcgacaatcgagaacaacaactttactgacaatatcccatcatactatgggcttctccgagccgaggggaacagtcatgacatcaaagagaacaacttcacaaacaacaagggcaattgttcaattattcaacactactctggcaatgctaccattcatggcaatcacttctacaacaattccctgaatggctgtggtcatgttatcaatgtgacgagtacttcaggttctgagatttataaaaacgactttgtaaacaacagcgccgacaacgggacggtctatctctacggaagctctaacgtgcacgataacaatttcaccaataacagcgtcaccgggctcggaggagctatctattcctacagtttttataatattaacacgacaatcaaggaaaatgtcttcgatggaaacaatgccagctttggtggtgccatctactatgaaaactaccccagctataataataagagggagattgtgaacaacaccttcataaacaactccgctgactttggtggggcaatctactcgaataaatcaatcaacaacatcatcgatgataatgactttataaacaacagcgctcaaattgggggagctatctttgtggactatctatacataaacgatttcagatacaacaacaccaacaacaccattagcaacaacttgtttgccgagaataacgcgcagagtggtggagccgtggtgctgtattcacagaacagcaccgtggaaggaaaccggttcatttccaacaatgccagtcgctatggcggcggggcattgattaccagcggaaataactctatcatcgtgaacaacacctttgccaacaacaccgctcagctctacggtggtgctatcggaaccaacgactctaagataattgacaataagttcgaaaacaacagtgcctatcaggccggcgcgatcctgacaatcaactccacaattcacaacaatgatttcgtgggaaatgaagcaactcgaggtccggccatagtctacatagacgactttaattacacggcactcacttactacacttataactgcagctgtgagaactgcagcaattgcagtggatgcagcgactgtgaatgctgtgtgactacgatagtcgacccagaaactggggatgagataaaaatcatcaactgcagcaactgtgacggttgcaattgtacttgcgagaactcgaccgtcacggagcacaatataaccttactgtacaacaataccggcattgatatcgacgaggacgtttacgcctaccatgaaaatcagctcttaagggttgccaaggaaaacaacggaatgtattacctgtatgacaatgttaacgtgacaagcgctgaaaactacacttattgggcgtattgcatagagcagaacaactcctacccttggctagggaatggaactctgggggtgcacgtggacgatctctactttgtcagaaacagtctcgacgactcttacgtgggggattaccttaagatactcatttcgtacttctaccataatcttgatgaggacaagatcaatgtcaaggagtacatctacatctttacagacaccgactatcggagcaacaatgaccgcatcatccaaaagattattaagctcgccaataatgagtcaacagttctggagaatgggaacaactggataaacggagtgtacaactgcctcgaattttcaacattcatcaaccctaccacaaggcagaacctgattctgatcaatggatgcgaacctctagacaagcctgactttaacatcacgaaaaaagccaatgctacacacgtgaaaaccggcgactacatcaactataccatccttgttacaaacaacggaacatgcaacctgcacggtctgaaggtgactgaacgtatgaacagtatgctcatatacatgggcttcgatgacgtgagcgataattggacccagacaggggatatggaatggatgctgaaccgaaccctgaaggtcaacgagtcggcggaactgcacatctacttcatgacaaacaaggtgaccagctataccaacattacaaatgtcattgaggccagaagtgatgaaagtgacacaaagatagcagaggagcatattgaaaccatctacccgaaactggtgtaccgaaaggtcagcgtggaccccgttgcctatccagagtccacaattaggttcatcctgctcgtgaagaacataggtactgccaatgcctacaatgtagccattgaagacagtggctttagctcatcccagctgctgtaccaggggacctggtccaactacaagggaacctggtataactcgggatctagcgcaacatcaaccgggcgcttcactcttaatgggtatttggcgcccaaccaggaggcgggggtgtacgtttcctttaaactgaaggagggtgtcaaagggacaacagtatccaattccttcaatgtctacttaaacaacacttgggatggaagcgcttccaattttacaagggtggtctcttctgccatgaaggtggaaaagctgtgggtcgacccccttcctattgcaacaatcggcgatgaggtcactttcgccatcaatgtcagcaatgtgggagaggccaatctgacaggagtctatgtagaggacttcttcccaagcggcttggagtacattagattctataacaccgacgcccacaactggacgcattacgaaaccctcgacggcacccataggttcatcttacaaaacaccctaccgaacagtcagaccagcaggacactttcgtcctccatcatttacgtggtattcaaggccaatgagataggcgatctcaccaatacagccattgtcaaaagtgactacactgaaaatgtcactgataatgaaacaatcatcatcagtccctacggaatgaaggtggagaaattcagcaacaacccgatttcacaatctgacaatcaggtgtcatacgtcatcagggtgacaaacacaggcatctacaacttgaccgatgtgtacgtcaatgagagccagaacgagtacatggtttatgaccatttcgaggatagttccaacaagtggatctataacgactcaggcgacagcccacgttgggtttacaatggcagcctggagaataatacctattccgacttcatcgtctattataacatcactaagatccccgaaaacggactgatcaagaacaccgtgagggtgtattcaaacgagactgtagagcggaatgcaagcaatgaaaccaaagtctacaaattatccctttggaaggtgtccaacaatcccgtttcccgcctgggagaccagatttcatttaccatcgtggtcaaacacgaatacaatggaaattcttatgacaaggacctttatctggacggcgtcttcgttaaggaactgatccccgacggcttgacctacgaccactacgtggacgagagcggcaaatggtcctatgattacaataccgacaactgggtgtatagcggtacgttagtgcctaacaccgagaccaactttaccctcttctttaacgtcaccaaaatggagaacctgacaaatgtggtgattctcgggaccaatcaaagcaataatgtaaccgtcaacaacagctccgacagccggtactacagcatgctggtagacaagataagcttgaacgagaccgtcttcaaaggaaacatcacagagtttctaatcaaggtgacgaataacggggacctgaacttgactaatgtcactattcgcgaagtcattcccgatggattggtctacgtgggatatctgaataaaaccggcaagtggatttatgaaggcggaaatggagcctcgagcgacgatcagccaatgtggacttaccagggcatactggccccaggagaatctgcagagttcatcatcctattcaatgccaccgagacaggcacatttttaaatatcgtgtatggcacctctaacgaaaccgaggaatttgtcgcagaaaacactacaaaggttctgaatcctctcctttacgtcgataaggtcaccctgaatcagacagtttaccgcggggacttgactgcattcgagatattcattgtcaacatcggtgattgcgacttacacgacctttatattgatgagatcttcccggacggcctggtctactacggactcgtggacgatacaggttcattgtcctatgatgagaagacgcaacgtatcagctttgacggaacattgaaggttcgcgaaactttggtattcacagtcattttcaacactacaaaggtaggcaacttcaccaacaaggttgaggtgggctctaacgaaaccaagaaggagtacgctaataatacgacccaggtcctggagaaggacctcaacgtcacaaaggtggcaaacaacaaaaccgtcgtcaaaggggacaagacagagtttaccattgacatcactaatgttggcgaatgcaaccttacaaacgtgtatgtatacgaggagtccttcgagggactgtcctactatgcctacatcgatgagacaggcaaatggtttaaaaacggcaataaatggatctacgatggtgtcctgaagcctggcgaaagcgtgaagttcactgtggtgttcaacacaaacgagacaggcaactttaccaacatcatcgtggcaggtgccgatggcatcccaaataagacggcaaacaacacgacagaggtgctcatttgcgacatctccattgaaaagctcacacttaacaagaccgtgataagcggagaggacacccagttcgccatccgggtgaagaacatcgggctgggcaatcttactgatgtgaccgtaacagacagcttccccgagggcttgacgtacaagaccttcattgacaacagcggaaaatggtccaaaaacggcaataaatggatttacgatggggtcctcaaaccaggtgagtctgccgaatttatcgtggtatttgctaccaatcaaacaggtaatttcacgaactttgtaagtgtgagcaccaacgagaccaaatccaagaacgcttccaacaaaaccgaggttgtcctggcagatgtggaaattcagaagatcaccctcaataaaactgtgataagcggggaggagactctatttgagatagtggtcacaaacaagggcattattgatctctccgatatcactgtcactgactccttccccgaaggcctgacttacaagacgtacatcgacgaatccgggaaatggtctaacagcggcaacatctggacttatgatggagtgctggcccccggtgagtctgctgggttcattgttgtgtttgatacgaatcagaccggcaatttcaccaactttgtgtctgtgaagacgaatgaaaccaaatccaagaacgcctccaacaaaaccgaggttctagtggcggacatcgagatccagaagatcacactcaaccggacagtcatcagtggtcaagagaccatgttcgagattgtggtcacaaacaagggactggttgacttgtccaatgtcattgtggctgacagcttccctgagggcctgacctacaagacgtatattgatgaaagcggaaagtgggccgtcaacaataataaatggctgtacaatggggtgctcgctcctggtgagtctgccgggttcatcgtggtgttcgataccaatcagacgggtaatttcactaactttgtgagtgtgagcagcaacgaaaccaaaaccaagaatgcttccaatataacagaagtcctcctggcggatatcgccatccagaagatcacgctcaaccgcacagtggtgagtggccaggagaccatgtttgagattgtggtcaccaacacagggatcatcgacttgactaacgttgtggtgactgacaccttccctgagggcctgacttacaagaccttcattgatgaaagcgggaaatggtctaacagcggcaacacttgggcgtatgatggggttctagctccaggcgagtctagtgggttcatcgtgatatttgacactaaagatccaggcaactttaccaacattgtgagcgtgatatccaatcagacaggcaataagtctgcccgcaacattacggaggtgatcgttgccgatgtgggcatccagaagatcactcttaaccggaccgtttatagcggggaggagactcagtttgaaatcgtggtcaccaacacaggcatcatcgacctgacgaatgtggttgtgacggacaccttccccgaaggcctgacttacaagaccttcattgatgaaagcggtaaatggtccaacagtggcaacaaatgggtgtacgatggcattctcacgcctggcaagtctgcgggattcatcgttgtgtttgacactaaagatatcggcaactttaccaatgttgtgtctgtaaacacaaccgaggtagggcccaagtactcctataatatcactgaagtaattatcaaggagaacaagaccaaccacaccaatgaaacgcctccagggcccaaccccccagggcccagcccacccggtcccaaccccccagggcctaacccccctaagcctcacgttcccacccatccgcacaagcctatagttccaactaacccgaaccagcccaagttggtgaagtccaacaagaatccgttatctgacgtgaaagcaggtaaccctatagctctgctgctgatcgtactcgtggtgcttggttctgtgccatttgcatcctgcgatagcggggggactagaagacgtagaaaaaccaaggagagaaaagctgcgaaacataaggagatcgacaagaagaaaggcatcatcattctgtccggatgtctgctgctgatggtttctgtgtcggccatttcggccgctgacacgggggatctgggctatgacgatgctggcagcgacgtggctgtgcaatcagtaagtcacgaaccggctcagtactcctactcaactagcgagaacatggcctatgacagttatgactatggcgactacaatgattacgggggctatggcgactatggcgattatggcgattatgacggctacgacacgtacaacgactactacatcctggacaacaacgagaccgtctatgaagatggcatggaaaattcagctgatggaaacagcgccgacgcagctaacggtcaggcaaatcaatatgctgaagacgggtctgacatggaactgtacagcatcgatgacgaatcttacgattccaacgacaactacgacaattacaaggagtattcctatgatgatgattcgtcccgcgaagatgcctcttcaattgtacggtataatgactgtaccgtaaacggcgacaataaagtcaaatcgatctacacctcttcttcgctcgccgaaggggagggcgttgtggtgtacgtttccctggacgggcggacaggtgctgaggggacctacgacgatccgctcctcactatcggggccgcactgactaaactgtccaccgtcagttctacggagaccaaaaccataattttgaaaggcgggaactattcaggaaacaattatagatatttatctactcgtcttaataacttgatcataaaggccgaggacggcgccgaggtgaatgtggatctgaggggaatgaatcagaacagtttgtattggaccttctatggtgataatgtgacggtgagcggcatcaactttatgaatgccaatatgacatcgtacaacctgaacaattaccacgcggtactgaaatttatcaacagtagcaactctcgtgtggaggactgttcattcagcaacctgaagtcctatgggatcttagccggaaacagtactgatgtggtaatcagcaactgtaatttcacaaacggaagctcgagaatgttcagtataaccaattcaagtgtcactgttgaagactcgatcatgaagaacttctctaccagctacatccgcaattccaccttcaccatggtaaatagcaccgtgaccgatttcaacgatgacgacatctttaacttcgcaaacacggacctcgatatcagggacaatacattcaagaatctgacattcccaaacaaaaccaattttcagcggtttggagtgttctacgcctgggatgacaatgctggcatcagttataatttcataaacaacacctttgccaatttcactgggacagatgcgtacatgatttaccggtcagcatcctcttcagtcaaacccatgtgcaaagtaaacttcaccgacaacaacgtgtcaaacgtctctgtgggcgtgaacatctattatggcaatatcacggttgaaaataactctttcgaccacatgagtccggccaatacgctgcggttcagctattcaaacatcgacatccgggataacaacttcaccgattctaactctacccatgtttattcagatcggtgcaacgggacaatcgaatacaataatttcatcaacaactctgcactgcctgtgtcagccgagtgggggaatttgaatatttcctttaacaatttcactgacaataagggcaacttctctgcaggagccatccaatcgacgggggtcgtgaatatctttaacaatactttctgtaacaattccgcccgcgttggtgcggtgaatgtggccagcatcagtagtaacaaaaccatttacaataacacctttgtcaacaacaccggtgtttccgggaccctgtatgtcaatggcaatgcaacagtgcatgacaacagattcatagacaataacgtaagcgaaaatggcggggccatctacgcagcatatgataatagctataacaattattataatatctcggctaatattacggacaatattttcgatggcaatattgccaataagggtggtgcaatctattatgaacagtacaatagcgcttacggccttgataacctggcaaacaacacatttgtcaacaacaaagccgagtacgggggggcaatctattcaaataagacagtgaatgtcacgatctccgagaacgagtttgtcaacaacagtgccaccattgggggggctatctttctcgacaattacacctctgcctttaacaccggaaccaacattacgctaaacaatttcacaaacaactcggcgcagagtgccggagccgtagtggtgtacggaaacaacaccaatgtgatcggcaataactttgtggggaacaatgcgacacgctacggggggggtgcccttgtgactgatggggctaatgggttgatttacaacaacacatttgaaaacaacaccgccttcctatacgcaggagccatcggcaccaacaactccaagatcatcaacaacacgttcactaacaacaacgcctatcaggccggagccattctgaccatcaattccactatacacaacaacacattcagtggaaatgacgctacacgcgcgcccagtgttggctatatcgacaattacaactacactgtgtcctcttactacgtgtactactgtagcagtgaagattgcagcggatgcactgcatgcgaatcctgcaccagtacaatcatcgaccctataaccggggcggaaatcaaggtgatcaactgctctaacggtgatgttcccgagtgcatctgtgaggattcagtggcaacactctataacatcagcctattgtacaataatgaaggtctcaatctggatgaggatgtgtacgtgtacgatgagagcaccattctgagagtggcgctgaacaataatgacatgtacttcctatatgaaaacgcaagcattcccaacgccagcgagtaccactactgggcatactgcattgagcagaacaactccaagccatggcagtggaacggaactacgggggtgctggtggatgacctgtactttgtgagaaacagcctggacggctcttacgtgggagattacatcaaggtgctggtctcctacttctactttaacctggacgaggacgtctataacttgaaagattacgtgtatgtatttaccgacacggactaccgtgctaacaccgatagggtaattcgacgagttattaacctgacagaaagagaggacacatctcttgtgaacggcaataactggattaacggagtttataactgtctgtccttccattcctttatcatgcctaccacaagacagaacctgatcctcattaactcatgtatggccatgcagacccccgacttcaatccgcagaaaatagccaacaaggagaacgtcggcaccggagacattgttaactacacagtcactgtgtacaacaatgggacggtgagcctgcacaatgtgactgtgaccgagaggccaaacagcatgctgacctacctatcattcacggacttccgcaatcagggatgggtgcagactggggagatgacttgggtcctgaataggcccctgaaggtccatgagaccggtacattcaatataaactttagggtaaataatgtcacctatctcacgaatatcacaaactacattgacgtaggctgtgatgaggtgtcaaacaaatctgcgttcaccaggaccgagaccaaatggccacgcatacaggtgcagaaaatcactttggaccagaatgtgacgcccggttcgacggtgagattcttgctcctcgtgaagaatatcggaacccttgaagcaagcaacatcacgttggtggacaattttaataggaacgaactcgagtacgaataccggtgggattcatacaaagggaattggtccggaggccacgggtggggggggagcagctcttcgtggcacgtcgacacactgtacttgaaccaagtcctctatccgggtcaggaggctggagtgatcatctacttcaaggtgcctaacaatgtaacagtagggagcgcttacaactccgtaaatgcttaccggaacgggacatctgagggttattcatccaattacacaatcatacagcggccttacttttccatctggaaaaccctggttagctcaaaaacctcaaccataggagaggaggtggtattccagatcaacgtgcagaatacaggttacgtgaacctcactggtgtttatgtggaggacatcctccccataggactgaaatatcttaggttctacaatacagataaccataactggactcattttgtggacgaggacggaaaacatcgcttcctactgcagaacacgcttcccacctattactccgacagtcagaactatgtggcccgactctacatcgtctgcaacgcgacagaatatggtaattggtacaaccttgccacaggatacacagaacagaccaataagagtacctctcaggcaaatgttacaataattccatttggggtatcaatcgagaaagtcagcaataatcccatatcccaggtgggggaccaggtctcctttaccattagggtacgaaacacaggaatatataacctgacggatgtctatgtaaatgaaacaaggaactcctatatggtcttcgaccactttgtggacaattcaggcaagtggattctcaatgaatcttacgccacttcaggcgtgcctagctggaactataatgggacttttgaagtaggagctgtcagcgagtttgacgtgttctacaacgttactaatatcaattattatggaaacataacaaataccgcgtatgtctcttccaaccaaactaccaacaggtcggtttccaatcagaccgctgcctataatatcaaggtgcgaaaaatcagcaataacgccacagcaagggtgggcgatcaggtgtcgttcacgatccagatatcacgggacggctattcttgggagagtcctttctccctatacggcattcacgtgaaagacctggttcccgatggcctggtgttcgaccacgccgacaacagttactattggatttataatgagtccgatgagacatggtactatcgttcggggctgacagcaggccgcaccatcagccttacactgtactttaacgtgaccaaggccgccaacatcaccaatgttgccattgtcggcgtcaataacagtacagtgaaaaccgccaataatacgacaaacagtatttaccacaacctgcaggtggaaaaggtcactctgaacgaaacagtgtacccaggaaatatcacagaatttctggtgcgggtgaacaacaccggtgacaataacctcacaaatgtgttcgtgaaagaaaacattccaaacggactcgtttactatgattacatcaacaagacgggcaagtggaattacacggaggatgatgacggacctatatggctgtacgacggcattctcgctccaggagccttcggggaatttattatacggttcaatacaaccgtgcctgggatctttgtcaacaatgtcgtggccggctcgaatgaaacttccaacaagtccacggagaacagtaccaaagtcttgggtccaataatctctgtgggaaaaatcactttaaacaagaccgtttatattggggagctaactgaatttagaattaaggtctctaacgatggggactgtaatttatctggcgtatatgtggtggaatacatcccagacggccttaagttcgttgaatttaaggatgagagtgggctgtggacttacaatgaatcaagccgcaccttctactacaatggaattttggaacgggatgattccctggagtttgtcgtggtgtttaatgccacccgggcaggcaacttcaccaatgtggttcacgccggatctaacgtgactaacgaatccgtggcaaacaacactactgaagccctggatgtacgcatggacattcagaaggtcaccctgaacgaaaccgtgttcactggtcaggagaccggttttgtaatcgtcgtttccaataccggactgaaggacctcaccgatgtccgcctgaaggaaatttatccagatggcctggtgtactcccgcttcatagatgattcaggcaagtggtttaacagaggtgattactggatctacaacggggtgctggccgttggagaaagcacgaacttcacggtgatcttcaacacaaccaagagtggcaccttcaacaacacaataattgtgagctcgaacgaaacaggtcccaagaacacttcaaataccactaaggtagtggtggccaacgttaccgttgcgaagatcacccttaatgaaacggtcatgtccggcgagcaaaccagcttcgacattgttgtcaccaacgacgggatctacaacttgaccggggtggtcgtgaccgacgccttccccgaaggcctggcctacagcggcttcgtggatgcttccggcaagtggatctttgatgattccaaaggcaatgcttggatttataatggcacgttggcgccgggtgagtctgcaagctttacagtggtcttcgacaccgacgaagtgggtgaatttactaacatagtcaaggtgtccaccaaccaaacccaggataagaacgcgtccaatatcaccaaggtgatcaagctcatcccaaatgtcgcaatccagaaggtcactcttaaccgaaccgtctacagcggagagcagaccagcttcgaaattattgtgcggaataacggagagatgaacttaaccgctgtgaccgtgacggacgccttccctgagggcttggcctacagcggcttcgtggatgcttctggcaagtggatatttgatgatgcgaagggcaacgcttggatttacgacggcattctggctcctggggagtctgccagctttaccgtggtctttgacaccaaccaaacaggcaacttcaccaacattgttaccgtcagctccaatcaaactaaagagaaaaatgcctccaatatcactgaggtgatcatcaaatctgttcccggcatcgagattataaaaatcacaatcaaccgcaccgtgtacagcggtgagcaaacctcatttgacatcgttgtaagcaatgatggtaacgtcaatctgagcaacgtgactgtgatcgactccttccctgaaggcctcacctacagtaacttcattgacgacacggggaaatggtttaacataggcaataagtggatctataatgggattctgctccctggggagtctgctgggttccgcattgtctttgacaccaacaagtcgggaaacttcacgaaccacgttaaagtcacaagcaatgagactggggagaaaaactcatccaatgttaccgaggtaatatttgctgatgtcgctatccagaagatcacgctcaaccgaaccgtctacagcggcgagcagacctgcttcgacattgtggtgactaatgtgggtgagattgacctgactaacgtggtcgttgccgactccttccccgagggactggattacagcagttttgtggacgaaagcggcaagtggatctttgacgatgctaagggcaacgcttggatttatgatggcattttagctcccggcgagtccgccggctttacagttgtctttgacacaaacattacagggaacttcacaaacatcgccaccgtgagcagtaatcaaacctccgagcgaaacgcttccaatatcactgaggtgatcaagctcattccagacattgctatccaaaagattacccttaacaggactgtctatagcggcgagcaaacctgcttcgatatcgttgtcactaatgtcggggagactaaccttactaatgtggtcgtggctgacagcttccctgaaggactcgattacagcagtttcgttgacgagagcggcaagtggatctttgacgagactaagggcaatgcttggatttatgacggcattctggcccccggcgagtccgcaggatttacagtggtctttgacacaaacctcacaggcaacttcactaacctcgctacagtgtcctgcaatgagaccgaggataagaacgcttcaaacattacggaggtgatcaagctcgtgccagacatcgctatcataaaggtcacactcaaccggacggtctatagtggccagcagacgtcatttgacattattgtgtctaacgtcggtgagaccaacctgacgaacgttgtcgtgactgacactttccctgaaggcttgacctataacagtttcatcgatgagactggcaaatggatctttgacgaagaaaaaggaaatgcctgggcttacaatggtacgctggcgctgggcgagtatgcaagcttcacagttgtcttcgacacaaacctgacaggcaacttcactaactacgtaagtgttacaagcaacgagactggagagaagaacagctccaatgtgactgaggttattaaagtgcctaagaacgacactcctccggtcccggttcctccagagccagtggtgcccccggaaccggtaactccgccagagcccgtgatccccaataaaaaagttcccagacatgagcttcccagaaccgggaatcccctgatggtcttactcattgcccttgccgcagtgggattaagttcggtgagacgtaaacgggagtga

SEQ ID NO: 4363 - DNA, 1509 bp, synthetic construct
  source 1..1509: mol_type = other DNA
ctcgggctctttagggtgaaaagaatcccggatgaaaaacagataaagctgggcattcgcactctggattttaacatcccagaggatcatatctctcgatttgtgggggatttcattgacgaatactaccctctgttaggaatcaaggagaacaagaagaagaaagggcgggacagttttccggtgaaggagatgcttaagctcctgatttacgctaagatcgagcacattgatagtatgaggttcctggcggacatggtcaaataccacgacgtgtataagttcgtgggaaacggcatttgtccctcagaacggtcccttcagcgatacagggagaagtacggcaaatattacaatgaattgctcaaagccaccctgaagaaggctagcgacgtggattacactgacttcaacgaggtgtccattgacgggaccatcaaaaaggcgtacaattcaaaaaataaggtgatcacagagaaagaaactgagattctaacccggtacttcgaaggcggccgggttagtcaggaggagctagataagctccacaagcccgcccgagagatcctcgaaaataagaagatcagcaaccaggagaagctctacctcctggatgacattaaaacgcagttcacgctgtctggtcagaaatcggtgcccgtaaccgacatcgaagcccggtggatgaaaagcaagaaggggaactcacagatcagctataatatccagtctgccgtcgactacgatacaaaaatgatctgcgccattaacgtcgtacaagcccccacggaccattaccaattgcctaaaatcgtggataaggcaataaacaacacaaacgtgatacctaggttcgtcctggccgatacaatctatctgaatgaagaaagcctttcatatctggcggacaaccaaattaatggagttattccagacagaaagcagtccaaggagaaaatcgggagactgaacaagaacccctatcacaaggatcacttcaaatacttccctgagattgatgcatttgaatgtccagaaggccagatcatgtactttttcaacaagtacactgagaagaatgacgacttggacaagccagacaaaattaagcgcctgtattccaactatggtgcttgcaaggcttgcaattgccgtgagaactgccttagctccacccagacccaccgcaccatcaccgaatacggcggaagtctcaagaaggccatgtgggagaaaatggagactgaggagtatatggaggagtatgcaaaaaggtcctcggtcgagggaccctttggcatcctgaaggagcaattccatatagaaagcgaagtagtgattggtaaaacaaagacagaggaaagaatcctactggacgccgtggcttataatctgatccgcttatttaacctggagcaggaaataaagaatgacaaagaagatatagttgacttctgtgagaaaatcagcgtccaggagaaattggaggtccgcgcaaccatattttga

SEQ ID NO: 4364 - DNA, 690 bp, synthetic construct
  source 1..690: mol_type = other DNA
atgctggagaaggaagtgaaacagtataaaagggggaacagtttcacttaccggatcgatctctctaagaaggacaacttcgaaggaggcgagaagataatgatctttaggatgagcgaatacgaggcttacctaaacgagatagaagatctaaagtcgcagatcgaggagaataataagaccatctccgaactgcgggaatcccgcagcgaggccaactccaatatcaacaatgtagttgacaaccacaacaaggagatcgcagataaaaacaaggaaattatggatctgattgaggagaacaagtcagctatccagaaatgctatgatattattgaggagaaggacaagctcctgacacaggccaacgaagagattagaatcgagagggaaaaaacagatgccactcgcaaacaggcccaggaagacattctcaatgagcgaaagcgacatgacgagctgacgctggagaaggataaacaattgaaacttgtcaacgagcaactgcaggacagtctcaaagacatcgcctacaaggataaggtcatcaccgcagaccggctgcttatcgaaagatacaaaaatagaggcttcgtggatcgtctgctgaatcgcttgcccgacgacagcgacctcaaaatagacgacgtgaaggaaacctatgtgttagaggcggagaagaaggaatga

SEQ ID NO: 4365 - DNA, 138 bp, synthetic construct
  source 1..138: mol_type = other DNA
atgatcctgagtctgcacctattctgctatgggtacttcttcatcgactttgatgatatcgtgctcagcctgcatagcatttgtaacctcttctttatagactttgacgacatagtcattgcctccatcggctactga

SEQ ID NO: 4366 - DNA, 1443 bp, synthetic construct
  source 1..1443: mol_type = other DNA
atgaaagtcgtactggctggcactggaagcgcagttggcaaaactacaatctcaaccggaatcatgaaagcgctgagtgatgaaaatgtccagccatttaaggtgggccccgactttatagatccttcctaccacacaatcgcgacaggaaatgtgagccggaacctagactcctttttcatgacggattttcagattatcaattcttttgaacgcgcccttaagaaatccaactctaatatgggtatcatcgagggggtccgcggtctgtatgaagggataagtcctatcggagatgtaggaaacacggccagcatcgccaaggccatagacgccccggtggtgctgttgatggacgcacgcagtctcgtgaagagcgctgccgccgtggttctgggctttaaggctctcgaccccgacgtccggattgagggagtcattctaaataaggtcaaagggcagcggcactataaaaaggccaaggaaagcgtggaaaagctggctgacgtgccagtgatcggcggcattccaagagacgacaagatcacagtagaggaaaggcacctcggcctggtgcctgctctcgagaaggaaagaattacacgcaacattaacctttggggcgagatcgcagaggagtacatagacttggacgcactcaaggacattatgaagacaagctccaagtctactgcccgggacaacaagaatattgcaatggagaagcatgaagatgacttcaatagagagcataccgaggccatcgacctcgaggtgaccaatgactcaaagccagggcaactgtggaaaaccggcaacaggaacaaggtcaagatcggggtggcccaggacgagatattcaccttctactataaggagaccctggaatcattggaggaaaatagcgcagagattgttccattcagtccccttaaggatgagcacctgcccgatgtggacgccctgtacatcggcgggggatatcctgaagtgtttaaaaaagagctgtccgataacaaaaccatgcttaatgatatcaacaaattccataaggaaaatcgtcccatctacggtgaatgcggagggttgatctacctgtccaaatccattgacggcctggacatggttggtgcggttccctacagctcggagatgactaataaggtgcaaggcctgaactatgttgtggccagggccaaccaggacaacctcatatcaaatgagggcgatgtattccgagcgcacgagttccactataccaaactcaatatcgataaaacggattctctggtgttcgatgtcttacgagggaggggagtgctaaacaacatggatggggtctgtgtgaacaacactctggctaactacattcacattcacgcttgctcgcatccgaacttcggttacaacttcaccattaacatcagtgagttagatatctga

SEQ ID NO: 4367 - DNA, 1116 bp, synthetic construct
  source 1..1116: mol_type = other DNA
atgtcaaccctggagaagatgcaggtgctggcggactcagcgcagtatgatctgtgcgactacgtgagccactcgaagagcagccaagtgaacctgccaggtatctaccatgcaacaggccacaacggatgcaagatccccctctttaaaacactgatgagtaataagtgcaaaaacgattgtaaatactgcatcaatcagtccaaacgtgatttcacccggctcgagctttccccggaagagcttgcaaaggcctttctccactactacaacaacggctacgtaaacggcctcttcctgtcctctggtatctctaatgaaatcgatgagacaatgaacaaaaccatcgagaccgcccggatattgcgacgcgactatgggtaccaggactacatccatcttaagattattccaggcagtagcaaggattcaatcaaaagggcgatgtcgctggccaatagggtgagcctaaacatagaagctgccactaaggacggcctgagtgagattacctcaacgaaggactacaacaaggacatcctcaagagaattgactggatgcatcagattgctaagaaaaatcctgattatgccaaatccgggcacaccactcagctcattgttggagccaacgatgaaagtgattacgagatactaaagcgaatggacagcctgtatcgcaaggctgacctgcggcgcagctacttcagcgccttctcccccgtggagggaacggactttgagaaacgggaagcttgtagcagtgatagaactgcccagctctaccacgcagacgccctcttgaatgactataagtttaaggtgaaggagctggtctttgatgaagacgataagctgttcctgaacgaggaccctaaaatcttggcagctcgggaaatggatatcttcccagtggaaataaatacagccccctatagggagctgatcagagtccccgggatcgggccgaaatccgcaaggagaatcatgtccattcgaaagaagatgcctttcaaaaagctggaggaccttcagaaattaggagtcgttattaaacgcgccgagccctatattcaattggaaggcgcttatcaaaactctttagacaattactga

SEQ ID NO: 4368 - DNA, 216 bp, synthetic construct
  source 1..216: mol_type = other DNA
atgagtctggaggagattcccttcgaagagcagctgcggggcgtcatcctggagggagagatcgaacgcgccgaactaaagggcgtggaaaaggggaggaacataatcatcattaaactcttggaaacaatgaatccgcaggagatttcagagagcctggaccttccactggatacgatcctcagcatacaagagtcccacaccaaaaacgtgtga

SEQ ID NO: 4369 - DNA, 888 bp, synthetic construct
  source 1..888: mol_type = other DNA
atggccgatgcgaaggacagcaaggacgataaagtttatcatcttgaggacctcctcttcgtaaagtgtctcgtgcaatttgaggagtttccccagtatattactgggtttaaggatatccgcaactcattcgacagtcgttttgcatcctcctctaacttctccagtttaaatctggactgcgtgcggcagagagaggacttgagtctgattgatatcgagcaccacagcagcatcaggccagacctgatgaggcgcaattacgaatatgccgtgaacctgtataacgtgacgggatacaccgtccatccgttcatcttttacaccggcgaccttccagtcaacaaaatcatccgcatgaatgatttcaatacatttcagccccagtggtttatccttaaggaaaaagatgggatgaaaagcctgaataacattaattacaaaaccttcaacaagatcgattggaacgttttcgacgctatagacttcgcctggatacctaaattcgatattgacatgtcaatcgaagactgcatagtggaactggccgaaatctacaaaatgatgcccgccgacaacaagttcctgcagttttgtcgggagtcactcaagttgtggacaggtaagtacataaaggacaaagagagactagataaggtcaaggagtgcctgaacatgtccgagctggaggagattcctttcgaagagcaactgcggggagtgatcctcgagggcgaactcgaacgagcgaaactaaagggcgaggaaaaaaataggattgactttatctctaaagctttgaagcacatgtccccaaaggaagtgagcaacatgttcgagctgcccatcgaatacgtcgatgagattgcaaattcgtatagcaagtga

SEQ ID NO: 4370 - DNA, 1536 bp, synthetic construct
  source 1..1536: mol_type = other DNA
atgtacgccattaacatggaacagaacaagaaggaactgaatatccccgatgaaatcaagatctttgacaccaccctgcgtgacggcgaacaggctccaggaattgccttgaccgtggatgagaaaatcaagatcgctcagaggttggatgagttgggcgttaacgttatcgagatgggtttccccacggtgtccagcggtgagcgaaaggctgctagagagatggtgagcttagggttcagcagcgagctgtgcggccttgcccgggtggtgcaaaaggatatagatgcattgattgactccgacctctcgtatgcacacctgttcatcggcacttctcccctgcacagagactataagctaaagaaatcgaagaccgagattctaagccaatccatggagatggtggagtatgcaaaggatcacggcctcaaagtggaatttagtgctgaagatgccacacgcaccgaactgaactacctgatcgagttctacaagggagtggagagcgccggggccgacatcattaatgtgccggacacagttggcatcctcgtgcccagtaccacacggactctgatccgcacccttcgcaagaaaattaacctccctatcagcttgcacttccataatgacttcgggttagcggtctcgaactccctcatcggcatagaggaaggggccaaccaagcccactgtaccataaatggcatcggcgaacgagccgggaacacctctcttgaagagctggtcgtcagcctgaaaatcgcttatggagcaaacctcacagtggatacaaccaaactctatgacacttccaatttcatcggctccattacagggataaaaatgcctcctacgaaaccgatcgtgggcgacaatgcatttgcacacgaatctggcatacatgtagatggaatcctgaagaacagcagtacctacgagccaatcgcccccgagatagtagggcacaaaagaaggatcgccctggggaagcatactggccatgctgccatcaaaagtaagctggaggagttcaatattgaagtgacccagaaacagtttgacaatatctacaatcaggtcaagaccctcggagacaagggaaaatgcctgacggatgatgacctaagatccattgctatcactgaaataggaacaagtggcaaggaatacattaagctcctcggtctgagcgtcatgacaggggagtccgtctcagcgacagcgactattaagctgtcaatagacggaaaaattatggagacttcccagatcggagtgggtccagtggatgcctctgtcctggccttaaagacactggtgcaggaccgggttaatattagccttgatgagtaccggcttgaagcgatcacgggtggtactgatgcactggctgagacctttgtagtgatttcagacgacaaaggaaacaaggccacggggagggccacccgcgaggacgttattctgtcaagtgtcattgcggtcatcaactcaatcaacaggattctggacatccaggagaactgctga

SEQ ID NO: 4371 - DNA, 792 bp, synthetic construct
  source 1..792: mol_type = other DNA
atggctaccgtggactcgttcctaccggacttcattcagaccaccttcttcagcggctacactatattcaatacagtcatctacactctcattctgctgatttttattatcgccatcatcaagatgttcaagaagataaaaatcgaccccatctccataatctatcctatcatcccctatatctttctggggtctctcatccgagcactggttgacaatggggtgtatcccaagacagtgttcttaataacccctggcctttacatccttgtgggcctgatcacaattgcaagcctgctattcagtctctttctctacaatcggaaaaacatcgactatcgctacaccctttcaatcattggagtcattctgctcatcccgaacatcatcatgattcccagattgaacattattccagtaatctatgtgttgatcacgtggatcatcgcgagttccatatttgtcctgatttcctacattatcccattcttcaaggacaggataaacctgagcataattagcgcccatatgttcgatgcttcaacgacatttgtggctgtcgagttcttcaactacagcgagcagcacgttttggccaatactctttatcaattgtttgatacgtctattacaatgtttcctatgaaaattattgtgatcgttgcggtgctctacataatcgatcagtacttcgatgacgaaaccatcaagtccctgctgaaattaaccgtctttgtactgggactggccccaggtctgcggaactttctcactatggccatcggggtgtga

SEQ ID NO: 4372 - DNA, 666 bp, synthetic construct
  source 1..666: mol_type = other DNA
atgaagtttgatccacatattcacagtgtgttttcaggggactctcgttcggaaccaatcgacattctcatccaggcccaaaagatcgggctcgacgcaatcgcaatcagcgaccacaatgaaatcaaaggctcccgactcgccagaagcattcctggagacattattgtcgtgccctccattgagatctctacagagaagggccatatgttgggactgggagttgacgagatcattcccaaaggcctgtcagctgtcgagactgtagacagaatccacgacgctggtggccttgctatagtgccccaccctttctcctattaccggcacgggctattctgcaatgtggattctaacttaggagtggacggtgtggagaccaagaatgcgcgctacatcttcggatacagtaacaagcaggcccagaccctggctgagcgaaaacggctggccagacttggcgccagcgatagccatttcttggaaagtatcggggatgcctacacagaggtaaacaccaaaggctatgattccgtcgatggcatactgaaggcaataaaacaccgccgctgtagggccatggggcatggtacgagcaacttcctggttgcgaaagaagtctttgtgaagaaggtgctgcggaggtatccgaagagggacgaatga

SEQ ID NO: 4373 - DNA, 1077 bp, synthetic construct
  source 1..1077: mol_type = other DNA
atgaagattctggctattgatgtgggaaccgggacggaagatatcctgctgtacgatacagaaaaggaaattgagaactctatgaaattggtgattccttcgccccacctgacgatcggacagatgataagcgaatcggagtctgatttatactttgacggcgtgatcatggggggcggcaaaatcaaggaccgctgtcttgaacatatggagaaaggctataagatagtattcgaagaactctccggcaaaaccatccgggacaacattgaacaggtcaaaagcttcggttttgaggtggtcaaagagggtagctttgacaaggagctcaatgaagattcaagcctgaagtacgccgattatcagaagatctccctgaaggacgtggatgtcgataagctgatcgacatcttcaagtcatttgacctcgacctggaggtggatgagctgatcatcgccgtgcaggaccatggctacagtgaggatatgggagaccgagacttcagatttgaaaagatcaaggaaaaattgccagagccccttccgccggaagtttttgcaatggaaagggaggaagtgcccgagtatttcacccgtatgcagagcgtgatccaatccctcgaggagtcaaatccagaatttaagcccgtccttatggataccaaattcgcttccctggccggggtctgctacgacaaggaagtgctaaagctcaacagtttcattgtcatggacattggaaacgggcacacaaccgttgcgtccatcgagaacggcaagatacaaggggttttcgagcaccatactagagacctgagtcctgagcgcttcgaggagttggtgctggcactggccgacggcacaattaagcacgaggacgtccacgatgaggggggtcatggcgccttcgcactaaatcctatcagcaagatagagaaggtagttgtggccggtccaaaacgggccctggtagagaaaacaaacttagactactatcacgcggctcccgggggagacgtgatgatgactggaactgtgggcctcgtcaaaagcatggagtacctcaggaaaaattga

SEQ ID NO: 4374 - DNA, 1302 bp, synthetic construct
  source 1..1302: mol_type = other DNA
atgcaatacagaattgatctgactaatgatgaagtccctaccaaatggtacaatattaatgcggatctgcccgtagagctacctgctccaaaaaacagtgaggggaaggatcagatatcaaccctgcctcaaatatttgtgaacgagtgtctcaatcaggagttctccacagagcgttatatcaagattccaagtgaagtcagagagctctaccagaggttgggaaggcccacccccctgtgccgggccagaggattggaggagaagctcaacacaccagcaaagatctattataagcgggaggacacctccccaacgggcagccacaagctgaactcggccatcgcccaggcctattatgccaaaaaagagggcatcgaacgaataaccaccgaaacaggcgccggccagtgggggactgccctgtgtctggcagcttcaatgatggacatcgagtgtacagtctatatggtgagggttagctacgaccagaagccattccgcaagaccatcatgcagctctacgacggcaacgtccacgcctcccccagtgaaaatactgaggtggggcgcaaggtcctggcagaaactccggatactccggggtcccttgggatcgcaatttctgaagccgtagaggacgctctcaagtatgatgatgtgaaatacacccttggcagcgtgctgaaccacgtgatcctacaccagaccacaattggtcaggagatcaagttacagctggagaaagctgaggaggagcccgacacaatgattgcttgcgtagggggaggcagtaacttcggtggaagcctgttccccttcattaaggacaaaatccagggcaacagcgacacggaatttatcgccgtggagccctcggcgtgccccaccctgaccgaaggtgaataccgctacgactttggggacaatatgggcttcacgccgctgttaaagatgttcacactcggccataatttcgtggccccttctgttcacgcgggaggacttcgataccatggtatgaacactcaaatatccttgctcaagaacgaggggtacatcacccctgtgacagcccatcagcgggatgtgtttgcagccggtaagatgtttgcgatgtgcgagggagtcatcccagcccctgagaccaaccacgcaattaaagctgctatcgatgaagctaaaaagtgcaaagaaacgggcgaagagaagactattgttgtgaacttcagcggccatgggctgatggactttaaaggatacgcaagctacatggacggctcaatggaaaattccaagtga

SEQ ID NO: 4375 - DNA, 777 bp, synthetic construct
  source 1..777: mol_type = other DNA
atgggcgagaccatcgccgtaatgaatcagaaaggcgggtgcggaaagacgacaactgttgtgaacttggcaacttccctcgccgccatgggcaaggctgtcctggtggtggacatggacccacaggccaatgccaccacctcgtttggaattaataagacagagatcaaaaagacagtgtacaccgctctggtcaacgaatgtagtgtgcaaaaggcaactatccccacccgaattgagaacctcttcctcctgccaagcaatatcgacctgagcgggatcgaggtagagttaagcaaggaagacaactaccacattgctctgaagaaactgctagagcccataaaaggcattttcgattatattatcatagacttgccgccttccctggggattattacgatcaactcactgatcgctgccgacagcgtcatcataccgatccaggcggagtacttcgcacttgagggtctggctgatctgatgaatacaatcaaccttgtggaaacgaggctaagatcccccactccaatcaaggggattgttctcaccctgtacgatgcaaggacccggttaggccgggaagtctatggggagcttaaaaactacttcaaaggaaaggaatacatctttaagacagtgattcccagaaacatccgcctggccgaagcgcccagttatggcaagccttgcatagcctatgaccctgagagcaaaggatcaatagcgtacctcaaaatggcccgcgagctcttgaagctggatggtgaaatctga

SEQ ID NO: 4376 - DNA, 747 bp, synthetic construct
  source 1..747: mol_type = other DNA
atggccaaaaagcagaatagcggcctcgggcgcggactagattccttgattccgaagattaaggaaatcgagcaagacgtcgaggagggcctgtccctggaagacctcctcaagaaatcagacgacgaggaggaaatcgaggagaccgtcgaggaaacagtggaagaggaagccattgaggaacaggaagacatcagcacagaggaaactgaaacggaggaggagcccgacgaagaagaggatgagcccgttgtcgaaaaagatgagacagaagaagagaagatcgagattgaggatgaacccaaggaagagctcgagaccgaagctaaagaggaggagacctcaaactacaccaacatcttcagtaacgacgacgaaatagtaactgagaacagcacaaaaaccatagaaatttctagctccaaaaacaacgacaagaatatcgagagttcagtgaacctgaacaaagagactgaggagagcatcaaaataaatgaggataaaacgaaggaaaacgactctgatagtgtgctgtccgagaaggaggagaagctggtgtatgaggtgatcgagacggttgaaaagaatccaagaatcacactgtggtcggcccgatccgctgcggtgttaaggtaccttcggaagaccgagcctgaatttagcatcagcaatgaagcatcgaaccttattgatgaggcaattgcccagaagtacccagaaatctggaccttgttcaatcacctgtga

SEQ ID NO: 4377 - DNA, 759 bp, synthetic construct
  source 1..759: mol_type = other DNA
atgaagctgggcttttccctgctgtcactgttcatgaaagaagttgatgagatgctggagatagctgtcgagaatggattcgacagtgtggaactgctcgccgagggaccgtaccggcaggacatcctattggaacggaaggagattacagaaaccttccactcctacgacttagacatatacattcatggggtaaacgtggacataaaccttgccagcctaaacgaggggatcaggaaggagtctgtcaagcagacgaaggaatgtcttgacctggcagatgagatcggcgcgattggggttactgcacaccccggaaaaatcggaaggcctgaaaagtacctgagagaaatggccttagggttcctgactgaatcgacccacgagctggtggcctacgctgaagataaggaggcgaagatcagtatcgagaacatgccagaacgcttttcctatctcggtaatcgagcatacgagctcgagaacctgaccaatgagacgggctgcaatatcacaatcgacctcggccacgtgaacacatgcaaagaccagctcagcttctttgagatccccaacatcctttattatcacattaacgataacgatgggatcaaagacaagcatcaggccattggtgatggcaccctggacttgaacctgctcaaatatgtggacaatggcatcattgaattgaataattttgataatgtcctcaaaagcaagaaggtgattgaggatttcctggccaaaaaccaatga

SEQ ID NO: 4378 - DNA, 807 bp, synthetic construct
  source 1..807: mol_type = other DNA
atgattaaaatgacgaaaaaagctatcgtgtttgataactctggtaccctgcttgagcgatttcgcgtcatcaaagacctatctaccggggaatttatcactcatgtaaacagtctcgacctaatcgacagttgtctcaacgcagccctggtggtgcttcagttcaacaccaaccggctgaaggatctcgaccccaatactctgatcagcgattttgtattggaaaataatattgattttgacattagctactattcaacagacgtttccaaagaagaaattaaggccatcctggagaaggacaccgctattatcaaagacatcacagacactttccctctgttaaaggaacgggtgccggggatggagctctgcaacggatcagcagtcatcattgacatcgaggaggagcgcatctcctatacgatcacctccgccgggcagttgttcagcggcgtcaaggacaccatagccaagctgcaagacagcggcacagatgtgttcattgcttccggcgacaggtcgggagatataaggaaactggccaatatcacgggcgttccagaggaccacgcctttgcgactgcaagcacagacagaaaggccgaaatagtcgccaatctgcaggatgagggctacaaggtcatgatggtgggtgatgggccaaacgacattttggcattccagaaggctgatgcggccgtgctcacaaccgagcagaaggatggagatttccccgacaagcttaagtcttacgctgatttcgtgatagaggacatcagtgaagtgctgcaaattgatttctga

SEQ ID NO: 4379 - DNA, 951 bp, synthetic construct
  source 1..951: mol_type = other DNA
atgcacctagacagcccgctcaaaatcaagaacatctgcctgtccaatcgcatcgtcatgccccccatggctagggaggagtcgatcgacgggaaggtcacataccctctgattgaatactataggatgagagccaagtccactggcctgattatcgtggaacacgagtatgtgcgtgaggaagggaagagctcccccaaacagcttagtatggcagatgacagcgtgatcgatggctacatagagctgaccgagagcatccaccgggagggctcctttgccatcgctcaaatcaaccacggccggtacgggtcaatttcttcaaacaacgtcaatctgaatgggatctccatagaggaaatcgaagacatcaaaaaggcctttgtggaggcggcagtacgaagccagaaatctggattcgacggcgtggagatacatgccgcccacgagtatctcttgaaccagttctacagtccatacacaaacaaacggacggacgagtacggcggcagcctcgagaaccgcatgcgattacataatgaaatcattcgcgaaatccgcgaggctgtgggtgatgattatataatcgccattagattcggagcatatgactatctggagggtggatcgaagatggaagacattccagccgcagtcaagtccttcgtggaaagcggagttgacatgattgacatcagtggtgggctgtgcagataccagaacccatacagtagggagcccggatactttaaggacctgagcaaaatagctaaggaatcttgtgatatccctgttattctcaccgggggggtgaagaaagccaaggatgccgaacggttgattaatgagggctattgcgatctgattggcattggtagggctcttctcatggatggagattggtcaaagaaggcgatacggaaggtaagaaagatcaaatcagacaaatga

SEQ ID NO: 4380 - DNA, 282 bp, synthetic construct
  source 1..282: mol_type = other DNA
atgagggcccgggaacgccgagcccgtctgatgagtctgtatatctacatcgtgatgaccatgatacaaaccaaagtaagcgcaaggaaccagacgactatcccaagcaagatccggaaaaaatacaacgtgcagcccaatgacattgtggagtggaaggagaaccgcaacggggagctgacagtcacattccggaagagaatctcctttagagacatgattggaaagggcacaattaaaactaccaccaatgctctcgatctcgaaaaggacctatactga

SEQ ID NO: 4381 - DNA, 1059 bp, synthetic construct
  source 1..1059: mol_type = other DNA
atgttcgaaaaacggaagattaagagactctcgaatcatctgaacaacagctatgatgccgaggattatgtgtcagcgctctcgtattgcgacatgatccttgacatcgatagcaataacccgcacgcactgttcaacaaggccaagattttggtaatccagggagagctcttagaggcaatgtcctactataagaaggctctgcagaccggtttcttcgacatgagcacttgggttgacgaagtctcttactacatggacggggacatttcttcaacaaattacaaactgtccaaccgaaacgaaatatccctggaactgtgcgagatatgcctggagaagtatgctaaggacattttcttcagcatctataaaagccaagctctggataacctgggccgttttgaggaatcgttgaacgccatctccctagatttaactcccgctgatggggagctttacgtgttccagtgtatcggccagtgttttccactcagcaatctgaacaggtgggaggatctcctggagacatcctccaacggactcaaattgaagagcgaggaccctagcctgaacagtttcaaggccaaagccttgtactacctgaacagattgaatgagtcagaaggcttttttaataagtacattcaacttaccaatgacagtagggcatataattttctctcaaagatcgagttcaagcgcaaaaactacaccagtgccctgaaactaatcaacaacgcaatacagctttctaagaaggaacaccttgatttactcgagtcaaacgtcctgatagaagacgacggcatctacgagaatgattactacatgaagagcctcatcctgctgaaactcaatgaattggacaagtccaacaagattatcgactgcctaatggagaaggaggagagcgccaagaattattgtctgaaagcgcgcatcctctatgaaatgaaggactaccggacgagcctgagtttcgtgaataaaagcctggatctgaaatccgactgcagtgaagccattgaacttaaagagaaactgggggagttttga

SEQ ID NO: 4382 - DNA, 1119 bp, synthetic construct
  source 1..1119: mol_type = other DNA
atgttcaccaagataaaaatcaacaaactgtttaaggaactcgactctgccctgaataaccagaactttgacaaggcgctgattatccttaataacatcctaatcctcgacgagaataatttaggggccctatacaaaaaagccttgattctgtataacaagggggaatacgagaagtccctcagcgtgttggatcatctgctcagcatcgactattgcattgacgcattcctgctcaagggacgggtatattgcaatctgaatgactacgaaaatagcctcaacagctacaaggaggcatccatcaacttcgacctggataaaatgaacaacgagatgacttattacgccagccacccgtccctgtttgacaagggcatccacaccaaaatcttcatagatctgtgcaacatcatacttgacaatgcagatattatcgaggtccgactgttcaagtcctacgtgctgtctgaaatcgggcgcagtagagatgccctcaataatgtgaattacatcttggcccataaccccaataacgaaaaagccatttctctcaaatcatccatactgataagtctgaaccactttgatgaggcgctggccctgattaacgagggtttaaatctgtacccaaacaaccttcagttaatcgatacgaaggctaggctgtattacgctttgagcgactacgatgaggctctagagatctgcaaggagtataattccatggacgattttggcaattactatctcctgtcaaagatagagtacaagaagggcgattactcactggctttgaagaacatcgacatcgcattggacaagttctttaagaatcctaacttcgacgacaaaaaggagtttagtcacgcttattactggtacaaatcgctcatcctcagcaaattggatcggttcgacgaggctaacaagatctgtgattgcctaattgagaaagaggaaagcgccaagaactattgtctcaaatcaatgattcttttcaaagagggaaactatacagatgcgctgattttcattgacaaggccctggaacttgactgtgaatgtgataaggcactggaactgaaaaacaacattgaagacaagctttcgagttga

SEQ ID NO: 4383 - DNA, 1506 bp, synthetic construct
  source 1..1506: mol_type = other DNA
ttgagcaacaatcaaatcagcggttgcagctacgccctgtatctggatggaagcgataatggctcattcatcggcaacaagatcttcaataatgattacggcatcttagccaaatactcaaatatcaacctcttcaagaataatagtgtcttcaataactggattgccatcgaggactcctccaaatacaatcagttcctatccaacaacatccacgataactatcaagggattcgactcatcgcttccaatagcgctctgatagagaacactaatgtctataataactatctgggcatccttaagtatagctcgtcattcataaacaaatccgcatctgtgtataacaacacccttataaatgttcagtcgctgaacgatggggaaatagtgattcaggacaacatgtggtactgcggccctgccgccctctcaatcatcttcgaaagcctcggactgagcctctcacaggaggacattgccaagattgccggaacaaataccaacggtaccagcctttacggcctttaccaggcctgcatcaagaaaggattcaatccctccgtattaaagatcaatagctccgacctcatgaccaatgacctggccgtgcttctcataaatgaggactaccacttctccgtgatctatagcattaacgacaccgacatcgtgttgaacgacccctcgatcggactgttcgtgctaagtcgggagacattcgacgaaatgttttccggctacgttctggacgttgagccaatcaaagacagggtttctaacgtcagcattgccaaaatgaagactatagtggggactgtgttccccgcgctggcttacggggggtacctggcgctggccggggtcacggtcatcgccggctccctggcaattgtgtggaacagtaactcacattacaactccaaaagcattcagaaaccacattatacctggaagccgaataataaaatccactttccacgtaacgtcaagtatcccacaagcacaggaaacaacggcaatcgcccgaaggtgagttacaatcccgtaaccagttctattagcggcaacaagtactacactaataacaaggtgtatacctataactacaagagctccaacagaaaggtgtcttcttctaacgcggcaattatcgcataccaggaagcgtataactattacctcagtactaagaataacgagcgggctaaagtggagaagcccacgaacattacaagttataattactttctcaaggatgtaaaagcatttgagaagggttcctacaaattttctctaggacctaaggggccagatgacgacctgtacgatagtgccaagatcgtcaaggcactgtatagggatgctacgagaaactataattacgggaaatttttgatcaacacaggcaacaaatctcgcggtatttgttacatttttctggctacctttgaaatatcgtttatccctgctattatctacaaccagctgtcattgaacccttga

SEQ ID NO: 4384 - DNA, 1404 bp, synthetic construct
  source 1..1404: mol_type = other DNA
atgaaaaagggggtgctcatgaacatccttgagaaattaaacgctattaaaaatcaggagataactgctaaggaaaatgtcgaatcttatattaaagtcattgaggagaaaaacgatgagctcaatgcgtttctcgagctaaacaaggaagatgccatcgctaaggccgaggagatcgatgccaaaatcaaggcaggcgaggaggttggagctctcgccggactagtgttcgggatcaaggcgaacataaatgtggaagacttgatcatctccgctgcctccaagaccctggaagattacattggaagctacgatgcaactgtggtcaagctcatcaaggccgaggatggaatcattatcgggataaacaatatggacgagttcgccgcaggaagctctactgaaacctcatactacggggctgtcaacaaccccgccgcccccggacgaatcccgggtggtagcagcgggggaagtgcagcggcagctgccgccggcatgtgcgacatcgcaataggctctgacacgggaggatcgattcgcaacccatcctcccactgcggtgtgtacggtatgaagcctacctatggcgccgtctcaaggcagggcctgctggacctgtcaatgagtcttgaccagataggcccaatggcccgggatgtgaccgggatcaccctggctttggatacaatcgtcaaatacgaccctacagagtgtacaaccttaaaatgggacgcgcctaacttcactgaaattgcactgagcgtaaaggataaggagaaacctctagagggtatgaagatagccacgtgtaaggagttcaaggaggtcacaaacgacgaaatcaatgagatcattgacgaaagtgtggccaaattggaatccctgggcgccgaagtggtggagctcagctttgactatattgacatctgcctgccaacatactatctcatcaactatgtggaatttttctcggctacccgaaaatacgacggccggaaatacggcagtcggatcgaggaggtctgcgggcccgaagtacttcgcagaatccagatggggtcatacattagccagaaggagtttagcggcaagtattaccaaaaagcactgcaagctaggtccctcattagaaatgccatcaatgacatgcttgagggtgtggacctgattgtaggccccacggttccaaagctgccccataaactgggcgaggaactggagcctatggaaatgtatgcttacgatgttctgaccgtgattgcgaacctggccgggatacccgctgcaagcctgaaggccggggaagttgatggcattccggtgggcctgcagttgcaggccaagccacaggacgatgccaagatcgtgaaggctatggcggcattcgagtatgcccaatga

SEQ ID NO: 4385 - DNA, 570 bp, synthetic construct
  source 1..570: mol_type = other DNA
atgatgagtgagctggagaaactaaaatccggcctggtgtactgctatgacgatgaggaagtctccgcaataaaggacaatgccatctatcagagcttcagatacaacaatatcgaccccaatgacaagcagaagcaatatgatgccttggaggagattctcggaagctgtggggatgacgtctggatcgggaaacgatttagcttcgacaatggcaaaaacatccacatcggaaacaatttcacagggaactacaacttaaccattctggatatccgggaagtctacattggagacaatgtgatgatcggcccgcacacccttataaccactgtgggccacccactggagccaaagggccggaggaagcatctggcaatggctgattcgatccatatcggtgatgacgtatggataggagggaacgttacaattctccccggcgtgaacatcggaaacaacgtggtgatcggtgctggcgcggtagtgacgaaggacattcccgacaattcactcgccattggggttcctgccaaggtggtccgcgagattgaaaacgatatcgaatga

SEQ ID NO: 4386 - DNA, 864 bp, synthetic construct
  source 1..864: mol_type = other DNA
atgacggataatagttccaacatgggcagcaattcagacaaaaaggagtttgatagcgatagaaaagagttcaattcagacaaagagttcaactcgaagaaggagttcgattctaaaaaggagtttaactcgaagaaggagtttgattctaagaaaaaagacttcaattccaagaaattcaattccaactacaaatccaaccggagccgcaataacataaacaccatccaagatctgaaaaatagcatcgaactaaaggagaacaagattaacgacttaaaggagcttctggaaatcaaggacgaggagaagcaggaggtagaatatgagctgtccctaaaggaccaggaactgaacgacctgcaaagcaagctcgacatcttaacagtggaaaatgaggaactcaccatcgagctgaatgaaaaggaaagcaaaatcagcaagctgaacaacgctctggtcaaatgcaagtacgaaaaggacaaggtggacctcgtgctgaagaacgaggtcaacatcgaaaaatcaaggctgaaggaaatggataatctcaacaacaccatcaaggagaaaatcgccattatccacgataagcaggagcagatcaattatctccgaactctcatcgatgactacaaagaccagaccaagaacaacaccgacaaccttgacttgcagcttaaaaagattacaaaaacgtacgaggggctgctcaatcagaaggatagtattatagaaaagcaggaacaaaatataaatgagctgattgagtctcagaagcagatagccaaagacaacaaagcaactattacacggttggaattggagattggaaaatatagggaggagctgaagaaaagttga

SEQ ID NO: 4387 - DNA, 795 bp, synthetic construct
  source 1..795: mol_type = other DNA
atggtgaaatgttcaaagtgcgggagtgaaaataagagcgaagcaaagttttgccacagctgcggagctaaactggatataaaggacccctataatctggacggcaaatcacgggagtacggttcgacaactggcaagagtgcaggcagcgctagcgcctactacgaccatagcgccaattctggtgggtccagtagcgattccaccggaggaatcgataacttcaggaacatgagcaactttaaaaagatcatcttcgcctgctgtgcggtcttcattgtgttgttcatcctctcccttgccgcgcaggcactaggattcgatatggaaccttacagcgagaacaaaaccgcctatcataattattcaagtctggacctggacgacgacggggcactgtgcttggaagagcttgagattgaatactccaatatcagctcctcaaagatgagcgacatctttaaaaagtccgataagaaccgaaaccacctgataagaggcgctgagtatgatatgctgaactactacgtgaatgagcactttaaagacctcgagaagaagaagaacgaaaaaacgagcagttccagcagctcctctagctctagttccgggtccagttcatacaagtctccgttcaccaccagcgggtcctcggatgatggcgccgagacatgtcccttctgcggtagcgaagctgtatatgagtctggaaactcgtataaatgtgccgagtgcggccgcactatttcaaatccagacgacctcgacttaaactacgatgagggctactattga

SEQ ID NO: 4388 - DNA, 1227 bp, synthetic construct
  source 1..1227: mol_type = other DNA
atgaaaaaatgcagcaagtgtgggtcagaaaatccagataacgccaaattttgtcacaactgcggcagcaaggatttcggaacgaacgagaacatctgtcccaaatgcggcgagtccaacgtgaaggaggcaaaattctgccacaagtgtggagccagcctgagcagcaattcgtccagcggcagctccagttcttacaaccccaccggaatgaacggtccattcggtgccggtgctaatgacaagcccggttctgtcatgaacgggccttttggcgctggcgcgaatgacaagcctggctctgttatgaatggccccttcggcgccggagccaacggcgtcgctgattcttttgccttcgacccgagcagtaacgacaaatccagctcgagtagcaactccaactccagctccaacagcaattccagttccaactacagttctagtagcaactctaattccagttctaactccaatagcagttccaactctaattcaagttccaactctaattccagttccaacaaccaggggtccacggcctcttcggcgaatcaatctaatagcacagcctctaccaagaatcagtccaattcaacaatctcgtcgaccactgccaatacaggaaatgaagggcctggattaaagaaaatctgctgttgctatgtgcccgtgattcttctcgtgctgttcataatattcgcaatccttttgaatgcgttcccggagaactttagcgcaacttacgatgacgaattttaccaattggacattgatggggatggccggctgtccctgtcagaggctagccagctgaaccccggaatgtctgactcaagcattagtagctacttcaatgaggctgacaagaacaacaacgggtatctgatcggccatgaatttgatgacttctatagtgatgtgaagccatattcctcatcatcaagtagttcttcgtcatcaaactcccacaagtactccagttcaagctcatccagctcatccagctcatctagcagctctagcgattacgactcttccagtgacggttatgtgctgacctgtccatactgcggaagcgaggcaatctatgagtcgggcagctattacaagtgcgcagactgcgggagcatcatccataatccagatgacctggagctcaactaccaggaaggctacatggacctcctcgcccctattgtccagattaacctagggggggtatga

SEQ ID NO: 4389 - DNA, 390 bp, synthetic construct
  source 1..390: mol_type = other DNA
atgatcaagatggaaatcacaggaatcgtgacaaccgggctaggaaaggctgcctactttctggggcaggacttctacaaaagccagttcaacgagaaatgtggttttacgcctttccccggcactctgaacctgatcgtggaggagaataagctcgaagacatccggctcatgaaaaactcctgcaccaacgttattaagccagaccaaggcttcggcggagtcaaacacatccgcgcctatctgaacgagaatattgtgggggcaattgtatttccggacaagaccacccatgatgaaaactatttggaatttattagcaaggacaagcttagggataaatacaatttcaaggatggcgatgaggtggtcataactatagacatctga

SEQ ID NO: 4390 - DNA, 1710 bp, synthetic construct
  source 1..1710: mol_type = other DNA
gtgtcttggctcgttgtgctcatagtgtttctgcttgctagtataaaatcgactaagaatccctctgtgtcggtggtgataccagccttcaatgaggaggcgacggtagctcaggtggtaaccgtcgctcgcaagctatcatacattagcgaggtcatagtggtggatgatgggtcgaccgataaaactgtcgaggaagcggaaagggcaggggcaaccgtcattagccataaaggcaaccaaggtaagggggtggctatcaaaacaggatttaaaaattcccatggtgatatagtggccttcatagatgcagatgtgtccaatttcactcctacaaagatcgacaagattatcaagccgatcctggaaggtaagacagacatcacaaagaccaaatttgcccgggagagtggccgtgttacagagctgacggccaagcctctattaagtttcttcttccccgagctgaattacgagcagcctctgagcggtcagtttgcaggaaagcggtctgccttaaacaaaatcaaatttgaaaaggactacggggtggacgtgggcatcgtactcgacgctgacgttcatggcattagcattttggaagttgacattggagacatccaacacgacatgtcttccctggccgatctcaacaaaatggcgaacgaagtggttagaaccatcatcgaccgagccgtggattatggccgggtcactatgatggatacccttgggaactacatcaggatggccatcatgggcctctccctgatcattctgggactgttcatgattttctttgtgccattcatccccctcgtcatatccgttttagtggctcttgttggaattgctctgactatcgcctacatcatcaagatcgtgcagcgaagcatccccatcctgaggaaaggggacaccagtacggccctgaagagttttgtgaagatgcactttcctgtgatcgtcagcggcttgattctcattctaatgctgtccaccttcctgagcgccgccacatttaacgacggcaggatctcagtggagctgactagccgcaactttgtatactccccctcagacgactatcaccagaccattagcgtgagagggccgtataccattgacagcgccattgagaatgaaacagatatggttcgcatcccaccagatgcgttgagcacgttggagatgtctgccaacgatacgatgattatcgacggcgagtactatagcgtcaacacttcaagagagggggaagtggatgtattccgcctctcaaaagcagtacggcacgatctggatctgtatcctcgggaagtcataccaaacagtcgattggctgaggtcttcaatggtgtcattgtcaaccacaacatcaacttcaacaattcctctgaagtcatggagggatatgtccagttcagcatcagtcccaaggctacaaatgcaactttcttcaatcttaccctggataacgagagcctcctttcaagcgtgggcaatttcaaaaacgattcctactataccatcgcctacgacgacgatattctctgcgcctttacaggagacgacatcaagaagggaaatgtgacctttgagtacgcaggcaaggacggcatgatagtgtttgaagacagaaacaacacctctatcaggaacttcattgactccgaccgcgactccttcgttaagctgtacaccctgtga

SEQ ID NO: 4391 - DNA, 315 bp, synthetic construct
  source 1..315: mol_type = other DNA
ctgattgcccttgtcctagcccccacggtcctcagcctgttcacttctagcgtgacagccgcggcattggtgatagtcggtatcctcatgattgtgcagctcaaagaagtggattgggacaacatggtggtagctgcatccgtgttcatgaccatcatcatgatgctgctgacctattcaatttccttaggcatcgcctgggggttcgtcacctacgccgttgccgcgatcgctacaggcaaggctaaggagtttagttggatcatgtggctgatggttattatatttgccgcatacgtgtttttcggactgtga

SEQ ID NO: 4392 - DNA, 996 bp, synthetic construct
  source 1..996: mol_type = other DNA
atgctgaataagtttttcaagttggatgaaaacaatacggatataaaaactgagtttctcgcaggcttgacaacctttctcgccatggcctatattttaggggtcaacccaaccatgcttgcagagggcggaatgccggccacaggcgtgtttttcgcaaccgctctggcttcaggggtaagctgtatcatcatggggctagtttccaagtaccccgttgggctggcgcctggcatgggtatgaacgccttgtttacctacacaatcatactggccatggggaacacttgggagacagcccttgcagccgtattcgtgtcgagcatcatctttctgctgatcaccattagtggcctccgggaagcaatccttaacgcgctaccatttgaccttaaacttgcgattggggccggtattgggttcttcctcgctttcataggactgaagggcgctggaattatcgtggcagaccccgctacgctcgtgggcatgggaaccatcctgtccgcccctgcgctcctggccgtgatcggcatactgctcactttgatactctacattaagaaggtccctgccgctgtgttcctgggcctggtgataaccgcaattttaggtgtgatctttacactgttcgggttcggcgcgggcgatccattgatgcccgccattcccacagagttcatttcctttaatttcgacacttctgtagtgggagcatttttaaaaggattttcacaactgttcacgaacatcccgaacctgatcatgatcctattcagcctcctgttcgttacattctttgacactaccggaaccctgatccccctggccaatcagtgcggtttcgtcgatgaagaggggaaggctgacggaattgacaaagctttcctgggtgacgctatcagcggaatcattggcgccatccttggcaccagcaccctgactgcctatgtggagagtgccacggtcctggtcctcgtggtcgaacaggtgtga

SEQ ID NO: 4393 - DNA, 9240 bp, synthetic construct
  source 1..9240: mol_type = other DNA
atgtccattaagcgaatcctgctgacgagtcttatgctgtttatcataatattttcaatttcgtttgtgagtgccaatgagaatgtgactaatgacgtgtccacgaatgagctgagcacacagacggtgtcgaacgatataactacgtcggagagcataagcgatactagtctcgacagcggagaaaaccgggggctggatgagatcaagtcgaatagtacagaggagtcctcatcgtccaatctggaccttgaggatggcactttgaataacgatgagattgaaagtgatgattgtttgacgaaaaatggcaaggaggcgaccctgcaggcaaataaacttagtctggacattaatatgagtcgagggacagcccaggatgtgctggacgccatcgtacgaatttccagtcaagggggaggtactctctatctgaatgggggcacctatacggaaggaggccatgccagagtgtataataatgacacggatagtttccgtaatatcgtgaggaacgatggcatcgtggacatttcaaatgtgcgcgttgttggtgggagcgtagacaatcctaatcaatatgctacctttcaaccaaatacgcgtgatagtacttcactggcctttagcggttacggggtgtgggatggtaatggcacgagatattaccctgattccgggtttaatctgactaacgtgacttttgagaatttaaactgtaccgggagattctttagttttaacagcgggtatttgacagattgcgtttttaataatctggagtcctatcagcacctcttctttgtaacgggagcttacaatgatgggggtaagcccatcgttctcactaattgtaactttaccaattccaaacagacttacaggggtgacggccctggggatggtacggatggaaccgggcagtttggtgtggtgttcggggctgagatgtatggctgtaacttcatcaatacaagcactgctactcacgggggtgctttttgtcttagcgacgagtggataagtgctgcgtgcgtgccatcgaagctggtggattgtaattttatcaacattacttctcgatggtttgcagtgtacatacatggcaattactccaataccacccgctttattacagaaccccaggtggtggaaaactgtagctttattaattgcacagccaccggggagtttgggggtgccctcggaatcagtcataacaatgtgattatcaataacacggagtttatccataacgtcgggggcaaagggtccgctattatggtgggtggcatcaataatacgcatgacggattcttgggggtgaatacgcaggggaataatattacgatttataattgcacctttgaggacaatattgccaaaattgaagggcagagcagcgctcactcgactgatccgccattcacgacgtaccccaccggttatggaggggctgtttatgtgtatggtaatcataccaaaatcatagatagtacatttaacaacaacactgccgatgattcttgcggtgctgccatctacattagaggtgacaataccacggtcgtcaattctgagttctataaccatacctccgagaacgggactatctatttggtggggaacgattgcaaaatcaaggattccctgttccacgacaacgatgcggactctactggggcttgcattttcgtggagggaaatagggccgaaatcggcaatactacattcgtcaacaacaccgctccgaatggggggtgcgtgttcattatcggtgaccataccctggtagacaatgacaccaaattcatcacaaacaatgctacaaacggggccggaatctatgtgaacggatcaaacaccatgattctaaataccagctttatcaacaataccgctgtgaacggctccggtgcattcatctatggtcacgacacggacgtcaacggctcttactttgagggcaacgatgctaccaacggtggcgcggtattcattgagggcaacatcaatgatatttccaacaatactttcctccgcaacaatgctaccaatcaggggggcgccgtgtatattgacggaaaccataccaaggtcaattataataacttcacagagaatgaggcgattcccattagcgaggatcaggagaccgggctcggtggcgctatcttcatcaggggaaacgataccaataccactgccaacactttcctccacaacaaggcccgtaacggatctgccatctacacagatggaactaacttctatcttcacaatgatcatttcctggagaaccaagcgtggagttatctgctgattacaactgccgaccctgccgaaagcctgtataaggagcaagatattgagatcaacgtgttgtaccgcgctggagacaatattatcaatgctattcacaacaggaacaagccaaatgagactcacttcatgaatgtaacctattcccacagtgagtttgggaatatcacaactagtcctgccgatcagtatgtcgaaccggttgacggcgtggaaaacagtcgagagggcgagctgctgtaccaggacgatcgtgagaactatcagcagatcgagctcagggtggagcatgagaatggggatctggccttgccaaggacaccctttagaaccaacatctacggcaatgttaacactaccttgaataagtcttccttaaggaaggggctttacgtggtgggggctgagcacattgaagattggaactataagttcattatgaatagtactagtttccgcatcctggatacaatggacatcatggtgaacaaaacctcggataaggaagagtacttccaggacgagatagcggaatgggagctgattttccataacacggacaatgggactgacgctgaaaacgtgacaatgaccgatcacctgcctaatgtctttgaactgatgaatctcagctacatgttctataccccaacagaggccattacaaatgctacgctctacttaaacaataataccctgcgctacggagtatataactccagcagtcagcaatgggtctatggcgatgcacgctataatgccagcgccaatagttggacatattatttctttgactatgacaatgtcacttatgtctacactgaatttaacgctgatgactttgtacctgtgttcggccctgtcatatacagcaactccactgatgtctgctatgacaatatctcctacaacattcccgaggaggactggtactatgataccatcatggtgaacgggcaggaggtgcggtacgggcatttcaatgcaacagagtttgagcagtacttcggcccctcatactatgatgaggacaacaagacttgggtttggattcataggggggaggacccactgaatccaggccaggagactgatcttcgcactatctatgatcctgagtctaacatctgggttatagatgattatatgcactatcccgagagaaagaccgttaccgagaaggtcgtctttaccattgttaacgacacagcaaacaatctgacccatctttcactgtacgcacgggactttgatgtgaatgtgacaggctacgttaatttcacgacgaattgcacacgatcaggggactacacgaatgtggtgaacgtgacgaccccagactatgactgggacttgtcaaacaacgtagctaacagatctgtgctcgtcgacccgctgcccaataagacagtcagcaacacgacgccctactaccacgactatgtcgactacaacctgaccatcatgaacacgggcaattcaacctacgaccagatcctaaccgttgtcgacagcctgcctgagggactagtctacaatacaactgtgggcattttgtacgctgaccagatcggcgagacgctggtggaaaaccagggacgcacagttacctggaacgtgacaaacattccggccaataccaatgcaaccatcattgtaagggtctatgtagatgctcttggaaacttgacaaacaacatgacactcatagctcccagcggagacaacagaaccgttaacgctaccattactccggttacctataccgatgtttctgtgaacaaaacagtcgaaaaagaggagtacttcatcaacgacactatagtgtggaccataaccgtatccgttgcaggaaatggttcaaatgccaccaacgtcaacctttcagatgttctgccgccggaagtcgaatatatttccacaaacgggacctacgacaatgccaccaattcctggtacatcggcaacatgaccaatggaagctccgtgagcatcacaattgatacccgggcaatcagagtggcagagaatgttaccaacgtagccaacgtgagctgtaacgaaaccgaatgggactatgaaaacaaccgggacaacgccactgtgagcattattcctgtgcctcagaagaccgtcaacgaaacaaatcccacatttggcaaatacgtggattacaacctcactatcatcaacaatggggccgagccctatactgacacactgaccgtggtagacaacttgcctgaaggcctagcctacaataacaccgtgagcattctatatgctgatcaggtgggcgacacaattgtggaaaacaataaccgcaccattacatggtacgttactaacattcccgccaataccaatgcaacaataattgtgagggtctatgtaggcattctgggcgagcagatcaacaactacactctgatcgggcctaaaggatctaacagaactgtgaatgcttcaattgttgtagaacctaaagttgacatatccgtggagaaaacaagcgacaagatcaattactttgaaggcgaaaccgtgatctggaccattactgtgtcaaatgccaacaatgcaactcctgcgaccaacgtgaccctcaaggacatcttgccagaggaggttgagtttgtgtcggccaacgacacatacagcaacgagaccggcatctggtacatcggcgatatggccaacggcacaagccggacaatcgtgattaatactactgctatcagatccaaaacgaatgtcacaaacgtcgccagcgttaactgtacggagaaagaatggaattacacaaacaatgtggacaatgcaacgataaatatctaccccctgattaacaagacggtgagcaattctacccctgactatggagatgaagtggaatacaacctcacagtgattaacactggggacgtaatgttcaacgagacggtcacccttgtggacaggctccccgaaggagtcgacttcatcaaagtactgaacgaggatggtcttaaggtgatcagtttcgatcactctaccaagaacctaacttgggttgtcactaacatttcagctaacacaaaagccaccatcaccatcctggccaattgtaccctggtcgggctccaagaaaacacctggaccatctacggccccgagggcatgaaccgcaccgtgaacgcaacgatcgttgtgggccccaaagtagacgtgtccgttgagaagactagcgacaagatcaactacttcgagggggaaacggtcatttggaccatcaccgtgcacaatgccaacaatggaacaaacgcaacaaacgtgaccctgaaggacatacttccagaagaagtcttatacgtgagctcaaatggtacatacaacaataataccggaatctggtacataggcaacatgaccaatggatcgagccgaaccatcgtgatcaacaccacggcaataaaatccaaagcaaatgtgacaaatgtggccaacgtaagctgcaatgaaaccgaatggaactacactaacaatgtggacgatgctgtaatcaacatctatcccctgatcaataagaccgtgagcaatccaaccccagactatcacgaagagattgaatacaacctcaccgtggaaaacactggcgacatcatgttcaacgagaccgtgacactcgtcgacaggctccccataggagttgacttcatcaaggtggtgaacgttaccggtctgaaggttataagtttcgataacactaccaagaaccttacctggaacgtaacgaacataacagcacacacaaaggccacgataacgatccttgcagtgtgtaatgctattggagtccaggacaacacttggacaatctacggacccgaagggatgaaccggaccgtgaacgctacaatcgaggtgaagccaatagtggatgtgtcaattacaaaggtggccgaccaagagatataccacatcggcgacaacgtaacctggatcattactgtgcacaatgcctggaacggcaccaatgccaccaacgtcaacgtcaacgacattttacccaaagaggtcgagtacctcacccacactgttacacaggggcagtacaacaacagaaccggaatctggactatcggcttcatggccaacggcacgtcccagaccctcacgatcgtctccgtcgccaagatcaacaaaaccgacatcaccaatgtcgcgaacgtgtcctgcagcgagaaggagtggaactattccaacaaccgggattacgccacaatagaaattgtggacactcccatcaacaagacggccagcaaaccggtcccagactaccacgaagagatcgaatactacctgacagtcacaaacctggccaatgagacctataacaaaaccgtgaccctcgtggatagcctaccagagggagtcactttcctgcgagtggtaaatgaaaccggcttacgggttctcggcttcgaacgccggggcaatcaccagatctggaacgtcaccgatatcgaacccaacacaaccgcagtgattaccatcctcgcccggtgtgacgcggtcggaacaaaaatcaacaactggacaatctactaccctaacggagatagcgagaccgtgaacgcaacaatcgaggtaaagcccatagtggacgtgtcgattacaaaggtggccgaccaggaaatctaccacataggcgacaacgttacctggatcattactgtgcacaatgcgtggaacggcaccaacgccaccaacgtgaatgtcaacgacatattgcccaaggaggtcgagtacctcacccacacagtgacacaaggtcagtacaacaaccgaaccggaatctggactataggcttcatggcaaacggcaccagccagaccctcacaatagtttccgtcgcaaaaatcaacaagaccgacatcaccaatgtcgcgaacgtcagctgctccgaaaaggaatggaactattcaaacaaccgggacaacgcaacaatagagattgtggatactcccatcaacaagactgcctcgaaaccggtccctgactaccacgaagagatcgaatactacttgacagtcaccaacctggccaatgagacctataacaagaccgtgaccctggtggacagcctccccgagggagtcacattcctccgggtggttaacacaagcggcctgagagtgctaagcttcaacagcactgaaaaggtccaaacctggaccgtgacagacatcgaggcaaacacaaccgcagtgattaccatcctggcccggtgcgacgccgtcggcatagaaatcaacaactggacgatctactacccgaacggcgatagcaagaaggtggagacgcccatcgatgtacagcccatagtggacctgtcaactacaaagacctccaataaggacgtgtacttcctagacgatacggcggtctggaccattaccgtccacaatgcctggaatggaaccaacgcaacaaatgtcgtcatcgacgaactgttcccaagtgagtttgagatcatcaactacacaaccacaaaaggccggtacgatccgagcgcgcgtgcctggactattgatttcatggagaatggcacaactgagacactggtgatcacctcggtggcaaccgtggtgactccattcgtggacaaccctgtgaatgtaacaagcgatgaaagggattggaacctgtccaacaatccatccaataagtctgttaaagtcatcgacattccagatccagagaaaaccgtgaacaatgcgactccttactacaatgataccgttgtttatagcctgactatcaaaaacactggagacattaagtacacgaacaagttaacagtgattgatagcatgccacagggactggaatatgtcaaaaccgttggtataagtggtgctaagttaatcaaggaggtggttaaaggacaagtgatcacgtggacaattaccaatatctctgcccactcaaatgcggtgatcaaggttcgcgtcagagccaaggccctgggcaacctcaccaacaacttgaccattgtgactccacatgccaacaagactgtgaactgcaccattactcccgtgcctattgctgacttggccgtcacgaagacaaatgaccattatggcaaagactgccttaactccacttttgtgtactggacgatcaaagttgtgaactacggccctaacaccgccgtgaatgccatcgcgaaggacatcttacctgaagggatcatctacctttcagatgattctgacggagcctacgattacgaaactggaatctggacaatcggcaacctggcaaaaggcaagtctgtgacaatgaccatcgaaacaattgtggatgctatcgacactcggatcaacaacaaagtggtcgtctcaagcgacacctacgatccggacaaatccaacaaccgtgacaacagctctataaaagtcatttcaatcgctgacctgaagctcaccaagacagctaacgtgaccaagacttatgtgggagaaaacttcacgtacactattaccgtggtcaacctggggcctgatacagccgtgaactctcgggtatacgacgtcttgccaaaaggagtgaaactcctgtccttcaacgagagcaagggcagttacaacccccagacaggcaagtgggccatcggagacatggcccttggtgaggaggtaacccttaaggttaacgtccgcgccctgacaactggcaaaattgttaacgaggcgcgcgtcgaatccgacacgtacgacaacgacacgtcaaacaacaatgactccgcgactgtcatcgtgatcggcgacaatcctcccatcaagatgctgcccactggtaatccaatactaattgcactcttgtccctgctggcaattgttggcgtcacactgagaaggaagagctga

SEQ ID NO: 4394 - DNA, 2187 bp, synthetic construct
  source 1..2187: mol_type = other DNA
atgatgattgctgataccttatcccaagagcttaatatcaagatatcacaggctgaaagtgtgatcaaactgatcgatgatggcaacaccatcccatttattgcacggtaccgcaaggagcttacaggttccctcgatgatgaagtgctccggaaattcgatgacaggctcaaatacctgagaaacctggaggagaaaaaggagacagtgttgaatagtatcgaagagcagggcaaactcaccgatgaactgaagcaatccatcctggactgcaaaaccctcgtggagctcgaagacttgtaccggccctacaagcccaagcgcagaacccgggcaacaattgctaaagaaaaaggcttggaagagctggcaaacattatccttgcccaggagatcgaggttccactggaggaaatcgctgaagactacattacgaaagatgactctgtcgaggaggagttacgggtgaacactgtggaagaggcaatcggcggtgcacaagacattatcgctgaaatcatatctgacaatgccagcttccgctccctaattcgggagctaagctatgaagatggagaactcatcagtgaagccaaggacaaggatgcggattcagtctatgacatgtactatgaatacagcgaagaggtcagcaagatcgccagccacagggtgctggccatcaaccgaggagagaaggaaaagttcctgaaaattaagatcagtgctcctgaagaggatattatcagctatctgaccagacacgtgcttatcaataagggcggaaagcccaccaagcctatctataacaagtacactgaagagactttgaaagaggccatccaggactcctacaaaaggctgattgctcctgccattgaacgagagctgagaaatcagctctttgaaaaggccgaggacaagtcgatcaagctcttcagcaaaaacctggagcagctcctgatgcaggcccccatcatcaacaaggttgtccttggctgggacccggccttcagaacagggtgcaagctggctgtggtggacgaatacgggaaagtccttgacactaccgtggtctacccaacggagcctcaaaacaagatcgctgaaacccgctcaactgtgcgcgacctgatcttcaaatatgatatcaacatcattgccatcggtaacggaaccgcttctagggagtccgaggcgattgtagcggacattataaaagacctggatgttcagtatgtgatagtgaacgaggccggcgccagcgtatactcggcaagcgaactagccacggaggagtttcccgactataatgtcggggagcgaagtgcaatctcaatagcaaggcgtctgcaggacccgctggccgaactggtcaagatagatcctaaatccatcggtgtgggacagtaccagcatgacatgaaccagaagaagctaggtgagtccctggacaatgtggtggaaaagagcgtgaataatgtgggggtggatgttaacacggcctcggtatccctcatggagcatgtggcggggatcagcaaaaccgtggccaagaacattgtaagttatcgcgaggagaacggcaagttctatacaagggatgagctgttgaacgtcaagaagctggggccgaaagccttcgagcagtgtgcaggattcatgaaagtcaaaggccccaatccattggacaacaccactgtgcaccccgagtcctacggggcgacaattgctttcttaagcttcttaggctactctattgaggatctggagaataagaagataaaggaatcagacctggacctcacagacaagcagtttgaggacatggcccaggaactcggaataggttcaataacattgaaagacatcgcgaaagagctgaagaaacccggccgcgacccaagggatgagatgcctcagcccatccttagaaaggatgttctcaccatggaggaccttgaaaagggcatggttctgagcggaactgtccgaaacatagtggactttggaatctttgtggacatcggggtccatcaggatggcatggttcacaagtccgagattacggatagccaatacgtcaatcacccgatggactttgtaagtgttggggacataattgatgtgaaggtcttggatgtggacatcccaaaacgtcggattcagctgtctatgattatttga

SEQ ID NO: 4395 - DNA, 1050 bp, synthetic construct
  source 1..1050: mol_type = other DNA
atggaacgcgtcaggctgcagtacattgatctgttgaagtttttcgccattttttcgatcatagccctgcacgtgtttctagtgtggcccaaggcaaaggtcatgggcataaaagtttattcactgtcaagtattgtccgcttcggggtgccggtgtttatcatgatcagcggcgcgcttcttctgaaccgggacattgaaatcgggtctttcctgaaaaaacgaattaatcggatcacataccctttcctgttcttctacatcatcacattcatattcatagccttgaccaaccatacccacgagcagcaaaacatctttgctttcagatggtatttctggacgatcctgggggtgtatctcagcatacctatcatcaacaagtacattcagcacagctctctgaaagagatcgagtatttcatttacatatttatctttgcatcaatattctatcagtttacgtacttctttgaaattaaacagtacttttacctcaccctgttcctgtccccactgggatacttggtgctggggtactacctttctaagaaggactttaatctcagtaccagcaagatgattgtgatttccatcatcctattcattctgtctacctccataaagatttgcggccagctaggatacatacccatcactgagaacttcgttgccagccagtcagtcatcctctcttcctggctcgacgtgagcttcattggcatccttcaagccgcgtccttcttcctgctctgcaagagcatctacgaggcttcgaagggtatctttagtccaatcaagaagttcttagaatcaaacatcatttcgaaatttgttcttagcgtaagcagggcaagctacggaatgtatctcatcaatctcattcctacagtgattgtgtattactatattcagcccatgaatctgactggcagtcaagtctttctggccatccccctcatttccattatcatcttcttggtcagttggatcatcatcgtgatcttatgtaaaattccatacatcaaatatgtatccggttattcctga

SEQ ID NO: 4396 - DNA, 3537 bp, synthetic construct
  source 1..3537: mol_type = other DNA
atgaaaacccgcatcagtgtcatcatcccaatttacaatgttcatgagtttctcgaggattgcatagagtcggtcctggcccagaccatcaaccactgggaccttgtagatgattatcagaggaaccttcaaatcattctggtggacgacggctctaccgacgacagcggtgagattgctaagtcttatgcagccaaatacgaaaacgtggaataccgctacgaggaaaatcagggactcggccatgcaagaaactacggatgcgaatttgctgagggggactatatcatctttatagattcagacgacatcatccccccaaaggcctatgagcgcatgtatcgcatcgcgcttaaaaacgacagcgacctgacgatcggctctgtatggcgatttaatagtaagctgacttgggcctccaacattcacgaaatcgctttcggcggaacaaaagagctgactcacattaaggagagccctgagctattttacgacaccacggcttggaacaagcttatcaaatttagcttttggaaagagcatggtttccaattcccggaagggatactctatgaagacattccagtgaccatgcccatgcactatctggcaaacaacgtttcaatcgtctacgagaactgctatctgtggagagtgagggatggcatctccaaaagtattactcagactacagatgacctgaaaaacgttgaggacaggctgtacgtgatgggactggtggataagttcttcaacgaaaatgtcaaggaggaggaactgcatagggtaaagaatttgaaatggataaagaacgacctcatgatcttcatcaacaagctcaaaagcatggacatagacgagagccaggaaatcattgacctgctgctggactacatcgaccgtaacatagacccaaaatactttgatgagataaacgagatcgaaaagctcaagtacgagtatctgtttgagagggacttcgaccggctcttgaaattgctgaactatgagcacgtgaatttctacactctgaatatccactccaaaggttccgatgttgtcattgaaggagataaggacgttttcaagacctcaagtttcatcgtgaacgatttcatcaaggaagggaaaaaagctaagtacattcaaaaggtcaatctagaggaagaggccctggaagtcagcggttttgtggtgattcccggtttggaggcaaaggaatttaaggatgtggaatactccttctatttggtgaatagcgaaaatcgcaagaagatcgccttgcgtcatgagcagatctatctggggaatatcaactcctatcgtcttcggtttgggaagaaattctcgtacaaggcggccggctatacggtattcgtgccgtacgagttaatcgaggacaacgaggacttcctcggagagaacaaaatcattgtggtctttaagcaacgaggagtcacccataatattttcgcaggaaacgcgaaaaagaacgtccgcagcaggagcgaaaaccgggcggttctcatcgggaaaacctatatgtccatcgggtatgacaagaataacgagattataatcaatgtgtcaaaagcccggcattcttatgatcggatcgagattgaggacgacgatctctgcatattcggcccctacgacggggatgtcttcctccactacaataagagtttcatcagtcccgagagcaacattccatttgcttacgatgacggcaatcagtgttaccggctggatctggataacatccggagcaccgaaggccagatcctatacgacaacggagaatccctcgtgtacaaagataaagagctgttatgtctgtattcctcgaaaggccagtgtgtgatcagcagtcttctggatcacaatatcaagatcaataagttcaagaatttttcattagtctcggagattagtgaaagaaacaacgagattgacattgtttcaaggcttcactctctggaccttggggatcggcagttgaagagcgcaaccctgtatttctttttagacaagaaccagagctcttatcctatcgccgaggctaagataattaaagacgtgtctaccacacaggacagtcatattggggataatgcctacattgatgataaggacagtgaggatattgactcgtcctccctgaatggagaaaatacttacgagctgaattttaaattcaatatgaacaataagataatcacagaaaacctctaccatggttactttgacctactgattcgctatgacttcggcgacctggtcttttcaacaccgatacacctgctcgatgacttcaaggcccttcttaagaagaaggtgttccactttactatctaccggggcaacgcctggactttaaggataagggcaaagaaaaaatggaattggtgggatggcaggcccagaatatacacacgagcatacagaatcttcaagcacttgccaatcaacaagaaacgaattatgtttgagtccatgtggggtgccaaatacagctgtaatccaagatacctctatgaatacatagacgagaaccaccctgactatgaatgcatttggtccttgaacgatgagcacatccccatcaacggaaacggaatccgggtacgccgttggaccctaaaatacttctattacctggcaacgtctaagtactttgtggacaacgtcaatttcaacgagcgctacgaaaagcgagagcctcagagatacgtgcagacaatgcacggcacccccctgaagacactggggttggacgtgccaggggatttccctacaaaagccagtgaggaacgcttcattgaacggtgtagccgatgggattatatcactgtgcagagcgagtatgtggaggacattgccagaagctgcttcaagttcgataaggacttcctgagatacggctacccgcggaccagcatgctctatacaatgaacaacgaagaggacataaataagataaaggaaagaatgaacatccctctcgataagaaagtgatcctgtacgcccccacgtggagaaagaaaaataaggtggaaatcatgttggatttccagtcatttaaggagagcctctccgatgattatatcttaatcctaaggctccatcacctgatgtttagcgcggatttcgcccccattgaggatgactttgtttacgacctttctcgccacgactccattgaggaactgtacttgatttcagacattcttatcacggattactcctcggtaatgttcgactactccattctggacaggcctattattctgtttgcttatgacctggaggattacgctgagaagctccggggcttttatatcgatattcaagagaacaagcccggccccatcctgttcagctcaaaagaagtggaggacgccatcagtaacatcgaaaaaaccgaagaggataccaaatatctgcgagaggagtttcgcaataagttcattccttacgaatgcgctaattcttccgagaagatcttcaacgatctcgtttctggcaaatga

SEQ ID NO: 4397 - DNA, 3675 bp, synthetic construct
  source 1..3675: mol_type = other DNA
atgaaaactcgcgtaagcgtgatcatccccatctataatgtttacgaatttctggaggagtgcctggaatccgtcgttaaccagaccatcaatgatatggagctgactgacggctacgagaggaatctgcagatcatactgatagatgacggctctacggactccagccctataatcgcaaaggagtacgcccaaaactacgaaaacatcgagtaccaccacgaggtcaatcaaggattaggccacgcccgcaactacgggtgcgaatttgcggaaggggactacatcattttcctggactcagatgataagctgtctcccaatgcctatgaatggatgtataaaacggccattaggaacgacagcgatatgaccatcggaggcttctggagattcaactccaaaaagtacaagatttccaacatcaataaaatagctttcaacggaaacaaagagaaaacgcacatcagcgaatctccagagctcttttatgacacaaccgcttggaacaagcttatcaagcacagcttctggaagaaacacaacttccagtttcccgagggcatactctatgaggacattccggtgacaatccctatgcactttctagcaaacaacgttagtatagtctacgagaactgctacttatggagaattagggagggcaagtccaaatcgatcacacaaacaaccaccgaaatcaagaatctcgaagacaggctgtacgtcatggggctggtggacaagtttttcgatgagaacgtggatgatgagcggctccgccatgtgaaaacaatgaagtggcttaaaaccgacctgctgatctttattagaaagctacgcagcatggacaaggaacaggggtacaaaatcatgtcactaatccgagactacatccagaataacattgacgctgatgaatttaagtacttgaatgagtatgaaaggctgaagtatgagtatctgatggacgacgagattgacaagatcgtgagcatcttgaacttcaaggctgagaatattaaggagacgaaggtctaccagaaaaacgggcatataatgttcaacgccgacaaggaggtgtttaagcagagccccttttacatcgaccagtacatcagggagcgatacaaccgtaagtacatccaagacattgagatcagggatgacggatttcttatacggggcttcatgctgatccccggactggatatcaaaaactttaaggaccgggagcacagattccatctgaccaatgccaatagccataagaagatcaagattgatagtgaagatgtggaaactggtaacattagctccttcaacattcgatttggacgtgggttttcatatgatgctgcaggatataagatcttcatccccttctctaagatatgtgatgacgaggacttctttggggagaatcgaatttctgtagacttcaagctcaacggcatctatcagagccccttcctttcttatgagaaaaaggagctctgtcagaatttctttttagggtatgcgaaaaaggacattcgtcaaaaaaccaatatgaaagctgtgatctacaaaaacacctatttcctcattagatacaccttgaaggatgagatcattatcgaagcactcccgttaaaaaactactttaaagagatcagactcgatgagaacgttctgaagctggatagtgaccacatcggtaacctttacatttactacgaggcggactcgatcaatgaggaggagaaaatagctttcgagtacgacaacgaggacaagagctaccagatcgatatccggaagctcaagaagaagccgggtaaaatactgtgtgatggggaaaattccatttacaagagtaaagaactgattctgctggattccaaatacggacaatgtctgatcagtaccctgaatgattactacttggacatttattattttgacagcttgacacaggttctggacatccgccagaatcgggaccggatcgatattgatgccaagctgtattccaacaggttcaatgagacacgcagcacgtataaggcagatagaataaaaacagccaaactctacttcaaagacgactcgagcaaggagaattacatactctctgacggcatgatagacaggcagaccggagacattaaattcagcattgacttttccaacaaggagattactaaaaacctatacgagaagatccacgatctctatgtggaatatgcttatgacgagacttctacggaagaagaggccattgtgaacaaagaagtggatgaaagtgagtatgattcagtctcaaaagaggaaaaggaaaacaacaaaatcgaaaagaccgaaaatgaaccagttccagtggagggccggaacaataagatcaacgaagagtcccgatttagtactgaactctatctgttcaagggtgatgacaaaaccatctctaaaagttactatgagtataaggtctatcatgatttaaaaggcttccttaaactaaaggtccttaaacgctggcccgtctacgaagacacccctgggaaacggcttaaacactcgcagatatcctataaattgttctcaaaactgcctattaataaaaagcgcataatgttcgagtcaatctggggtggaaagtacagctgcaatcccagatacctgtatgaatacatagacgaaaactaccctcactatgagtgcatctggtcctttaaggatgagcattaccctatcaaaggaaacgggaaatgcgtacgccggtcttccctgaagtacctctattacctcgcaacttcgaagtacctcatcaataatgtgaacttcaagaagcatttcattaaacggaaaggccaggtggagatccagaccatgcatggcactccattaaagacaattggcctggacgccccaggtgagtttcccaccaagaagagccagaaggactacatcaagaagaacaagaattgggattacctcactgtgcagagcgattacgtggccgagatcagccggacatgtttcaaatatgaaaaggacttcctgaagttcggataccctcgaacagacattctctacacgaagaacaacaaggaagacattcagtccatcaaagaacggatggggcttccatcagataagaaggtaatcctgtatgcccctacatggcgctttaagaacaattttgacttgatgctggacttgaagtcctttaaggaaagcctgaaggacgaatacatcttgattctccgcttgcaccacttctcagcgggtggctggaagcagccgctggatgatgacttcgtctatgacttctcaggctacggcagtatcgaggagctgtatctgatttcggacattctaataaccgactactcctctgtgatgtttgattacgccatcctggacaggccaattatcctgttcgcatatgatttggaggaatatgatgaaaagctgaggggcttctacatggatattgagagcaataagcccgggccaattctgcacagttccaaagaggtggaggaggccatccttaacattgagaagactgaaatgaagtataaggatcttcgtagaagtttcaaagagagattcaatcagtacgagtgcgaaaacagcagtgagaaaatttttaataaagtgatcgacaaaaagaagaacaagaagtga

SEQ ID NO: 4398 - DNA, 2091 bp, synthetic construct
  source 1..2091: mol_type = other DNA
atgcaagatcctaagatttctgtaatcattcccatatacaatacagaagactacatcgaggagacactgctgtctgtgattaatcagactatctttgacgagatagaggtcatcatagtggacgatgagagcaccgacaattcaaaatacatcatagagaaatatgccctggactacagcaacattcaggtgttccaccagaagaacgaagggcagggaatctcacggaattacggcctgtctaaatccaaaggcgagtacatccactttctggactctgacgactacctgccacccacggcatatgagaccctatacaacatggccctgaagaatgaaagcgatattgtgattggaaatgtcttgcggtttgctctctacaacgtttgggaggagagcctttacaaaaacgcttacaacgacttcgacgaggacatcgccatcatgagcctcaacgaacgaccgtccatactctgggacacccttgtcaccaataagttgttcaaccgagaatttctgattaggaagaacatccgattcccaaacaagaaaatcagtttccaggacatcccattttcactggagagttatatcttggctgatagtatcagctttagtaaggaaatcttccactattggcgcctgagatccaatcaaagctccgtcacacagcaggacaagagcctcaagaacattaaggaccgccttgaaatcctgcggatcgtgcagaacctcctggaaaagtacgaagttgaagaggagataaggaactacgagtactcaaaatggctgaaccatgacctgaaattctttctgaaaaggttcaactattatcctaaggagtatcatgaagaactctttgaagaggtctacgggatagtgaagatcatccccgacgcgctgattgacagcctcaatagttataagaaggtgcttttcaccatgatccgcaataaggactacgagaacttcctcctgttcgcacctttggagaacgagctatacaagaatcctgagatcccatcgttcctgaatgatgaatataagtcctacttcgattttgagaaggcgatggaagaggaggagctgaatattgaactactggactttaagaatgacaatgacaacctgtacatcgattttgatggctaccttaactacctcagcccgaacgataattacaagatcatcgcaaagctcgtggatgagaacgattatgagaatccccttttagtaaatcatttggagaacaagcaaatcgccattcccttctacctgctgaaggataagaagcgtgcccagatcaaggtcatttatgaatttgagagcttcaaaaaaactgcttatctcaaaaacagacacagaaaatccattgagcgcgagaagttctttatcgatttggatttgggcaaaaattcctatttatatctcgacatccgggaaaaaaacatcgagaattacattgacattattgacatcagcttcaactccaaggaatttacgataaaagccaaatcgaaaaagtcgattgataaaatcagcatggagaacattattagcttcgaaaagatcgcctatcctatctacgatctgaaatatgaagagaacgaggataacaacttgaaaaatgaagagaacggggaatatacgttcaaattcaaaattccctattacgacattctcaagtcagcagtgaaaaagtgggagctgaactgcgatgaatacttcaattcaattaagctatccgagacatttgagtttttcactgaaacctacaagatcaagtttgtaaatacaagaaacaagatcctcatcgagaacgaaatattcaatccaattaaaatgatttacgccctgaaccacgaaaacactgaccttaaactgaatatcaagacactgaagggtgaaaacagtcggctcaacaaagagattaagaagaccaacgaaaagaatgagatcctgaatgaggaaaacaaaaagcttatcgacaagaacaagaccttaaataaggagaacaaaaaactgaacaagaagatagaggagtataaatccaggaaggtggttaaaatagtggatagtttaaagaattga

SEQ ID NO: 4399 - DNA, 639 bp, synthetic construct
  source 1..639: mol_type = other DNA
atgatccttggcacttacttaatcatgcccatcttcaatcgctggatcaaggactgtagtattagggaagtggaatacttcttggccatttggctaattacgtgcatcttcgacaatactttactgatcggattccccgtgaccctgacctactttacagggcccatcggcatggtggtgctgggatattaccttcggcacacggatagaaagatattcaacagccttccatatgcattggccttcctgctcatcggcatgatcgttataatgctctgttcctacttcctcagcagtccagagggcatgtacgtcttcgatcgatattccattctactggcgattgaagtagttggaattttcaccctgtacaaggtcattgacaaaaaggagctgaaaatcttccacaaggagaatggtttttttcggcgcgcctctttctcaatcgcaaaatatagctacgggatctacctctgccatgagtttattatgaacatctttatcataatatttctgaagcacgccccgtttaaggtgaccttgctgctcgtctttgtgtgcacactggggacatcgtgggctctcctggccctgctgaacagagtgccttatctcaacaggattatcggtgctaaatga

SEQ ID NO: 4400 - DNA, 294 bp, synthetic construct
  source 1..294: mol_type = other DNA
gtgaactgggtcgtaattccagagtattcattaatccctagcctgaactggtttatcacggattttctggggacctgctgtcggtgcggtgtggacatattcctgatgctcagtggagccttgagcctggggcgcgactgggacatcaagtcgtttctcggcaaaagaatccccaggattacctacccgtacctgttctgggcgacactgcttatcagcattatgctggtggcagtctacttcaatcccgatctactcaagctttttttcggcatatcccactccttcatctga

SEQ ID NO: 4401 - DNA, 1008 bp, synthetic construct
  source 1..1008: mol_type = other DNA
atgatgatccccaaagtgatgataattcttggcagtgccagcgataaggatatagcaatgaagtccattaagattctggagaagctgcagattccgtatagcctgaaagtggcttctgctcatagaacccacgataaggtgaaaaagctcgtgaaagacgccacagataagggcgtcgaagtcttcatcggaatagccggcctggcagcccacctccccggcgctatagctgcatatacccaccgccccgtcattggagtaccagtggacggagccgtgggcggtctggatgccctctacgcctgcgtccagatgccgtttcctacagcggtgacgactgtggggatcaacaggggggacaatgcagccatcctggccggcgagatcattgccagctacgacgagaaggtgggtcagaacatttccgacctcagggttgaataccaggaaaaggtcgaagcaggtgagaaggagctgatcgaaagcattgagggggaatacttccaaaaagacttcttggaggaggagaaatacgagaagatcgagtttgaagagctcgacgacaccccagatgtcatgatcctggccggaagctattcagacatggaaatcgctaaaaatgtagcgatcctactggaacggatgcgaataaattacaaactcgattacatctctccaatcagacatgctaaggattttgaatcatatatgagtaaacggaacaacgctaagatcttcattgccatttccggcctgtctgcccttgtagcaggcagtgttgtcgctcttacagaaaagccagtgatcggggtgccttgttcgaagaaattaaacggccaggacgccttgctgactatggccaacatgccccctggagtgcccgttggaaccgtggggattgacaacggtcgcaatgcggcaatcgttgctggggagatcctagccatctccaacaaggagatcgaggagaacctgaaatggataaagtataagaatgcggacttgtga

SEQ ID NO: 4402 - DNA, 1263 bp, synthetic construct
  source 1..1263: mol_type = other DNA
atggccgaagaactgaacattatccagattgatgaagagctagacgctgaatacgaggctgcaaaggtgttgcgcaagtaccctaaggacacagtcatgctcaacaatataaaaggctacgacatccccgtggtctcgggtatctgcaatacaagggagaagatcgctcagtccttgggctgccaggtggatgaaatcctgtacaagatcatcgatgggatgaacaatccaacgccaatcaccaaattcatcgacctgaaggatgaatacgacagcaaacgcgtggacttaggaaagatccccatactcacccactataaacgtgacgggggggcctacattactgctggggttgtctttgccaaggaccctgagacagggattcagaacgcctcaatccacaggatgctcgttctggagaaaaacaaactggctatccggatcgtcccacggaacctctacacctacttccagaaggcaaaggatatgggcaaagacctcgacatctccattgccattggcatggagccgtccattctactggcatgtacaactagcatcccaatcgatgcagacgaaatggaagttgcaaaccgattcaagaatggcgaactggagcttgtgaactgtaaaaacggcataaaggtgcccgaggccgacattatctttgaagggaagatcttgattgatgagaccgctccggaaggacccttcgtcgacctgactgacacttatgactacgttcgggaggagcccgtgatcaaactgagcaagatgtatttaaaaaaggagaatcccatgtatcatgctatccttcctgccggattcgagcacaagctgctgcaaggcatgccgcaagagcccagaatcttcaatgccgtcaagaacaccgtgcctaccgtgcagaatgtagtgcttaccgagggaggctgctgctggctgcatgcggcggtgagcatcaagaagcagaccgaaggcgatggaaagaacattataatggcggccctcgccgcccatccctcactgaaacacgtggtggtcgttgacgaggatgtgaatatatttgacccacaggatatcgagtatgccatagccacgcgcgtaaaaggtgacgacgatataattattgtgcctaaggcaaggggttcttccctcgatcctaaggcgagtgagattgatggaaccacaacaaaagtcggtgtggatgccacgaaaagcattctggagccacacaagttcgaaagagtaagctttagtgagtga

SEQ ID NO: 4403 - DNA, 972 bp, synthetic construct
  source 1..972: mol_type = other DNA
atggataaggtgggcattatcggggcaggtagtctcgggacagctttagcgcagaccgtggctaataacgtagacacagtttacctgcatctgcgccgagaggaactggctaaaaccatcaatagcacgggatataacagcgaatactatccaaacactaagctaaaaaacaatatcatagccacgactgacatgaacgacttgattgattgtaagatcatatttctgtccattcctagctctgcattccggtccaccctggaaaacctaaaagaggtcatttcggaagacacaatcctggtgacgacagccaagggcattgaatatccctcactcaaatcaatgggtcgcctgatcgaagagtacttcgatgagaacttcgtggccctgagtggcccaaattttgcgtctgaaattgtcctgaaccttgccaccgtgtctaacattgcgtctcggagcagtgagaatgccataaaggtcaagaaggtcctctccaccccggagtttaaggtaaaaatcattgatgacgttgtaggccttgagatctgtggagtcatcaagaatatcaatgctatagccaacgggatctgcgaaggaatgaacatcaatgagaacgccaggtatgccgtcctgacaaagggcttcgaggatactgggaggattatcgaggcatttggtggcaaaatctccaccgcaagcgagtactgcggattcggcgacttggtgctcacctccacatcatcggaaagcagaaaccacacccttggaatgctctacggccaaagaatcatcgtggatgagaaggccagcgggatcgtgttcgaggggaaaaactccatcatggccataaaggacatctgcaataataccaatactaacagtgtggttgtgaactttgtgtacgacgtgattgttaaacagattccccccaaaatagctttcaaggacttgtggaacaatattgaggagtga

SEQ ID NO: 4404 - DNA, 1092 bp, synthetic construct
  source 1..1092: mol_type = other DNA
atgatgtccgaggacagcatcttgcttactatcaaaagctttacagacctccaaacggaaataaacaacacggccaacggcggcatcctgatcctggagggctattacaagtacaatagcaatctggactccaatttcttacagaagggtgtcctcgtaaataagaacattaccattttcggaaacgggtgcgtcattgatggaaataatacttcgagcctcatggagattaacgcgaacaacaacaccgtgaagatctacgacctgaatttcattaatgggcaccagaacacttggaactacggcagggttagtatcacaaattccatcgcttacttcaacaactgttcattcctcaactccaccaacgggtactatggtagtgtctacatcgccaagacctcgcaagcacatttcaacaattgcatcttcaataacaattacgcaaagtttggtggagctatcttcaataacaatattatgtattgtaaaaattgtagctttgagaataacagtgcccagtctggcggtagcttgtgtataaacggcgagaataacggagtggaaaatacaaacaattatacgtacctggaaaattgctccttttcagataactccagcacagcccacggggcagtgatctactgcgatgagtggtcaaaaggttgcttcaacaattgcagctttgaaaaaaacagcgcaaccaccagtggaggcgccattaccatcgatggggcgaatatcgacatcaacaactgcagtttcaacaagaacaaaaccggaacaagctcaacatacaacggaggcgctatctggatcattaaaaacgatataagcggggcctctaatgtgaacatactgaacacttcctttagtaataatagcgcttcgcaggacggcggggccatttatctgaacggaacttgtgtgcttaagatttccaactcttcattcaacaacaacaccgccactcgctatggcggaagcatacggaactaccagggcacagctaccgcgtatctatgtggctttctgaagagctccgacgccacgtacggcaccatcaccaagaatgggtgctatgggccctga

SEQ ID NO: 4405 - DNA, 717 bp, synthetic construct
  source 1..717: mol_type = other DNA
atgatcggtgtgattctggccgccgggatgggcacaagactcatgcccctcactaaagacatcccaaaggctctgctcaaaatcaatgagactaccctgcttgagcggatgattaagaactgcatcaatgcagacataagcaagtttatagtggtcgtgggctataacaaggataaggtgatcgatctgtgtcccgaaatagcggaaaaatacgatatcgaaatcaagaccattgaaaacgaaaaatacgatgtgactaatacctctgtaagtacctacctggccagcaaattcatcgaggagaacgacctggacgactttattctagtcaacggtgacaatgtggtggaccctgagatcattacgcgcctcgcagttagccagaatacaggcatgattatagataacttcaaggagctgaacgaggaatcattcaagcttatcatcgatgatgagtcctttaatgaagacaagacaatagccaacggcaaaatcaactccatcgggaaagggttagacattccatccagcacaggagagttcatcggagtgtcgaaggtcgtatcagatgacgtcgcccaattcaataggatcttggagaaattgattgaggaggacccgcagaactattacgattttgcttataaggacctgagtctgatcaagaccattgacttcgttctcacgaacggactaaagatggaccggaatcgatga

SEQ ID NO: 4406 - DNA, 1221 bp, synthetic construct
  source 1..1221: mol_type = other DNA
atggcggaagagaaacggagctttaagaagctcatcaaagacatcctgtacatcagtgccaagcgcagcgccagagccctttattatattggctcatacatcatccccgcaaacgagaaaataatcctcttcgaaagcagcaatgggcgaaactacacggggaatccaaaatacatctatgaagaaatcgtcagccagggcctggacaaggagtacaagtgtgtctggtccttcatgcatccggataagaagatcccaggtaatgccatccaggctaagagatcctttttcaagttcctctattacaccttgcgtagcgggacatggatatttgactcccgccacttatactacctgaagaagaacaagaaaaccaaatacatccagacatggcacggcactcccctgaaaaagctggccctggacatggactacattgacatgagtgggaaccaggatattgaagcataccacgaggagtttcggaaaaacacatccgcctggcagtacctcatttcacaaaacgagtactcgtcaaatatattcaggagggctttcgactttaagggtgagatgcttgagatcggataccctcggaacgacattctggtaaacaaagacaacgaaaaggacattgatgagataaagacccgcctgaacattcctaaggacaagaaaatcattctatatgctccaacttggcgggacaatcagttctacaccaaaggccaatacaagtttgccacagagatggacttcgataggctttatgaagagttttcggatgattacgccctgatcattaaattccattacttggtgaaggagaacatggactggtccaagtacaatgatttcatcatcgaatgcgatgcagactgggacatccaggagctgtatctaattagtgacatgatgatcaccgattatagttctgtgatgttcgattattccatactgaaaagacctatgatcttctttgcatatgacctcgatgactataaaaacaatctcagggacttctatttcgacatggtggaagatgtgcccggccccatctgccagactaacgaagagttggttgattttattaaaaactacagcgaaaatgcttataagaacacgtttggagagaaatacgagaagtggaatgataagttcaaccaatttgacgatggaaaggcgtctcagaagattataaatctgattaaagagcgatga

SEQ ID NO: 4407 - DNA, 1053 bp, synthetic construct
  source 1..1053: mol_type = other DNA
atgaaggaatctagcttttacatcaaactatatgaagagaacaactccaccgaccatatctcgaactcaaacaagtccgtacaatgcaacctttgtgctcgtgaatgtaagatcaaaaataataatacagggttctgcaaaagccagaaaaacatcgatggcaagttattcgccctgaactaccagcgcatcgccagctaccatatagatccaatcgagaagaagcctctctaccacttccttccaggctcatccacgtactccatcggcgggtttggctgcaacttcagctgtctcaactgccagaactatatgctgtcaatgaacagttacaacgaaaacaacagtattaagattctgccagagcgaattgtgaaaaatgcactggacaacgattgcctctccatatcctggacctataatgaacctacactctactttgagtttgccgaggaaacttctcggttagcgcacagtcagggcctgaagaatgtgttcatcagcaatgggtacatgggcgaagaagtcttgaaagaaacagtgagtttcatcgacggattcaacatagacctgaagttctttgacgatgagctctatagaaagatttgcgggggcagactagacatcgtcctggacaacctccggaccatttacgagtcgaagaaaaagtacaacaatcacctggagataaccactcttttgatcaatgacctgaatacggagaaggagcatattcgggcaatcagccggtttgttctggatgagctgggtcctgaggtgcccctccactttagcaggttctttcccatgtataaaatgacagataaggcccccactgacattgactatcttattagggcccgcgaaattgctatctctgaggggctggagtatgtctatctgggaaatatgcccgcggataacaatacctactgcccggagtgcggtgagttgctgatcgagcgcaataggtactgcaatcgagacaaaaacagaatcaaggatggatgttgtgtgaattgtggacacgaattgaacttcgtgttcgactga

SEQ ID NO: 4408 - DNA, 1242 bp, synthetic construct
  source 1..1242: mol_type = other DNA
atgaaaagcactttgaaagtctctgacatcggtgaaaagcaactcatcgagcgaatcatagagaagtcaaaattatgttccctaaagaaccccttcgacctcgatgatttcaactccaattacccaagtagcaattttaagaccagcattggagacgactccgccctcctgaaccagaatctcaatacgaatcactatctggtggcatcatccgatatgctgatccagtccagccattttccaagggagatgacgtactaccagatggggtataagtctgtcatcgtgaatgttagcgacttggcaagcatgggggctaaaaacataggattccttttaaacatagctatccctaaggacaccagcctggacaacttcgacgatctcatttgcggcattatccgggcctgcgacaactacaatattcctcttgtcggcggggataccaacgaggcgagtgagattatcctgtccgggaccgcaatcggacaggtagaaaagggcaaggccctgatgaagcacggattcaaggaaggagacttggtgtcgattagtgaccaccttggctacgccgctctgggctttgagcttctgaaaatcaaggaagagaatatcgacaaatacaacgacataattttccagattaacaagatcgaccccacagtgaaggacttggctctgtttaaggccttgaagcccgaggccaaatatgaagagggccggattctggcgagccacaacagccaggaaaaccgcatctccgcaaccgacatcaccgacggcctggcgagtgaattttatgagattctgaacgccgataaaaagtattatctattcaacaaagatactgagtcccacaacccgaacgattcgaatgattctaatgacctgaacaatcagcagaacaaccagaataacacaaacaaccaagacgtgattgatgaatatgatgatagcaactactcaaaaggcatcagaatctacgaggacaagctgccagtggacgacgaatttaagcaaatagccgatgttctcggtatcgattaccttgatctgttcctgcatattggggaagactttgagctcctcttcacaatcaataaagagctaaagagccagctggaaaacgatatgaatttctacgtcatcggtgagattacaaacaataacactgtggagatcgtactctctaatggggatataaagaatatcagttcaaaaggatacgagcatctgaaatga

SEQ ID NO: 4409 - DNA, 684 bp, synthetic construct
  source 1..684: mol_type = other DNA
atgaatttaatcaagggactggacaagaacaacgggcttgatctgatactgcatgcgcccggaggagatgtcggggccacagaatctattatcgattatctctacgaggtgttcaacggtgacatccgcgtaatcatcccacaaattgccatgtccggagggacaatgattgcatgctcaagcaaggagatcattatgggtaagcagtccagcctgggcccgattgatcctcaattcaatggcatcccagctgagatagtcatcaaagagttttacagggccaaaaacgaaatttccgaaaagccagagaccatccccttttggcagactaacatctcaaagtatccccctgccttcattatcctttgtgagaacgcaagaaaatggagtgacgaaatcttggacaagagcctccgatacgcgatgtttgacgggtcggacgaggaaaaaatcaacaaaatacggctggaactcggctctcacgagaatacgaagagtcacggccggcacctgagtgctaaggactgccaggagctgggcctaaaaattagctacttggaagatgatgacgagttccaggacaccgtgctctccatccaccatgcctgcatgaattttttcagcatcaacaaggattgttgcaaaatagtggctaataacgacagcaagttcttcattcagtga

SEQ ID NO: 4410 - DNA, 168 bp, synthetic construct
  source 1..168: mol_type = other DNA
atggccgtggaatttaatgaggtgatcaaaatgaacgaaagctatgtaaagaggctataccgggatctgggaatcccgtactaccgccccaaaaaagacaagggcgacgaggagttcgatttcttcccaaagtatgacctcatgcactggattcctctgaaggtctga

SEQ ID NO: 4411 - DNA, 321 bp, synthetic construct
  source 1..321: mol_type = other DNA
atgttcaagatacgcaagctgtccaataagattatcgttctcctgatctgcggcctactcatctgttccattcaggcctgctcggccagttgtactgcagtctacgtggggcctgatgtcagtgcagacgggagcaccatcattgcccggtgcaatgaccaccagggagtgtggggcaaccatatcacagtgaccccaagggtagagaacaagtcaagcagactgatggctgtgtgcgaagacggtagcgtgaaaacggagcttccggctaccacttacaaatacacagccacaccctatatgaacagcaccaaagcgtga

SEQ ID NO: 4412 - DNA, 1452 bp, synthetic construct
  source 1..1452: mol_type = other DNA
atggacaaccagaatcagtggaatagtagaattgcgtttttactgtcaatgattggcgcggctgtgggactgggcaatatctggcggtatagctacgttgtgtacagcaacgggggggggactttttttattccatacctggttgcaattctcatcatgggaatcccatttcttgtcctcgaatatgggattggtttccgccacaaagactctttctccaacatcctgaagagcatcaaccccaaactcgaatacatttcatgggcattggttctgattatctactttgttctaatctactatctggtgatcgtgagttgggatttggtctacttaggctcgagcataaatttcagttggggcgctgattctgctctttatttcgtgcagaatgtcggaggcagctcgaacctctccaacatggcaagcttcataatccccaccaccatttccatggtcctcgtgtggatctgtgtctggtacatctcccacaaggatctgaatgagggaatcggtaaggcctcaaagattctcatccccctgcttttcggcataatggccttcatcattgtctttgcactgacccttccaggtgcaggcatcggcataagcgccttgctgaaccctgattggcaaatgcttttgaacgttaacatttggctggcggcctttagccagattatcttctccctcagtatgggtgagtcaattagtctgacatatgccagctatctccctgagggctctaagctcaccgacaatgtgctgattgtggtgtttgccaactgcgcctttgaggtctgcacggcgttcggaatcttttccatcctggggtacatgtcctacacgtccggaacaccgatcgtggaattggtcagcgagggcacaggacttgtatttgtggtgttcccaatgattttcaatatcatgggggccatcggtcacataatcgctcccctgctcttcatcgccatcttgttcgctggaattacttcagctgttgcagtatttgagccgatgatcaactcaacagtccataagctgaactggtcccgaaaaaaggccgtgacggtgtggtcgatcgtaggctgcatagtgagcctgttattcaccaccggcatcagcagctatctggtcggaatcgtggacagcttcatcaccgagttttgtatcctgctgctcattgccattcagtccataatattcacttggttctacgacatcgaaggcgtcattcctatattgaacgaaaacgacagggtgaaagtggggaagacatgggtatttgtgctaaaatacatactgcctatcctgctattcttcatgtgggctagtggggtgtatcatctgcttctgaacgccaataccttcgagctgatcgtgtatgggctaattacagtgttcattatcattctcacttacgtttttaccaatatccccgagaagagctga

SEQ ID NO: 4413 - DNA, 462 bp, synthetic construct
  source 1..462: mol_type = other DNA
atggaaacaattctgaccaacgaaaaagacgaacggttcatcgagctgagcaacgagctgaacaatgagtattactccaacatcggagaggacagcttgaaatatctcgactacaacaccctcgaagatccacacgtggtgctcctggtgttaaactggggcaaccccatcgcctgtgccagctatcgaatattcgatgagcagtccgttgaaatcaggagggtctacgtaaagaagagataccgcaataaaaaaatagcttacaagcttgtcaaggccctggagaagctggcaatggagaacaatttcaaatactcaattatcgagactggtagtgagaatatggctgcgatcaacctgtataaaaagctaggctacgaaaagattgacaattttgggtttttcaaggacgatgatgcatgcatctgcatgcggaaggagtttaagacgcttattttctga

SEQ ID NO: 4414 - DNA, 468 bp, synthetic construct
  source 1..468: mol_type = other DNA
atgcaccaaaaattcatggaagaggccatcaaagaggccgaaatctccagcaaggaggggggattgcccatcggcgcggtcctggtaaaggagaaccagattatcagccgcggccataacaggctgattcagaaggattcatccatcctccacgctgaaatggatgccatcgaaaacgcagggagacttaatcacgaggactaccagaagtgcaccctgtatacaacattaagtccctgtccaatgtgcagcggggccgtgattctgtacaatatcccgcgggtggttatcggagacaatcagaccctgatgggcgcagagaagctactgaaagacaacggtgtggaaataattgtcctgaacgacgataaatgcaaagagctcttcgaagactttgtgaacaataaccctggaatatgggaaaatgagcttgctaaggtgggcaacactacggagctcaaggagtga

SEQ ID NO: 4415 - DNA, 969 bp, synthetic construct
  source 1..969: mol_type = other DNA
gtgattattatgagtgaagacactgctgtgctgttactgtcccacggttcgtcactcccttacgccgaggaagtttttaaggacatatgcgcgaaatttaaggagcagactgagtttgacgctgaggttggctacatgaaagtggccaagccaagcctccctgaggcaatcaatatcctcaaggagcgcaaccccggtctaaaaaggatcattgccacccccgtgtttctggcccctggaatccatacgaacatcgacattcctataatcttgggccttgagcccaaggagaccgacccacgccagcccgacggcaattacccagaaggccactacctctatggcctggaggaggtggatttcgatggagagttaaaactgatcgatgccattgggccgaatccacgactcattgaaatcataaacaacagaatagacaccgctcttgaagactccaagctagacgatgatgcaaagacagccgtcctgcttgtatcccatggaagccggctgaactacaataaagagttcatctcatgcgtgttccagcagtttgaagaacaaaccgattatgtctgtgacttcgcattcatggagctggtcgatcccaacattccaacgacaatcaacaagctggtgagcgaaaatgaagtggaccggctgattgtagtccccgtcttcatcgcgccgggcgtgcacactacaagggacattccgacaattctgggcctgatcgaggatgatggtagcgggcatcaccaccatcaccatcatgatcacgaccacgaccacagtcacgaccacgggcatgaccatgaccacgggcactctcacggacaccaccaccatcatcatgcccacggggatgagaagatggagttcgacggagaaatcctgtatcctgaacccatctgcgatgatgacatcttgatcgagatactcgaaaccatggttaaagaggctttgtga

SEQ ID NO: 4416 - DNA, 399 bp, synthetic construct
  source 1..399: mol_type = other DNA
atgtcagacactgtgcgaacatggcgccatatccagcagcggtacaacctcattggaagcaagtgcacgacctgcggtcaggtgttcttcccgcagcgcgtgatctgtcccgaatgcaggagaaaagggaatatagaggacatccaattttccggaaaggggaagattcacacctacagcgtgattcggacacccaccagtgactttaaaaagatagctccatatgcggtcgccatcattgagctggaagagggcgcaaaggtcactgcccagattgtggacgccgatgttgacgatatacaaatcggcgacccagtggagatggtcttcagaaagatcagggaagatgggcctgatggcgttatcagctacggcttcaagtttaaaatcgtaaaatga

SEQ ID NO: 4417 - DNA, 1158 bp, synthetic construct
  source 1..1158: mol_type = other DNA
atgaccatcaaaaagtatttcaaaacaagaaaaggcacgaagaagagtgtccaggaacgcgattatgacagcgattacagcaacaaagggctccacaaggagtcaagaatcaaaaacctacttaatgacaataaaggaaactatagcatcgtcattagcgccatcctactcatttcctttctgatcctctcgatcattgtgctgaacacagttctggaggaaagggaggagcacaccgacacaatagcatcaaaccagtaccaatacatcatcgaggactacaagcgaaatctgcctaacatcgagcgggaggccttggaagagctgagcttgtatgtcattgagaataagcgcccctgttttaactcccgtgatgacctcaaggagatcatcgatgaaaaactggctcaaaagaatcaggagtactaccagaactacaatattgagattaactcctcaatcatcgggattgaaaacaccagcgatcccttttcctacaagttcaaaacttatatttcaagtgtaaagggagacttttcctatgaggagatcgacgaatcgtacgtgaactgctataacctgaaagatcccgtgcctgtgctcttttgtggtgatgattcgagcttccgaatcgaggactacagtcttttaggtgacagcgactttggaactcatgactccaacttcgaaaatgatgattcctcttccaatcagaaggtattctatggccacagcctggctaaattcctcagaaggcaccatgtggagaactactcattctacgagaatgccagctctccattcataattaaacggtgcccatacgacccgtacaagcatcacggcgatgacaatggccgcatcatgaagaactgccgggacaacgggtactatcacgaaagcgcagatggcgcgtgctacctgtgtaggctggaaggaaagagcgggtgtgaccattatggctttgaaacgttcataaacccccagaagaccaatgagaccggcggtgtctccgcctgcggctctgaccacgtgatattcagtgatgacatctacccaggggtggaggttatttataacagtgaaaatgggttgaacgaaatactgtaccttgaccctcatggacacaaggtgaagtatggaatgagtgagtactga

SEQ ID NO: 4418 - DNA, 1017 bp, synthetic construct
  source 1..1017: mol_type = other DNA
atgtactccagcgaattgattctgtccctcatcctgattatcttcatcatcggcatcatggccaacataactgacagcgtcaatgaaaaggtcctgagccaggaggagctgtcctccctagaggccatcagcatagaatcggtggattatctcttgaacaatcccggaagtccaatgaactgggaggaagatgaggggctgaataatggaattgtatcacggcgaatcatccccggccttgccataaataaaaaatccgtggagaatggcttcttttatgaggaaagcagtagtgacgaggagatcatccctaactccatctcatatatcaagctcttaaagctgcaaagcaactacgacgacctgatcaatcggaacctctttaactcgaccctgaaatcctccataaccatttacccccacagcgatattgacatcatcgctatgggggacgatctggaatcatctagtgatgttgtggcgataaatcgcacagtgagatgtgactaccttagcaattttgtgatctataggttcaacgacttcgagctgtacggtgagaattacaaaaagaccgaactctgcaaccacgacagcaatgtcaatctatctaaccacagcaacgaccgacgctacttctggctgtgcaagaacttcagaatctatcggagttctttgaacaactataattattacctgatttctgactcgtcaataaggcacgcaaacagttactacatcctggaaagccttaaccgtacaagggacgacatggaacgcctcaacgatgaggtgattgaattaaacccgttctttgctgaggatatggtaaacagctctaacgagatttactcaattcattttaaggttccacacgatgatattgacgattttaaaactgtgatggtcgcaatccataagaacatgaccgacgagattgtctccaataaccagctgcggtacgattatttcaatagcggggaggtggacttcgtgctcaagacggcctacagatga

SEQ ID NO: 4419 - DNA, 435 bp, synthetic construct
  source 1..435: mol_type = other DNA
atgagcaccacaatccggattaacaaggacgtgaaagaactgctgaagttgaaatccgttgagacgggggtgtcgcagatcgatctggcaaatcggtacattctatatggcatcaagtacgacgacacccccagtaaaccgataaagtcaatcgaagagatagagaagctcctgaactacgatgagataagagagtctgtcgaagagattgaccttaaagactacgaatacgaaattccccagggcattagcctcgtgaaagagggagaagagaacaaacctatcaataccgaggaagaaattaagaagatcctgaaatatgataagccagagggggacgacgtgtcccgcagcatcgccggtatcatcaagacagaggaagtcactgatgcggtaaagctcaagaaagagcgattaaaggagaggtataagtga

SEQ ID NO: 4420 - DNA, 393 bp, synthetic construct
  source 1..393: mol_type = other DNA
atgattttcctggatacgacctacataattgcactgatcaacgaaaacgacaagtaccataagaaggctctaaaattgatggaggacgtggactacgaaaagaagatgactaacagtgtcgtgttcgtagagtcactgaacatgctcgacaaacgcagcacacagaaggatatcgataacattgttaataagctttatcagctggacaaaatacactgtgtcaatagcgccaatatcaagaacagcctcaatatctttaaattctacaatggctcgatcaactttgccgactgcaccatcattgactccatgatcacatatcggatcaacgagataatctctttcgattccgactttgataaggtgaaagggatcaaaaggatttatatttga

SEQ ID NO: 4421 - DNA, 2289 bp, synthetic construct
  source 1..2289: mol_type = other DNA
atgctagttaaaaaaatgctgcgagacctgtcggaccacaagattcagtttgtatccatcttcctgatggccttcctcggcgtgttcgcctttaccgggatcaatggtgaggtggttggaatcactgatgtgtcaacacactactacgaagacaccaacctggctgatggttggatatatggcgagaacttcgataaagacactctaaaagatatcaaaaacatggaagaggtcaagaatgcccaccgggagatggtcgtggacacggtagccaactactcttcggaccccgacataactctccacatcctggaaggaaaacaggagatctccaaattccacctgtttaaaggaaaagactttaaccctaacgacaaggaaggcatctggatcgacaagcgctttgcagatgcgcgggacctcgatattggagataagatctccctgaaattcgatggaaaaaccgtgtctaagaccatccgaggaatcatctacagccccgaatatgtctactacatccaggaagggagcatgatccctgacttcagccaagtgggctatgcattcatgccaagtaagggggctgattttgacatcgagtacaacagaattacgatcgacggcaagaaggagctggacgcgaaagagttcagcagtgaggtcagtgagctgttaggccaatacacctacgcccagttcgtgccacgcgaagacaacgtaggggtcagcacattgcaggatgagatagaccagcataatatgttttccgggattttccccattatctttgtgatggtggcccttctgaccctcttaaccacaatgagcagggtgatttccagtcagcgcacacagattggtacactgaaggcgatgggatacgacaacactacgatcattctccattatctcagctacgggttcttcctatcctttgcaggctccctcttgggccttataataggtcctctcaccctgccctatctcttctacccaagcatgtcagcaatgtatagccttccatactggggtcccgcatggaatctcagtttcttccttgtggccgctcttatggtgatcatctccgtgcttgtgacgttcatctctgtcaagacaatcaacgatgagaacccggctgactcaatcaagcccaaagtgcctaaggcagttagctccggaataatggagcggacaaagatatggaaaaagatggggttcaacgggagatggaactacagggacgccaaaagaaacaaggtaagggcaatcatgagcatcttcggcgtgtttgcctgcgcgttgctgatcatgtccgcctttggaatgtacgactctatgaatgacgttcaggactggcaatacaaccagatttacaattacaacagcaaattatatctggatgagaacattacggatgctcagctgagcaccgtcgtgaaggacaccaacggcgaagagatgatggagcaggccattgaggtcaagtatcgggggaataagcataccgcttcgatgacggtctataacgatagtgaactctttagaccaaccgacatcaatcgtaactacatagagatagatcccgatggcgttgccattagcgaccggctggctgaagtcttagggctgaaagtgggggataaggtgaggtggcacctggtgggcaatcctaaatggattgatagcgagatcactcagacctattcaactcccttcggccagggaatcatcatgtctgaaaagacctatgaaaagtatggcggcgatgactacaattattcaactaatgtggttttgaccgaggataaggacattaagaactacaccggagtcaccagtgtctcgacaagggaagatattgtaaagggctgggaggacatgactgaagccatgaacctgatggtttatgtgctgataatctttgctgtcattttggcggtggtggtgctgtacaatcttggcctgctctcatttacagagattcagcgcgaaatcgccactctgaaggttctggggttcaatacaaaaagcttgcgccgactgctgctcactcaaaacctatggttttccacaattgggttcattttggcaatcccaggtgcctacattctcatggaggccatgatgggcagtaccggagctgactattacttcccgataaatatctatccgttgaactttatcatcagcctgattatgacattcggtctgtccattcttgtgaatctgctcttttcaagaaagattaagaaggtgaatatggtcgaatccctgaagagcaatgagtga

SEQ ID NO: 4422 - DNA, 705 bp, synthetic construct
  source 1..705: mol_type = other DNA
atgaccacaatgatagaatttcaaaatgtgagtagagagtaccagagtggcgaccacatattaaaggcactggacaaccttagcctaaagatcgaaaaaggggagtttgttgttatcctgggacccagcggggcaggcaaatccacatttctgaacctgctgggaggcttggacaccgccactagcggaaaaattatcgtcaacggggaaaacattgccgattacgatgataatcaactaaccaaatacagggcgaaggaggtgggcttcattttccagttctataacctgatcccaaatctcaccgcaaaggaaaacatcgagcttatgtcggatattaccaatctcaaggtggacggcaataagatcttggatagcgtcgggctcttagaccatgccaaccagttccctgctcagctctcagggggagagcagcagcgcgtctcaatcgctcgggccattgcgaaacaaccggctatgctgctgtgtgacgagcccacaggtgcactcgactccaatactggtgtactgattctttccttgctccagacaatgtgccacgagaagaacacgacggtggtgatagtgactcacaacgccaagctggccgacgccgctgacaagctgatccgaatcaagaatggccagatcgaggaggtgaaaatcaatgaaaacccactggatatcaacgaaattgagtggtga

SEQ ID NO: 4423 - DNA, 1332 bp, synthetic construct
  source 1..1332: mol_type = other DNA
atgaagatgattcgtcaattcggggaatcctccatcgctctggtcgtcaacctaatactgttcttattcaacggtatcaaatacatctttaccctgcccaatcggatctacgtctatataaagctctttttagaagacacggatgccgtattgaaggagagcctgattgctctgtctatctgtgcggttggggatctctgcgcagggatcatcctggggaacatggaatttttcctaaagacctatcccggcctgatggtcatcattccaggggccattggcatgcgaggaaacatctttggctcgtttggcagcaggctgagcacacacctccacattgggaccttgtctcctgagtttaaacggtcagagatcctgagcgagaacattacagcatccctgatcctgactatggtactatccattctgctggctgttatcgctaaaggcgtctgcattgccttcggatttaaaagcataagcatctatgacttcgtgcttatcagtttcatcgccgggcttatttccactatcattatgctgcctatcacgatgttcatcagtctgaagagctttgagggaggctgggaccccgacaacatcactaccccattcattgccgctgtgggagacttcttcaccctgccagcaatcattttaagcgtgatcattgtgggattcatctccataatccccatagtcaagatgatcgtctttgtggcggtgatctttgttacaatcgccgccctcattgcaggatacacagccaaaagcgatgttcggcatattgtgaggcagtccacgcccgtactcttcatttgctcactcctgggaacctttgccggtggcattttgaacgattcgctgacaaccttgctcaagaatcagactctgctcacgcttgtgccactcttctccggggaaagcggcggtttggtaagtatattaggcgcacgcctctcatcgggcctgcactcaggcctgatcgaccccgtgctcagacctaagaagcataccgtcgagaattttgtcgcgatactgaccctttccgtggtgatgtacccggtgatcggcttcctcgctgagtcaagcaccatcgccttcggcaatatcggggtgggaatacttgaaagcatgtcaatcagcttcttggccggtatgattctgattctgctaatgttgctggttgtgttctacatctctaccatcagttaccgcagaggactggaccctgataatattgtgataccgctttccactagcctcacagacagcataagtacactgattcttatcgtggtgagtcttggtctcctgaactatgtgttttga

SEQ ID NO: 4424 - DNA, 609 bp, synthetic construct
  source 1..609: mol_type = other DNA
atgcctagcgtgaaagacattctcatcgagatgaaggacatgtcggagctgatggtcgacctggcctattccgcggtgctctttaacaaccgggccgcggctgaggaggtgatcaccttggagaacaagcttaacagcatgaactacgagattaaaaaacagtctctggttgccgcaagaagcctagaggacgcagaaaagctaacaaccttgctggagatcgcagaagctgcagaatccatcggcaatgccgctaaggacctggccgacctcacattgaagggattcgaaccccacccagtcttcaaaatggtgatggaggagagtgaaaagaccataatccgcctcaatgtggacgaaagttcagttctggtgaacaatagcctgggggaccttctgttactcaaccgcactgggatgcgaatcatctccatcaggcggggggattcttggatttacggcccggataagaacacggtgatcatagccggcgatgtactgatagctaagggctcagaggccggtactgagattattgaaaaacttgccgagggagagatggatctggaagacctggtcaatatggaagacttcattgatgataattga

SEQ ID NO: 4425 - DNA, 1365 bp, synthetic construct
  source 1..1365: mol_type = other DNA
atgatgatccacctgattggtattgggaatgataaaggaaacatcacgctgaatgctttcaaggcgatcaaagaagcagacgttattatcaactacaatgatatcgaccttagtttctttgacagcgagattaaggacaaagagatcatcagcgcgattgacttgatcaacgacatagatttggaggatgatctcgatctgaacgatgatgtagccgagaacatcgactcggatgaggacctggatagcgaaatcaacagtgacgacctggaatctaacattatcagtgatgaccttgagtctaatattatctccgatgacttagagtccaatatcatttccgacgacttggaatcgaatgtgggttcagatgatctggaatccgacattgacagcgatgacagctctgacatcgatctcgaagatgacctaaagagcaacccattattggagcgcatactccaggaaaacttcctgattgagctagccatcagcaagagcttggaatccaagcaggtggctctcatcgtctcagatgacccgaatatcctcggcctctccaatcgcttcctgcaaatcaagtccaagtacagcgacgtcaaatacaaaatatatcctggggtgtcttcaataagccagagcgcatccatagtgggggcacctctgggggactttgccctgatagacctctcaaacccaatcacatcgctgagcgaaatcgaggacaaggtgaagcacattctggacgccaatctggtcctggccatcaagaaccctatcgacgataaacgggaggatggaagagaggcttacaacctcattaagtcaatcataaacgaatacaacgacgaactgctcactgcaatagtctatagtgacggctattactctatcgatgagtttaaaaacatctacgacgaggacattgacgaaaattcaatctttttcattggaaataagctttcctacattctggaggaaagtatggtcacctcctccgactatattgtggagaccaaacttatcagttggtctattgagttctttgagaggtacctgaacggcgaggtgccaagaggccttgactatgactgcgatttccttccctgccatgtgaacctggaagcctgcgacttttgctactgtcccttctatccctgcgccgacggggttacaggcggagaatggattaaggacagggatgtgtggagctgtcagcactgtgattggatacacctggaggagccctgtgtagctatccgagagggcctggatgacatcctgaaggagattgacgatttgaaggataaacatatcgagctactgaaattacggcgtaagagtctgctcaagaccctcaaatga

SEQ ID NO: 4426 - DNA, 786 bp, synthetic construct
  source 1..786: mol_type = other DNA
atgaaaatatcacggatcatcctaatcctgttgctctttgtggtatttttcgagataggactgttcagctcatataccatcgtcaatgccgaagttccaaacccccaggagctgtgggatatgcaggtcaacactgtgagttcattcttcagccctgagaatgtcggcggccttctgattaaggacccagacaacattaacgtgacaaataaatacgatctggccacagaactggcggaagtggccgaggtggatggcgtcaatgtggaaaatatgacaatcaccaccagtgcagatactgacgaggagccattcaatgcaacggtaacggccttcggatattccaccccgaaaggaaattccggttccatcgtgattagcggacagcccgattataagattgtggctagcgtgcagatcaagcacaccatcaacggctacgaagcggatttggacactatcaacattgagtccatcttaaaggtctacgacagcaacgacgctaagaacgttagctactccggttacgactcaggacccagcggcgcctcgcaaagctacagctattccagcgactcgtccagtagcaacgacaacgcctacatctcgtcagattcctccagcggcagttcaagctatgacagcggcgcatcttcgtcatctggctcctacagtggagggtccagttacgatagcggggctagctccgggtctgggtcttcttctgggtccggcagtggggacgttgtgattaacctcctcagtcctatatttagctttatttga

SEQ ID NO: 4427 - DNA, 1974 bp, synthetic construct
  source 1..1974: mol_type = other DNA
atgacagctgaaaccctgcttaaatttgcgcgcaaaggaatcatcctcacaccaggggcgtatgatttgattctaggctccgataatcctctggacctgtccagctcaattattctcaagttaaaaagcggaaagtactctaatgaggacctggtgccggtcgatgagaagcagataaaagagatgatgaaagcgctgggcatcagtgtgaaggagaacaagggcctcgatcatggctcgctggacgacttcggtagtcggacgagtggcgagggtctggaacgcaagattgaaacaagaccggaaaagactgtggaaaaggcagtggagccccagcaggccgtggaaactagagagcagaaaccacagcagaccttcaagcccacacaggaaaaaactgtggagaaacccatagagaagccacaacaaaccttcgagcctaaccagcaacggaccgtggagaagcctatcgagaaaccccaacagacattcgagactcctgctaagcaaacccgggcagaaaaaccaattaaacctcagattaagcccattagtgcagagaagcccacagaagcaccacagaggcaggaaactaaagaaatcgaaaagaccatagaaaagcctaaatctgataagcccaaagttaacgcaggctatcccagtgatcacattgtgaagatcgacaatgttgaggtgtctgaagagacgaagaagaaataccggagaaacctgacagagtcgaaggtcaactttgacgggttcaaggtcctaaaggacacgagcaacaagtcatacacaagcggggagatcggaaaccttatcgaatatttccagaacaggtacaagaagcttagcgacattctgtccaagaggcccgaactccggacgtggcagaaaatcaacgagatcaccgagactcagactgacctcaatctgatcgtaatgattaccgacatcaaaagcacgaaaaacggccattacttcatagaagtggaggacgacaccggctctatgcccatcctggtaagcaaggataacgaccagctgattcgagccgccaagaacctgatgaaggatgaggtcattggtattgtcgctcaaaaaaggccgggcaatgagctggccatctgtcaaaacatcatcgatccgggcgtgccccgcatcgctaaaaaggaagtgaactttggaaccgtatttacctcagacattcacatcggaagctccaccttccttgaagacgcctttacaagattcatcaaatggattaatggcgatttcgggagcgaggagcagatggagatggctaataacgtgaaatacatgatcatcgggggcgatatcgttgacggtattggggtctacccaaatcaggataaggagttggcaataaaggacatcacagcccagtatgacgaggccgcccggctggtcggcgacatacgtagcgacgtaaagatcatcatcactcccggaaaccacgacgcctcacgagtggctgagccacagcctgccgtccctgagaagtatgcgaaatccctgtacgaattgaacaatgtggagtttctctccaacccaagtatggtgtccctcgacgggctagaagtgctcatttaccacggtcgcggaatagatgatatggtgatgggttccaatgacttttcacacgagcgaaatgaccttgtcatgaaagaatttttaaataaaagacatttggcccctctctatggggagcgcaccccactggcttccgagctggaagatcacctcgtcatcgatagggtcccggatgttctgcacaccgggcatgtgcacataaacacctacacaaactataagggaatccattgcattaattcgggaacgttccagactcagaccgagttccagaagatctacaacattgtgccaacccctgccgaggttcccatcatcgatgttgggggcaattacaagcagttgaagtttatagactga

SEQ ID NO: 4428 - DNA, 588 bp, synthetic construct
  source 1..588: mol_type = other DNA
atggaaaaggagatagtgaaaagcgtcgtggagatgagcgcctatgtgttcgagcggggccttgtaagcgggaaggccggcaacgtgagcgcacgcttcaagacagaccatggtgacatagtcgccatcacgcccaccctgaagtccctagcggacttagaggataaggacattattctggttgattcagagggcaacaatctcacgaaaggcaagccatcctctgaactgggaatgcacctggccatctaccgagaaaagccggatgtgtatgggatcgtgcacacccactcaccttacgcaaccggattcgccttttccaacaagagaatcaagcggctggaggggttcgggcagatcaaatcggaatacattaaagacatcgactactataagcccggcagtgaggaactggctaaaaatgctgctgaagcattgaaggaagaggacgttattgtcctcaggaaccatggagtcatcgccactggttctactgtgaaagaggcggccacacttgtagagtttgtggaagagagtgctaagacccagtttgtgacactcgtcttgaatagcctggatgagaaatga

SEQ ID NO: 4429 - DNA, 492 bp, synthetic construct
  source 1..492: mol_type = other DNA
atgaaaatcgaatttgacaccataggcacaatccactcaccctttaaagagctagaggggatgcctatccagccaaccggtgcgaagggcattaaaggggagatccacattaaagatgaatataagcccggactcaaggatatcacggggtttagccatctgatattaatctaccacctgcataaaaccaatggtaatgcactggaagtgaagcctttcatggacaacaagacacatggagtcttcgccactcggagtccgaagcgcccaaacaacatcggcatgactgtggttgccctggatagcgtggacgatgactgcgtcctccacatatccaatgtagacattctggatggcacgccacttttggatatcaagccctacgtgccccaactccacgaggacaccattgtggacctgaggattggatggttcgagaccaaccacaaaaaggctaagacacagaaggccgacgacagattcatcaactga

SEQ ID NO: 4430 - DNA, 249 bp, synthetic construct
  source 1..249: mol_type = other DNA
atgacaaatgagacttttgaggaggtctcacagatactcaagcacatcatggagaacccgagtgtgccacgaaacatcaggcgcgcggcagatgaatccttcaacacgctcaacaatgaagaagaggacgaaaccgtgcgggccagcgctgtaatcatcaaactggacgagataagcaatgaccccaacattcctgtgcatgccagaaccctgatttgggagatcctgtctaagctagaagccatttga

SEQ ID NO: 4431 - DNA, 357 bp, synthetic construct
  source 1..357: mol_type = other DNA
atggtcaagaacgaaaagttcataacagtcatctgctttaataaattccacggaaagaagatcttcaaaatcgggagcattctcaagctggttaaagagcccgacaacgcctatgacgccgaggcgatccgaattgagatgagatacgcaggtaaggtgggctacctggcaaacagcgtgaagacggtagtgcggggcaccatgagtgccgggagggtctatgataagataaatgatgaggctgcctacgctcaggtgaagttcatctcaaacgaaaatgtgatcgcccggattctcgaggaggaagagatcaaagacctaaaacgcgatccagaatccgacctgaactttatttga

SEQ ID NO: 4432 - DNA, 1008 bp, synthetic construct
  source 1..1008: mol_type = other DNA
atgtcaaacacagagaaaatcaatgtgaacgtcgagtccaataaagacaaggggttcagtgatgacatcaacacaatcttcatcaacttcaatggtctaaacattagcctggagctgatggagaaacagtcctataaaaatatggacatcattcctataaagacggacagcttcgcaaagaaagacttcatcacgctgaagaaaggctttgagatgggccttgtggaaataaaggagctagagaatgaggaggtaaacactgtcatctgcaaaaacgatgccgtggtgcccctgatcctcatcgacggtgatgagatcatcggcgccaagcaaaaccggattatgaatgaaagcctgctcattccggcgaagtcgcaggtgaaaatcccagtcagttgtacagaacacggccgctggcgcttcaagagtaacgagagagagtttcagcactctgattactccctgaacttcgagagccggagaatcaagtcaattgccagaaacgaatgccgagactaccagtctgatgtctggagtcacataagcgatctcgaagacaggcactcctttcgctcaaggaccagcagtatgaacgacaattacgagcattccaagaccgctcaggacgactacatcaagaatctgatgattgcagatggagctaacggtctcatttgctttatcaacggggaatttaaggggctggagctcttctacaaccacagcatctataaggagtactacgaaaagaccttgaggagctacattattgaagccatctcgtatggagggaataataccgtgggcgaggagctgtttcgagtgattaatggcgaaatgaacgacttgtctagctccgaatttatcgagtatgaaaccgttggccttggaaagaacatacggttcgccactaaaggaggatcagggtctggccttatattcgaggatgaattagttcatatgacttacttcaaggaggattccaataaaaactatgaaattctgtga

SEQ ID NO: 4433 - DNA, 1026 bp, synthetic construct
  source 1..1026: mol_type = other DNA
atgatcaccgagctgtactccaactcaatctatatgttactgacaatcctgctcttttccctggcagtggatctgcttctaggtgagttcccaatgcagatccaccctgtagtctggatcggcaaaatcattagctttttcaagaacatcctaatcaaatacgacaataagatcgctggattgatcctcagtattgctgtcatcattgtgtcaagccttatcgtgctcatcccaatggccattgcaaggtacctcctgccctataacgatatgatgatttatctcttcaagctgatcgcgattttgctgctgacttcgaccttttcggtcaagctgctgctggactctgcccgggacgtggaaaaggaccttcgcaacaataacttgaacaaagcacgtcaagccgttagctacctggtgagccgggacactaatgaattgaataaggagcacgtcatatccgctgtcatagagacactcagtgagaacataccggactcctatgtgagcactgtattctactattcaatcgttggaatcatagctagcctctgtggcattggagactttgatgtcatcattctagccgttctggccgccttcatccaccgagtggtggatacgatggactccatggttgggtacaagaccaaagagctctacaatatcggttttatccccgcgcatctggacgatgctttaaactacatccctgcacgcttctctggcgctttgattgtggtgtctgccatgtttctccggctgaattggaaaaatgcattgtttatcatgagaagggatgcaaacaactgcgacagtcccaatagcggctacacgatggccacagtagcgggcgccctgaacattcagctcgagaaggaaggggtgtataccttaggggataacataaatccaataaacgtggactgcattgaaaaggccgtggacctggccagactgaccattttccttgtgacaattttcttcatgttcgtcttcatggatctgattcttcttatgctgtga

SEQ ID NO: 4434 - DNA, 465 bp, synthetic construct
  source 1..465: mol_type = other DNA
atggctgtgatagacgaggagcaggtgagggaatggttaatggaggaagacatgattagagagaagatttacgatgaaaatgccaatttccactacatcatcaacttcccaaacaacaatgcaatggatgtgatccagccccggaccaaggaggacgtgctccttattggctgcgcaaccgaagtgagccaggttgagcaggacatgattaaaaacacggacaaggccatcaatcaggagttcatatggaacgtacgctttgccctgaacgaaatgctactcgactttgagttggagcacccggatgatcaactcaagcgattcatcatcactgaagacattttcagcgatgggctgacaaaacatgtcctggtcaagtccatcaaaaaggtgtttaaagcgaagctgcaatgtatctggctgctgggcaagacatatggaaccgtccagatgaagaaagagtga

SEQ ID NO: 4435 - protein, 388 aa, Methanobrevibacter ruminantium
MTNIFEDLQEESVGVSIFKDKKPLDHRFLPENLPHRKKQITEIAKHWIEALNGNTPSNITIYGKTGTGKTAAAKFAKEQLIEASRDKNVFIKVEYIRCTDFTTEYQVLTYLCQRLGRDVPNRGWTKGEIVNTFRDILRRNAFGRNLILIVILDEIDILLEKDGDGILYTLTRTDNIAILSISNYLDFKQFIKPRVASSLRDKEIVFPPYDAEQLADILHERSELAFEENTLEESVIPLCSAMAAKEEGDARYALDLLENAGDIAVEEGSEIVKGKYVRQAKDVIEYNKVKDVIITLPTQQQRVLAAIMKLTQDNEEITSGKLFEVYKDISKGDSVTYRRIFDFINELEMLGIISTNTISRGRGKGRTNIIKLQTDSKLIQDNLSAVLY

SEQ ID NO: 4436 - protein, 234 aa, Methanobrevibacter ruminantium
MTRLIEFKNVNKEYKSGDYILKAMDNVNFTIDEGEFVVILGPSGAGKSTLLNLLGGLDSVSSGEIIVNGSHIESFDDDQLTNYRARNVGFVFQFYNLIPNLTALENIELMKDVVDFDINGLAVLDAVGLKDHADHFPAQLSGGEQQRVSIARAIAKRPSMLLCDEPTGALDSKTGALILALLQDMCEKLNTTVVIVTHNAILSEAANKVIRIKNGQIESVIVNEMPKKVSELEL

SEQ ID NO: 4437 - protein, 755 aa, Methanobrevibacter ruminantium
MLKRKMLRDIWNYKVQFISIFIIAFIGVFVFAGLTAEADGFEASIDSFYQRSNLADGWIYSNYLVDDFLKQVYLLGATTSMERQLVVDSQAELDGKPDITLHFVENNTISKYYPLEGNELNISDSEGVWLDKTFADARNLKIGDTIAFESNGIKIEKKIRGLGYSPENVYSLVPTQTVPNYTARGFAYMSYKAFPSDNITYNVLNVKFDGRPEIFSELLSYRLDGYYELYLPQSNQYSVNAVSDSIAHQSSLNAVFPILFTLISMLMLSVTMKRIISNQRTQIGVLKANGFSNRSIAIHYMSFGFLLVTSGSILGAILGPIVFHFVVHESRIYYFKFPVWAYVGLERFIFVIVIISLISLIVSYLSIKSIVNEPPSQIIKPKPPKMVSSGFIEKLAIWKRLSFNIRWNYRDIKRNRFKSLMTIVGVMGCTILLISGFAVYEQMEISKDWYFNDVNHFESKLVIDDNTDLSQIDSIAHKVNGDEIMESSIEILKGDANFASLLVLNDTDLITMTNDNREKIDIPKNEVSISKKMADILDLKVGDTIDCHLLDSNKLVKIRIDRIHSTPFTQGLVMSADKYEELGFNFTPTSIITSEHVNKSYDGVKSTIYSEDMVRGWDQMQKTSMMIITSILFLAIVLAVVILYNMNLLSFIEMENDIATLKVLGFKSKYLTKLLATQGFFFIIVGFILGLPVAYYILTLLMPAFGNKIYLIPNISVLNMAFSFLIIVSVFIVMNLYFSRKIRKLDMVDALKTFE

SEQ ID NO: 4438 - protein, 745 aa, Methanobrevibacter ruminantium
MKNRMILIISLFLISLLAIGAASASEDITDTIEAPAADEVVTVDSEIQEIETVDNNLEEIETDTNNIEEVEAADDEVINETAETEIKDETEITDETIISEEKVQIANDEKIVQDGLLGFSINLTDLLGGESSSLNLSKLLSGDNLNLNLSKLLSGDNLNLNWSELLSGDSFTLNWTDLLGGDSLTVNWTDLLGGESTTLNWTDLLGRDSLTVNWTDLLGEDFTLNLTDLLGRDSLTVNWTDLLGGDSLTVNWTDLLNGDSLTFNWTDLLGDNLTLNMSSLLGGESTTINWTELLGDNLTFNMSSLLGEDFNLNMTSLLGEDFKLNLTNIFGDNLTAIFGENLTNKLEELFGDDFTINMTDLFGEDLALNMSDIFGDDSIFNLSNILGESTTINWTDLLGEGSTLNISKILGESLTLNLTDLFGESSTLNWTELLGGESLTLNWTELLGGDSFTINWTDLLGNSTTINWTDLLGRDSLTVNWTDLLGGDSFTINWTDLLGGETLTINWTKILGNDTSLIDNITSLIDDISPFVDNLTTAVKDLINKFLKEEKTVSVINYEDMTTTAFDSKIDGRIGKYFVVKLTDDKGKALSDKFVQIGFNGRIYNRTSDENGTVKLQINLGYKGDYTFAICFLGDEKTNGSFAVAKITVKKQKAKLTGTAASYKASAKNKYISATFKTTAGSPIAGKKITFTINKKTYTAKTDAKGVAKVKVSITNKGTYAFTAKYAGDDTYATITSASKKLTIK

SEQ ID NO: 4439 - protein, 319 aa, Methanobrevibacter ruminantium
MYFKCKLKECNIIFGHNNVISIKDFEKEDIKFILDEAEKLEDIAQSKEKSEELSGKILGLLFYEPSTRTRLSFETAMKRLGGDCISLGETSNSSVAKGESIADTAKMFESYCDAIVIRHDLEGVSRFLSDVIDVPIINAGDGAGQHPTQTLLDLYTIRKHFGKIDGLNIALLGDLKYGRTVHSLSYALGMYDVKMTFVSPEELKMPKENLLDLEKNNIKYKETSNLKDIIDEIDVLYVTRIQKERFPDIEEYEKIKGAYLINKDLLEGKELIVMHPLPRVDEIDYDVDNTKYNKYFEQAANAIPVRMAILKNLIRHRYE

SEQ ID NO: 4440 - protein, 167 aa, Methanobrevibacter ruminantium
MKTAIIYASKTGTTKKIAKALVDKIDGEVLTIPIARAKSACLLKYDFVIIAGSIHYGRIQGEIKSFVNKNYKTLQGINYGLYITCTNQGKAEEYLNKSFSEEIVKSAFVTACFGAEINPNKGDMITKRIINSNLKRFKKENKEPPSIDWELVDEFADKINKRTIKKK

SEQ ID NO: 4441 - protein, 268 aa, Methanobrevibacter ruminantium
MKFLRFKKKINELGKDNSIKIGFYDGEKIIELKGDILDYFNSNLDEIKENMIESYSLEDIEIEAPVNPSKIICIGLNYKDHAKELNLELPKKPVIFIKPNSALNSTEKNIIFPNISKQVDYEGELAVVIGKATKKVSKEEADDYIFGYTIINDVTARDFTLGDGQWTRGKSCDGFAPIGPFIETDLDPLNQRIVTKVNGEIKQNSNTSMMIFSPQEIIEFISQTTTLNPGDIIATGTPPGVGPMDAGSTVEVSIEEIGILKNYLIKEE

SEQ ID NO: 4442 - protein, 483 aa, Methanobrevibacter ruminantium
MNQNAQWNSIITFILAMIGLTIGIGNIWRFSYVLYSNGGGSFFIPYFIAIMVMGIPFLILEYGLGFSLKKSFSKLMHDIRPEFEVIAWMLVIFVFIVVIYYMVIIGWDFVYFLNSFSFGWGSDPNSFFMTYVGGTREISQIGRLLLPTLICTTVLWIIFWFVSNRDVDEGIGKISTILMPLLFIIMIFIFLYSFTLPGFDIGIKTLLKPNWSLLLDIHIWLAAFGQTIFTLSIGQAMVYTYASYLPRNSKLVDEVLLVVITNTLYEVFIAIGVFSILGYMSLKSSIPIEKLISEGTGLIFVVFPKIFSEMGFVGQIIGPLLFLSILFAGFTSALALFEPFLSSLCDKFNLSRRKGVTILVIVAVICSIPFSTGISSYLVGIVDKFVNDFGILILIGVQAIIFGWFYGVEKVMPVLNELSTFKVGKSWVFTIKYLLPVLIIIIWVNGVVGLFSNTNSFELIVDLIITFVVVGFSVLFTKLGVKE

SEQ ID NO: 4443 - protein, 249 aa, Methanobrevibacter ruminantium
MIFYYTGTGNSKYVAETIAKSNEEEIISIPDCIRENKFTFDVKEDEIIGFVCPIYSLGIPDSVRIFLKKLRLNYNKKPYIFLVATYGSTVGNIKSIVSKYFKKIDGFFNVKMVDNWVPKFDLTDQNYIKQAEEYGEKRLEEVNNLILLRKTGKYLENENKIFSGFIYKVGYDFIRNTSNFKLDDNCIGCGICRNNCPTNTIKIENKRPVWKRKKCDMCFACLHRCPQFAIHYGKRSIEHGQYLNPNVKL

SEQ ID NO: 4444 - protein, 287 aa, Methanobrevibacter ruminantium
MKIKIAVPSKGRISEPSIKILEKAGLGLKDSTNRKLFSSTYNENIDVMFARAADIPEFVDEGICDMGISGYDLIEEAGADVKILTDLQFGATKLVLASPENSEINTKDDLKDGMTIATEFPNLTRKYLEENNLNIKIVKLTGSTEIAPFIGIADAITDLTSTGTTLNMNHLKIVDVILESSIKLIANKNSYTEKNNLVEAVSTSIQGVLEAERKKLVMMNVAKENLCEVQKVMPAMSGPTISQVLSEEETMAVQAVVGEDEVFDLVNKLRNAGARDILVVPIERIIQ

SEQ ID NO: 4445 - protein, 67 aa, Methanobrevibacter ruminantium
MSIPVAPIGRIIKDAGAERVSEDAKKELNAYVTAQAEAVAKKAIEFAAMAKRKTVKAEDIELAIKNL

SEQ ID NO: 4446 - protein, 339 aa, Methanobrevibacter ruminantium
MGRRKKQDSTLDSYFPDSDLIEEKKKKDEACKICGNPIEDATFQRCRKCLNKLALIDDLRELLEYVSPGESFREIDLINKGFKSLKLNILISKFLKEQLILINLDGLFTLNNIDFLNAFIKKYGEKEKPLKETDYLIVRDDKSAFYIDVNNYSDYIKIRFNPRINKWQVDFFNENGLANTKSFIDSNDANKEAIYYIKQLGVIGSSADDKKEEKSDKRLYSSHEGIYYSPSRGMWGAKVKGYKGFKFIGHFSSEEEAYEARCKYLENKERTRQKYISEKRGLKSGLRNQSSGELIYFSKQKGKWIVRLKNKEGQIVNVGQFDTEEEANKAKEEFIKDNS

SEQ ID NO: 4447 - protein, 106 aa, Methanobrevibacter ruminantium
MSELKLDLVFDDYQIKRAKPARGSSVIHVNKRWIGKEVSIIPLPFDVDEKFIDETKGEDGLYHLELAVKEIFSKTVSDRKDVGFFYLKESLLGLFFLIIEAPDIVY

SEQ ID NO: 4448 - protein, 487 aa, Methanobrevibacter ruminantium
MYEKEDILIDYINNEINTVPFSLNDKLKIRNEKFRCREEFYEIKNYVDDFLEGNYTNRYIVLPGLRGLGKTTIIYQLYQYLLREKEINHNQILYISCDDLNDYMDINILDVVNCFLKLHHNSNLRTLDKKIFIFIDESQYDSNWAGAGKRIYDKTNNVFLIFTGSSALNLEYNADSARRLLKKSITPLNYGHFLKLKYGFHYDEFSDALSDLIFLGDEKKAIQCEREVYSKLYNLEGYNDNVWDDFLRNGGFPISFYEKNDDNVSQRLREVVKKVLISDIANISTISSEKYINSIRLLNFLAVQKPGDISQNKLANFLNVSPTTVKGIIDLLEKTHLIFHTEPYGSAAKRSKKSWKYFFASSSLKHALVKDLGSSMRDVKSYEGILLENLVASTFFNWTNRKNISFNLFYDANDDEKNKTTVDFIIKEGFNKPIPIEVGIGKKGDKQISKSISDYRADYGIVISNKTKFIERQGNVIYLPPRSFSFL

SEQ ID NO: 4449 - protein, 1281 aa, Methanobrevibacter ruminantium
MKLYKNSIIILLLILILSIGAAAAVENDYSNADLDISNDFVLSDNSNEILIDSSGSLDDSSSALVSEGSSNGLDSYYSNDLVLNDSLSSRSSVIEDSCSIDSTTIEDKALEKSLSSNELAEGTKTYTDLLKDIKSAKNVLNLKYDYIYDSTIDKSLKKGIVLTFDEDYELTINGNGHIIDGNGIAGGFNFENGEFVINNLSFQNCKISSLILTSCDFTTNYVTFSNNYDKSSGACVYLDNSYFYSSHDNFIDNYAPSGSAIYGECSVIDVYDGLFESQKPIDWSFIYGWDETEIYIEDCLFRNTVSNYSTAVYGDYIIEISNSHFTNLFSKFTGGAIGVRNASLTVEKSEFNNVSSLRNGGVIYADMNVDEEKSSEETIIKDSSFVNSKSDFGGAVLQLGGKLKIYRSNFTENTANYYGGAIYTSNVSFYTSKSKFSNNVANEMKGSAIYFDNGDLKIENSNVLSNPSCEGAIYIYDSFYNISGSTFSNNDVAIHSFFDRTRTVKNSKTGKSTTVKSSLNNNTWGGDRNKLNNVEYPYFVSNLGQDIILNPVKINATIKDKYFNLVDLGLVTPVKDQGDSGACWAFGGAAALESAILKATGVSLDISENNIQSAGLRYSLYGKPSLTEGGYDYTALAYYLSWLGPNNSSIDEYDQFGKISPQLFSEDNYHILDVIFLDPANTSSIKDGLIKYGALSASANGADSDSNDFFNEKTYAQYCNDDEASANHIISIVGWDDNYSKNNFLITPKGNGAWIVKNSWGSDWGKNGYYYISYYDESLRSCYAVAYLLNNTLRYNKLYQYDLTNYDDFDDGDYDGVIYSNKFTSNGDDLIAAVGTYFEYEDDDYVISVYVNGKKAYQQKGTSAFVGYNTIKLNKYIAVNKGETFTVAISSSAMPYVDDTRIHLPKGSSFLTVDGEQIDLSQRGQIACIKVYTFNDTKITRDQSTYYGSDKKLAIESELEGTTISLTDSNCKSLGSAKVVDGVAQFDLVLGPGTYFYTSSYAGEKIINSFKVFSTIGGVSNKNIGYKATASFSLSFKDENGEILNNSQFTYTLDGKSKTLTTLDDGTYNISFKNLAIGTHKLSVKNLISGQVSNATIKVVSRFSGAKDISMFYFDGTCYKVRIMGNDAKAVGKGQTVTVVLNKKTYKLKTDANGYISLKIPNTLTPNGAKAKVYSIKMTYAGQSLSKKITVKQVLKTNSLTVKKKAKSFSIKVTLKGKTVLKYKVLTIKFKGKTYKVKTNAKGIATLTLKKAVINGLKKGGKYTFTVTYLKDTIKATVSVK

SEQ ID NO: 4450 - protein, 168 aa, Methanobrevibacter ruminantium
MNKKLIEYLIIATVIILILYGCYSLIDYQSNGYQFRMVNATDSMNISCPSSSAYSVSGDTVEFRNGLNSFYNMDVSKLNSSDGKVKNILNQYSKFHKSGTLDLKNETCYVLTVELEDDKGFNYHSMIISVDSFDKDSLSFNKEATVYLFDGNNREFVVDTVYGSQVVI

SEQ ID NO: 4451 - protein, 312 aa, Methanobrevibacter ruminantium
MSPYELIKDDGEVVNLGGSPDESQDFDVSLERLNDKSLADSDGDGKHDVFISYSTKNSDIANEICYLLEKNGLECWIAPRNISSGKNYVDEIADGIKSTKIVVLVFSKYSQESKYVNNEVMMAFSYNKPIISFNIDQTEPNDIMGYYLKVAQWLPAYPNPKSQYETLVTDALKLCNERPRTVITSLDGFIPEDISKQKKNWISLILLFTPIYWASFIYMGLVSKKKSWTLLGFLYAIPTVIGLLLYFQVFTRLFLIYPIFRLFNLIFILCWILAIIHGLVIRNEFLTRYSVLGLMSFDKDLFEYLYGMYYKM

SEQ ID NO: 4452 - protein, 291 aa, Methanobrevibacter ruminantium
MSHDVFICYDEEDKDCAEAICRIFEENNIKTWIRSRDVSSKDAARNLTEAIRNSKCFVLVYSKNGKNTNYIINETDIAFSKEIPIILFKLDETSIPKDLEFILISKKKIVAYPHSKRQLKTLVKETSDILDRPTDDIKLDSNSVKTIERSNPKRKENNIKKAIGAAALIAAVLILIYLFVIVPTGQNITDSGVFSMDVTHVEVDELAKGNKYTIYGESYNLPSDSDRYFMNLQFFDDKDNVVYEVNSTADEFKSGIIWSGDINKGDIKHIGFKLTDMDNKILSQEDYNLGL

SEQ ID NO: 4453 - protein, 406 aa, Methanobrevibacter ruminantium
MVKMKFKRSLILAVILIILFSLGTVAASENIVIDESSDSNLVIDHAKDNYLFNGPIKDNYLSSSSISDNYLSKGVLDDSYLSRSDLDDSYLSMDDGKGSIDLTNHNQLSNSDDKQLKTSNLEDEKQLESVNKGDKLLKDSNDNVDLFINMDVKTSLTNKQYNRAGSEVPWIITVSSLNGTSYNTQVRDVLSENLQYLSHNATMGTFDPENGIWTVGDLESSKNASLTILTRLKRDGTYINKAYATTDSNDVNLLNNFLIISIRTGSSKITSNITETSDEREGIQHNVHYASMVDTDFIYRYEEDSSEDDGGNEEGQSEGNSHTKTRSLGNKLKLFNAQNIDYHSLSKNIGGALGFGYNSNGGFLNSKDIYEALFVYDYTRIPIIVFAAFLVVLASIVGYDKVKSSK

SEQ ID NO: 4454 - protein, 2004 aa, Methanobrevibacter ruminantium
MRIMINKKLFFVFLLMVLVIGTISAVSANECANDLTMEISDDNIAIDSSSALEGDDLAIDSSSSDLSNENNINSMNDSVINSNSINSDSINSDSINSDSINPNPNIDDEINNHKDSFLKAVQASKTGTFTELQTKINKASKGSTIYLDKNYLYNDDFKGKYGIVINKSITIDGKGHVIDGLKKSNLIFINDASNVVFKNIIFRKGDGDENGAINLIGSDHIEFNNCSFNYNYGDRGAVFLSGSDYSSFVNCKFNENIGENGGALILADSDYSRLVNCIFFGNEASDGGAVFITYSDYSYFFNCTSEGNSVDYTGGAFYLDYSDNSSFIDCVFDTSSAKDGGAFYLGDCHNSSFINCSYWNNQVDYYGAVCYLDNCYDSSFISCNFTGNSGSNPELDETPSIGGGVFYISESHGLYFTHCNFSENEAKNDGGAIYASDSDVHIDSSVFEENCALCGGALYAMNSDIFIDSSLFESSVGDRGGSIFANKSNVYSKNSSFIQYYEIEDEYVYIPASGAYHLMEGNIGGAIYSLQSVLNISSNKFNNNFGLTSGGDIYSQYSMIYIDDCSFSNSFSNGFGGSLSFNNDYVQITDSSFENCSSRDNGGGGIYSINSILNCSDSDFTNCYSYFGGSICSLNTDLSINNNNFYKSSAEYYGGSIYFLYGTLDINGSLFSNSYGQYGGSIYIRSPQTIKNITNNQFLFSQGIRGPRIYIDQYYGEISNSGNVYTDEYEEKGLFSDYGMGISFESNEGLVPLIHYYPSNESLPSFYDPRGGGDSEDDYEDEDDDSDIAVKDQGIGGNCWAFSGIATLEACLEKVTGEEFGFSEGNAKNLMAISSIYGLNIDTNNGGYDTMFLAYLASWLGPIYEEYDTYNPLSSLSIDLPSVFHILDIDFLAPRKNSLDNDEYKRAIMNNGAVSVTFDWVENKVSNGFHSVSIIGWDDDYDDIDSLGNYAKGAWIFKNSWGYEWGDGGFGYLSYKQKLSEEIAPYMHAYTFSFKENDIGYTDIYQYDFSGLSDFLILNSTNAYYKNKFIAEDNEFLYAFSTYFDKETDFTYSVSINGNVITKTEDGKDILTSIHHSPAGYHTIPLGYNLTLKEGDEFEIIIKLLNDNQNRIPVCQADELYRTSLPSNASFMSLNGKDWIDLSNLASSNEFSSLGIKANTSQVACIKAFTSNWRMNSDSSIVNSKNHSIITSEGTELSQYEICQLKVGSFTRASANETIIIAMSIPEWRNYQDEYENYIEVHINDEFYYVRVNEGVAYLDISFDKIGHYDFKAQFKSNIYSSDIVEFDFEVVKDSIFDVDDLDASNPGTFKELQDIIRNAKNGSIISLDKDYAFSSGDESVVDDYIEINKSLIIDGKGHIIDGSSDSGIFRLSSGDNLTLRNIKFMNADNGAIVSNGNLTVSNCYFISNCASGSSSTSTSSSDSSSTACGGAIYCEGTCFIVNSLFESNSADAGGAVYCEGTCFIVNSYFDSNYADLGGAVCCDGSCYIVNSLFDSNFAVYGGAASIVGNESCEIIDSNFIENEAIYGGAIYLESYCYLLDSSFNYNYANNGGAIYSIADLDIHTTGFNYNEAYKDGGAIYLVNSTSYINEGNFTENSAKERGGAICALEFSNLTIRWAYFMDNSASKYGSAIFSVNALNITDSEVTVSSGKVELICFAYDYASNGQAYGDLYFDENSFYISGAPEIYYFREKIAHKLALDLEFNNIELIRGGGVEISRDLNDDGWEDKINNNMLEICRLVDDDDYMTVLRMKEIEVILINKNNRSDIQKFKIPFNVKLNGYFLNTSSLKYGSYILTGNLSKDLASNCIVKNGTLKVLRKTTLSSLSTFTKVYGNSKNLVVTLKDSSGKAIVGVNIAVKLNGKTIKAKTNSKGQISIAISLKPKTYTAYISFAGNDYYASASKKVKVVVKKANPKLTASKKTFKLRNAKKYTVTLKNNLGKALKNAKVTIKVAGKTYTAKTNAKGQVTFNLKLAKIGKFKAVVSFAGNKLYNGLKKAVVLTVKK

SEQ ID NO: 4455 - protein, 185 aa, Methanobrevibacter ruminantium
MEYENILDLKSSEEFREWMIKNHSSQRECWVNCKRGKADKDELSYVDAAYVALSFGWIDSTYGLIDGKRMQRFSPRRKNSNWSQLNKERCRWLIRNGLMTDSGYESLPDLEEDFIIDSDILDELKKDNETWNNFKNFPDLYKRIRIANIQKEKDREAFDKKLANFIKDTKDNKMKGNWNDDGRLI

SEQ ID NO: 4456 - protein, 84 aa, Methanobrevibacter ruminantium
MANEIILNIDGNEHQIKYDNMEVDHVSIIDLEKLGRSLILELEIDGKVDRNSLDDAINSFLDTIYDDIKYFAVEYADDNEIELI

SEQ ID NO: 4457 - protein, 155 aa, Methanobrevibacter ruminantium
MRNPKDYIMKTDYLIILMALLLISIVSPIAAADSFDFDIPEGYHIENASDDFVLLENEDYYSISISIMDNSTDRKTLMDMLERHRCYDFRNGVNYTKGDFYIEEKPYYQEFQMGILYFCENGRDLVVIDYKGPLGMDLNNSPIDGILDSFKWVSY

SEQ ID NO: 4458 - protein, 252 aa, Methanobrevibacter ruminantium
MGQDGFKNEDLMLEALNNKKFMDLNDNLKQMILDMYGEEISQDFIIKAYKKGGVNKTDLTIDINSQNFNVSIKKGTGNSVHQEKLEEFVSFLKEEYGISNVLSDDIRFFIWGDGTLDGTGEVSDRLSASEFRKQFPEKIRNIREFFYTVKRDLIERFVIKGPKSKSRPDFIYYGTPDKGIIVESQSVIDWLSDDKNEKSSSPIPIGRLTFQAWNRNINGGDKSENKRGVIQLKWSSVGKDLVKIYKEKKDDK

SEQ ID NO: 4459 - protein, 193 aa, Methanobrevibacter ruminantium
MTNRGTAEGTEEEISFVKLLNKKEDLSYWDVLNLDHNCHFAIHVLYQKFSKISNKKVYPKADVYIAKGNVPYSYLEDNDFYLSEDNTEDFDLEPIKYTGISVKLQNSSRYQITKMGPNTFKDIFGCYELGAGASIYCRDVDDLEKNPQVLTGWNTNFEDFIKYFKSFDVVSSSDLDISSYKKLKVFLIKRLRK

SEQ ID NO: 4460 - protein, 339 aa, Methanobrevibacter ruminantium
MVSKKRAMQYTLEDFKEKNLDETEENDKDFTFIDLFSGIGGFRLAFESVGGKCVFSSDIDKWANETYYMNFGEYPHGDISEIPANQIPDHDILCAGFPCQPFSIGGYRKGFCDTRGTLFFEIERILKAKKPQMFLLENVKGLTNHDKGKTFKVIKESLWNLGYSIFYQVLNSKDYGVPQNRERIFIVGFKDNVNTFKFPLPFENKANINDLLEKNVKDHELSGIASDHLKKHYEEFLKNKKVNKNYPIFATEIRPSRCSIRNDGNSPCLTAKMGTGGNNVPVLVNENRKLTVRECLRLQGFPENYKIKDNYSQSYKQIGNSVTVPVVTLIAKEMIKYLN

SEQ ID NO: 4461 - protein, 342 aa, Methanobrevibacter ruminantium
MEKPTVIDLFCGIGGFSKGFEMAGFDVLFGIDIWDIAIETFQHNHKNTEGILADLTELDDDFFKQYTNKVDVIIAGPPCQGFSMCGKREVGDKRNELFQEVVRAVKIINPKIVIIENVVGLLSMENVDGEDVKGLIVSEFEKLGYETNYKILDASEHGVPQKRKRVIFIGSRIGDVEFPKPKDKKVSVMEALGNIPDTNFEYYDEPTNSFQELMADGEKKIYNHDAMKHNEKVLKRIENVPQGGNWQDIPPEIYDVGGTHSNNYRRLDPNKPSITIKHAIKSMIIHPTFNRVITAREAARLQSIPDSFIIKGNKTAQHQQLANAVPPLLGYEIGKQIIKKLN

SEQ ID NO: 4462 - protein, 57 aa, Methanobrevibacter ruminantium
MKRIQVNFTKEQYELLQKLKGELGNSDSEVIKNITMAWLSEKSLISTTLKEKIFNNY

SEQ ID NO: 4463 - protein, 250 aa, Methanobrevibacter ruminantium
MNEIIKTTLILLLKQEIRKEQRRGIKNILLYFRDVDTLDTNSINWKIRYDRNNQNYQMIVGICYLTLKGLLQSDSKGEKKLMSFLDNQRMNRLYEKFILNYYKREHPDIKASSPKIEWQLDDDFGEMLPRMQTDITLEHKNKILIIDAKYYSSTTQTYYDKKTIHSHNLYQIFTYVKNKEVEVANEANGVELDNKVSGMLLYARTREKIYPDNDYLMSGNRISVKTLDLNQDFTLIKKQLDSIIEVYLKA

SEQ ID NO: 4464 - protein, 156 aa, Methanobrevibacter ruminantium
MNNKKIFVAGLAILAIVLMGSVAAVDMGILSGSPTKFSIDGIDFNIPQGYAVTDNYTRVNDTDTAGSSSYRVTQATFENNVHDAISVLVADYDHDMSEDIISQRGNKTTINGVDGYMQTQGDYTTFNYLVDGNLVTITLTNADLLEDIIVGNQTDD

SEQ ID NO: 4465 - protein, 1471 aa, Methanobrevibacter ruminantium
MSEDIGINDNNGALIADVNFADDNNNALKAESNSASQNDASIDESANPTQDLVDTDNGLNQSITKSPLKSNTGLTVTKTIDNSSNHMPVDGFYDIGDTIYYTINITNNLEESIGNISVVENFPDGLIWEYIWFADDNPNWKNESNVFNYTKALEPEHSILLKIRMTGNKTGTYINTINVSSNLTSSQEFLSEEVTVYAPNLTITKVANDPIVTIGEIANFTINVTNNGNRPLSNLRIYEDPEESLFLNEFTNISGNWDSFANRGGDYGFSLDQLDIGESAAIIVSFLTTEIGNFTNNVYSNYPNPQVEANATVTVVPRIEKTVNATEIDMGESVEYNVYIDMTGANKLGIDDFKIKVTDILNEYFDLDKDSISSNWKYNRDEKAFEYMLSDIPESFEFNFAVYITERGNYTNTVSLKIGDLPEVSAESDVTHVRISDANIAETALDSTVNLQEQAVFIVNITNTGDKTFNPYELVVNDDYDEDALTYLSHEDITGKWIENIETDSLSFTLNSTLEVGESASFKLYFNTSKVGSYSNYVYININDKEDDSIVIVLALMNKSVNSREIDAGDSVEYNIFINLSGYQGPVKVEDLFNDTFALDKDTISENWHYDETENAFIFDLSDNPDTLNLSFNVTINEKGNYTNLAKLILSSDYPEITAEAPEVCVYKPDMTVTKTVNDTEIYIGDTVKYTVTIDNTGDRTLTNIIVKDELDPAFILDESSITEGWTYNKDNSSFTYNNNISVGESAILEFIVEISKEGKYTNIVNVSSPGVANKEARSEETVAKTIPTNICLENVTADPDSFVRIIINITADKGLINGTVNITFPDGTNEAVEITNGIGETVWYVPDNYASGNYSVFAYYEGNGTYLESEGQGNIEVIPYYTEISLSNVTAYPDSDVEIEINITAGDAKLINGTVTVSFPDGTNKTAEIINGTGNVNWTVPDDYKGNYSISASYPGGGNYLDSNATANIEVIAKISTQITADIPNAYPGEEIDISVNVTADNDVPFNGNITVNLPDGSKETVEIKDGKGNIAWTVPDNLDVGDYNLTLTFDGDNNYLPSNATSTLTVEKIKLLIIIDNITAHPKEDVTISVNVAIDDGSESDNSTKGSLSDNNLNKGALSDNNLNKGVLSNNDNKALLKAYISSAKGILSSNHLNDGDNFNGYVNITLPDNSTVEVQVKDGKAALNWTVPEGYEGEYPIKVTFNGNGKYLSASETGYITIEKIPTSIDLENIGTKPNREIIIPITIKTDDDVPFNGKVSVELPDGTIQTAEITEGIGNTTWTVPDDYNGEYNYTVRFEGDETYLPSNNTAIIKVDSKIPVEIIVGNITAKPKDKVTIPIEVITAEESLFNGNVTVRLPDGTEVTAQITNGEGSVEWTVPEDYNGTYSVSVRFDGDDTFLEADGTGFITVTPETPDNPVPPISPVSPDNPVAPAKHSANKPMPMDKTAPGNPIMALLIVLSSLIFVRRSRK

SEQ ID NO: 4466 - protein, 325 aa, Methanobrevibacter ruminantium
MDFNNFKYLDELIHSGAKEINLDSDIILEDKEEQKYSDGIKLNIDNLVINGNGHIINAKEKTRIFYSTAQNITIKNIRLKNGKTNTIGGAIYNLKGKIKIIEATIKENQSKYGGSIYNDEGEMEIIKSTFTKNNAKSNGGAIHNYKGKMSIEESIINENTAKQGGAIHNYRAILSIENTTLRKNDAKDFGGAIFNDGNELKITESTIEENTSSQGGAIYNNIGEIIIKNSTITKNIAKIGGAIHSWNKLSIISSTLNKNKSYEYGGAIHNFDGEIFIKDSIITENISNKGGGIFSNNKKYKITTSTIENNESDNIHEIDSFLDMD

SEQ ID NO: 4467 - protein, 365 aa, Methanobrevibacter ruminantium
MSKSFRDLELLIENCDDEIVLDSDIVLGDGEGPIYLEGINLDSDVIIDGNGHSIDACGKVRIFYSSGELTIKNISLLNGYSDESGGAIVVDGGKMDIIDSIISGNYSADDGGAIHIEEGELALINSTVKENKAKEFGGAINNWDSLKIVNCEISSNEARFGGAILNNDGNLEISDSLFKDNKADKGGVIYNQDGDFSVEKTLFEKNKASADGGVFYNENCDISVIESKLNDNQADKGGVIYNNGVFIIKDCELINNRANDGGSIVNYEAELNVMGSSLSGNLSNYGGAIYTYDGEMSIDESRFDDNRAECGGAIYSEKCIWDVSNSEFNSNKAKNSGGAILLKKSKYEVDNVSFRDNEPDDVSNF

SEQ ID NO: 4468 - protein, 91 aa, Methanobrevibacter ruminantium
MDDLITTAGMYGEPVSSRKGNYIVEGLFGKPIYYIDGDIVRENNPFGKPVYRIEGNYIKEGMYGKPKYYIDGDLIRENNQFGKVVGRKRKF

SEQ ID NO: 4469 - protein, 90 aa, Methanobrevibacter ruminantium
MKYCFKCGAKLIEENQKFCIECGSNLEKRKEEHNKDLKESHKKYNPKKGESYNDYLNRIDSPIKDKIATEDEIIKESIAYKEYNPLKKRV

SEQ ID NO: 4470 - protein, 604 aa, Methanobrevibacter ruminantium
MDFREELNKILKSDDEENNNLKSTENKIKDKKEDNNLKPIDNKIKDKKEDNNLKPIDNKIPNENKEPKEKKTPQKTDEERMQNRPKETIDHLKRFKELNTTTDSIFNISPYQVLIILKDGTNITDWKEIEDKKDILYISEDLSGESYISNKYRDLEGMRLIIAQGITSKVQFIESMFADCKSLIDVIGLETWDTSNLLSLENMFGGCSSLTSCDGLRYLDVSNVNDMTALFNDCYRLNDIDSLKEWNTSNLTKMWSMFAGCKSLKDLRPISNWNTSNVTNMTSLFTECESLNDINGIRSWDSSNLKDMGSLLWGCKSLTDISALSNWNTSNVRKMGRMFWNCESLTDISPLKDWNVSNVEDMVYMFVNCKSLKDLTPLSNWKPSKVIIMRSMFDGCSSIESLNGLENWNLENVTTVERMFDRCKSLSDVSALKSWNLSNDVIAGGIFNECPNVKENPLKKEIKDKNKPLHHIDLNIKFLDIYGTGWCLVKLGDIYSRASYITDVPYDCLSSIVNAIKNDENFHVDFNGEGWTFDVEADNEQCYFNFHGGEKHAFDTMNKYDLAIVIYRNIRDNLSSWKGWTHRDLSPLLNELCSLINENEADEN

SEQ ID NO: 4471 - protein, 447 aa, Methanobrevibacter ruminantium
MELLDRLIPKYKDINWMKRIDIIRKTDDQALLEEIARKEEEGIVRKYAVKKINDQSVLIDIAYNDPHWESSSEAVKKIDNQDVLIDIAYSKLKASPRSKAAERIKDQNVLIDLAQNDKEYQVRRAAVKGIDDPFVLKELALNDPDSSVQMEAAKKINDGEALAEIALKDRSEFKRLEATRHIDDEKILSQIVLNDPDFYVRLEASKKITDEKTLAEMGKNDFYWQIRSNALNKITDEKVLAYMACNDPNPSTRYEAVKKINDKAILVDIALNAFDWKVRLCACRRIDDEEVMTKIVKKDTCWRIRRNAVGKITNETFLEEIAFNEPAWRVRLESIKNIEDESALIYIALNDSNWHVRRQALSKIKDKSILEDIAQNDPIFELRKLAVRMINDESVLRKIAKNDPEWKIRRLAIRNIENTDILKDIAMNDSNIDVRLAASDKITDKSD

SEQ ID NO: 4472 - protein, 638 aa, Methanobrevibacter ruminantium
MTAPDSNYETMAEMTIRNSIIENNSARNGGAILNDGNLFIEKTTFKNNLAFTAGAISNGGYVSLKDVSMENNIAVTGAAFINGGDAKIEDSFIIKNIAIGEKRGMNGEHDVGGAVGNSDNLLLKNTSFINNSSPFGSAIYNLGIDIPKLKYLCKIKIEDCRFENNSSHISGEIHNEIGEISIDDSKFKNETAKRGSVIYNDSYLTITSCDFKDLKKIVHNFNLMTIHSSNFESNQSDSAVIENDGEIGILSIEKGKIANNISDYTTVYNHGKDCNITGTIFENNHSKKENCHNICNRSNMVLKEIILKDKTVSIFNEGILTAEKKYKNFIFSVGKVFYLGMENEFNFSYLDELIHSNISDTISFDEDISLLSDEFDFYEGGIELDRDNMVIDGKGKTIDASGRSRIFLVTGNNITLKNIIFKNGHAFDNYFMSNNEGGAIKVYKGLDLKIENCKFIDNISESKGGAINNKGHLTISNGLFESNKSNEGGAIYNHQKLSIIDTCFKGNEGHIGGAIYNKEDLEIVSTKFLKNIVKESLFKARFIPILQLEDESFGGAIFNKKRMVIKQSSFKKNMGLDDTDGAWGGAIRTIGDEEVTIIQTEFIGNYLKDSNFGGAISSYKTPNLIDCTFSDNYPNDLN

SEQ ID NO: 4473 - protein, 449 aa, Methanobrevibacter ruminantium
MGMVLKINVKIGDSVKKGDVVCILEAMKMESEIFADKSGVVENILVNPGDIVNQNDLIMIIGDSIDRDENKSNKENKPKPNKEDPKDRKNEFSKSKNDKKINSPNEMLDKLKNNIKVDKILFVDGANISISPIAEAIFNKKVKGIKAYSAGLSAISGNKAVPNAIKVCENHDIDLSSHCTANIEDYDLDDSTLILSSTTYIRNILKYYYHVYKVVTINEFAGFSNLDIQDPFWSDLDAFETCFSKINDAIDEIFGLNSLEKDNMAFNCEIEENKNIQSNKEENKNTTITSNKEENKNTTITSNKEENKNTTITANKEEKNTQSNKEYLNEKSSKINSFKYLDDLIHSNKKNITLDSDIIHMEGDSPIILDVDDTLIDGRGHAIDAKGKCGIFNITGKNITIKNIVLKNGFVESDGVICNKGKVTLENISVQNNRGSKYEGNAIVNKKIS

SEQ ID NO: 4474 - protein, 411 aa, Methanobrevibacter ruminantium
MPSKIIKREAYIRDLKDYVNTDFVKVYIGIRRSGKTSLMHNIIDELKRDGVNDENIIFMSFESREYIHINNSEQLDELVYKKVENLEGKIYLFFDEIQQVKGWEKSINSYRVSIDSDIYITGSNSKLLSGELATLLTGRYLTIHVYPFSFKEFLQYKNEIEGVEITKYSIDELYEEYFNFGGMPGILSLGSDEFKRLALKDIYNSILFEDVVSRFNISNIDLLQRFSRYMISSTGEIFSSKSIKNYLKSNDIYTSEDTLLKYNEYLKQSFFISKCKCFHLKGKKEMKILGKYYLTDHGFHHALIEDNILKVTKILENIVYVELLRRGYKVNVGRNEDKTEVDFVCEKSGKYKYIQVSYRLTSEQTLNREINPLLRIPDKYESILITTENHDFSKDGVRHLNIVDFLCGDDV

SEQ ID NO: 4475 - protein, 1044 aa, Methanobrevibacter ruminantium
MSEKYTVAELKYILKENGLKVSGRKPDLVERVLPILNAEASEEAVEEVKEEVKEETVEAEIVEAEEKAPVDLTFPDTEEALSSILALYGLSYDDLSIKDIEFADGKICINGEAFIQNGLSMSDSTMSIINADPTLNLTMNIPEVAYSDFESTIFRFKDLDLNLIPTDDSLEFKAALKGLDIMTDLNNIILKGLDFAFKSFPDRGVEIGIDIDDFIYPNFYNTSFNFENLDFNMAIGVDGQSIAISVNLPALDLLNKDYRVKLSDLSLNLVLSDLQLSDLDLSIAISDFHYTNFDDVVIYMEDIGVSLEHIPDTNSFNVLIGLSAMDAVGLNSFDALFPMMEITGVNFNSKDSDSLINFTGLISPIDLTQIDLLELGALLGSGFDLDAYTRNMAYYPDIASEGASDLGIPGLDLGAIVANCDYSCLGAIELNLTGLLDSADIDLSDLGIDLSDYDISSIKLSDLIGAVGDSEFVMSAIPAVLNIFSLDLTDVDVSGLIADFDEENFDISSLLASLNLSSTDIAAILDILDKSDIDLGAIFAGCDISCLDAITLDLTGFIDSLGIDLSAFIDLSEFDLSAVSLTDIIAILNSFEFDMSTISALLKIFGLDIGDLDLEGLIASFDTENFDLSTLLASLNLSDLDIDAILAIFNNPDFDWAGIFENSDLSCLDAITLDLTGLLDSAEIDLSALGIDLSDYDLSSIKLSELIGVFGNLDFDMSDMISGIDFESIDFENIDLEGLIADFDAENFDISTLLESLNLSSTDLSAIFDMFINSDVDLGKVFEGCDYSCLDAIVLNLSGLLDSIGIDLADLGIDLSDYDLSAIKLSELIGILNGFDLDMNTLSALLKIFGIDLEELDLSGLIAIFDGDNFDMTALLSSLNLGGVDISAIVELFDNLGFDFDGMFENLDISCFDAITLDLTGLIDSTGIDLAAFGIDLSAYDLSAIKLSDLIGVVCSSEFIMSASGAVMKLFNINVDDLDFDGLIASFDAENFDISPLLESIELSGFDISEMLEMFDMNGFDLSQFLNQFISSFMENALLESGDE

SEQ ID NO: 4476 - protein, 97 aa, Methanobrevibacter ruminantium
MLKIDEFRMEMEEPKRIYTEELKKFAKKYDFLGDFTIVEERDIDTADYFFCFNNLNGTSDETLYSTRDEIYDHMIKFCEDNGIDEFSKNAYIFYKSD

SEQ ID NO: 4477 - protein, 166 aa, Methanobrevibacter ruminantium
MSQEENKMIDEVEMSSVEEIGRDSVEEIKIGSQDEIGMNSVEEMDLDSADEIDMDDVEEMEMKIENYENRIKLQDILIESLGERCEGEKERNKQLHDRIIQLNEELKKKQELEMVSDINYWRGIEKAHIELHDKYYKRIIQLEKQNFLLEVENDELKDELERIKNV

SEQ ID NO: 4478 - protein, 269 aa, Methanobrevibacter ruminantium
MGLLSLTISYFNKSANGESLWAPFLEMFRMLSVVLILTYIATKSKSFKVIIRGQQSRKTIIWQIIIFSILGILASYCTMDVNGIPANARGLIVMISALLGGPYVGIPVGIIAGVWRYGMGGITALACGVATIMAGIVGSLVYRWNDGEFLRPYKAALLMLLYSGFDMFLITILTPQPKGVLIANALYAPMTFGAVLGILLFTLFLTEKKEEAEKSDEQTVSDNRNTDTQNINEISQELNEYKDKVKKLEQKLEEYDKKFNQLEQKLKDK

SEQ ID NO: 4479 - protein, 101 aa, Methanobrevibacter ruminantium
MTKMEFDLTDEQIEKVKELEKSGISLGEAIDLLFEIKDEAFNQMDEVDENIEIVSQITKSMNGEKKIEIIEKAYRNYEKTPEMKIQEVKRNLSWGRDFFKY

SEQ ID NO: 4480 - protein, 514 aa, Methanobrevibacter ruminantium
MNETIKEHSWIPLILVCFATFIIALDTTFMNVSISSVVADLNTDVSTIQTISSFYTLITASFMLLSTKLQDIVGKKKLFLIGAGIYGVGTLTAALSANTLMLFIGWALLEGIGGALMTPTAVSIISGTYQGEKLTFALAIESALVAIAAAIGPLFGGVVTTYFTWRLGFAVEFIIVLIVFALQGKIPYFEATGSKSELDITGAIISFVGLVLFVMGILMLTDDTTFSIAIMAAGLIVLALFALFEIKRKRKGNVPLLDVELLKDRNLRVGTLLRLLVNLAMGGALFAVSVYLQSVLALSAFNTGLTLLPMTLGLLLFALTAPKLSAKLNHKILMSIGCIISIIGCLILSQQFTMATSMLELMPGLFVLGAGLGFVMALGVDIALSNIPQEGQNNASGIVTTGQTLGQSMGTAIIGVILILGIIGGISNAVDTYVPDQSGNATFEHDVYEGFQSISSINDVKAENSTIQNIVNVIVRDSMAFVMYVTMALMAIIFVLTLRLSDKEIKKPDKLKKQ

SEQ ID NO: 4481 - protein, 244 aa, Methanobrevibacter ruminantium
MTTTNDQDESISEHIKKAFSLKEDTASNEEIRSRLLDGGKITGTNMRVLVCAMVIASVGLNMSSTAVIIGAMLISPLMGSILASAYASVTNDRPLLGKHLTGFAMQIIISVTAAAIFFFLSPVKEPTVELLARTSPSFYDVLIAFFGGLAGIIGQTRSDKVSTVIPGVAIATALMPPLCTCGYSIANGRWDMLLGAGYLFLINCYFIFLSSSLILSALKIPKLKEYTEKEWKIHKWRMSYGILF

SEQ ID NO: 4482 - protein, 1001 aa, Methanobrevibacter ruminantium
MGFIDKLKKGIGRKNKEKSSKRDTQKDTGLKRKSPPIDKASFDGSDEEYKLFESIMSYRDEPVVHSILRKISDDRLLIEIGKSHPFLELRRDAILKIKHASREDLIELFDLNEDRWGIGLRNAIASKFTKEQLMEINDERKLREIIRYSNEENANCIYDKINDEELLIDIVCLTRYESIRDKFVERFKNDPEVMRRCLESSRSPELKSKVAQYINNDKELKKYILSQNDWNNTVEYALNEMKDEKIANEALYEFAHKGKNQLNKSIEFMSDDETLLNIALEYYNLDYDRYYFEIGMALDRINDDSLLVDLMHNETDETLRRLAAKYIKSEEALKEFVNDPNENVRKIAIRATCKNSLDKFMDLFNNDEIILDDHFILDGDGIYETITINRDNVTIDGKNHKLECINPKIELRIEANNFSIKNIETNMLIRLNEGSLNISNSIIDKSIEINEGNLTGENSTFDRRIKNINGSLNLTDCNIDQIFNESSLSLKGCIIGSIKNDDSCNIDNCTINEFLYNNGRCKIENSKVESASRNYSNPYDGGGAISNGQNASMELTKCILAKNSTDKNGGVIRNIGSINLYDCIFEDNKAGLSGGAIFNEGRLTASRCKFKNNLVEFPRYGSFSRATGRYHFIKHGNSILNLAFMDLFNCQFITDKINDAPEIIAQFGKDSYLNIENCQFSTNKKTSVDAIEGGLNFNNAKFKVSFDDVEEINLANEGPEETGSINKNLKETSSTNEGLKERRSTNKGLKETSSINKGEETTVSSKNEDIDAESILENFKGFEYLDDLINDGSSEITLDCNIQMHELEQAFYEGGIEIYEDNLTIDGQYHTIDANNLSRIFHITGNGIVIKNIKFKNGYYYQDYFDNSKDGGGVLCITHSASAKIINCEFSNNESRQSGGVVKNNSDSLEIIDSNFRDNKVIYQKGGCIINNASLTLRNCSFKNNFSNAGSCVFNSEDSSLKIFDCEFNNNTSRKDFEAGGVRFSLEVPSSGGAIANEGSL

SEQ ID NO: 4483 - protein, 657 aa, Methanobrevibacter ruminantium
MRDIEELKKTPGLSLKRYLILFIANLIGLYLISFGLDFTVTNLGRVIIFIFFISIFNAAIWPLVTRIYMPLMVWTFGIGALLLNGGVFAFFGPYFGLDISGWGIVLAPLTIALITIVLSTLMDAEDDGTYYQAVLREAQTKRKGEIKDYPGLIIVEIDGLAYDVLLEAVEKGVMPTVKSMIDNKTHILKKWETDLSSQTGASQAGILHGNNENITAFRWIEKENNNQMMQCSGVTKVKVLEERISDGNGLLVENGASRSNLFSGDTDNVIFTFSKITDLRKLYNGAWFSIFSNPSEFARIVILVIEDMVHEIYSQLKHSILNIRPRISRGIAYIPTRAGTNVFMREINTETLIGDMLIGDIDVAYSTYLGYDEIAHHSGVRDEDVWFALKGMDKQIRRLIYGNKYSPREYEFVIQSDHGQTNGATFKQRYGQSFEDFVKSLLPHETNIYAKMSSNEDHFAEVYIPFKDRIDKFKNRNKPDEDKLISESEVIVLASGNLAMIYLTRWSHRLTYEEINEMFPDMISEIVNNEYVGFVLVRSSENGDMAIGKNGIYYLDSDEIEGENPLIGFGDNVTQHLKRNSSFQYTPDILVNSFYDVENDEVCAFEELVGSHGGVGGSQSEPFILYPSDWDIPDEEIVGAENIYRILKDNLAKMKEK

SEQ ID NO: 4484 - protein, 94 aa, Methanobrevibacter ruminantium
MDVMDMIKEIETGNDYWQEGLDYHMDCKVTVNNVRTRCDQVSIVQCDMSKYGKGIELLLELRRGDFISWIYLDDVVSFDVQMMDNVLREEKKNH

SEQ ID NO: 4485 - protein, 85 aa, Methanobrevibacter ruminantium
MIDEMMKIEQFTSHCCFVDEEGMNSVDGDFLTAIALCVNFMYNFIDIQNIESGSEDEDDLNFQLIMNKIEYYQKMEEICKKYKEE

SEQ ID NO: 4486 - protein, 228 aa, Methanobrevibacter ruminantium
MNKINILSVSRLRTYTDGDGITSLVATMGCPLRCAYCLNPSSWDGTAYPKSLTVDELYEELKRDNIYFLSTGGGIAFGGGEPLLYHKFIRKFIEKYSSTKWKFYLESSLSYKTDSLKDIIDLIDYFYIDCKDMDKTRYELYTKGDYDLFFGNLIYLKEHVDNNKIKIRVPRIKGLHKSDEAESNLKVLQEMGFTNIEIFDYIDDVEIHKPISDKAIRNKKDFLERIKE

SEQ ID NO: 4487 - protein, 159 aa, Methanobrevibacter ruminantium
MNGRDKCELLNEVRQRIAKANNIEFDFEECTFEGNCSGTCPKCESEVAYLERELEKKQDNGEKIDIEGIFTLKEKEPTKLLCKDVFVPFGNFEPVRPKMEILEKSPYCETFGDIEYKDYAFTYLKIFYLGNDEEIVLPYNEKEYDGDITVFEIKEDEYE

SEQ ID NO: 4488 - protein, 183 aa, Methanobrevibacter ruminantium
MYQWCNLFGKIHRGQNYEDIKEDNCRMLLDLVRKYPEHSDIIYLKKVKDIGTSSKMDNSLDERINQMEEALKPVHDMVDDVYSCQINDDLINLDDFVPFEFLSEYAYKKRFWLTYNEKPDIFELETSYRDKIYSFDSVTESVIFVMDEMKNFIDKYPQYSRLIPDYSSFIKYKEKLIEEFEGE

SEQ ID NO: 4489 - protein, 58 aa, Methanobrevibacter ruminantium
MKSELVPGYDFEYTYDGVLLIEYDTYHYKNYEINRVYLEDHIEKLIKLPDVYVICLEQ

SEQ ID NO: 4490 - protein, 72 aa, Methanobrevibacter ruminantium
MNENNKKIKEKSAEDYSDLDSFLEEVFGPTDDIEWTEEKRKRFEEINNKCPFSPTRNEWPNIKIHREELKED

SEQ ID NO: 4491 - protein, 685 aa, Methanobrevibacter ruminantium
MTEEINEKINTQLEEEIKGFGTRVVEIFKNTKSTKKENEDPEDDNTKKSQEFITVAEFNEFKIETLEFVTEMNNKANNLIKASEKFGDPEDDYAEIVNKVDTLLQGLHNELLGKEITIEDRLDKRNTLVRMSLKVHQSKRILKLLDKQSQMRSAEENNLKKDLSKWFHKLERRIQNLIDIYYENELFFLHINKVTTIVEDMKPEYNTILLKHGLTVFYNARETATTLYTIQQKKVSSKTGLYEPKIMRETDVGLFRTNPEIEDSLRYSTFQASNSTLIRVSKNITNNLADSYHKGLGIEDVGHKITEEFTGLKGWQAKRIARTEINSASNVGTFSVYDELGVEYHMWWTGNDARVRDSHKPLHSHIVAVGNTFSNGLLHPGDKSGPINEWINCRCTSVPYIIPLGMMAPPGVKEFTEDQLIPIPDYDSSKDRGKIINSSSNSFNNVLKVPNNKLKKEGHNFRKKELEELLELKIREKSLKQPIIKSDNTPLVELEHPILKRELDNFDKFLEDKDIEYFQMYTFDGREASKLYIGKMHEVDVPNEEIIEAVRKGGKISVHNHPTNFDNMHSISDIYTQIETGIELNIVKSYTKKYIVVAEDLSSKERKYLLNQLEKIEKKYNEFIEKEKKPYLRGLDKIDLTVAEREYAEEIIHQYVVINNYDKYEKVMSYFFKANPSIDLYVYDI

SEQ ID NO: 4492 - protein, 165 aa, Methanobrevibacter ruminantium
MLPVFIPNLPDCEYQYGEKPLTADQIIQFARDYEEWLIVDLEHEFLYTGQVIGTVIKSHVNTEPVTVKFIDSTPREYPTGTWFVTLKITNQDVIQGIHNEHYTGGSATTIEREDTDKLRKILNVPITSTTKSKIKRIPISEIKNPVVITISIVHSPCVPLANFVV

SEQ ID NO: 4493 - protein, 340 aa, Methanobrevibacter ruminantium
MVEFDSFINVEKVIEAKDSNYVTKELSFDDKTILNTPYKIFNVSKVKLNKLELPLKGNIIETTKFINNKKSYDALYNLLENSPNNQKSKLNQFFKVDNTFKSYKSIISLTFSKNPFKSNKFTHGHSKPLSFSNFEYLLDYMYEYSTLFVLIPDIDFKSFDSMDNYMEYIEKAVNVVSSFNNKPIFVPLSMKLDNSNLEKLLHFYKENNYSNIWFNFYSNQINTKISIIRYSLRLINRLFKGNAVTYFSNMKKEINKHLDDVYTLPSDFLGPFFGCDFLGSNRESGFPGKNIKRTAKEKREFERKNLINKNRIFDSSSYYYFSILEYPSDLRIKFKVNSTN

SEQ ID NO: 4494 - protein, 189 aa, Methanobrevibacter ruminantium
MFFADFLRFLSYGFLEELKQSNCYNFLDYYNFAIGSKVFEEINQHLDNNLINKLHFCPNNNYNYSALIAPLLSNEEKNKNKGEYEVIGLSLHYLSLNQVKYIIIDDKRARKFAKRNFEELQEYITGTIGIIIFCSKDNFISKIDAANILKDIEFAIENHDETQGNFICSLGKQNYKKIIDDAIKMLDVE

SEQ ID NO: 4495 - protein, 190 aa, Methanobrevibacter ruminantium
MTLSNAEYKQKYIEYLILLLLGDFKNKLSVLHIQKEIYLLYNFDVELKKLFSFVKHYKGPYLDLINSCCETPFYLDGCWEYFEPKEKISGGFLKITDKGYKEYLKFLQKIKDENQEELLHINTAISMLNRLYGSLDCEELLLLIYTEFPEYTEKSEVYSNIISKKTNIAKNLFEKKVISEEKYNELSGIL

SEQ ID NO: 4496 - protein, 922 aa, Methanobrevibacter ruminantium
MEPTISSRLLIFIRNDLKNDINELLGEPKCGKGSAGIGNLAHMPWLDFTLHNIDENLGAINVAYLFKPDMSGFYLTFRALFYQEIEKKHGKYLLIYLKNKSRHIREFLEESNKLRDDFLFNMDFSEDTAVLKKHSAGTIVAKYYDASNVPSDEELINDLNYFLDLYAFVIDNYENKTDLSVDEWVKVLENKELIDDKMFSILEIMNEMDNYSATTSQISKKREELGFLDEKSYNSIIISNSRKIKEFLNKKPIYNDDGTENYWTRFFYGKNVDGAFEFKMKDELVEAFKKTNVEKRKKGGEEVTKNYNSFYDFLLDNGYLFDKGTIENYLLSLKVKPFAILTGNSGTGKTKLSQLFSQYISNNNPILVSEMNRLSKDTEDFVEVQVTTRRSSWNIFEKGKEMNPGWTISNEFFSNYLPIDQFSGEYQIEVDGIEGNGIISPVIQVYYDKNSLKLKKEFEKLYLSELESIEKDKENKVSHEIQLVGLELNVNSLENMVNTNFTKFKGDISFKKEITTTSIKPGEFIVPYEIFDYIPFNKNQMDCKIISCGRFSNANIHIKFKLRKLSKNIREYLEEKGVGAEIDVKIKNIDTSLERFNPDWSSAKRYSSEQIAQLNEKNIDLIDFNSQNYKIIPVGANWTENRNIVGYYNVITNKYQSTPAYDLITQAQKSDEPHFLILDEMNLSHVERYFADFLSAIESKEKIPLYGEEALEIPDNLFIIGTVNVDETTYMFSPKVLDRANVLEFKTYSAASYMNGDIKLSGPDGNLSYLENPLDGNNIRSKGIDELRELFDGVKVENKPFWNILSSEIEKFQSVLKVSGFDFGFRVINEIVRFMAVAWEYENKPDEFSNWERYFDAQIKQKMLPKLHGSEKIIGDTIDELHKICLDSSIDDVEMAKYPESYKKLTEMRKVLRKQRYVSFIN

SEQ ID NO: 4497 - protein, 547 aa, Methanobrevibacter ruminantium
MEQYIKINAIDNESNQLGTFKISKEYDGYIPSIENFNKEIILENLILYNVPIVEYFDNKTPIQYYKNDSFNANILLLEEYEYTIEFEGDLNLDVYESLKNSKNSPLKLLSNTNSGFLNFGSYVGKTFIDIYKDEGLLFKCPIEVRSRKINYAKDYATMIGDLSRFSSGLIYELNSPVYQSLEVSDINKTPYEDFMLLEYLFEDENLPSTVEYLSRNLYTLLEESREEVPSSLASNIGPNELVEVFSNSDNLERYDGLDNGHLDSVLSRTKGYLPLKINEIKYVDNIDTPENRFYKNFLLYIDDLIDDLIKRIDEGYSLDKLHEYKETLSYYLSSRYFLDISPMDYPPLNSQVLQKKEGYRDILEYYLLFEFGFKLNWNQVVDDFRGYEKKVYRLYEYWCYFELLDIVGELTDTEIRFDDLFIEENLNISLREGAIKRFDLNLSDLLDNDLPSSDDLDIRIDLMYNKTFNKDMAFHSYSVALRPDYTLSIEFGGNAYRIHFDAKYKLNINDESFKNDDIVKMHSYKDAIGDTIAAYVLYPGDRKEIFL

SEQ ID NO: 4498 - protein, 1178 aa, Methanobrevibacter ruminantium
MEKTMKSKLFILLIIISILISISSVSASELQADASNIDNDYQTNMEFDPICNDESNQNQDLNLKNNNEHILKEENTNPPEIEDETCFTTLYQEINQSDDELNLTHDYIFNKSYDNASLYQMYYGPLISVNKTNFTINGNGHIIDGNEMGAEFDFENNKGEIVINDLTFKNFNQTVLQIYGKLTLNNVNFTESFESLESIIFVSKGVLNVNNCSFYSNRAKNIISGSQSNITVNNSIFSGNGNYERAISANRWQLVIHNSRFENFTFKNGAIIDFKGYYLDLENSSFNNIHSNLSGGAILGKYFPAYIKVANKTQYLPSDPMIIKNCRFENISCLNDGGAIHFDFDSGSQRIAQSLNIIDSNFTNCSSKYGGAISILGGGLNLEKSNLLNNYASFEGGAIYSSWTNINITDSSIKNNKAEKNAGAIYFDKGNLSIKSSDIINNSALEESPTTANAIYAHDVAADFSDSTFDNGGIAVYADFASHSNFTNVNKNDDIFLMDNHNYIVSVETPGIKLNLTNNEIIVDSLPSKFNSQDWGWTTPGKVQGDNDDCWAFATIASIETGLGKSTGVLYNLSQNYVQKLQLKYYEVGDLRNSLTGFITSGLGYALSWYGVLPTDAAYDDRGMIADSDMNVPRIHVQDAMFIYTGENNTIDQLKKAIIKYGAVTVQYWAYREGEEILSEGEDISIMEHNTHFISLVGWDDNFTNDFGGAPGCWITKDSLFGYSNTEYINFADIDYFAIVPLRVAVAYIFENDIDYHVNYQTDLTCLAGFDQNYTIYSNEFTSKYDELIGAVGTYFNESGIKYSFDIFVNDKKVQTQNGTSEYAGFRTIVLNNYIPIKSGDQFKVVFKSNSVPYQAWSRVHYLNGTSLVSADGSTWTDFAPLNKTVCLKVYTLNDTTKLADANDMIIEYGEDSYFSVRAATENNISVGPGEEVTFTINNNTTTVKTNDEGVAKIKISEAPGTYKITSSYNNQSYENNITIISRERTSTRILYQNMSTVAVNSKVDGRIGKYFEVNLTDDEGQPLNNMPVQIGFNGAVYNRTTNATGGVKLQINLGYEGSYTFAIAFLGDNKYAGSFEVAIIKVSKQAPKITAPAKTYKASAKTKTITATFLSDKGHGVKGKKINFVINGKTYTGTTNDKGVASVKVSLNKKGTYTCTAKFAGDGMYKATSTNFKVKII

SEQ ID NO: 4499 - protein, 354 aa, Methanobrevibacter ruminantium
MKGLARIEQDVLGWVDAELDECGPYDAICKPLAMAPCTSDVHIVWGHAYMSDAPNRVVGHEATGEVIKVGDKVKDFKPGDRVIVPAITPDWLTVPAEQGFSQHCYGMGTGMSFVTFKHGVFAEQFHVNQADANLAHLPDNVSLEQAVMISDMMTTGFYAAELADIQFGDTVACFGIGPVGLMALAGAQVKGASHLIAVGSRPAAIKVAKEYGAHDIVDYHNGSTVEQIMELTDGKGVDKVVIGGGGKDTLSEALSVLKVGGVIGNVLHYDGIETIPVDGLSWGQGLADKTIRGGVCPGGRARMEKLANLIEYGRFDSSKLITHKFDKFEDIEEAMILMRDKPRDMIKPAVILDE

SEQ ID NO: 4500 - protein, 623 aa, Methanobrevibacter ruminantium
MISKLKKTIISFIIMGVVSFAVTLLPISGGMSMLAPDLGLIYVLGLLFGPYGALGVALAIVTLNLINGFTLMETLPFEIFTFGVSYLGYRLWYSGFKTDTITKPKLDNSYHISLFLVSIIICGFIYSTVQGISFNLIFWVDRFYIMILFYFMSFTTMAFLYGIIGIWICNRYDCFETPKKSKRHVDKRIYQAIFCMIIITSIILATSFITTDDTTVRIIELIVLGIFLFAYLTKPFEYDITPNDKDTISGRIMRNFIIITFILGVLGIAISMISYSAYSQSDNVYLVLMWGPIITDTVLLLFLIPCIFILRYIEDKVVQPISSFSKIEGFIKENEKIDEDGLVKTYSKYTDEKTEIGTLARSYTELIKHNNNYIENIREIEGEKERINAELDIATKIQESSLPENPIKTNDFTVEGYSIPAKEVGGDFFDYYMVDDENLAIVIGDASGKGIPAAILSMITQFMIKNFLKQTLNPSEVLYSLNNQLSENNPECMFITLWLGIYNTRTKKVRFANGGHNPPLVKEDKKFKYLDIDTGLVLGITGDFDYINEEIILKDELIVYTDGITDATDEDSNIYGEDRLLKFLNEFKGDEVPIKPLISDVNTFSKGVEQFDDMTLLCLKLNK

SEQ ID NO: 4501 - protein, 99 aa, Methanobrevibacter ruminantium
MNVIKNYNGKELTMAVDGRIDTISAKELEEEINAEMGNFDSLIMDLGDLEYTSSAGLRILIATQKKLKSEDIPFVIRNVNDAVKEIFKMSGFIKILNIE

SEQ ID NO: 4502 - protein, 2687 aa, Methanobrevibacter ruminantium
MDLFNLSSAQKMLLFSEINNPQNDSFYLKFRKDYDLGDYEYVKSAIELISRKYLNLQIKYDENADFKQYFVDADEVNVDSFDFSGSDLDGIDGDIGGSGVGSFDGDIGGSDVSSFDGDLDEFIKNYLDKPFDDIFDSPLYKWAVLKTSDSTVLIGVVQHILLDGTSLYSIVPSEIERCIDSLKSNEEFIPIDYSYETYVNDELEYLNSSQSQEDKQYWLDSLKGYSQDWYSFDDSELGFYEILLEKVPDFGYSPFVTALALSFLYFSKSKEGNESFKDMVFNTSVHGRYFSQGDALGMFVNTIPLRLSYDGDMTFDELLAYSKSVLKEGLGHAKLQFSEYTTDLRNEGIDPDCISMFSIVSNSTDMNSKFLTLQKDIKFPLHFRINKNYSDKKGLQSIFIEYDKACFHKREIASIAEGLKYLIRQLIDDSAKRCADYIVHEAEFFKGENYYNNLINSFDNPTAISPDLSGDKVRFVNISKHIDIDKLKNLSNRYHLSKEKLLLAIFLYDLSKFSFSKDILIAYNRVAAGYHFNTDLTVEEYLNDFKQSFEEYNNYPLLNNRKLNFESEILFFINDYDAKDYKLVFNFESGKINISYDESFYSKELMEAFLDSMDVLLGRFDSSDEPLKEISIRRELELDEGFEIELANEGTVKEMFENIASENPDKTILYCEDGQLTYDELNRKANRIANGLLKRGVKIEDKIMFMMRRNSDLIAAVLGIVKAGAAFIPIDPNYPKNRIQQILDDSDSKFVITSSEIDYDGDNRIDVDELLLDGDYSNEDNVDSNPDVDLTPDDSNPKLDADSNPKLDADSNPKLDADSNPKLDADSNPKVDLTPDNLCFLIYTSGSTGKPKGVMITHRGITNYIANVKENVPIYELNHKCSGFVSISTVSFIVFLREILGTVLNGLPVVFANDEQAVDPLEFAELFNNSDADAFGSTPTRLLEYLQLEEIQDLVGKCKVIIVGGEGFPPVLYDRLRKHTDADIYNSYGPTEVTIASHYKLIDSNEVTAGWEMLNVVDKIMDIDGNQLPPYVTGEIYVGGAGIARGYLNNPEQTEKVFLTLNDIPYYNTGDLGKKDANGELYVAGRNDTQIKLRGLRIELSEIEGAIANYENVSLSKVLVKKLNNVEHLCAYFTASSEIGLGDLKQHLIDSLPEYMVPSYFTQLESFPKTPNGKTDFKNLPDPEIDADEFISPRTDLEKELFDIVSDILGMDEFGVNTDLFSIGLTSLSVIKLTSAIYNKLNAQMNVTEILKYKTIERIASEIKIEDDESRDIMELYPLTSNQLGVYFDCIKDLENTAYNLPKKIEFTEGIDVDRLKSSIIKAIDNHPYLKTRIVMNNGEVYQQRRDELKVDDLIEISDDENLDDFVKPFKLDEGPLFRFKIVGDSILLADFHHIILDGTSLNILFDEIAKIYDGKDYELEELDGFEYSLDEVKVEQSSLYKEAELFFADKIKEFDNASLIPQDINGDESKGKAAICDVFLEKDSIDDFCSKKNISQNNLFLAATSFVINKFVFNRDTLIATITNGRFNPNQQKTLAMMVKTLPLALKLNSDSTLKDYIEYVNLEWLNVLSYSSYPLTEISNEFDITPEIFYAYHGKIIEEIEIGGMTVERQSIDYEGLKFKVNINVVEEDGQYRIFCQYNDQLYSETLIDTFLDCIRIVLDKFQRFDENTLMKDISIIENDDWSVDDLEYDEIPEDRLNKIFESQVELHPDRVILYATDGEFTYRQLNEKANRIAHSLIKKGVGPEDRVMFILNRNSNVVASIFGILKAGGAFIPVDSEYPSERIEHVLTDSQSKFIIVDDVIRKKGIDLSDYSENLLDVNELLSEEDTSNPDPDVHGNNMAYLIYTSGSTGLPKGVILEHGNIANFVYPDPRNVCTYELVHNLEKEDYKVLSTTTVAFDVFQQEIMGSLLNGVPMVFANDTEYKDPIEMMDLIHRTGANVYIATPSRLLQYLEIEAMQETMYGFKVYIHAGEPFSARLYDLLSQNSKGKFFNMYGPTETTVYCNGQLLESSDIHIGKELFNVHEMVMDFDSNPLPPNVIGELYIGGKGVSREYLNRPEKNAESYEVINGIRFYHSGDFVRVTEEGNYYVFGRMDNQIKLRGLRIEIGEIEVGLSKFPGIKSVAVVVRKIKGNDHLCAYFTVHDEYKDEKRGENGYSIDIDDLKASLAEKLVYYMVPTVYMELEEMPQTANGKTDLRNLPEPVLITEYVAPENDIEAFFANLFGEILGLDEVSATDNFFEIGGTSLLVTKITMEALNRNYNLSYGDVFSNPTPRALSELILSDETAEKKSELSYDYSEINALLKKNNLENIINGEIQESLGNTLLTGATGFLGIHVLRELIENDIGDIYCFIRANKVLSGEERLKSLLFYYFSDEYSDIFSERLHVIEGDITSFDDFEKLVHERIDTVINCAANVKHFSSGTDIEDINLGGVINGLKFAKMKNAKYVQVSTYSIAGESINNYPPVDVKFSENDLFIGQAVDNQYLNSKFLAERAVLEAAVNDDLDVKIMRVGNLMARSSDSEFQINFESNGFINRLKAFVTIGKMPYSMLMNNVEFSPIDMTAKSIVALSKTPKECTVFHPYDHHSVCFGDIIEIIKPLGLDIEPAEEEDYEKALDEALADKDKQDGVSGLITSIGSGKVKKIWVPVENVYTIQALYRLGIKWPFVSEEYIYNFVKYLNDLDFFSV

SEQ ID NO: 4503 - protein, 486 aa, Methanobrevibacter ruminantium
MYERNYKLLRAKFSEFFLPTLFTSMAGNICLFVDGLIVSFLIGASNLAPIQIVAPVITFVNLIYWMIGLGGSVLCSVAKAEFDDEKSNSYFSVSIISLISIGVLITVIGLLFSGSIAQFLCSSQPELVSQVSQYFIALVIGMPFLCYMMSLSYFIRADGIPQLPFRAILIANIVNICFDIIYIKFFNLGLTGAALATSTGYLVGSILISYYFFKKERTLEFIKLKANAFFKFIKKIVTSGFSSASTQLYLTLKLLVINFLVGLYVGKSGVVAFGICYNSLFILYIFLIGTAQTMSPIVSVYFKEEDYSGVDYIIKRSLKIVVASSLALSVLFIFYPQALLFLYSVKDPADVPVVLNALRIFAISYVGTAITFLYTFYAQAIQKNRLSTIISLLEGFLLPISAAVILSFAIGGNGIWISFAIAELLTILFIFAYSRNINKKTNGEYTGFFINKHNDDERVFEYTINGNIEEAVNLLQRKSQKLPYLG

SEQ ID NO: 4504 - protein, 78 aa, Methanobrevibacter ruminantium
MLVNIININDVVDTIDIIVRKNVDNILISVKDTGVDFNPVVENEELKFDNISVLNKIADKIDYSRVLGLNSTVITIKN

SEQ ID NO: 4505 - protein, 353 aa, Methanobrevibacter ruminantium
MFNNYKDKLTGDRKILILFVILAIFNIALYINIFKYMVDIKDINMAVIHDFVTINCAIIILGFTSTRLPNLKKRDSSIYEISYLIIIGLLSITISFFNKSINGESLWAPYLEMFRILSVVLILTFLATKTKSFKAVVRGDRSRKTIISQIILCSVLGILASYFTMDINGLPANARALVVMISGLLGGPYIGIPVGIISGVWRYSMGGPTALACAIATILAGITGSIIHRWNGNEFISPVKAGLLMFFYSGFEMFLLTILTPRPTGLIVASNLYGPMTFAAVLGILLFSLFLDEKKEKAETDTDDGDEDKKIELMSEELEEYKIKANQTEGELKEYKDKVEKLEQELNEIKGKI

SEQ ID NO: 4506 - protein, 972 aa, Methanobrevibacter ruminantium
MDKKIFIVSFILLAIFTIGAVGASDVSELTANDLDDNALSLNDGEDLLAGDESGESGKESYFNNDNNYNDENRVNANNLDYGAGDNDASKDKVLSDNVSDYIYATTLSVSVDDTPQSQYPTATVSLNDLSGNPVAEASVSVSVDGDDYMTVITTTDGTCPLSLDNYLSVGSHKVGAEYSGDGTYGPSSASTTFNVLEEYSSYLNTDLFIYTGTGREGGYTSVTGKLTHINQPISNATISLYVDDDFYSNLTTDKQGEIEGMLFNISVGRHELRGEYVGDRGFEPSNATKYFNVLPKDSVSSNIQMTLNASDAQVGTQANAYVLLERQYGGPMEDATISISVDDVFYMNVTTNALGYAFFDLSDDLSVGSHKLSGEYPGNEYTGSSSASITFNILPVDDSSYNFTVTEYANYLDTNTTVLDISSKYYVNGSFNVSVVSPNGTLSTFTQDCSPDGHNNWSMADFGIDGIGSYIISGSLIFKNETLTHFDNQTFHAICIRPIYMESTEANNPLDILVVYNSSDATKVSVNGSGLFEGRKITDGPIVWNLTDLNITELGDYNISVMSYDSKGNLIDRFDYNLTIGPNGDDYKLYAKIDPNSYSTDDVAVALYCPNASWGNDIEVHIYMGNPLEVLTFFPDSVSPTEAASFKKYTLADLRIENSNDYRVEIKDFALNQFPGISFNIKVCYSNMILVSGNGSFEIDFDGASVNATLTDSNGNPISNASVSALVNGVESNCTTDDNGNLIIPFEGNTTVKLTYIDNNGVEIKGTGKYVKESVIKNRTETKIIYQNMTTTTVNSNVDGRIGKYFEVSLQDADGNPIANKTVFIGFNGKVYNRTTNSTGGVSLQINLGYAGKYTFAIAFLGDDDYMGSFEVALITVNKQTPKITASSKAYRPNSKAKSLVATLKSAKGNAISGKKISFTINGKTYSTTTNAKGLATLNVSLSKKGTYSCTAKYAGDGMYKATSTKFSVKIA

SEQ ID NO: 4507 - protein, 487 aa, Methanobrevibacter ruminantium
MTVKVFISSNQNEFFEERKLIKKELESDSMFKNYVDVFVFEENEARSLSPQENFIEGLYNSDVYIGLIGSSYGDIKDNGLSSTEYEYEIFSRLKNKQNIYFFIKDSNEREDKALDFIERIKSDTSFKIFHNTVELIEEIKRSLKAHINQSLSNQEFDFQLLAESSCDDVSKEALDLLFDSIDYQPILDLLGNRDMESILEILSLGKKDLSGTFRLNNAGALFLAENIEKFNIEHEVKLVRFKGNTKLEMIDKCYTTSPFFILLKEFEHFYWKNIKVGSVINGLRRVNIPEYPFNAIREAMINALAHRDYSFKGSFIQFYIYDDRIEIISPGNLLYPLKVSNLKNIEVPVHRNKNICNLFSKTIFMEHVGSGIQRMCDEMRKSGLREPEFINGEGFFKVIFWGPNGKLIYPEEAVDNNVLDLTKVGLNDRQIRALSRIVNEKVKYSYERYSNEFDVSKSTSKRDLNDLAKKGLVIENKSNRRNYYFVE

SEQ ID NO: 4508 - protein, 175 aa, Methanobrevibacter ruminantium
MIDESILNLFKDEKIRSIWDDKTGDYYYSIVDLISIITESKNPDKYWSDLKRKMKKDEYNLLNKYIVQMEMPSSNGKMRLTDAGDIETVLRIIQAVPSPNAEPYKEWLAQVANECLEEYINPELAIEMAIGAYRKKGYSEEWISRKLFSMEIRNGLKKEGFKEKTNREHVLDSLA

SEQ ID NO: 4509 - protein, 409 aa, Methanobrevibacter ruminantium
MVKRELYMNKINSFIDKDLIKIITGVRRSGKSYFFKLIINELKERGVAEENILLIDFELPQYRHIKTSEELDEIVLDFIDSHPEKTYLFFDEIQNVSEWELSVNSYYKLSKSDIYITGSNFKLLSKELASFLTGRYVSINMYPFSFNEFIDYKKEIGSLPINSNELNTELENYFDEYFRYGGFPTAISSNDHKEIILNDLYSSIILNDIVTRYEIRNVGLFSRIIKFLIENVGNLISANSLYNYLRGQGMEITKPTIYNYLNYLESANILSKITREDLVGKREINGSEKYYLIDQGFYRSQLEIKQENTGRIIENIVYLELLRRGYTITIGCIGKLEVDFVCKRNNERIYIQVAYYLSSDETIEREFEPLRRISDNYPKYVLSMDKTDQSREGIKHLNIIQFLRSSEDI

SEQ ID NO: 4510 - protein, 2201 aa, Methanobrevibacter ruminantium
MMKMTKKNLFLISLILLIILTIGAVSAADDLSASSDLTVEDSGEAIATAPEESVLINENNGDSIADKGLSDPISNETANIAIDEKTTNDKAISEEDNSIYSKDKANVLRENETPVILTINAPNIYYGETANVTVSARYGAGPLANSSINLALDGAAGENILIFDDGIAQKNYTGLAAGNHAVVASFSGYGPYPSASASKSFEVLTPTVNIEIEANDIYYGERAYVTLHVTYGNQPFANNTIQVSLDGQSSTSFIVEDDGNIQVTYSNLALGSHTVSAYFSGYGPYPSASASKDFKVSKKETAVSLSVSNPQLDKGDELRFTPSVISNGFYVMANSYSIMVDGMSNYSYWTENGTYFLSTSSLSSGNHTLTVSYAGDASFLPSSANATFTVNSYKATLSLMMIETELYPGDDCYIFIDLYDSNTHQSIAANITVSVGNNSYLYPIRVNSSFNLPTDNLAPGVYNVTAFFDGNGLYDPETAVGTLTVLSKKETTLSLSISNPVLSIGDELRFIPSLTGDGSYIWGASYTIKVDGMGNQTCRLVNDTYFLSTSDFAIGNHALTVSYAGNGEYMPSSATGYFEVTPKKANLSLNMLSTELYPGDDCYLYIYLTDSNTHQSIAANITISVGNNSYPYPIRENSSFNLPTDNLAPGVYNVTAFYPGNDLYGPETAVETLTVMEENATIKTETYLSIIMASGDKYLGDNIPFSVSRTPSGVSLFGDNYIFSIDGVESQDIFYENFSYFIVTENLSLGNHNLTAYYPGDEMYLPSSASQNFTLISRPKSDVLLSIEANDTFIGEDATIIINMIDELGNPIDGANVYLYMDNKEFALPLVNGVAQFSYSNLSLGTYLVSALFNGTEYYNPANASASFEVLNANLTVTKDNFFQFFNNNGVLNTNATDLKFVGEFNDLGITSIKINKPVSIVGENANIINIPVIVSSDDVSLANIAFAYNGSEPIIYANNVANLEIINNAFSYKSPSDKSYAVNITKSENVTIIDNSFNVVGGNNTYGINIDAIGFEIDSNDIYVESTEYYASAININGPSSGNVLNNTINAYAPMMVYAINTDPSSGTLETSYRDNVIEGESYFAIGIYDDSETITGNEIKLTANYAIGIVALSESNIEDNKIKLDATNVGDEDVEDDEVDVQTAGIVIKNNVQVTGNNIDSSDASIAVVSGSSTINNNALNGHVTVGGDSSDNNIVNNIINTESEYAVELTTTTGNTVYNNEIHAADTVGNDAVNAENIGANTVEENNDWVNITNLILTVNDDSTEVTANLTDIWGNPISGIINVSLNGADPAECTVNETGLYVIPITQNSTVYASYINVDGSLSFDKIKVIVFNFPVEVLPNATIALTDLDGTVVANVTDLEGNAIANKLLAVTVNDIPVLGAQTDDEGIYSIDVVGNATVVVSYIDANGITVSSSIQIINNVETETGTIIIRPNATIALTNVDGTVVANVTDLDGNALANKLLTVTVNGASKLGAKTDENGIYSIDVDGNATVVVSYTDANGITVTSSINVVVNTVTETETLRPNATIGLERDGNVVIITLVDSDDNPISGADVVVYVNDIETLVDPTDSEGKTNVSFEGNATIEVIYLDDNLIAVSSSIEIINNTEVEIESETLRPNVTIGLERDGNVVIITLVDSDDNPISGADVVVYVNDIETLVDPTDSEGKTNVSFEGNATIEVIYLDDNLIAVSSSIEIINDTVEGETIIINPDATIKLHHVDNKVIVNLTDLEGHPLADKVIYVYVNYEEIEGAKTDENGLYSVDIEGNTSVIVTYVDPVGRRVTSSIDVVVNTETETETVVIRPNATIALTNVDGTVVANVTDLEGNAIANKLLTVTVNGAPKLGAQTDENGIYSVDVDGNATVVVSCTDDNGITVTSSIIVVNSTEIVEVEKIVNQTVEVEKIVYVNQTVEVPVEVEKIVYVNQTNNNTIEVEKIVYVNQTVEVPVEVEKIIYINNTVEVPVEVEKIVYVNETDNSTIGTEKIVYINQTVEKIVYVNQTVPIIPNRTATNIICDNMTTEAVATVDGRIGKYFEVTLVDADGNPLVNKPVAIGFSGKIYNRITNETGGVKLQINLGYKGSYTFAIAFLGDDDYNGSFAVANVKVTDQNAKLTASGKAYKASAKTKAVSATFKSANGNAISGKKISFTVNGKTYSATTNDKGVAKVNVSLNKKGTYTCTAKFTGNGMYKTTSTSFKVKIF

SEQ ID NO: 4511 - protein, 3053 aa, Methanobrevibacter ruminantium
MVIMNNKKLFIVSLIILTILTIGAVSAADDGLATSDEITVDDSSVAVSTASAESDIYETNGDIVADYQSDSISNVTVDDDNTKDEIIRSSPAKDNLLLDDDDDPGAVNDDDEGDDDEDYLDDISVSITNEYDVTDQDAVIVSIFVPDVEEGEDGIEGYFVVCLDDDDEIFLGPFNHTITPDDYGTDVTFTASDLEITEAANYWVRVFYVSDLAEPLIDNDEEDGYNMIFDGDCIARDYTQFYVIVPPDGRISIFDTSAIYTVYCPPGSEGTVTLTLRDEEDVETSFTQEIEDADDENQLYWDLDYMGLNTIDAAGNYEVTITLENGTLICEDDIRIMDPIEIPEVSYINSTDYDHATLVALIKIPSELDDDLEELIDGTVIIQIDDETVFEKTLSEFVEGESPDDPFWVYPKIHWSDELDTSVKLYYVLNNQLDIDLEPGTYDVTVKLDLDGWDEVSSTEEVRLVESNVVIDEDIGASIEIFDQEDILNDNEVRIIAITVTGDKSGRVNLAVEGCPEWECPLDELENEGDIYYINSGFDIESGEHEVVVSYVLNDDRSVSNSAILNFIVYPRIFICGNGGEDIVNYFADEDSAIHIYPKGDDVSTIRIVVTIGDEVVLDSTIDDLGLSPKINDWGETYYTVGPANFNKKLEFGHYEPVVAYYYSDAYELSTEDGELSFIDIIGMVHVADIEDDETPVLAVCSDRDGQIGVYIRQYTEDGDQELEPKYFEVEKHGFIMPTIDQLGLDEGQYHIDVAYADDEWIFGNDLIVVNSSEYFVLYGCDWLYTEESVVYVWCPDDAEGIISLTNNDGTINVDHEITDEDKGKYVEFTLEELGISGPGWYEISVRVNGNEIDHIGFDVPSPIYMPNYNVYLPEEGYEPDYSMIIAKLELNSELEGNITINLDGTIVFNKDIEDMEAIKDGSKWIYTIYTSDLDEAEEGMHDVTVTFNDLNEERSIEFLNRTTESDGNLSIIMLGGTYCINWNDVIAEVIAPTNYNGRLVLRLQGEIMQSWDELHWVNWDNYNDTHNIYYIYVDNLDKMCIENPGEYTVSLEYYSDREDENPSLQNSEEYRFVRDEEPSGDFEWEVYHWADYEDENSLLVTVRYNDNIVDGRIEINIEDPNGITLTDSRDVGEGYEDTWLVSDLGIQEYGVYTISAKHILGDDEEIIFENEPVYVTKIQIRGEEEVYVDDPLFVLAIYHAGDRTTVYLNGAGIEGRRLPNGGPLVWYLSDLYINEPGEYDCTIQLFDEDDNLFAQTEYYLNVIEGDDGYRLIKNLDWDYFTSSTPVAALYCPEGSVGDISIDIYAPDDNDDDYRSRDIVNTILDSIGSEDVGGFKIWTLGDLGINEGGWNYGFVLNDADGDTITDENGENCEFGFGAVLYHGIGIAIWDQNPVALDNEWLVDIYSPLDNDGDVILMIGDEVYFSDTLQNLAMYQYDEDIEQGCAHFHFGANSFNRTIETGHYEEVIVYYDGFDGYSTDSTAFDCPTVLDFGKPMNFDWSVKGAYYEYYDNNVINVWYNEEINGGQIKIIARAENGTEYESVKDYNDNRNNEWTITDFGISEIGKYNLTLIYINEGDEEIVRDDKVLQVLTFDPRFANWVTVDHPYDVLAIYQATEEIRVYVNGEGPYEGIKMPNDGPLSWDLEALGISAAGEYEILVESYDGEGNLLSSFEDVLYVSDEMNPNEYRVEYANDWDFYSLDSPVFGLYCPEGSEGPITIEVYGPDDNDALLNTINDNIESGDIGTIKSWTVGELITNLNGWDYRFVISDANGIIKNGNDEDIGEFNRGINFHDSIDYISINEWSYLDDEWFIDIFAYTGNDGDVAVEFDGATVYNGRLSDLLFFQSDEDMQRGIAHYHIPVSYLSNEGNPIEAGLYLNIIVKYYGDDGYNTTGYTLQSYIDENGFDWANVRLSVGDDPNTIILTLTNSHWEPLADKEVYISVNGGERQWGLTDEYGIAIFTIDGGNCTVRGEYENAENQWSAYEMTLCVFGEPIYPNATIRLEFVDGEVIVTLTDGDGAPLANKGLGLAIDGIVVIGPSTDDYGIYRMGIEGNATVEISYQDENGIVVSSSITIVNNTETETVYVGPNATIRLEIVDDNVIASLSDGDGAPIANEFIDVSVNGVPVNGAMTNASGLYSISVEGNATVEVSYTDDNGITVSSSIRIINNIETVPEPVNVLPNATIGLSKDGDSVVISLKDGSGAAIAGASVNVSVNGGDVTLVGPTDADGKASVEISGNATVVASYVDNNGITVSSSIVINSETVPEPVNVLPNATISLSKEGNSVVISLKDGSGAAIVGASVNVSLNGGDVTLVGPTDADGKTSVEISGNATVVASYVDNNGITVSSSIIITNNTEIVVIEKSHTADALFNVIIQEDKLGVWLYNNNEEELANKNITVVFDDDEEGQNYLTDGQGYTSIPIGDHSIIKLSYTDEDGASVFYTVHLFETGEVVDADYVVIYITPLDDSSLEVSVSVNGEDLEEGEITYYLGEDAEGITVDLEDGVYVINYDNTVNQTIAVEYIDDDDVSWYAYYEVVVYNNTVTETVYLSPNATISLSKSGNDVLVSLTDNDGKAIANADLDVLVNGAKSTAKTNAKGEATIAINGNATVVVSYKDANNITVTSSITVVNETETVVIEKNNTIIEYVNQTVPPNATVSLSLVDGKVVAEVTDGDGVPLANKLLAVTVNGAPKLGAETDANGIYSIPVEGNATVVVSCTDNNGVTVSSSITVLNNSETVVVEKNNTIVEYVNQTVYVPVVSNSSFDIVGDENGISAILLDEDGKPISGAVVELDVNGAKSNITSDKNGEIVIPTDKNGTITMTYTDENGAKLIYTTKVITQTEIIYQNQTIEVPVYINVTPNRASTKVIYNNMSTTSVNSNVDGRIGEYFKVQLVDSNGKALANKTVYIGFNGRVYVRQTNETGGAQLQINLGYQGDYTFAIAFLGDDDYNGSFEVAIIKVSKQSAKLTTAAKTYKTSAKTKALSSTFKSAKGNAISGKKISFTVNGKTYTGTTDSKGVATVKVSLSKKGTYSFTAKFAGDGMYKETSVSSKLTLK

SEQ ID NO: 4512 - protein, 282 aa, Methanobrevibacter ruminantium
MRNIFNEGELDKDSVCAKIAHTASDGKIYKTNFYNLDAMISVGYRVNSIKATRFRQWSTSVLKEYMVKGYVLDDVLLKNGTRFGKDYFDELLEKIREIRASERRAYQKVTDIFSQCSYDYNPKSEVAREFYAKIQNKLNFAITGHTAAEIISERADSEKEHMGLKTWKNSPDGKILKSDISIAKNYLSEDEIKSLNRLVNMYLDYAENQAYMHKLMGMDDWALKLDSFLEFNDFEVLDNKGHISMNEAQKIADAEFDKFRVKQDKFYQSDFDKLLEDVKRLK

SEQ ID NO: 4513 - protein, 1186 aa, Methanobrevibacter ruminantium
MKFNKNRGISAISIILILFLSISMASAIEISADDADMDSGDLSVCEVSTSDCYGETLISADASGADSSDEIIINETIADEKTDYRSSILADGEKKNLHVEVSNDVFTPDNDYEFMLYDEDFNQIGGYLDIYLNDELTYSDFTVDSSESSSISLSGLECGLNKITFIYDEDDVYNRLNQTKEFYIYGENPEFVMIPHYDTITLNGNYSSRVYLKEYDEWGYYDEDNEGDIEPIDDKFNVYIYKENPGDEYELVWEDEFEANGTINFDDAIKTTGNYLIRYVFNGSSDYSYAPYNSSNIIRCVNVITDFIINDTYFIPDKGFGFSVYLVDNATGDIIDKEFKLMVYYILDTSNPVRIVEEEMVKGNKTYTFDCSEIPENITYLFIGCIFDGDRDEYSSADKEYALELTDSRIETSINANIGDSVIGNSSSFRVYVQDEENWGQIDATLDIYLNEEYSQTVTAYAYLENEVLIENLKKGENTLRIVYNGTDIYQNSEKSYNFTVSDKRANIEVDVSNIIVGDVTKITVNLTDEDGNILNKEFNVSIYKGGSYYDEDSELIYSQVYTGSANISLPDLEIDDYYVRAEFVDESFVYSQAEDSEYFNVYSKGSYIDLGKTYWPDNDDVVLNISLRNYIEENINGEVLFQFNGTDYPLTCTEDGAILNLGKLPVGKYQIFAKFDGDGEYEASNLTDQLRIVKATIINVEACDVLKGQSETVNITFTDGDGNPLDVKMLDINIWDTDGNWLDYGQLRNSIEIKNIQTDYIIRAMLSDSYGEIGYSDYYPSSAYGFIRVLNGTDPTVITVTNTANIDLAIDGPKVIITLTDEDGKAISGAKLNAAVGNMESILTTDSKGQAVLAIGANDTAKVTYTDENGAGVSASIVNNVINTTVTEIVEKNITVPVTANATIDLAIDGSDVVVSLNDLDGNAIASASLDATVGTTNSTLTTDDKGQAKVAIGVNETAKVTYTDENGASVSASIVNNVINSTVVINNTVKRNATKIIYNNMSTVSVNSEVDGRIGEYFNVTLVDSDGNALANKTVYIGFNGRVYVRQTNETGGAQLQINLGYQGDYTFAIAFLGDDDYNGSFEVAIIKVSKQSGKLTSSPKTYKAKAKTKTVSATFTSSYGNPIPGKKISFIVNGKTYSANTNDKGVATVKVSLSKKGTYTCNIKFAGNGMYTESIAKSKITIK

SEQ ID NO: 4514 - protein, 486 aa, Methanobrevibacter ruminantium
MEYKKMLAEIDFSKDLIGFFEDKNLCIINESLLDGTFGLSRDILFDKRILFNNDSLIDSFLLNAKAYNLNNEFFILLSNIIRNDFQEAISNKSNNEILDFEETLEKESPFYSGIPVSKEMFVGRKDSIHKILRNFPHIFKGQTRHFFLTGDRRMGKTSLIDFIGEYMKSYGVVSVYISNKGNDSVEFLAYEIVEGLIDELTLPDESLKTKIVDFFQDHVESVEFKGTKIKLTVDKNLSVSFKEDFINHLKSIYDEFGMDKKGILIVVDDINGLSNSEEFVHWYKRMADTIQVSHINLPVYFLLAGYPEKFYNLTRLDESFGSIFAYDNLDRLSNMEVLEFFESSFGEKSMLIDKDALFYMILFSQGQPLMMQELGESVFWECPNGHIDKYIAIRGIINAANVLASRQIKYTLNILSEDDKAIFKSLISDGKFFFNSSDICDEGFLESMFDLSLIEVSKKEDYDFCFKNTLVFIYFWVEAIQGLIEK

SEQ ID NO: 4515 - protein, 202 aa, Methanobrevibacter ruminantium
METKNLIIICVTLIILVCLGLFLISHMNGQEETHITILTSQYLTEGDTLKLKLCDKDGKGIADQKISLKIQSKDGNFNDDIVIKTDENGESQIQNLQRGNYTLIAKYDGTSQYEGYGLTYEFIVSPKEVEQSSKTTSTTTTATSNNGDYASDYKADDVIDGWDPSEHEVSREYLGEGEYRVNYDDGYSRVIDSDGNVLSYGY

SEQ ID NO: 4516 - protein, 840 aa, Methanobrevibacter ruminantium
MAMVSASDISADDSVSLDAADSDIVSTDSISVDSVNTYSADSAISSNEDKDNYHPSNLKDDDNKISKINYELNDTVFYGDDVIINANLTDMDGNIIDEFFQVTVYDEGNPLQSNSLKGKGTMIVPTVSLTESSYYDVALSFAGNEEYASCNEFTSFNVTFKENSYLAISNYDSYSKINSTKINFIIYDVDDEYINDTADIYLNGEYYTSVLTNGNENEVTIENLQVGENTVLVKYNGSNIYKGSEDSATIMGYEKDTSIGIDAPDVLIGNDARIKINLTDEDGNIVNGRVDVEIYEYYTGDDESYVPFKDDYVVNGEAIIVIYQSKLRAGVTYFIRADYEGNLTYFRSVGSDYFDCFNRSTEIVIDGRIASDDKDITLEIGLFDQRQVMIAGLVNLTVFDNESNVVIDTISVETSADDYVNVTIGKLPYGHYMINASFEGNEEYEGCELEANLHVFKATNLTIEVRDQIKGESQIVNFSLVSSDGGLNESASLIIRNMENDLIYDGIINFTDGKASYNLDNLEEGLIILADYNNGMDLVGPFETVYDSASKFATVRIIKQLNGTIEFEPVNDSIIVNLKDIDGNPIAEAPLSVDVNGQVFELITDDNGQAMLDNIPNNVTIEVKYTDNQGLVASNKIVVLVKEQIKQRAASKIVCKNMSTVAVATPDGRVGEYFNVTLTDADGNPLVNKTVMIGFNGRVYTRTTNETGEVNLQINLGYKGSYTFAMCFLGDEDYNASYEVCVIKVSSHQPKLTGSAKTYKVSAKTKAISATFKTSNGNVISGKSLVFIIDGKLYNAKTNSKGVATVNVSISKKGTYSCTVRSSDDGMYAATSTKFNVKIV

SEQ ID NO: 4517 - protein, 279 aa, Methanobrevibacter ruminantium
MFILKFEIKRSLIFISILAILILSIGMASASEEISDSVSTDIASEDVTSEIQTDNVEITNLDEDSSLDDADLEKDTGDKVKKAKKRINTKIIYQNMSTTAVVNEYDGRTGEYFNVTLVDEDDKPVVGELIQIGFNGRIYNRTTDSNGGAQLQINLAYSGPYTFAICYLGEDTYESSFEVAVINVAAKKMTLTVPSKSYKASAKTKTLTATLKDNKGNLIKSKQISFTVNGKTYSAKTDSKGVATVKVSLSTKKTYSFTAKFAGDKSFGAVTKTGKVTIK

SEQ ID NO: 4518 - protein, 4825 aa, Methanobrevibacter ruminantium
MQAIIPVKDNFLILVTNMKKSDFKRIFICLVLLTCLIGAVSAAEDVSVDDVSTDAVAVDTITEDASDPTDISTVSEPVSNDVQANTSQELNKEPATKSTNVLKDGTSTNIYVATTGSDENDGLTQSTAVASLAKAVEIVNATAGTDFTINVANGDYNISKIESPAAKNVNLIGESKEGAILHASDTYGINVYEDNIAWTIENLTICDFNSTTSTSAAVRCFAIDSVFNINNCIFKNIGSKNGAIYITSTGTRTISNVLIEDCFGTYSSSSSIIHLYGEGPVTLDNIEIRGSYMDPSVGTATYLRSVIYADQAQTNVTLKNSRIVDNIGAMGSLIEAKGAFKVINTTFEGNYLNTSSNGVNGGTFMFYSGTSSNSASNIDISQSVIKDNVLAGGSIGLFNCVYGTHNIDHNVIMNNKYANGNDVPLGSFSGAAISTDDNYWGTNERPNTKTTEWVILTVDTPEMAFVGVSEAIPVNLNTYKTTNNETGAVEGMPDVDFGVTYALNQANPSTVTVANGQGTINYLATVDGNETLTFSTGDAFSFDVKADIASLIYVDGLNGNATGPGDSEHPYKTIAQAINVAADGKIIVIKSGTYTENSLIIANNITLKADKNAEVIIDANNEGRIFTVQKDAIIRDLTLINGKSTGNGGAISLDSGLLTLNNVKIYNSTAQSGGAIVSLSGSQLSVSNSEFIDNNASNGGAIYVAGVADITNNKFISNDPEDGGAIYVAGVADIESNEFTSNHATNGGAIYIDSENNQTIKDNTFTSNTADKGEAIYIKNANVSLSGNTMGENDSIYLDGASLKTTLTFLGGKTIAAEFGQTLNLTATLTDEDGNNIRGGIVTFTANGETIATIDLSTDAQLKTQYTVPNDAAGDITISGSYSLDNGGAVISGKIHPAVPHWFIEGGSGYETLADAIDGASAGDIIYYDLPEDYTEVISSKTINKALTIKNNGTGVVTLDGNLDRILSISSASVNLENLIFINGATATNGGLIYLSGSASNDLNISGCTFKDSKFTTTSTYTYAVAIYANGGNINIKDSEFRNLTAPKTGMIYQSSSSGAITIENSLFDNITGAYDGGLINSNGDVSLVKTNVTNIFGSTSTSDYGLIYIRSYGGFLFISECQFINISNAGAHPVYYRGSGGYNITQSLFMNINSNKIIDASAKGYVNYNIFANNSNNYVLYGSSSSKISADYNFFGSNSKPTSYVSNVNYTYWTIVELSSASDTAYVGNPTDIAIQFVGTDGSENLTLEGIMPEYTFTLNVTNGTIVPNTVTLEDNEANAEFTPTSVGKVNITATPGPAQLTLNVIDPSILLVVSTDGSDTNPGTLNSPYKTIAHALTQANATRNVIYLLSSDDAYAEHGLTVSDNITIRAEDNTVTIDGGQEGPIFTVTGTLSIEDIILSNAKVDEDNGIGGAIYLNGGNLTVNGVVFSDCIAAYGGAIATTAGSNLTVINSVFSDNKAKYGGAIYVAGEANISNSEFSDNNNEITYGGAIYVNGTGPVVISANEFDNNKANKGEAIYIENGAVNVSENTIPANETIYLAGGSINSVLIFLANGTISAEFEEEVNLTATLTDDQGNAIKGGIVTFTANGETIATVDLSTDAQLETQYTVPNDATGDILISGSYSLDNGGVVATGIVHPAVPHWFIEGGSGYETLAEAVDAASAGDVIYGDAGTYDVSDLIINKAVTIKANESGSIVLNGNGNQIFNTRANVILDNLTFINGSASSNGGFIYVYSDSLVINNSVFKDLKATGGLGSAIYVATGSSNITIENSAFDNIKAATGLINCRSKTTTFTLVKTNFTNIDVSTNGLFYLYEGGLRAYESQFINVSGGDGAVVYFYGQSDNIVTKCLFDNVTTTKTTGIIYSNSKSANITYNAFLNVNYGVYSSSSYGEVITADYNYWGSNDKPGTSLVNSNSKLNNWVVMTVSPDTLDSLDSGATQAFTVDFTHYTDGTANYTMADTIPELTVSASAVKGSLDQSEVETQNNVATFTYTGSQNGEETVTFTNANLSIPVKFVVGEGYFGIVYVAKNGSDENKGSEDAPVATIARAVEIAQRGSGQIIITEGVYNENNITINSEIPISIKGQGDVVIDGEGLSSLSIFTIKSGEVSIEKISFRNNKAKFGAGVNVQGTSGSSLLDANVLINECNFDNLSSDASGSQGGAIYAKYLKGNLVINNSNFTNSIVKSGGGALTVAYCAYEDALDLVISNCNFENNTANNGGAAYLMANTINIVNTSFINNNATYSPGALELYNCTGTMDNCSFINNSAKNTAAAFKLEFVKDQPITSLIVTNSIFKDNVGRDEVAPAIFVDRASLNISNSILLNPLNINTSTVTGYGAVPGQGVTVANSNWWGTNENPSNLTAGSGDNVNTTIDNWVIMNVSPTEAIGYTGEALEITVDFKYTMSADGTIETLAGTLPEEFTVNANAANGTLDKTTADTSNLQAKFAFTPEFAGENIVNIYTTESNTVPVTIMVTEKYAGPIYVTKDGDDENEGSENLPVATIAKAIELAQGKSGLIFIGEGTYVESNLTISKDLNITALGEVIWDANGQRAFSMSTGSVSISNITFINGNYTRNGHLIYCAGDSLKFDECKFLSNGGNVTGTNGVIYVELASANFNNCYFENNTAGTGTSYGLISAKDSVIIVDGCTFVNNFNKNGCIYVSGSNIGSMAVINNTKFIGNNATSASGGSGGAIYASGSMAYQYSNGTVRPGAQSAVYVIDCDFINNTAFGGKYYNAEGGAIFVNANATLYASNSRFIDNTALDYEETNKSGRGGAIAATTGNVQISNCIFQGNTANNGSVIAMKFANKDLTTVNVLSISNSVIMGPGEKLIVSDFTNGSLVANNNWWAANENPSDRVSEGITVDSWVILTADPSEITGTLDEIIPIVANFRHTNSTDGTIGDLEGEFPELEVFGMTLDEGEITESNLTVDNVATLYYTPEETGETTVYAISGNAMVPIKVTITDTPQPVADVIYVSPSGADTNAGTYEAPVATIAHAVELAGAEGASGLVVIEEGIYNENGIVINSAIPITITGNGTVIIRGNNHVVNGNGAGRFGDVSESTSIIIVNTTEAVVIANIAFEDNIAANGGAILIAGTSSSNLFDADVLVENCSFNNLQGRNGGAIYAYYAIGNLTVANCEFTNINATWAALCAYQAAYGEGLTVEIKDSSFTNNSANNAPALYLQATNVVIKDSNFTDNNATYHPGAIYLQNTTATIDNCIVANNSAKYDKAAIAIHGGNIQYNPVIVKPSEVTITNSIIENNIGRDKAAPAIYLENSILNMSYSSVVNEININNTVTATYGDEKPGLVLINNNWWGTNDPSTTIFGTNITMDNWVIMNVEANATEILAGEEVKLTVDFNHVNTTAGEIEELTGGVIPRESYSVALSVDNGTVAPETLTIANGATGEAIFTAANANALITVTSENAVETILINVGEQPVPFTGVVYVSKDGDDANEGSEDEPVASLARAIEIATAEEGSGQIIIKEGTYIVDGYNITKDLTITGEGDVILDAQNQGNRLFNMAYGTTVSNFELHNLVLANVTAMYGAVVYSYAANAVLDNITVAGINHEMARLISNYGNLTIKDSVFANNTVSGIITHSGNNNLNIVNTIFEGNNVTYDSSIMGVVYVSSGRGNITIEDSKFYDNLVRQSTVRGYTDTNITVKGTEFINNTADNSPYYCSGGAIFAQANLDVTESIFINNNARREGGAIYIGINGVANITKSEFINNTIYDNEYYGDAIYTKGTTAINYCIFLTNGTRYAVYNGGSKEVNAQYNWWGTNDDPQGFAYSADASNWIIMTVTAPSTQDIQAGDEYELTVDFNHYTDGSDILELPDSLAQELTVEFTSTTGTFDNPVVTTENQVATAKYTVVAGENSITVKSTDAVWNTSFTAGEKAKAKMNVSMENNTIIVTLTDEEGAPIAGKTISVLINEDTLSNETNSSGIAAISLGTLDAGTYPATISLADSEYQAPELTVFVLVEETLVDNPIGAVIELALAENGTSIEVTLKDINGQPIGDTIVRYYIGSTDGALLPIDANGKGSFDIDNTVNQTIKVSYTKEGTEWSSYYDFIVNNEVTPVPVANNAKFDVIVREDSIDVFLYNDNLDDFEGAKIMVTIGEEDPVEYIAGENGNITIPINGDTTVELSYTDENGATVYHTVKVSTSGVDPSAEIEIIVESHNDTSIEVSVTVDGDDVSDGEITYYIGDDDDGTVVPIEDGIAIIPFDNTVNQTIEITYSDGDATESVYYTIVAFTHEVPVEPPVANGSFDVETTDDAIVATLVDSDGKPIADATVSAIVNGEEQNFTTDADGKLSVPIDGNATVELSYTDPENGAVLKYVTDVVTKEVPIEVPVVANGTMSVETTDDAVEATLVDSDGNPIENATVTAVIDGEEQNFTTDADGKVSIPVGENATVELSYTDPENGAVVKYSTKVVTKEVEVPVDVPVVANGTLTVETTDDAIVATLVDSDGKPIANATIIAVVDGEEMEIPTDEDGKCSVLITGNNTVEFSYTDPANNATVSYSTKVVTEVEEVIVPVPVVANATISLSTEDGSSIVATLKDLDGNAIANATLDANVNGEETKLTTDANGIATIPVSANTTAVVSYTDSNKATVTSSMSLTVIETIVEINKTIEVPPVRNASQIVCEDMNTIAVAKDDGRIGEYFYVKLVDANGNALVNKSVQIGFNGRVYNRTTNETGDVKLQINLAYKGTYTFAIAYLGDDNYNGSFVVSKITVKQQSPKITTTSKTYKASAKTKALTATFKTANGNLIADKTIKFTVNGKTYSGKTNAKGVATVKVSLNTKGTYSFTAKYAGDDTFKATSASGKLTIK

SEQ ID NO: 4519 - protein, 2676 aa, Methanobrevibacter ruminantium
MNFKKLLMISLILLFVLSVGFSTASAIDSDNLLDENNNINVNYIDSDNSDSILISDNSNDAKSNNLILNNSINKKELNDNSNSNSNLECDSSINENLDLENNYKINEKSAGLKDNTNTIYVSVDGNDENDGLTLETAVANISKAVSLAGEGYTIHISSGTYEQNKSTQLSHAFNFIGEDGTIIKRIGTANAFTYTSDTKKTISFKNIIFSSTTPNPSNPILSMAGGADLQIDNCTFTDAIAGRNGLIRYLGSSTGKITNTNFIGLTGSTSASSSYITALAQSKVKVENCTFANINEPGFLNSLVYVNNNETNLTLVNCVFNNITGNLNAVVNNRGYMQIKNCSFTDISLSGNSPRGIVWSSETISKNSITYINSSVFINNSVNTEVVVNSSVIQAKSPTIVEYSAFLDNDVVFIINNDNDTDVTANYNWWGTNEGPKNCSVNRESSASSNPSSSSEEKISLVSDGVTVDNWAIMTVDLETSGLIAGEDYPIIININKYMNERGEIDSSVEYGISGAEILLSSQIGTFNSDFIIYNEDNGNIIQNQAKVYTNNGAVTVFYKATEEGSDTLNISSGYEEIVYNLEFGQSIEYNDIYVSKDGNDNNDGLSNETSVLTIARALEIGENLNSNIRIHIGSGSYHESGFELNGTYTVQDGVLQVKRTTYSFIGYGNVVIDGDGQNKSLFTVRNNSVSYKNIRFTNVDGATYGGAINGDNLYRRTAYIDLTINNCTFDDLHVKSSGGAIYLNYVSGRISINNTKFYNLTTNSSWGGAISAEEAFDLARVKVTNSDFRDNYANNAPAMYLRVSNVTVLNSNFINNSAKYYPGAIHFYNASAIIENCVIANNSAKKDSAAIKISEGTNDVGNKIIIKSCIIENNSARDEISPAIYVEKGALDISYSSVVNDLSIATRTYYSNLYGLQQGVAIANNNWWGLSNPFGENEIGGNYSSLLGGVFNGSNITVDSWVILNAVLNDTGVLKVGNIVNISIDFNHVNTTRGEIELLSGGKIPKEYTLRLNATGGIVYPNYMKTVKGEANSKFTVRDLDNLGDDFASCGFDIISDNEITHIVFEINNYKGVIFVSMSGNDDCNGSMDAPVRTINKSIELALDEEFGSHEIFVLPGTYEAYGIELDSTYLSITGSGRDSTILDGVGYTGGIFNIFESELTVKNLTVINGVNTVSSGGAFTNMGNLTLEGVNVSNCQVRNANGAAIYSVGNLNLINSSFVKNTALSGNYANGGVIYADGYSTSLPYPPSLNITDCEFISNAAQGSTFGGGVIYAQYLDGYKSIKNSKFINNTAEFGGAIFLQDSEGDFIIDNTSFIGNKATGQAGSTNPYYGGGALNLIGRTDGREGNFIITNSLFINNSAKNSRGGGAILDRNVDLNITNSVFLNNTDTNKSVQVFKDTTVYFPSGGRISLEDNWWGANELSSLSTVAANVTINRWVVMNLSVELIDDLDSWGLNLGNSLDDGLNTDLGNTLTENNLNNYLVKVLLNEYNDGTLIDNPNYYPLLRLYTLESSDGEINPSFGILQNNCATALLSSSNRENVIRATIDGETLEFNTIDLYTKTVLDIEFDSPIKAGENLTVYLNLTDIDDNPINGTVILNISSDLYETVETVNVNEGKGFKEFSGLKVGVYTVLANYYGQSIYLDSNDSKVLEISPISSYLDLESKEISIFLGFGNLTGTLSDDNGPISNRNVSLIIDDDTILNGLTDESGQFLIDLSSLKVGNYSDLELVFEGDGDRLSSSDLVNITVKKIVLNLNLIVEDDSIVVNLSIDDSVLDYLGVDDSLDDISLEGLTVLAFINETDRVSDLINKSAITDDNGIATIDISDLNPGNFTALVSLKENDNFEIDSNKDINFSIDRYKTNLTAIIDENNSYILINLTSDIGLDSKTVSVTIGNESFDVITNSSGLYGLDISDLAPGYYDCLFVFDGDDYYDSSSDSLNFTIENRMSELTAIIDDNYESILISLTCDGIGLAGKTISVTIGNESFELITNDSGLYSLDIGDLVPGYYDCLFVFAGDDYYDSSSDSLNFTIDKYSSDLTALISEDSILISLSSNNLGLDNKTISVTMGIESFDVITNSSGFYSLDISGLGPGDYIDCLFVFAGDDYYDSSSDSLNFTIDKYDTKLDAKNTIGSFALVNLDAKLTSGENALKDKSISLHIANKTFTKKTDDQGKVVFDLSSFDPGNYIALLSFAGDEYYKNSTVSVEVIINKLNADLSSEFKDKKLYISLSHKGAPVKYMNLAIEIIDSSNKSTVSNALTDNEGHFIMDLSDLSPDSYVSIIRAIGDKIYNPASDEIEFVIGGDTPSKSTRTAADLQKLIDDASSGDIIDLGEYDYLNVSNINITKDIVLIGNNTSISSSGDGNPIFNIATGLSSVKISGIDFNASNGDVIVKAIAQNGTDSLSIIVPAIEITNNTVMGDNIVPESITILELDSDRGVLAPNNEIYIANNTLEIGMKPFEFKVKSFENDSSANVPIGGGLNGKKTSIIHYENMDTVAVNMDIEGRVGKYFEVNLTDSDGNPLADKKVQIGFNGVVYNRTTNATGGVKLQINLGYKGTYTFAISYLGDDEYNGSFVVAKIKVSTQKTSLTSTSKTYKASAKTKTLTATLKDSKGNLIAGKTVKFTLNGKSYSAKTNAKGLASVNVSISSKKTYSFTAKYAGDDMYASSSASAKLVIK

SEQ ID NO: 4520 - protein, 3391 aa, Methanobrevibacter ruminantium
MKIKNIKYLLISLVLLMFLIGAASAADDAVTLEGDAAAVDSISEDASAPITTTVSEDASIGTTFSDSAIESDSIQSNDDLELKNVTDVKQKDSSDALKDGESTTIFVSTGGNDNNDGLSLETAVATVEKAINITKTGGTDFTLLISNGDYNIEQITIPVGKYISIIGESKEGTILHASGDYGFDISYGCNFENLTISDLNSTSSTSAAIRIIMDNYDININNCIFKNIGSAYGAVHVYSNGKTSISNVLIEDCFATKSDDSSIIHVSGKGPVSLDNVEIRGSYMLPPAFPWSTPYLGAIIFLSSADPDVTLMNSRIHDNNGSIYSIITSKGKIKIINTTISDNCLNASYASIFSSGVNSNTATDITVTQSVIADNILANNAVGLLDARFGVFKVDHNIIINNKNANGNDLSVGDLSGASSFSIDDNYWGTNVRPNDKTSEWVILTGDVAECAFVGVCENIKIFLNSYVTESGEIGVIDGMPTVELAVGYALNQENPSAVTIKDGVGTISYLASIAGEETLILSTGDVFEFNVSSEIGSLIFVDGSVETSGDGTQENPVKTIAEALNIAADGKIILIKNGTYKESNLLVDKDITIKPYDGADVIIDGDNQDRIFTVTSTATISDLSLTGGNATGDGGAIYLNGGNLTLSFLNISNCIASDNGGAIATAAGSDLYLSNSIFTDNFASKGQSIFIGGEAEILMNDFVAHMDVLSPDASFNAISINTDSPVSIVSNNFNDNGAIKGQAVYIKDAPVSLSGNIMDDEIIYLESGSVNSNLIFMDGKTLTVEPGADVNLTATLTDDKGNLIRGGELTFTANGVAVGDPIDISGDNELRIPYTLPSDSEGDIIISGSYSFDNGGTIVNGTIEPDIPYWFIEGGRGYKTLNETVENAVAGDVIYGSPGTYIANGIFITKDLTIKANETGDIILDGNGSRVFTIKNQATLSLVNLDLSNGGSEGGGFVYIYAEGGNLNVINSTLRDLNIVGYPESFEGGAIKTYASSTINIESSHFENINSSAFAPILSGLGGVKLSLTIKDSSFTDIKGTAMYGLMNAPGKVNIERSNFTGIIGNTTKQTGLIFADSTSNYLINECLFSNISTDSVIRFKNNGNITVTKSVFQNIQDTGGALYIYNPGSAKVNYNLFIDNTNLNADSNRDIYSYGSNVDLSYNFWGNNSKPTESQIYDVSKAPYWTIEELSMNSDYIFTDETADIAVQFVGTDGEENLTLDDVMPEYSFNLEATNGTLDANTVTLVDNEAIVTFTPPSLTGTVTVTATPGPAELTFDVIETSKLLVVSTAGSDENAGSFESPYRTIAYALTKANETRNIIYLIYTGEDYKEHDLTLAGNLTIMGENDEVTINATIGRIFLVTGNVSIKSLTLSNGFDQDYGGAIYVDGGNLTLDYVNFNSNRAYGLGGAIATSSESNLYISNSIFTDNFASFFGGAIGTASGSNLSIDNCIFSDNKASYGGAIYLAGESLILTSTFDGNHILLDDGRGGAIYVNTTDSVVISSNEFENNFAYTGEVIYIENGIVTLSENTIDGDTIYLAGGSVNSNLVFMDNSTLKVELGETVNLTASLSDDCGNPIRGGSIIFTVNGEAIGDPIDISGDNELKTTYTVPIDASEDMIISGSYSLDNGGIVKAGSLHPSVPHWFIEGGIGYEYLSEAIDGAEAGDVIYYDLPEDYTDVISSKTINKALTIKNNGTNIVTLDGDGNNVFTVSADLDLINLNFVNGGNTKGGFISQSSNNLNIINSSFKNSASSSSAAAILSSNGNLNIESCLFENISSSASSNGGIICYSGSSGNLNINNSAFNNLSGKYDGFIIYSSTFTNIANSNFTNLLGPTSSGYWGGIYNSKSLNLTNCQFINVTGPKGAAIYSTGSLNVTRSVFENIITTNSVIYSYSSDSFINYNIFADNNKAIDSTRANADYNFWGSNDRPSSDIVSSSIYHDWVIVELSSSNDTIFLGSTEDISIGFLATDGEENSTLEDAMPSYGFELTVTDGTIEPSLVILEDNEAKAVYTPSAVGTVTITASPGSAELELNVMDKSTMLIVSAEGSDEGDGSFESPYATIAHALSQVTETRNIIYILSSDKAYKESGLVLSGNVIIMGEDNSVTINGGNESRIFLVTGNASISDLILSEGMADDYGGAIYVDGGSLALNNVIISQSKASLGGAIYINTSSDVSISSNVFEDNEAEKGEAIYIENGALTLTENAMGNETVYLAGGSVNSNLVFLANSTLNAEFGKNMTITATLTDDCGNVIRGGAVVLTVDGETIGTVDLSGSDPLEIDFYVPQDASEDMLVSGSYSFDNGGTVSTGAIHPCIFYWIIEEGRYGFETLDEAIDASRDNDVIYYDLPDDYEEILNDKVISHNLVIKNNGTGIVTLDADRRRMFDLSGDLELNNLVFINGATNKDGGFIYQNSGSLNIISSIFKDSLSSYSGVVVFSNGGDISIDGSRFENLTSRKGPIDFESNSGRVDIRNSVFDHITGNYDGFVIYCKSDLNIEDCNFTNLNSTRATSTNYYGAICHESGSGDLNISGSYFSNIYGPTGTAVYYKGSGTYNISKNIFENISSGANTCIIYGGSSGNINYNVFLDINCGITTSGGNIDYNYWGTNDYAGLGINGTVPNNWIIMNVVANDSDVIAENEVPITVDFNHYIENGEIKELEDSLAKEFTVQFTSSTSELDVDEVNTTDQVAIAFCTAVVGENNITVKSDNAVVEITFNASEPLESHMSVDMDDDNNLIVTITDGEGNGIEGKTVCLFIGDEVLNATTDSEGNAVIALDEVDDGAYTAKISFKDPEYKDINENTFVVIRTNELIEPVAANISIELSIEDGKVIANVTDLDGVPLAEKLLTVSIDGVPVLGAKTDENGIYSIDVSPNATVTVSCSDVNGAVASASITYVENNNTEEVVVIEPVSANITIVLLVAEGNVVAYVTDLDDVPLVEKLLSVSINDIPILGAKTDEKGIWSLPIEANSTIVVSCSDVNGAVASASITYVENNNTEVVVEPVSANIVIGLSIVDGKVIANVTDLDGNTLADKLLSVSIDGVPVLGAKTDENGIWSIDAEANSTVAVSCSDANGAVASASIAYIENNKTEEIIVPVPVPVPVVANATISLSTEDGKSIIANLKDLDGKAIANATLNAKVNGIEQNLTTDANGIATIPVSANTTVEVSYTDSNMATVTSSMSLTVIETIVEINKTIVVPPIRNASQIVCSDMNTISVAQEDGRVGEYFNVKLVDANGKPLANKFIQIGFNGRVYDRTTDENGSTKLQINLAYKGTYTFAIAYLGDDNYNGSFVVSKIKVTQQTPSLKTSSKTYKTSAKTKALTATFKTVGGKPISGKTVKFTVNGKTYSGKTNAKGVATVNVSLNKKGTYSFTVKYAGDDIFKAVSASGKLTLK

SEQ ID NO: 4521 - protein, 440 aa, Methanobrevibacter ruminantium
MESQSILIKNASILNPIGDGKTEEFRKDLLIVDDKISQIDEDIDESNADKIIDASDKILMPGFVNTHTHISMSLLRGIADDLELDTWLNDHIWPMEAHLSEEYCYIGALLGACEMIKSGTTTFSDMYFYMDGVARAVDEIGMRGVLSYGMIDFGIEEKRENEFKENISLIKKHNNTADGRITARFGPHSIYTASVDLLERVRKEADKYNVGIHIHMNETLKEINDSKENHDGKRPFELLDSIGFLADDVVAAHCVWLDDAEIKLIKDNGVYASHNPCSNMKLASGAAPVAELLSQGICVGLGTDGASSNNNLDMFDEMKFAALLGKASTLNPKVLTAEEVVNMATINGAKALNIDAGTIEVGKKADIILVDANSPNMTPMSNTLSSNLVYSANGSNVDTTICNGRILMENRKMVTVDEELILSEAKRAIKEMKELREADE

SEQ ID NO: 4522 - protein, 551 aa, Methanobrevibacter ruminantium
MESKIIKSDVLIIGSGGAGCRAAIEVSNEGKEALIVSKGLSFRSGCTGMAEGGYNAALGLVDPEDTIEAHIKDTLKGGAYLNDPKLVDILVNESPKRLSDLEEYGALFDRQESGELNQRPFGGQTYRRTCFQGDRTGHEIMTALKEEILKRNIKTMDEVMITQLILDPAESFMPKVIGAVGLDLKTSETIFFQAKAVILASGGAGQLYPVSSNTTQKNGDGLAIAWNAGADLIDMEEVQFHPTGMVYPDSRKGVLVTEAVRAEGGKLINSEGERFMGRYDDRMELATRDVVARSIYNEIMEGRGTEHGGVYLDVTHLDGELIEEKLETMLEQFLDVGVDIRKEPMEVAPTAHHHMGGLRINPDASTNVENLFGAGEVCGGVHGANRLGGNALADTQVFGKIAGSSAASATDIAEFRYNNEAVEDEENRIKSLIKEGSINPLDMKKEIQNLMWEKVSIVRNEQNLKSALERLLEMKNELNDLNVDDRTQFNESLITALEVTNMVEICILIVKSAILRRESRGAHFREDFPETNDTWKKSIVMSKSKIRFAKR

SEQ ID NO: 4523 - protein, 213 aa, Methanobrevibacter ruminantium
MNQEERLKGSPIERVETALEAIKAGNGVIVTDNEDRENEGDMIFSSEHLTEEQMALLIREGSGIVCLCLTQDKADALELPLMVENNTSTYGTGFTITIEAAEGVTTGVSAADRVTTVKAASALDAKPSDLHHPGHVFPLRARPGGVLERDGHTEATIDLMRLAGLNPCGVLCEITLPNGTMARMPDVIEFSAEHDMPVVTIEDIIAYRKENDI

SEQ ID NO: 4524 - protein, 687 aa, Methanobrevibacter ruminantium
MKIKKSFVILCLIICLFTIASVAASDINDTTISDGDNLIKEADGDLLSLEDDNNLKELNEESDKNLLVQESDNDNNNPESDKDLLVQESDNDNNNLESDEGLLVQESDDDLNKKADGSLFSSKYGDNAAPIKINTSYLIKEINSYLEKDNYTALKEEINNYLKKSNNNAIKEEISKYILKNSYKALQKEINNYLEENNFSTLIKEINNYLEENNYPSIEDGIKSYLQSNNYSSLQDVLSDVISKIINSSKKESEPIDDGTFTALQYKINSAPNGATISLDKDYSYDEGFSTRGIEIKKSITINGNGHTINGLSASRIFLIHFGLTGNNKVTLNNIVFANGKTDLYGGAIFNYGNLTVNKCTFKNNYAKTCGGAINSVGEMILKNSNFKNNTAGGDAGAVFSFKIGNSTNIFKDIYKDKVIDGNMDFIIDYILNININYGWDSINNCSFSSNVAKGRGGGAIYAFTHIKINGCTFNSNKAGEHGGAVFANKNLNISKSKFTNNKAPKYGGAVYFRCHELSGSYVNKTWVSKMKYYTATIKDSIFTKNTASKGGAIYEFNHTVSDKKRLKVSKCNFTDNKASLGRDVFSGSCSNCIYFYVKISTKSVTVKKTAKSFTLTATITNGTKKLKNKKVTFKFNGKTYTTKTNSNGVAKVKIGKAVIKKLKKGKTYSVQITYLKKSAKTTVKVK

SEQ ID NO: 4525 - protein, 127 aa, Methanobrevibacter ruminantium
MSLKSKAKKIGKAVIFVKLFEDLMANKDKREEDIAKLRIHIEEWKAEAPDDLNAILAAILMKAPDSSPDEIKAEFEQAKAEYHAEDEDILPWFESQIENITKEGEEAEEEAEEEAVEVEVTEEEPEE

SEQ ID NO: 4526 - protein, 78 aa, Methanobrevibacter ruminantium
MDNKFIILLCLVTVSVFISASFAFGNVLSNADNGSVQTYNSHKDISSPNMDYKHPGELIYGGCGGNQNIQTDGHICEK

SEQ ID NO: 4527 - protein, 54 aa, Methanobrevibacter ruminantium
MNLISVIIYLIILIFGVWVLYRGYKKGMEFGKFQYAFIVCLSALFICLLYSLFN

SEQ ID NO: 4528 - protein, 248 aa, Methanobrevibacter ruminantium
MGPEDTIYESQSLEDTIYKRKSVRSYEDAPLDNETINEIRDFIENANPLNPNIEWSYEILPKEKISTMMRWKAPHYIAIFSEDKENYYQNIGFIFQQVDLFLQSKGIGSCWIGMGSPKDYKNPHGHKFIILISFGMSERIYREMNQFKRKDIDAISDNKDERLIPAQFAPSSMNTQPWYFTHNDDGSFDLYRVKRGVLRNRFMGRWNKIDTGIALAHLYVANRDNFSFYMKDNPKELKGHIYDGSFEI

SEQ ID NO: 4529 - protein, 223 aa, Methanobrevibacter ruminantium
MDNKLFLQAFSKFFIGLIIICALLFIPAGTLNYPNGWLFIALLFIPMFFAGIIMFIKSPELLRRRLNADEEEEEQKIVILISAIIFLLAFILAGLNFRFGWFKLNSLIIIIASVIFLLAYIMYAEVLRENEYLSRTVEVNEGQNVVDTGLYGIVRHPMYTSTIFLFLSMPLVLDSIFSFIVMLIYPIIIIFRIKNEEKLLEEELDGYVEYEKRVKYRLIPYLW

SEQ ID NO: 4530 - protein, 329 aa, Methanobrevibacter ruminantium
MKWKIGDVEIDNQVVLAPMAGVCDSAFRTIVKSMGCGLIETEMVSDKAVMYGNWKTKEMLYMTDYERPISQQIVGSDIESLTFASKYIQDNTNVDIIDINMGCPVTKVTNRGKAGSALLKSPDKIKSIVESIVDSVDIPVTAKIRSGWDKSCINAVEIAKIIEDAGASAITVHPRTKDQAYSGKADWSIIKKVKQSVNIPVIGNGDVRTCFDAKRMLDETDCDAVMIGRAALGNPWLIRDCVNYLDNGDLPMEVTIEERMDMLKRHVNLLLENKGEEFAIPKMRTHAAYYVKKLPRTIELKQMIFKMNTKEDLFNLLDDYVDSLDELKR

SEQ ID NO: 4531 - protein, 312 aa, Methanobrevibacter ruminantium
MEILKPEELKEKFNDPWIAPYEKVITMADGDKVELIEYHPCPSGSNWLLYQYQHSSELIIDAKRDGNKHTYLCKVGKKPLDLKASINAAGIEEVAIDEEKNEVKVTHGGLAGAGVGAGMCRGMGEGVKYIELLEVGGGSKEGKATVVTPKYEKLVIGIDDTDVKDAGATWTMAHNIGLQLKEEGYEYLDHIIVQLFPHNPHKTQNCVSIALTFAVLKEEKENLINRLIEILKHDTLSDKTAIAILEGIGIPPKLREYAMATKTGMMDVETAEKLAEELNIPLLAVTGEQGKVGALAALGLYDDVDEAVKVYY

SEQ ID NO: 4532 - protein, 143 aa, Methanobrevibacter ruminantium
MVKYNIGAVVAEFNYDITHMMLELAKAEAQVRDCEITKIVMVPGVFDMPLAIKKLTEADQEGRIDLDCIITLGTVIEGATDHDQIVAQHASRKIADLSLEWGKPISLGISGPGMTRLDAHRRVSYGKNAVEAAVKMCDRLQDI

SEQ ID NO: 4533 - protein, 399 aa, Methanobrevibacter ruminantium
MSINKSKSNLSLKNKLKSLFSGNSNKSRYQSKLIRGDFDSLHDLNIAYVLKGFPTLSQTFVSNELRYLVEDGFNVVVFCYMDPADLVELDFDLEVIRFDESDDPTGKLEQLLLDYEIDIVHTHFVYPPCTEYTFPVCDRLGIPFTVFAHAVDIFKYDVDKINRVDEISKSPFCKGILTLSNYHKNHLIERGVDKDKIHITRQATDYEIEELELKERNVRNIVSISRFVEKKGIDVLIDVADILRDEDYEFSIYGFGGLEKAYQRQIDELNLDNISIKGRLDGPQEVKEVFDKADILASPCRIAENGDRDGIPTVIFEAMAYGVCVLTTEVSAIPEVIDDGRNGFIVPPDSPEIFADKIREIANLSPEERFEIAKQAQVDVQDTSSVDETMKTLFLTWSL

SEQ ID NO: 4534 - protein, 395 aa, Methanobrevibacter ruminantium
MNYALMVYNYTTNLGNEIQTIAARRFLPKIDYYIDHEKINLFNEEDNVKMIMNGWYLDCEKAWPPSESIDPLLISMHFNTTSSNKERLKALLSDESIEYFMNHAPIGCRDYSTVEFLNEQGIDAYFSGCLTLTLDNGKTKEERELDKGQDYIVVNSEIADEIISFLKDKTDKKIYRIQQDMIPSFDTSFPESMPLWLYNLSSFYDYEEKLFMAENLLRIYENASCVITDRLHCALPSLALETPVMLLNNRGFRERFDGLSNLLLESDIDSYESNYNIFDVDNPPENPKDYLKIRKDLIEKSKKFTGHINNSYYSDISQREIFERNNLLLSRNAIGTRDYIRNVLKRMRQHEKDISKKEEIIKNQEAIIDKQKKMIDEMKGSNSWKITSPLRKIRK

SEQ ID NO: 4535 - protein, 331 aa, Methanobrevibacter ruminantium
MTKPKVSMILSAYNEERFIDKAICSLTNQSLKDIEIIIINDGSTDKTPEIIEKYAEEDPRITVINQSNIGLGASRNKGMAIAQGEYVGFLDGDDWYRLDALEIAYNEAKSKDTDITMYQMINYDDATGRIYENDWFNLNNLDESFDGIVFTPEKTKDFLFDLSVSSCQKIYRNDFLKSINASFPEGIYFEDMPFFFYVYLKAERISIIRHHFYYRRKHNASITHVVDANYLDTVEAGCELMRRFIDNGFYDDYKFDLIAYKINGPRMALMDITEDAKEPLFNLIKEDYEKIKNTEYYQDYLDNLGPKKKKFFLDVIKYDNYEEFKKNNPEY

SEQ ID NO: 4536 - protein, 516 aa, Methanobrevibacter ruminantium
MKDNNKKEQAEDLLIANKFPPMNDVSGIILAKRALLSGKRYDVCHTVIKEPLDNDFNEIAEEIIDNRIIIKNFEYEMSKKELNETFRNYITEGLKKLEETNPNYKTITTRSWGFQPNFLALEYKLKHPDTFWTAEFSDPLTVNIENKPRDRRFKLDNKEYIDRINNEIDKVNERTGQNLEHIKESDFIYLICEYIAYVFADKIRFTNPNQREIMLNQCPYDVKDMVMAKSEINPHPTLDEKYYHIKEVDYKIDDDCINIGYFGTYFGKRNFETIFYACESLNEDIRSKVKFHLFLNHGDNLKRLTGNLKISKNIIVNDKVSLLEFLNLSTKLDILLVNDTETKGNFEINPYRPSKIADYIGSGRDIWGICEKDSIMDGLDEIKYKSYINDFYSAKLTFNQIVKDSSKIDDGLKENPFEDNDYLAKRASAMSEDEIVELINENNYLKGRTNHLNHLFNGTRGRGLFADEAKKLNLKNEKLEMENKKLKKENKKYKKDLKYLKSSKGSLKYQIKKIVK

SEQ ID NO: 4537 - protein, 328 aa, Methanobrevibacter ruminantium
MYEIAVIPGDGIGKEVMEATINVLESLDVDFNFTYGEAGDECLEKNGVALPNETIQLAKNADACLFGAAGETAADVIVRLRQELNLFANLRPVKSYPNTNALFENLDFMIVRENTEGMYIAKEEEYTAEGAIARRIITRKASERIIEYAFQYAKDNNKSKVTGVHKANVLKISDGLFRDIFNEIADKYKDEIDSEDFYVDATAMYLITRPESFEVIVTTNLFGDILSDEGAGLVGGLGMIPSGNIGENGALFEPVHGSAPDIAGQGIANPLAMMLSAVMMLNYLGESEAEEKLNNAILELLNEGKCLTPDLGGSSTTMEVSEAIKSKL

SEQ ID NO: 4538 - protein, 160 aa, Methanobrevibacter ruminantium
MKGKVWKFGNDIDTDIILPGRYLIYTDEEKLSEHCMEGLDPDFKNKVSAGDFILGGTNFGCGSSREHAPIAIKGCGISAVIAESFARIFYRNATNVGVPLLEAPGISSAIENGEEIEVDMEKGIIISESGKEYEFKKLPPFMLEILEEGGLINYLKKQNE

SEQ ID NO: 4539 - protein, 425 aa, Methanobrevibacter ruminantium
MSTIAEKILSRASGQGQVEAGDIVMADIDIAMMHDLTGPLAVESFNKIGTERVWDNEKIVIPFDHQVPADSLDSANNHILMRKFVKEQDIKNFYDVYEGVCHQVLPEKGHVIPGTVIVGADSHTTTYGALGAFSTGIGSTDMAMVLSTGQLWFKVPETIQFNIEGILKENTSAKDVILNIIGQVGADGATYKSCEFKGETISTMNISDRMVLSNMAIEMGGKTGIIEPDNVTYQYLKDRVKDENKNRLKAFIEKSNLKTDEDSSSLETMDIDVSDLEPQIACPHNVDNVKPASELSDIEIDQVFVGSCTNGRIEDLRDAAKILKGKHIASGLRMLVIPASRETYMKALDEGLIKIFVEAGALVSAPCCGPCLGGHTGLIGPGEVSLSTSNRNFKGRQGSPEGEVYLSSAKVAAQSAIEGRISVPK

SEQ ID NO: 4540 - protein, 419 aa, Methanobrevibacter ruminantium
MKICIVGQGYIGLPTAALFAKSGCEVVGVDINKEIIEKLNQGIAHIEEPGISDSIKNAVDQGHYHASLTPEEADTFIITVPTPYLPEDLSCDLSYVISACNSILPVLKKGNVVIIESTIAPMSTDEVIKPIFENEGYVIGEDLYLAHCPERVLPGQIMEELVNNNRIVGGITEECTKKAADVYRTFVKGEIIETEAKTAELSKCMENTFRDVNIALANELAKICAEIGVNALDVIEMANKHPRVNIHSPGPGVGGHCLAIDPYFIYAKAPETAKIIKLARDTNNSMPGFVIENTGKILSKLDKDAEKISVFGVAYKGNTDDARESPAFEIIAGLKAAGYEVVIHDPHFDNPDYLDFDDAIKDSSMILILSDHNQFKDMDYDSIKRNMKTKLIFDTKNIIKSVPEDVTLVNYGNLYKFIH

SEQ ID NO: 4541 - protein, 286 aa, Methanobrevibacter ruminantium
MRILITGAYGMLGSDLREVLKNHDLIATGSKDLDITDEERCIDFIAKERPEIVINAAAYTAVDDCETHYDDAYAVNALGPRNLAIACNKIDIPLVHISTDYVFDGTKRTPLIENDKLGPQSAYGKTKLAGEEFIQENTQKYFILRTAWLYGIHGGNFVKTMLDLAKEHDEITVVNDQIGSPTFSLDLAMAICEVLDSDKYGIYHLTNDGECSWYDFAKEIFRISDIDVKVIPVSTEEFPRPAPRPHYSVLSNVKWKSAGFVPMRDYKEALNQYISLYNFFVKIGKI

SEQ ID NO: 4542 - protein, 290 aa, Methanobrevibacter ruminantium
MKGIVLAGGSGTRLYPITKAVSKQLLPLYDKPMIYYPISVLMLANIKDILIISTPRDLPMYKDLLGDGSNLGMSFSYAEQENPNGLAEAFIIGEDFIGDDNVALILGDNIFHGHRFTEILERARDLDDGAVIFGYFTNKPEAFGVVEFDNEWNVLSIEEKPEHPKSNYVVPGLYFYDNDVIEIAKSVKPSDRGELEITSVNEEYLNRGKLKVELLGRGMAWLDTGTHDGLLEAANFIETVQKRQSLYIACLEEIAYSKGYISKEELLKLAEPLKKTAYGDYLTKLAERKI

SEQ ID NO: 4543 - protein, 192 aa, Methanobrevibacter ruminantium
MGKFNIIKSEIEGVFTVEPTVFEDERGYFMETYNENDFKAEGIDLTFVQDNQSKSSKGVLRGLHFQYTQPQGKLVRVIKGEVFDVGVDLRKDSPTYGKWMGEILSEENKKQLFIPKGFAHGFLVLSDEAEFVYKCTDFYKGDDEGGIQWNDPDIGIEWPLGDLKEEDLILSEKDKLLKPMKDTPTDFYMEDE

SEQ ID NO: 4544 - protein, 335 aa, Methanobrevibacter ruminantium
MTKILVTGGAGFIGSNFIKYMLDKYPDYEIVNLDALTYCGNLENLEDIEDNPNYSFVKGNIMDEGLVDVVVSSVDYIVNFAAESHVDRSIEDPQIFIKSNIIGTQVLLDAAYKYQIKKFLQVSTDEVYGSLGPEGYFTETTPLQANSPYSASKAGADLMVRAYGETFDLPINITRCSNNYGPYQFPEKLIPLMISNALEDKELPIYGDGKNIRDWLHVYDHCSAIDLVLHKGKIGEVYNIGGHNEKQNIEIVKLILKELDKPESLIKFVKDRLGHDRRYAIDSTKITEELGWKPKYTFETGIVETIHWYLDNQDWMEKVKSGEYQEYYEKMYSKK

SEQ ID NO: 4545 - protein, 327 aa, Methanobrevibacter ruminantium
MKVSVVTPNYNGLKFLNAYFETLAFQSRFIEEIIIIDNASTDASCDLIEEYINSPSYKIDIKLIKNDKNLGFAPAVNQGIRLAKSELIYSVNNDVELEFNTIETLIQSMERSIEEGKNPFSIQSKMIQYHNRSLIDDAGDEYNLLAYTKKLGDGSPIDNYNEKREIFSSCAGAALYRKSILEKIGLFDDNFFAYVEDIDLSFRAQINGYRNYLEPKSIIYHYGSATSGSRYNEFKIRLAARNNVWMIYKNFPIPLKIVNFIFIFLGFFIKYLFFLRKGFGSIYLGGVKEGLRERKGIEKTHFEWKNWKNYFKIEWKMIKNTFGYFKK

SEQ ID NO: 4546 - protein, 298 aa, Methanobrevibacter ruminantium
MRNIDLSIIVVNYNTFKLTRDTIDSCLAEPTHYTYEIFLVDNKSTDDSLEKLQEYFKSETERGILKIIPNQSNDGFAKANNIAIEQAKGDFILLLNSDTLMKQSTIDKCMDYITDKGHDDIDALGCKVSLADGSLDKACKRSFPNPANSFYKLFHINVDSDKNDYNLDDLDDDGIYEIDCLVGAFMLVRRTTIDEVGLLDDAFFMYGEDIDWCYRIKQAGWKIVYFGQAEIIHYKGASSEDKNTKKRNPKIIYEFYRAMYVFYKKHYTKKYNFLVNIAVYIGIGVLLVFNLVRNAFRS

SEQ ID NO: 4547 - protein, 466 aa, Methanobrevibacter ruminantium
MIKENQRILNAILVIIDIIVILISLGLAYFVRFKTTIFSVGGSLPFSDYFIFTIVCIIPTYILLYYFFGLYKPFRNQSSIFSGAEDIVKSDIMAFIILVAILFIINQPNFSRIMLLLLSLFGMILTIAERVLVVLVLRMMRTNNLNLKHMLIIGDNDLAFEFAHKINSKTYLGYNIAGFLGRKENIGKRFEGTKFIGSFDDLPRVLKTHKFDRVVIAIPLKYYYHLNEIVDACEEEGIKAEIIPDYYKYLPAKPSVDMLDDMPIINIRYVPLDDAFNKFKKIVSDYFVSIVAIIITSPIMILTAIAIKIESPGPIIFKQERIGYNGKPFMMYKFRSMKVQDDEEEKSQWTTKDDPRKTRIGTFIRKWSIDELPQFFNVLKRDMSVVGPRPERPYFVEEFKKTIPKYMVKHQVRPGLTGLAQVNGYRGNTSIKKRIEYDIRYVENWSLALDVKIMFWTVFRRNKNAY

SEQ ID NO: 4548 - protein, 823 aa, Methanobrevibacter ruminantium
MEKEFFEGMNLEEDISDEDFQTIVEGWEKVQDQMSKEEFITKFNEHKAEFKDASFFSDIDFLNMIVNPLVGGGDDEPGPAIVEGEFQKISDVEPGNEGFNVVARIMSIGNSRIFTSRKGKQGKLCNLQIADDTGELRLVLWTENIKHLKHVTEGDIVEITNIECKEGFRGGKEFSLRPRSSLRPIEEGSENYPENIAAFPVYEEKITQIADIKPDETVSIIGRLIRVPKPHAYESNGKKGKVTSLEIQDASGKTSYTLWNNDVKLIDILELKEGDIVKILNEQSRERNGEISLSHWDGRIVKAEGDYDIPEYEENIIKIADAQEMQDVSIIGLVTKVQDVIQFTRNDGSEGFVKSIELSDDEGSIRVTLWGDDTKIPISKGDIVKVIGGNIEYDDFSNGYRVNTNWNTELKINPEEHSDLIETLKGQAENLGPIPISEVQSIEEDGEEVDIIGRIITLNDTHTFPRDDGTEGVVRSGEMADGSSPDGLVRVSFWDDKAKVPEIGKAYKVENARTRMGMYAVEVNVGKTTRFIEIPESEAGDLPSFEELEESIYISKKIEELDEDDMNIKVLARILEVHEPREFPRDDGTKGLVGNMEVADITGSIRVTLWDDKNNLPYGVGDAIKIQNPRVRYNSNMDYLELSVGNGTNILTPSDSEINDIPDILELQNTLYQTKEIANLSDDDTKIRVTGRFVDIYGQKMIIPKCPQCNNTLEPEDIDAEECSFCGNYIDEPKYLLMLPGKLEDDTGDIQVTFFNELVGELLGMKQDEIFELYEGEGGDLGPLEGKIDDLEGITLEILADVTFNEYDEENRLRPRKIFNMEW

SEQ ID NO: 4549 - protein, 311 aa, Methanobrevibacter ruminantium
MVELEDLPNVGEKTAEKLREAGFADMMRLATATAKELSVKAEIGEGVAEKVIEAARKAEKIDFETAFDVMERRRDVGRITTGSKNVDELIGGGIETQSITEVFGEFGSGKSQISHELAVTVQLPKERGGLEGECVFIDTENTFRPERIEQIADACGIDREEALQRIHIARAFNSSHQILMAEKINELIQSGVNVRLVIVDSLMAHFRAEYVGRESLATRQQKLNQHLHALQQIANTYNVAVFLTNQVQARPDAFFGSPTKAIGGHVLGHASTYRIWLKKGLAGKRIARLVDSPHLPEGEAVFKVTTDGIVD

SEQ ID NO: 4550 - protein, 305 aa, Methanobrevibacter ruminantium
MLIAMDFRIIILSIIIMILLGVLLKKIDLLKEEDVETLNNLVINICLPCLIFNALYTADVSLLPSLSILTLSTTITSLIVGVFTYILLKLFAWDNVKIWSILVTVVLGNTGFLGYPITQGIYGSEGLIRAVFCDCSTSITFVILSVILILIFDGELKVALRKIATFVPLWSIVLGILFNIFAIPITDVGTTVVGYLGDATIPLIMISLGLSLNISGLKNNLKEVSLASFIKLILYPFVALGVMALLGITGFNHTIGLIEAAMSSAMIGLVLAITYKLDPHLTSDCIFTSTLFGLVTIPLFLMFIV

SEQ ID NO: 4551 - protein, 660 aa, Methanobrevibacter ruminantium
MAEEINNEEIRVGVYVCHCGVNVGGVVNCPEVAAYAETLPNVVIAKDYKYMCSDPGQSLIQEDIKEHNLNRIVVAACSPRLHEPTFRRCVEEAGLNKFLFEFANLREQDSWVHMTQPEEATAKAKDLTRMAVAKARLLEPLEASKVAVDKKCLVIGGGVAGIQSALDLADMGFKTYMVERNPTIGGRMGQLDKTFPTLDCSMCILAPKMVDTSKHENIELITYAEVKEVDGYIGNFTVTVEKKPRYVKEDDCTGCGQCQEVCPIEIPNYYDEGVGMVKAAYIPFPQAVPLCATIDKNYCIDCGLCETVCGPDAIDRDMEPEEIELHVGTIIAATGYDPYDPTEKYEYGYGRYTNVITAMEIERMINASGPTGGHVQKPSDGKEPKRVAFIHCVGSRDEQIGKSYCSRVCCMYSMKNAQLCIDHEPDTEVTCYYMDIRSFGKGFEEFYKTSQEKYGIEFIRGRPAEILENDDLTLTVRAEDTLLGKVTEYTYDLVVLSVGLEPPKGSNELRQTLGLSRTTDGFYMEAHPKLRPVDTLTDGVYIAGVAQGPKDIPDAVAQGSAAASRASIPMAKGEVEIEPITADTDTTVCGACEVCVELCPFGAVSIEGEGADKHAAINVALCKGCGTCVGACPSGAMNQNHFKTEQIMAQIAAALEDVAK

SEQ ID NO: 4552 - protein, 221 aa, Methanobrevibacter ruminantium
MKKFESVDFDKTEKIVDGIAIEDNEAMDIVVILEPGSGQYAFLASRKAPSKGFNAFIETEAAKDHKTFVTAVLFDNEYEILHSRRDINEVPILTTNEYSCRGCTALYDAIGITIESIKDEIDNKVLFLIITDGMENASRRFNEDQIRSYIDELDYEFIFVGADIDSYREASKIGIRQSHTASFKKTGEGIDDLFKTISDVSDIHRDNMKLEDVDWKHRLED

SEQ ID NO: 4553 - protein, 498 aa, Methanobrevibacter ruminantium
MVKRIPDEEQIKLGIRTLDFNIPEDHISRFVVDFIDEYYPLLGIKENKKKKGRDSFPVKEMLKLLIYAKIEHIDSMRFLADMVKYHDVYKFVGNGICPSERSLQRYREKYGKYYNELLKATLKKASDVDYTDFNEVSIDGTIKKAYNSKNKVITEKETEILTRYFEGGRVSQEELDKLHKPAREILENKKISNQEKLYLLDDIKTQFTLSGQKSVPVTDIEARWMKSKKGNSQISYNIQSAVDYDTKMICAINVVQAPTDHYQLPKIVDKAINNTNVIPRFVLADTIYLNEESLSYLADNQINGVIPDRKQSKEKIGRLNKNPYHKDHFKYFPEIDAFECPEGQIMYFFNKYTEKNDDLDKPDKIKRLYSNYGACKACNCRENCLSSTQTHRTITEYGGSLKKAMWEKMETEEYKEEYAKRSSVEGPFGILKEQFHIESEVVIGKTKTEERILLDAVAYNLIRLFNLEQEIKNDKEDIVDFCEKISVQEKLEVRATIF

SEQ ID NO: 4554 - protein, 97 aa, Methanobrevibacter ruminantium
MSFEDLIEDYVKAKIDLNVKFGSVLDELNIEYESFCFYDEFKSVCLDLEMHNKELSDEEIENIIEKTGFDFLKVEIKGKKFPFGNGEEIDYTYVFEC

SEQ ID NO: 4555 - protein, 332 aa, Methanobrevibacter ruminantium
MKISLNNVSLDIDLKNSQKFKNMEVIPIEALSAGKKEFITLKAGIQEGYVKISECESSTVNTVMAQNKSSTPLVLIDGEEVIGAMQNRIMNRSLIVPGNTTMPISVSCTEHGRWHTRGNSPKAREFSHSDFFADYETRHRKSETLYNNSDCQSEVWASISDLEIKNSYRSPTSALNDSYVHHRPRLNEYLKHFSMLYNQIGAIFIINGQIKGLELFYNPFLCSQYYDKILKSYIMNAITNYYSNCSSNSSNIDVGAFLADLSDSKLNHSPNQGLGQHIKFSNNHGTGSALINDGEFVHLNYFKTKYDVSYKKQRKNVRTFGSFDDLLSKMDE

SEQ ID NO: 4556 - protein, 423 aa, Methanobrevibacter ruminantium
MYQYENEVTKLNELMETHNNWMRDSVNLIASENTTSNAVTGAVASDLAHRYAEGQAFERLYQGCTYIDEIEDIVKRLSREVYDCSYANVQPVSGVTANLAAFFGFAKAGDKMMAMNIPFGGHISHANVSAAGIRGLKTLEHPFNPEVMNIDIDAMNKMILEEKPKIILFGGSLFLFPHPVKEAVDAANEVGATIMYDGAHVLGLIAGKQFQDPLKEGAEVMMGSTHKTFPGPQGGIILSDESNKELIDNAVFPGVVSNHHLHHLAGLGIATAEMLEFGEDYAKQTIKNAKALAGALAEQGFNVFCEDLGYTESHQVAMNVSDVKRATILAKELEQNNIILNKNLIPGDNVNDSDDPSGIRIGTQEITRRGMKEKEMEEVAEFIWKVAEGDKVDIKDEVTEFMSQYRTIHYAFKEEEGYKYIQY

SEQ ID NO: 4557 - protein, 233 aa, Methanobrevibacter ruminantium
MRIGWAFTGAGHLLRESVEAMEEVAKYHDITVFLSQASEEVLRMYGLYDRVVAVTGGRYRELACDSNQKFSFPITGRLSLGKYDALIVSPVTANTVAKIVYGISDTLVTNAVAQAGKGRVKTLMVPVDIEPGDVDTVLPSKLELSKCQKCDVCDAAEVCPNGAIVAHQEIDLLKCIGCGACKDICQYGAVSAGKIITMHMRDIDIENTQKLSKMEGIEIFASPQELLLHFDYK

SEQ ID NO: 4558 - protein, 133 aa, Methanobrevibacter ruminantium
MKNNRKNNQNKENNHLKSLHLKKSNEKITDLRIADSFLSRFLGLMFKKDIDYPLLFKIPQNINNRHRSSIHSCFMRFELKLVFIDKNNIIYEISDLKPWRYYAPKKPAKYIIEFDKNGFSDYDLKIGDEVELK

SEQ ID NO: 4559 - protein, 402 aa, Methanobrevibacter ruminantium
MSRNIFVEKLNQTFIEDLDIEIVERKGIGHPDSISDGIAESVSEALCKMYMDELGGVLHHNTDEVQITAGESNPVFGGGQIIKPIDILLTGRGVSEYEGHKLPLDYVAIDAAKEFLDKTVINLDVNRDTIVECKIGHGSGDLVDVFKREGAPSSNDTSFGVGYAPFSEVETIVFETETLLNSKAFKKDHPGVGEDIKVMGLREGDKITLTIGCATVSKYLANREEYIACRDVLKDIVADLAVKYTDREIEVFVNTADNDNATDESGYYLTVTGTSAEMGDDGSVGRGNRANGLITPCRPMSMEATSGKNPINHVGKIYNILSNEIANDVAKDVEGVKQINLMILSQIGKPIDQPKAASAGIILEDGYEMGKVSPQVEKIIDNWLENITDITEKVVQGKARTF

SEQ ID NO: 4560 - protein, 1143 aa, Methanobrevibacter ruminantium
MPIEEAEKSYDFKKIESKVQSFWEDEDIYQKTNELNKNGPQYSFLDGPPYCSGKIHLGTTWNKVIKDTLLRYKSMNGFALRRQAGWDTHGLPIEHKVEQLLGIESKQEIEEKYGIDKFVGKCKEFAMENKVAMTEQFKSLGVWMDWDNPYMTLDPKYMESAWWTLKKTHEKNLLTKDKRVISWCPHCQTALAAAEIDYTEDTDPSIYVRFPLKEKFLNEENCSEFANDSDLANLKQSFLVWTTTPWTLPGNLAICLNEDFEYSFVKVDERLNESDDEILIIANELLETVLGPIEIIHKNKIPNPKYDPENKESKEKKYLIEEETEVMYEIIKTVKGSELLGLGYVYPLAEEVPKQMEIEAENSLVHTTFHGDHVELGEGTGFVHTAPGHGPEDFEIGQEVGLPIHCPVDEAGCFTEDGGAYANGYTKDLNDTIIADLIAKGLMFKNDTITHRFGVCWRCKTPIIYLATEQWFIKVPEIKEKMLSEIDRVEWVPKWAGEGRFHDWVANAKDWTISRQRYWGIPIPIWVCPDCGEIKVIGSVEELKELSINEITASDEELVHRPYVDDILINCDCGCDSPMKRIPDVLDVWIDSGVAGWAALYYPREEEMFDKWYPYDFICEGHDQTRGWFYSQLGTGVIALDQAPYNKVLMHGFVLDEEGKKMSKSLGNVVQPEEVIEKYGADVLRFYLLWACKPWDDLKFVWDELNNVKKMFNILWNVYVFSTTYMALDEFDPAKCVLDGPDANVTLRNEDRWILSRVNSLAKEAGDAINDVHFHLATRAINNFILEDLSRWYVRLIRGRTWVESDDPDKLGAYYTLYNTLNTLIHLMAPITPHLSEEVYENLVKNLDDNAVESIHMDNWMFDECLIDKELEAEMDHIREIIEAAARARDVARYKLRWPVSDITVVSQDESILNSVALLEDVIKDQSNTKEVLTANEFENLTFIAKPNLKTLGPRLKGDMGIVQKFFAQAKAEGIGNSIKEELDSSGKYIVTGEDREGNQKEIELSADDVLYETELPDDVVSAEFNGGNVFVNTKITPEILSEAMARETIRRIQDMRKDMDLDVEANVGVMINTDGEFKELIEKQSNLISDEVRAKSLVIFDGKACEVCTDKGMGREYEDISVEYSKEWEIEGHKVIISVVKL

SEQ ID NO: 4561 - protein, 736 aa, Methanobrevibacter ruminantium
MTLTDSEVKYIEGILGREMNELEEGMLDVMFSEHCSYKSSRPFLRMFPTEGENIVLGPGDDAGLVSITDEYALAVGMESHNHPSAIEPYGGAGTGIGGILRDIISMGAMPIALLDSLRFGPLEDQKSRYLFEHVVEGISDYGNRVGVPTVAGEIEFDESFRTNPLVNVLCAGLVKKDEIVLAVAPNIGDVFLLMGGTTGRDGIHGVTFASEELTSDSETEDRPAVQVADPFTKKRVLEASLEILEKIDCSGVKDLGGGGLTCCVSELVDKSKNGAVVDLRAIPLREEGMTPYEIMLSESQERMIFVINPKDVELAQKICDKHEIPSAVIGEVTEGSNMVVKDFDAEEELQTLCNVPTILLADPPSIDRPTVEPAKSEDLVEVIDGPIDESLIKILSSPNIASKAWVYKQYDHEVQTRTVVKPGDDAAVLQIDDETAVALTADSNTVHTKLSPYDGGAGSVAEAIRNVVSMGAKPYAIVDCLNFGNPETPEILWQFKECIRGMSDIAEKFEAPVISGNVSFYNETEGIKINPTPAVGVIGVEKLSSIRTLPFKNEGDKIIIIGKTYDELGGSEYHRAVHNLEQGEAPKIRIDDELAAANAVLDLIENDGDYVKFLEGEDKLNIKATHDVSAGGIAIALSEMVMKGKLGCEIDISNVPAEENISDNDLLFSESHGRYIIAVDADKAEEIVNSIDIDAAIIGEVKGDSLIIKNNDETIVDFAIDELDNAYNGVIEKYMA

SEQ ID NO: 4562 - protein, 408 aa, Methanobrevibacter ruminantium
MKFISNLIPLEEALSKINDNIKLMDTETIDLKDSQGRVLAHAVSSYHNSPPFDKSAMDGYAVIAEDTFGASNNVIKELKIIDRIGAGDFSNKSLQNGDAIVIATGAPIPDGANAVLMKEYTYEDGDNLEIHSQVTPGENISPKAEDIAKGDEILGENVLIRPQEMGLIASAGYSEVEVYKRPRVKLLITSNELVDPSPNIDDAKIINSNQYTIAALIRSAGATVDIDHGIDDFDEIRDAIDKASREYDCVITTGGTAISKGDVVIDAVEDLGEVLFHGVAMRPGKPVGAGIVNGTQIFMLSGQPVAAMGQFDIIARHFLFKVQGLDYSHKIVKRTSSTKIHSSLGRTDYIRAVADDETVHHVLNRGSGIIRSMVEANCYIIIDENHEGIEIGDMVDLIFFNDMAWPSL

SEQ ID NO: 4563 - protein, 219 aa, Methanobrevibacter ruminantium
MNKKIIFLACVIGIALLSVSYISAESDVDTSDWVNITVNDINFQIPPEYGGGRNASGDYLFNNVFTFGLVALENNKSFRNNYGYEATNEENYDVEEMEIDGHHAVAYYSNRSIVNHTVTYLYFESNGTFYALSYDGDDVNSSMKKIVSYSPKSKLSKEEFNEKLNKAQEEYIEDQIEQEEAYQYEQAYREGYNQGRSDSRGGELLGYYFFYKLGQRSRY

SEQ ID NO: 4564 - protein, 385 aa, Methanobrevibacter ruminantium
MNGIYYYVIAFLLIWTIAIVFKGRLENYGLEVNFPLLMWKTQRLRGFIDRIANRAPRFWKWYMNIGIVISTGFMILMAVALVYSLKTLMDAPTVSLVIPGVEVPGSPIFIPFLSGLIALATVLIVHEFSHGILARVEKIKINSIGLLLFAILPGAFVEPDEEELKGLNRPSRMRIYVAGSMANLTLAAIALVIMMLISSFVVPAVFEDDGIVISRLTEDGNAINYLSEGMVIKGINNYSVSDGASYQKAVSTLRPNQTVTVLTDQGEYSFQLKSNPQNKSLGYMGVQAQVNQIISPDFDNKFYTPLLWGIMSLTDLLFWIYFLNFAVGTFNLLPMKPLDGGHLFEDLLSYITSENIYKPVVTFMSFFMGIIIVVSLVVGFVGVPF

SEQ ID NO: 4565 - protein, 408 aa, Methanobrevibacter ruminantium
MKAKAEKIGDGVYWIGVLDWDLRTYHGYTLDGTTYNAYIVFGEKVAIIDNAYPGKTEEMMARIDDAFEQEGREIKVDYIVQNHVEKDHSGVLYDLWKRFDAPIYCSKIAQGGLLRHYPKLEGAEFNIVGTGDALDLGGKTLAFLDAFLLHWPDSMFTLLAEDGILFPNDAFGQHLCYSKRYDKDIPEYVLMDAAQKFYGNLITPLSKKVLNKFDEIIELGLLEQVKMIAPSHGQIWTDPMKIIGAYSDWATGKRAEDKVTIVYDTMHYSTQKMAHEVAEGIMAEGYDVEMFFLHEDERSEIVKSILTSKAVAFGIPTINDFPFPSIGDIIYYLKGLHFNRTGFKRPAVTFGSMGGRGGAVEFIANELTECGFEVLDQQEIYYVPADEDDEASFKLGQKLVEEAKKLEL

SEQ ID NO: 4566 - protein, 264 aa, Methanobrevibacter ruminantium
MENEENISQPKAIQIFAKAPGELGVNVVKSPVKLTILSMLKDTDMEFDEIVKNTGKSKSTISVHLKSLREDGIVSYRFDANDHRKKIFYISSKFLGEVESGDEKELEERQAEFLVKNILDVDNFKFSFLLFHTLRSNLIQEGININPVLNQTGKNIGAAMYEKLYDDDIKVFCDNITEFWADNGLGKLDIVLGDIINVTAYECFECSLLPKKGKPACYLDAGIFEALFANYLKKDIAVTEVKCFTMGDDCCHFLVEGINGESLT

SEQ ID NO: 4567 - protein, 660 aa, Methanobrevibacter ruminantium
MSNSIFCPDCGMLKENCVCGRYKANRDKVKYTKGTRSNPQYKKRKTFNYSNKKRAENMKNTSSNKSKGLFQYEEPKGLYQYEDLEPVKVEEEDDFGSSKVYDIAEHDLPKEIIDGLKEDYPEIPDSIIENFPFERPREGQLDIIADIEEAISKGFKYIILEAGTGTGKSAVATTLARMYESAYILTMTKQLQRQYADEFDFPLVKGRGNFDCIKDGFEVTCDMGACKTAPKNSKFFCPYGISKNPTLTGDLAFQDSYGGDIFFQTNDHCHYWQQKANAINSPITLMNYDYAILELNYVKHFGKRTLLILDEAHNIEDKLMKTMEINLYNRQLEKDIKKVISPQTLKTREMGEWIMEIDAIQGHYADIDIKDLPTNKADRIRSTSARLKDLKNKLETEPGNWVIDSNENGVSFKPLKVNHYANDYLFKHGDVVIFLSATILSAKMFSKWLGLNPHEVYHIKVDSPFSVEKRPIELNLAGKMSKNRVKQSAPKSIEILNKILKRHEGDKGLIHTHSYKCQQYIINNLYNSRLIAHGSNNRERVLKYFEEDDNPLVLVSPSMSEGVDLPYDKCRFQVIYKIPFPYLGDPQINMRRKKDQRWYAYKTVMTLMQAYGRGMRAEDDSCVTYILDSDIQMLLKSPLYRSLIPEFFKEAIIVNDDRII

SEQ ID NO: 4568 - protein, 232 aa, Methanobrevibacter ruminantium
MVIKEKIEIEGIPVEVHRKRMKNVYLRVLPDATLRVSAPERVSNDYIIEYVTSNLDWVKQTQERILKNPPKPKIMYKNGEVHKIWGEEYKIQLITNDTIKHAFYDADESIVYLPVRRRSTVNEREKALFELYRSEMKRNIDCFLNKCVPIVGEQPKEIKFRNMKNWGNCRRNKTITLNIKLASKPPICTEYVLIHELCHILEFNHSPRFKALMDGFCPNWREIKKLLNESDD

SEQ ID NO: 4569 - protein, 277 aa, Methanobrevibacter ruminantium
MLTKRIIPCLDCDLQVPEGRVVKGVEFKQIRYAGNPVELATKYYEDGADEIVILDITASHERRGTMVDVIERLTENVFIPICVGGGIRKVEDYTRMLKAGADKCSTNTAAIHNPQLLTDASKVVGSQAVVIGIDAKRRYVEEDPEQAKGKTIVDTDDGEVWFDCSIYGGREFTGMDAIAWAQECQDRGAGEVLLTSMDGDGTKDGYDLILTKAINDNVDIPVIASGGVGNPHHILEAFEIADASAALAASIFHFDEYPVPVVKKYLKENGVPIRETF

SEQ ID NO: 4570 - protein, 358 aa, Methanobrevibacter ruminantium
MSSQKINSLIDLNLTQYSGQTSQSPWRHNSMENIDKFDELIYLKVPSIIDGLDDKTINLNGLPVLLNLSQDKDNINGFEYTYSLPQKVEKQAFSIGQDNLSKKELQSIEREIDSNLNNIYDLEFDLEKFYEFLLEDEKLAPSVDFCKGLRLFIAKDPFECIISSICSANNSIARWTASIDKIKLNWGEKVEFDEGMFYGFPSPKDFLDFYETPIEQSEADGRRYEVDCYTKNLKSCGVGYRAPYMKKASQMLIDEIDMNDVSKMAYDEAFDLILRLPGVGPKVADCILLYGFGFQEAFPSDVWIKRIVSHLYFDGEDISADKTREFGIERFGDYAGYAQLYLFHYARKSGLMDEIKNK

SEQ ID NO: 4571 - protein, 147 aa, Methanobrevibacter ruminantium
MKLVIQRVTNASVEVEGEITGQIEEGLMVLVGFGQTDTEKEVDYLARKLTKLRIFPDEEGRMNRSVKDIGGKLLLVPQFTLYGRTKKNRPSFHKALAPNEATKLFDYFVEKCSEEVPCETGVFGAFMKVSLLNNGPVTILLEKEFED

SEQ ID NO: 4572 - protein, 149 aa, Methanobrevibacter ruminantium
MNGESFQGIWDNSPLIAWIHNLSKNHFKYLKAKINEFDLGHEIRYIMMIYDNPNISQDDLVIMSGQSKGNIAKSLKKLEDDGYIKREVNPENRRKYMLRTTSKGDELVPKVRQISKDWEKEVGITEDDKEVIERIKEIAINGMKLTEDL

SEQ ID NO: 4573 - protein, 463 aa, Methanobrevibacter ruminantium
MKFDSETSVLLVSFLTAFFAVFLAAGIVIGVPAIANEFGMNNVVQNWIITIALLVVAMFTLPAGQLSGKFGVKRSLLVGVLIFIVGSIGACLAFSAESFLFFRVIQGIGGAFSNVASMAMVVQAIKPQSRGKALGLTVTGVYLAGSLSPVICGFLVYNFGWRSMFYFTIPFFLICIALMLWKIPGDWKTYENDKIDSIGYMIYAVGILLFIYGFTNLINAWGLICVVVGFILLLAFAYYETRVDTPAFNMRLFKNTKFASSNVAALCSYLAVAALTTILNYHFQYVRGWNAQMSGLILIVTPIIMAFMAPNSGKLSDRIHPQKLAAIGMTIATAALVILIFLDANTPIWLIIVAMVLQGVGMGLFTTPNTNAIMSSVPPKETPNASAAQSAMRTIGQTMSLGLLTLVFAWIMGSLKLSSQYAGMVVQASQIVCIICTIICVVAIFASLVGIKSKDEFNIEKPS

SEQ ID NO: 4574 - protein, 463 aa, Methanobrevibacter ruminantium
MKLDLETVVVAVSFITSFFAVFLSNGIVIGVPAIAQEFAMNNVIQNWVPTIFFLVVAIFTVPAGQISGKFGVKKSLLGGVLVYLFASIGAVLSFSTESFLLFRILQGAGVAFLNVSAMAMVVHAVKPQNRGKALGFTVTGVYLATSLSPVICGFLVHNLGWRSMFYFVIPFLVICVLLMAFKIPGEWKTYEKDKIDMIGSILYGIGILAFIYGFTTLTTSTGLILTIAGLAMLVVFGAYELRQKSPVFNMNLFKNKKFTSSNIAALCSYIAVMVVTTILNYHFQYVRGWNAQTAGMILIITPIIMAIMAPNSGKLSDKIHPQKLAAIGMSIATVALLILTFLDGNTPIYFVILAMILQGIGMGLFSSPNMNAIMSSVPPKDAPTASASQATMRTIGQTMSLGLLTLVFAWVMGSLPLATKYAGMVVQASQIICGICTVACILAIFASLVGVKSKDKFNTDRPT

SEQ ID NO: 4575 - protein, 338 aa, Methanobrevibacter ruminantium
MNDLTDRLFHFFKEEIIFSISLILAIISCFFVPPSVDYLNYINWETIILLFIIMLFVEILKNLSVFEILVRKLLKKVKNTRGLVLFLVFTCFFSSIFITNDVSLIIFVPFTILALRKVDRLDLIIFAVSMETIAANVGCMVLPIGAPHNIVMYMVSHIPFQSFFLILLPYIVVSAVFLIILSFFVPSDAVNLPKFGKVEINKEGFFKRVLFGVDYFLLLTFIALFVLIGNLENITFFNLLFKKWIIGNEVIWGVVASQFISNVPAAILLSGFSTNYEAIIVGINIGGLGTLIASMANLISYKILVREHGEFKIRYLIIFTFLNVVLLFILLGVYVFIH

SEQ ID NO: 4576 - protein, 196 aa, Methanobrevibacter ruminantium
MLFEKENTEEKIIRATFDIVQREGLQKATTKKIAAEAGVNEVTIFRKFENKKNLIKKTKEYYTNQLIAKLEESFEFNETDSIEEYLKRSFNKILEFSEEDFNIIRVAMQEVKNDDDKKLLITTITDTIINKLDEFFKLQLEKGTIKDLNSKAVSLMCFSIIFQSLILWQIYNDGDLAADYYADEFLDIIFNGIKVQ

SEQ ID NO: 4577 - protein, 1094 aa, Methanobrevibacter ruminantium
MKVLKIAIIMLILIISLGAVSATENFNNDLSDNGLNDNTLSDNSLNENTLSDNTLSDKSLSESTIIQNDHDNLKDTNNNDNNKALKDPAKTFTDLQMEIINASDLLELTDDYKYNNETDNITLTISKSNFVINGNGHTIDGDNQCGIFQINGTNITLKNLNIINANSTKDSALLLNPGSELETNNVTFINDSSDKRVIFAFGAKYTSNNDKFIDCTSLNDGVINSYLGEITINNGYFESSKPLDWAFVNSLGNSSIYVLNTTFANTTSKYATAIKGDRETVIHDSKFINLYANLTAGAIGLKRIEEAEIDNCTFINVSSQKNGGAIFLDIYSDSEDVPIMISRSSFVNCYSEFGGAILSLGGKITLEEDNFTNNGAFFDGGAIYSSFSQLTISQTIFDNNSVELDDDRGSFGGAIFSDISALIILNCSFSNNNAQTGGALYTYDSGYYIANSTFKDNTNKESEFDDIFTDFDGEIATLENNSYSGEDSICLNNERYESVIAVSGMNFTLIENEINVTNPPRKFDLREWGWVTPVKNQGYMGSCWAFGTVGAIESSILRFLGLEMDISENNMQDSLLQYYRYGTLGAEEGGEYNLGPSYALSWFGVFPSEYDVYDELGKISAIIATDDSIHLQDAVFVPPLMNSTDKDKLKQSLLKYGALAVSYYAETDEPGLNENTSSQYSLKNDSNHRVLLVGWDDDYSKDNFYMTPPGDGAWIIKNSWGEELGDKGYYYISYYDASFATLVPSVGFPIMNTVIYNKNYQYDIGGTLEFTDMGNEYVNEFEALEDDFIAAVGTYFIDAGVDYNIEIYVNDELKYSQDGTSPFFGFHTIQLDSYVPIKEGDEFDVKITSDCIPILESGRQHYIENKSAANLNGEWVDLTSDGKVCAIKVYTTDEDKKKESSRINTRIDCKNMTTTAVASEDGRIGEYFQVTLKDENGTALANKPIKIGFNGRVYDRTTDENGSAKLQINLAYKGTYTFAIGFLGDEEYLGAFEVAKITVKVQTPKLTAPNKSYKVSAKTKSLTASFKTANGKAVSGKKISFTVNGKTYSAKTNSKGTATVNVSLNKKGTYSFTVKFAGDDTFATSSAKAKLTLK

SEQ ID NO: 4578 - protein, 45 aa, Methanobrevibacter ruminantium
MARCPRCGSEALEEINFNTYKCHECGYMIRNPDDLELVERENGDL

SEQ ID NO: 4579 - protein, 142 aa, Methanobrevibacter ruminantium
MKKAIIETEKGDIVLELFPNEAPGTVANFEKLANSGFYDGLTFHRVIPDFVIQGGCPRGDGTGGPGWTIKCETEGNPHKHGTGALSMAHAGKDTGGSQFFITHSPQPHLDGVHTVFGQVIEGMDVVNAIRPGDKMLKVTVQG

SEQ ID NO: 4580 - protein, 91 aa, Methanobrevibacter ruminantium
MLEQYMQFMWLIIFGNIENLILSSQGVVQGVDPKILGGLSILVVIMWFVIGTVITDVAIQYSNLINFIGGLAIFLLGFQAVYEAVRNIRGG

SEQ ID NO: 4581 - protein, 89 aa, Methanobrevibacter ruminantium
MDWKPYAPFTALLIFGNIENLILSSEGVIAGVNSFVLLILSLIAVVAWLLLGTYGTNYAIKYADYIEIIGGIAIILLGLESMLEAFGIL

SEQ ID NO: 4582 - protein, 346 aa, Methanobrevibacter ruminantium
MARIILGKTGLEIEKNGFGALPIQRVDFNESAEIVRKAYNNGINFFDTARAYTDSEEKLNYAFKGFDKEFPRESIIIASKTQGENRRDIEKDIKTSLDNLGTDYIDLYQIHNPSFCPTEGDGSGAYDALFDLYDEGTIRHIGFTSHKYELAEEAIHSGLYETIQFPFSYLTGPKELAIVEMARANNIGFIAMKAMSGGLIRSSKAAFAYINHFDNVVPIWGVQKLSELDEFLSYMADDTKLDKQLEEIIAKEREELQGDFCRGCGYCMPCPEDIQIFICARMSLWIRRFPAEPNLNEETQEKMRKIEDCTECRQCVMKCPYELDIPELLKKNYEDYKKILSGEIKV

SEQ ID NO: 4583 - protein, 391 aa, Methanobrevibacter ruminantium
MNTQEIIDIEDKYFINTFNRVPIVLDHGEGVKVWDIDGNEYLDFLAGIAVNCLGHNHPKLVSAIQEQAGKLIHVSSIYYNEPATVYAKRLVDATGFDRIFFANSGAEANEGAIKLAIKYSGKHEVLYCGDSFHGRTILTLSVTDHPEYSAPYVENLPKGFKKVEFGNLDSVKEAITDQTAAIIIEPVQGEGGVHVASEEFYKGLNDLCKEKGILIIADEVQSGFGRCGALFAHELFGLEPDIMTVAKGIGGGFPMAAFLAKEDVAGGFVPGDHGTTFAGSPLAGAAANAVFDAFEEENIVENSKKMGEYFKEKLAPLKDKYDFITDVRGSGLLVGLELNFEGADIVGKMLEEGFLINCTAGNVLRFAPPLVVKEEEIDALVEALDKVFSSL

SEQ ID NO: 4584 - protein, 214 aa, Methanobrevibacter ruminantium
MEIKRINRYVIYLFSLFLISLGASISIKANLGTSPIICLPYVSSLILNMSVGTVCLIFNVIFILVQIILLRGDFERRQYLQIIVGTIFSLSIDFSMTLVTFLNPTNYISQFAVLMLSCVVVAFGVLLEVQTEVVFLPPDGIIVAISKVLNKEFPKVKPFFDTSLVLTAAILSIVFLGYLAGVREGTIISAVIIGPIVKVLQKFFNPYIEAVIEK

SEQ ID NO: 4585 - protein, 145 aa, Methanobrevibacter ruminantium
MTNRKDWGLTVRGIVQQEDKILILRRHPKSRNNPNKYELPGGKVDPGEFFDEALIREFKEETNLDVNIVSLFETVQDEFISRRTNQPISTVQLMMNLEIMGGEVEISSEHDDFKWVSIEELKELYKNDMVTPTLRLTLEKRDFKI

SEQ ID NO: 4586 - protein, 427 aa, Methanobrevibacter ruminantium
MDLNIKTNDKGHLDIGGADACELVEEYGTPIYVIDEERVRDNYNRFYNAFTKFYPKFKVFYACKANTNIAVLKILEEEGCCIDAVSPGEVYICKKMGFSGDRILFTGNNIRNDEMDYVNSEDVILNIDSVSALKRLAESIDPQGKKISFRVNPMVGAGHHGHCITGGEMSKFGIMETEAVEIYKLAKELGFEPVGMHSHIGSGILDPEPFKLAIESTMNIAGKVHQEAGIDFEFIDFGGGVGIPYTPEEELLDLEHFAEENIKLFKEKLEEFDMGEPILYLEPGRYIVGDASVILVEVNSVKESYRKFIGVDAGFNTLLRPAMYDSYHHIVVANKMNEEPTQTVDVAGNVCESGDLFARDRPLPDIEEGDILGILNAGAYGYTMASNYNSRPLPAEILVKNGESFVIREAQTFDDIFEKQSIPEHLK

SEQ ID NO: 4587 - protein, 287 aa, Methanobrevibacter ruminantium
MVDLKGLKFSKMHGIGNDFPIIDESKGEQIKEADKPEACRQLCHRNFGVGGDGVLFVVPSDVADIGYRMFNPDGSEAEMCGNGIRCFGDFVYRNKIVEKETMTVETKSGIKTIEITVEDGEPVLFKVNMGKSTFKVPEIPMIADTDEFVDGDLDVIDTTFKATCVNVGNPHAILFVDNVDDIDIDKYGPAIECHEVFPEKINVHFVEVLSKNEGKMRTWERGAGVTLACGTGATSTALAGVKLGLFDKNVLLHLPGGDLEFEVYEEDGELGAFMKGPAALVFNAEIQ

SEQ ID NO: 4588 - protein, 56 aa, Methanobrevibacter ruminantium
MILSRNILNYLKEGKTLEEACAKAGVVQNELNIWKLWADKGLQPYKDFFREIENYR

SEQ ID NO: 4589 - protein, 242 aa, Methanobrevibacter ruminantium
MNLEERNSREIEEFFKSKGVKVVGFASLENIRNVPKEYPNSILIGIPIEKEALKTIYTNDQSLYVESMKEVAQKLNDIILEGEDYIKNTMNYNALAISRERVAGELKDLASKIPHKTTGTRSGLGWIGRCALLISPEYGAALRLSTLLTDMPIKVGTPIDDSLCEDCTDCQDACPVDAINEVKWNSRREREEYFDAEKCFEFIKKEMKRTNGKSLCAKCGLACPYTKEYLGIETDRNLIKEI

SEQ ID NO: 4590 - protein, 216 aa, Methanobrevibacter ruminantium
MKTKNTKTRPQLTKDLKSEDFMEYYFLKEELKEFCRREGLKIGGSKNQLEERIIYYLDTGKSLDESVKDGNKTKNHKSVKDDNKTKNCNHKISNSDSQEITLDSILGENFRCSEDKREFFEREIGKGFKFKVKFQRWLKANPDKTYQDAINAYYELQNSNEKTKIDRQFQYNQYIRDFFEDNEGRSLDDAIKCWKYKKSLKGHNRYEDSDLKILKS

SEQ ID NO: 4591 - protein, 194 aa, Methanobrevibacter ruminantium
MGKFEIETDDLVYIPSDDTFLLAENLEIKEGQSVLEIGTGSGLVSMYASLLTDDVTATDINYNALELAEKNFKLNDINTIRLEFGDLFEPVKNEKFDVILFNTPYLPTDTDDIIDDDLNYAFDGGIDGRKVIDRFINEVSHYLNDGGIVQIIQSSLSNNDKTLDMFDRNGFIAEIAKSESFFFEEIVLINAYKI

SEQ ID NO: 4592 - protein, 298 aa, Methanobrevibacter ruminantium
MKEEISLAKQTKRILQENDIKLNKNLGQNYLIDDFKRKKIINYANLTKEDTVLEIGPGIGTLTIELAKRAKKVIAIEQDETIFNILKKRLEKEKINNVELINGDAVKVDFPEFNKIVSNLPYQISSPISFKFLNHDFDLAILMYQKEFADRMNGKVGTKQYSRLSAMLYFKADVKFLTKVSPESFIPSPKVDSAVIQLKPKNIDSIRINDKEYEIDKETYKTYSKVVKALFQHRNKKARNALIDSRHIIGFKDKKELKSILNDLEDENPRIKEILLERTINLAPEEIMELTILLKDQL

SEQ ID NO: 4593 - protein, 249 aa, Methanobrevibacter ruminantium
MDNPNIDNPAPKKEENVIILDYLKFGYINPERPTARGKPIAQALGVDKFTLIEVTPKQGIDLEIHEKVYIGSGKRDKINRVKGLLDYEKLTATSRIELEYAIKEIIQSKEEIYIKFFNEIDSLNIKMHKLELIPGIGKKHTQMILEERKKEPFKDFEDLKKRVPLLGDPVDMLAKRVSLELDTTQVKRGKKKYYMFTQVPSKHPSNKKRYRRGRNNRNRNNRNRKPNKNRNKKPNNKANNKATNKPKTE

SEQ ID NO: 4594 - protein, 1058 aa, Methanobrevibacter ruminantium
MNFKTKGSLILISLLFILIIGIGMASASEDINTDIDTDYQSDSIDVSDVSLNDEQIASEDSLPNYEIANKSKDKLYDEGEEEEGGITNDDDDENYRIDGIYADYTITPSENGTIFVEGERIQIIFNFTDQDYEPVSGDWFINFYGESTDVDIYHPFEATGLTDYVVPIYLPPGDYVIFFYEGVVFDDFGGIEDEGTQLDVTFEDAEGNQLDNPEFSIRTNYNKKVYANLTIDYSVAELENLVEGDDITAKISLMDEFNNKMTEKVNLEIYRNGENYDSKKVNVVEGQNNNIIFENLQEGNYSLEVASIDSVPKYTNIITKAVNFTVKSNYDPDNYQIILNPEDEKKLVGDSYEMGVKLLNPSEEAEEGSIDLYLNGNFVKTLELNYDEDGYSHHIVEGLQLGPNNATFLYQIRDGVNVSESVNLIRYETESIIDLESSDIIIGDDAKIKASLSYLDGIVKKPINENFKLYIKNYVEDEDEVEFVYDEEFTIKGSETITLSDLEEGTYYISAVYNGKNYKYLATEEESTLEVFPKETRVDAVARTYSTEENVIVGIELADLSGKAIKGTVNVVLDNKTSYQVNTTDDIQHPVELDLGKLGYGLHNIELNYTGDDSEGWLPSYNNAEFLVIYPSFMSIEDGDVTSGSDLTVNISLTGPDDEGINGIITVRIYDNTGKYLINGDFNTTNGVKSIELKNITKDYIIYGRYYGLDTSKIEIGPSNHYLSSEAYGFIRIAEGKSEKTEYDLELTKVNDNTVIASLKDSDSKPVANAELTVKVNGVESKAKTDNNGMANISFSGNSSIKVSYTDANNTTAKASMEIIIINNVTEKIVNQTVEVPVEIEKIVYVNQTVEVPVEVEKIVYVIPNRTDTAFEYENMVTTAVASADGRTGEYFNVRLIDATGKPLAYKPIKIGFNGVVYDRTTDADGRAKLQINLGYKGDYTFAIGFLGDDNYTGAFEVAKITVKLQKPQLSTASKTYKASAKTKTLTATFKSEHGNTVSGKKISFTVNGKTYSGTTNSKGIASVNVSLSKKGTYSFTVKWAGNDQFASVTKSGKLTIK

SEQ ID NO: 4595 - protein, 114 aa, Methanobrevibacter ruminantium
MIGKKTLESEPIPAAKVKEILEEFSEKYELNYEQNLTLAHVTNLNKLSLEDAEKLIEELEAFMTHKQAIRVADLLPRDMADLRLIFAKERNAPSKEDMEQILEIIEKYEIYVEE

SEQ ID NO: 4596 - protein, 96 aa, Methanobrevibacter ruminantium
MQRSRGFKSRSRKKLTKKVRPGRANPITRRIQQFENGDMVHIIIDPSIQKGQPHSRFHGKTAKVVDKKGKAYILALKDGNKAKELIVTPEHLKLQE

SEQ ID NO: 4597 - protein, 422 aa, Methanobrevibacter ruminantium
MNQEILNKAEELINHTNGNICNHCLGRKFSDCVEGDGNEDRGAKIRQALNLEPYKANEDNPANDEKCLICNDLFEDLNTVLDLVNEKIDLLKVEFDTFVVGCKLPKEIVEKDQEISDEFDFNVEIIKKEVNREIGKLLESNLEQNVDFDGEDVLVMVDFRRILKEDIENPIKVRLQINPIFIEGRYRKLIRTIPQTKWPCRKCKGKGCEECNFTGKQYPESVEELLSEVVLKHTNGYEAKFHGAGREDIDVRMLGTGRPFVLEIKEPKIRKIDLKKIEEEVAISAKGKTEYLNLKFTERRRKAEIKESSPDTYKVYRALVKCEDYIKEEDLEKLQTLHIIQQRTPIRVSHRRADKIRQKEVKEIKAEFIDSKTFEMIIKTEGGLYIKELISSDEGRSNPSVSEVLGTQAICAELDVIEVGIK

SEQ ID NO: 4598 - protein, 444 aa, Methanobrevibacter ruminantium
MLGSLGENLTNTMKKLAGMSVIDKKVIKEVVKDIQRALIQSDVNIQLVLKLSKTIEKRALEEEPPKGITPREHVITIIYEEMVNLLGSEAQELKITEKPFKILFLGLQGSGKTTTIGKLCRYLQRKGFSPAVVCTDTWRPAAYEQLKQLTEEMQIQLYGDPDNKDALDLAEKGLKHFKNQKIIIFDTAGRHKNEEDLIEEMNKLDKIINPSESMLVIDATIGQQAGEQAKAFSQATDIGSIIISKLDGTAKGGGALSAVAETGAPIKFIGTGEGIDDFEAFDPERFISRLLGMGDIRSLIEKAEEVIDEDEATKTMNNMLSGKFTLVDMRSQFEMMNSMGPMQQVMNMIPGLGGKIPKEASQMTEDKINGFKIIMSSMTEEEMLNPKIIKQSRIQRIARGAGVEESDVKELLRYYNNTKKAMKGIGRRGMGGGAMNRIMGQFMK

SEQ ID NO: 4599 - protein, 188 aa, Methanobrevibacter ruminantium
MLENLVESLRNAPVVKKGDYDYFVHGISDGIPALNPCVLKEISEVLAERIDLDKVDKIVGVEAMGIHIATALSLETGLPLLVIRKREYGLEGEHEILKHTGYATSKLYINDLNEGDNIVLVDDVVSTGGTLSVVINELKAIGVNILDTFVVVEKGEGKKIVEDKTGENIVTLVKLDVVDGKVVADSLI

SEQ ID NO: 4600 - protein, 335 aa, Methanobrevibacter ruminantium
MSIYDMELKKVIRKINSLNVKNVGLQFPEGLKMQAVAIAREIEKNTEANVIISADPCFGACDVSDRKMNGIVDFIVHYGHTPLPLRYSIPTMFIEAKANVNIKQYLEDALEMLEDYSKVAIATTAQHLHLLDEIVDFLEDHGKEVVIGSSRSTRKGQVLGCNFSSIKNLGADVYLFIGSGNFHPLGIYMFTNSPVLAIDPYSGDIREMSGYADRILRIRFARIVKAREVKKWGIIVSSKEGQYRMALAKELKKLLEDEGMEAFILLMDHINPDVLLPYMELEGFVVTACPRIAIDDSQMYKKPVITPKELEIVLNKREWEKYQLDEILFEDRYYQ

SEQ ID NO: 4601 - protein, 153 aa, Methanobrevibacter ruminantium
MNFEFSILGLFLLLLLFVPNIIWTKFIPKDYENYSKRENKILLILERIGEVATVVFALFCGAKFSWSLLLIIIFILMALYEVYWIRYFMSSHTMKDMCDSLLMIPLPGATLPVIAFFLFGIYSNSIFLVISSIILAIGHIGIHYNHKKQCNLN

SEQ ID NO: 4602 - protein, 188 aa, Methanobrevibacter ruminantium
MKVESGDFVMPGDFLSVSEEFLPGPGAYEDDGSVKSGVPGNVFVDNGEKEISVISKSGGPNLLKVGDIVYGEVKDVRGQRALISVYAKKGTDRQLALPYMAAIHISQVTPGYIDKLTDAFRIGDLIEAKVVKIMGDNLDLNTEDITSGVVKAMCTRCRAFMEPRTESEVYCPVCNRKEKRKVSKNYDY

SEQ ID NO: 4603 - protein, 92 aa, Methanobrevibacter ruminantium
MEIEVIKESKLELEMIIHGENHSLCNVLRKYLMEDDDVEYAVYGIDHPLTGAGKPVMTIKTKRSKRPRNSLLKAATRLKEETAEFKELIEEL

SEQ ID NO: 4604 - protein, 138 aa, Methanobrevibacter ruminantium
MAYKIPSLTVDIFIFNDEKEFILIKRKNDPYKDFWALPGGFVDYGETTEHAAVREAKEETSIDVELIKLFNVYSDPDRDPRRHTVSVFYLAHGDMNDAKADDDAKDIGIFSFDDLDNLDLAFDHRMILNQVKEYFDKE

SEQ ID NO: 4605 - protein, 131 aa, Methanobrevibacter ruminantium
MEFCPKCNGMMMNTTVKVKKEDLEEKVDEENQSNQETEEEKVVFKCMTCGYEKDPSEVDQDQYKVKETVESSDSVIMRGDESGMRSTVREICPKCGHDRASYELLQTRSADEAPTRFFTCEKCHHKWRGYD

SEQ ID NO: 4606 - protein, 539 aa, Methanobrevibacter ruminantium
MSNSQNDGLEDVSKGNNESAGENTDSTSNKKTRFTKSKSISEVFKELDSQETNDSILDSEDAASELESEDKYSNIENYLSEAESEEEILDASSEAESLDASSDVEFEEDIIIDSTAEEEIDEIIPIHNEYKDLDESEAFNTESIDEEEISESSELDNYVESIVNEKDDLSSDELVDSKENLDAVGGDEGSMSVKDIENASFEAEDTSLDAEDYEDDSIDSEDIDQSYEEELLDENMKVIKVNNASSEDVLSKKNKGFLSSFGSIKMDSSFIITVLSFIVGLGILIMGIFYLNSSSDRVVDNVLSGETAGLAVFLIIIGLLIIGFSILRFLSSTKADQSSSMLDMFKSIRDIDYDDVKDDNISRDDFDSVFSSVFGKEKRSDFSNDDGDKSSVDKNLFDEDDEISDEDIDALYSDSNLNKTASSTKNSTGIQDTDNIIEEDLDDDFDMIDSDNSEDFDNDTDLEDDNVSDLKDKYSKYNFDDDDAPSKPQFKKSVDISKFDDDGLSEEELEAERRRKAEELEEKKRRIIQGTNFDNSLRK

SEQ ID NO: 4607 - protein, 244 aa, Methanobrevibacter ruminantium
MFKAELSDSSILKSSFDAISSIVDEVQIQTDSEGFRLDALDRSHITFVHLELKASLFDEFVCDEPEKINIDTDELMKVLKRSKSDDRVLMSLDEGNFILTFEGEATRTFKIRLIDIEYDSPAPPSLNYPTEFEIPFSLLKDSIQDMDIFSDKITLMVDPEYFKAFAQGEFGDANIEYLHGEKIDASAKSIFSLEKIREMLKADKFSDIVNISLGDDMPVTLTLRRVANDGELSFLLAPRIESEE

SEQ ID NO: 4608 - protein, 537 aa, Methanobrevibacter ruminantium
MDGDFFQLLRRVQKEERTKSTLARVDKDFYKQLYSYIRDLERSVAQNPFDTAQSNLLNNAQRIATEICQWRESKISTAANNNIYRSFHLFKKGNPQFDLIDTTPLHLTPEEETLYFALMDALKTHRYNISLDKFGDEKADWGADDYEDEEEDDFEEVASVVKSRVNKGVVSDEEFFNEGGSSNESVTDGFSGESISIEESGADPVVQEPAVETPVEESSGSGFKQEVQESAVETTNTNVGGSDEVLDRLNQIKNSTVVTDEKYEPIEKQINNQAKVVPNVSMSNNLNYESKNYNGQDNEFDSKLKPDYESDVESEPKIESKPKVESAPRIESKPKVESAPKIESEPRLESKPKVGSEPRVESKPKVEPKTIEDRPKRKSSSTLDFDSIFANPDSQFDSIHNFEPDYEADLANIQASSSFAEPSEADLMFSTKPRPKKEPKPKSQVGSKEEFESRPKVEEPSHAPTAKAERPRSQSIKAFAKKEELENTTVVIYKNIDSFMGIDEKIYGPFIANDVVILPNITAQILIDNNKAGLIDI

SEQ ID NO: 4609 - protein, 92 aa, Methanobrevibacter ruminantium
MKMPKEKRTYCPHCKRHTIHEVHTSKKRKASELKWGQRQFRRVTAGYRGYPRPLPGGNKPVKKLDLRYKCKECGKSHIRKSFRVGKPEWVSN

SEQ ID NO: 4610 - protein, 59 aa, Methanobrevibacter ruminantium
MASNGRGNFLRVKCLDCDNEQIIFDRAASDVKCIICGKTIVKSRGGKAKIMAHIDEVLD

SEQ ID NO: 4611 - protein, 260 aa, Methanobrevibacter ruminantium
MVRKSQEWPNEGELIVGTVYKVLNYGAFANLEEYAGKEAFIHISEVSSGWVKNIRDHVRENQKIVARVLRVNPKKGHVDASLKRIREDQRTKKIQQWKIEQKAEKFLELAAKSLDKDLDTAYDEVGYELMDIFGDIYGAFESAAEEGAETLTEEGISQEWADAITEVAVKNIQPPEVHITGYVDIESYAPHGVEIIREALLAAEDENIEVQCVGAPRYRITVTSTDYKLAEGQLKEAANKAIDIVIENGGKGEFLREIDN

SEQ ID NO: 4612 - protein, 56 aa, Methanobrevibacter ruminantium
MKMKMKKCPVCNIYTLKPQCPNCGGELRVIYPPKFSVEDKYGKYRRQLKKEMLNKE

SEQ ID NO: 4613 - protein, 262 aa, Methanobrevibacter ruminantium
MRTTQFKVLEEVKLNNPIFIEALPGVGHVGKLAIDHVIDELEATKFVEIYSPYFPPQVLVGEGGIVEDMKNELYYLKSAGGDERDFIFLVGNCQGLNPEGQYELCGSILDFVESLGAKEFYTLGGLATGQPLEGVEDRVLGAATDEERIEMLKEADIEIRSADGGIVGASGLFLGLGRLRGMKGACLMGKTPGYFIDAEAAEAILAKLAILVKLEVSTDELEERANEIREMINKAQEMEQEMINRAMGQQQAQTQDDLRYIG

SEQ ID NO: 4614 - protein, 395 aa, Methanobrevibacter ruminantium
MLQIAVTGKPNVGKSSFFNSATASQVEMANYPFTTIDANKAVGHVISECPCKELGVTCNPNNSQCIDGTRLIPIELIDVAGLVPGAHEGKGLGNKFLDDLMQAKVFIHVIDASGGTDAEGNPVELGSHDPLEDIEFLEHEIVMWMYGIVSKNWVRLIRKVEAEHLDFSKVIFEQLSGTGILIEDVIEALRTVSPDYGKWEDEDLIEFVRNLLNIAKPSIVIANKADLPGAKENIERMKEKYPRVIATSAESELALVNATRAGLISYISGDNSFEILEKDKLNPNQIKALEYIQTNILDVYGSTGIQEALNTAVFELLNMIVVYPVGDEHKFTDQKGNVLPDAFLVPKGSTPREFAYIIHTDIGDKFMHAVDARKNMRIASDYEIQDRDIIKIVTR

SEQ ID NO: 4615 - protein, 372 aa, Methanobrevibacter ruminantium
MMHPRPSPIAASLYTLRDLNADVIIMHGPHGCCFRTGRLLESDGVRVVTTAMAENDFILGAADKLEETLQEAYDTFNPKLIGIVGTCASMIIGEDLKEPIENLNLDAVVIPVESHGGFGEGDNTEGAIAVLNAAVECGVIPQEEADRQNEMLRLATVVEKTRGMAQGKYIKPNFGDNKEKVAKIVVKAVKEGKNVAFVLNAKKETSYLFADILNCDFSKLFQDTDSNIKSNKDIENLHFIANLDENIGLPRIRQHAVNITKELNETGIDIECITGGLDEYPITPRKAEEYLNELNPDLVIVAGVPHALYVEELDCETIAVTDGPRLVQPLNELGYSHVIAELDAHSKTLGVDEIVDSDFGMMIRSAIEWELE

SEQ ID NO: 4616 - protein, 197 aa, Methanobrevibacter ruminantium
MITIIDYKSGNLRSISNSFKKIGSKAVITSNPEDIANANHLVLPGVGAFGTAMENIEPYKDLIYEHIDDGKPFLGICLGLQVLLSSSDETPGVKGLDIFKGHVEKIPEGRKIPHMGWNQLKQVKPCPILDGVDGKDFYFVHSYYAVLDDESNLSGICDYGVDLTASVSRDNVFATQFHPEKSGVPGLKILKNFVNLE

SEQ ID NO: 4617 - protein, 206 aa, Methanobrevibacter ruminantium
MGKFKFIFILVLALFLICGIAAVVDAPDSFDGSLNLIPVSDSSVSQSDSSVNQSDCENGTCSVDLNKSEDNSSKETSDDEIDYDSKYYDDSLIDGLYFCNDLEHAFKDAKQHHKNVMIIFDGAACIYCEYLKDEGLTDSDIQKEINENDILLMTYTSDSPELSQKLEIYGTPTTVIFDENGTELGRIEGYESPEQFLSELKEYNGK

SEQ ID NO: 4618 - protein, 205 aa, Methanobrevibacter ruminantium
MEIMPIISFFIGVISILSPCILPTLPIIAGFSLKAESKAEIVAFILGLFSIFTIIIFLTGFFTTILFRYIVYVRVIAAFLLLIMGILMFFDYNLSFGSVKSRSGEGIVNSFILGFLTSVAWADCYSGYLISLITMLVSSSPLYAVFNIFIYVFGFALTLLVLCLAISKIDLEKLIYKSGYIPKIFAVLIIIGAFYMFYTSIQVFL

SEQ ID NO: 4619 - protein, 230 aa, Methanobrevibacter ruminantium
MIYSKEIENMCPVHKGADHGPAPIPEEGRWVKSKEISDISGLTHGIGWCAPQQGCCKLTLNVKDGIIEEALVETLGCSGMTHSAAMAGEILVGKTILEALNTDLVCDAINTAMRELFLQIVYGRTQSAFSEGGLPIGAGLEDLGKGHRSQVGTIYSTKVKGPRYLELTEGYITEIGLDEDDEIIGYKYINMGVMLDLIKDGTDPMEAIEKASGQYGRFEDAVKKIDPRKE

SEQ ID NO: 4620 - protein, 332 aa, Methanobrevibacter ruminantium
MSLFESYERRIDQIVPVLEKYGIKDLEEAKAICNEKGFNPYDIVKSVQPICFENACWAYTLGAAIAIKKDCKKASDAATAIGEALQAFCIPGSVADDRKVGLGHGNLASMLLSDETECFAFLAGHESFAAAEGAIGIANSANKVRKEPLRVILNGLGKDAALIISRINGFTYVQTEFDYFTGEVKVVREKAYSDGERAKVRCYGADDVREGVAIMHLEGVDVSITGNSTNPTRFQHPVAGTYKKECVLQGKKYFSVASGGGTGRTLHPDNMAAGPASYGMTDTLGRMHSDAQFAGSSSVPAHVEMMGLIGMGNNPMVGATVAVAVAVEEALK

SEQ ID NO: 4621 - protein, 468 aa, Methanobrevibacter ruminantium
MYTFLICLFALILSYFVYGKFLERIIGVDETAKTPAYELEDGVDYVPMNKYRALLVHFLNIAGLGPIFGAIQGALFGPSAFLWIVLGTIFAGGVHDFFEGAMSVRNDGLSMPGIISKYLGDRVRKFFAVLIIITCILVASVFASGSADLLSSLTNIDIHIWLVAIFIYFLIATLFPVDKIIGKIYPIFGALFFIMAVLLISALILNPNYSLPEFTTAGLYLTDKAIFPFLFVTIACGAISGFHASQAPIVARCVKNEKDMHMVFYGAMVIEGILALIWATIAMSFFHGQPQLASIYGSSPSIAVKEMSIALIGTVGLVLAIIGVVICPITSGDTSLRSARITIADELGLNQDKLKTRLKISIPLFLVSFGLTFIDFSLVWRYFAWSQLIVAIAVLLAATVYLIDNKKHFIVTFAPAIFCTVVAIAYILQASEGLRLDPFISNVISVIVALALSVYFILKYRKQPNTTT

SEQ ID NO: 4622 - protein, 81 aa, Methanobrevibacter ruminantium
MGIFSFFKKDKDKEKVESHEEVHSIQINAENCQGCGRCVSVCPNNAYELIEGKSSLKENFTCRDCKVCLAACSNDAITFVN

SEQ ID NO: 4623 - protein, 260 aa, Methanobrevibacter ruminantium
MKIFINADTYKEIAQITKEKLIETANELGIEISEDINEADIICSIGGDGTFLESSKLALQKPIIGINCGTLGYLTDVNPEGIKKAMKDIIDGNYYIEERMMLEAEIIKESGEIIKMPPALNEMSISKNIFGVVRFDAIVDGKLINSYTADGILICTPTGSTAYNLSCGGPIVDPTAEIITITPIAPHTIINRSIVLSDKSIVEIKITELREHTSSYALSDGKSSEIETGDILKIKKSDAKTKIIKLNWQSFIDTVRDKIN

SEQ ID NO: 4624 - protein, 456 aa, Methanobrevibacter ruminantium
MDIEGFVRGRLTKGEDEEELKSILAERIREFKDISEEHSLLMAESVIDEVKTTLELNNTEDEFLKDIITVPKANVGMGKMGVGSRGAGDFFVHRKIAQIVKSTNTQSVVDPNAQDDGGVVKVPAPGDDVYITTAVDGIHSRLSEYPFLGGFHVTRATLRDVCVMGADPVAILSDLHLADDGDIGKLFDYTAGICAVSELIDVPLVAGSTLRVGGDMVLGDRLVSCVGSVGVSQHPPTARKGATVGDIILMTEGAGGGTITTTALYNGYFDVVWDTMNISFVKASKALFDADLVKDVHAMTDVTNGGLRGDAHEICETTGVGLEFYHDKIKTTVAPNVLNMLEDLDIDPLGVSTDSLMLVVPPEIADDVVKTVSDVGVYITEIGKVDDEGSPRLIKEDGSVDTLVPLFREAAYTKIKKLVGDTTPEDFEIMKEKVQKAADDSIRKKERVIDYILNNN

SEQ ID NO: 4625 - protein, 137 aa, Methanobrevibacter ruminantium
MALEGAERIDEFISEAKVFFLATVDGDKPKNRPLGFHLLKDGKIYFGVGNFKDVYKQMEANPYVEIVALVETDFLRYYGKAVFEETYDMADAIVAGNEFLQGIYNDETGFKLAIFHLEEATAEIRDITGKINESYNF

SEQ ID NO: 4626 - protein, 131 aa, Methanobrevibacter ruminantium
MSLFKNFIGNFKKSDVLDLAKGFKLEYEANNLENMKSIVDKFVDFHPDSYFASCSMVIYIIQLYKKDPLKVSPNMLNNLSIMERNIKFYDNSSTDSLDNEELELRQWFKKEVYENVKYMESAGLRFSADDK

SEQ ID NO: 4627 - protein, 52 aa, Methanobrevibacter ruminantium
MQLNKICLAAIVLFVLFTILKFVMKWSFKLFAIGIVICIILAIFGFFKGDDL

SEQ ID NO: 4628 - protein, 212 aa, Methanobrevibacter ruminantium
MSSNSDKDILKELRDITKDKESWKSNINHVAVKLNDDFSLSVKAKVLWLLGEMGLKHPLEIEEYVDDIAVYLEDDHPKLRERSANAIGRIGRADKNLVINYMDKLMKLSDDESESVRHAFIWACENIAVNAPELFCEKLDIFYEMISDPGEKVRIEAPEIFRVVGKRNPSCVKPYLDKLEHIAENDENPVVRIHSAGAVRITRKALKESDNA

SEQ ID NO: 4629 - protein, 230 aa, Methanobrevibacter ruminantium
MGFFSNMRKPEGKLGNIQLKSMNKEHTPVSLWGLKHLDISPEDTILDIGCGGGMNINRMAQTAKKVYGVDYSIESVNLSKEVNADFIRSGKVEVYEGNVSNLPFEDNSFDIVTAFETVYFWPDIEKSFGEVKRVLKPDGMFLIGCESNGANNLAMKFFDRVIDMELYEDNELYGFLKNNDYGDITIYLRDGKNKQEIIKKDDKTFVIDDDYDNFSISDRWVQWMTITAIK

SEQ ID NO: 4630 - protein, 153 aa, Methanobrevibacter ruminantium
MLSLIKDNKGFLSLIDAILSIFLIFIVLISFNMIVDMEMPSLSEDNNQFKTSQDLMELMSSKIDGRDYSTLERISYVLSSNDNSIASRREVKNILDDFFSAHLGSDYKYVFIETNQLNGYVLSSDGDYSTADEVSLAIRNYGNYSYKLYIFKA

SEQ ID NO: 4631 - protein, 452 aa, Methanobrevibacter ruminantium
MLNANTYVTEEEGIGGTIRNRWEDFYVEEIPEVIPDGEGPNIYIWIEKLGRTTLDVLLDIARDLHIDRKRMGFAGMKDKKAITRQWICIANMDSEEQFAQVEALAGTIHNTEFLKVIRGRKKLRMGQLKGNKFRILVKDIDGMESDNEETRKLAIEDAAKRADAILKTLEKTGVPNYFGWQRFGKPRTNTHLVGEALIHNDLKEAVRRYIGNPSEEESEDSRKARQAFDDGNWEESLELMHPGMRYEKMMLKVLLKEKRRAIRKIAEEEGIEIEEVDESKVELSDKAYKNAIHALPKPLQRMFVHAYQSFLFNAAVSERVAMGMDKYIEGDIVIDKEERIVRDKTPEEFQEMVSSFEINQTCPLYGTKVPFAGGEVGKMEEEILNSYGLTRDDFEVPKMPRLGSHGLRRSMRFQVWDASATATEDGVMCEFSIDKGSYATAVLREVMKKDVY

SEQ ID NO: 4632 - protein, 401 aa, Methanobrevibacter ruminantium
MEERTGLFSNGVIWFGVAISVSEIEAGIQLASMNTLDSIWLPLVLGHIIGGILLFSTGLIGARLRLNAMETIKSTFGNYGSKFFSTLNVLQLIAWVAVLNAQGASALMGLNLPISFPLTCIILSAIIAVWVYVGLRRSSKITTIMMIVLTALLVILSVKLLGVHISNALPIQNINSTALSFWSIFEISIAMPISWLPVISDYTKDVENPVNGTLVSAIAYTIASLWMYFLGIEIVGIGTTSIAQSILLAGLGAQGVIILVLSTVTSNFVAANSAGESAKAIFNRINPKIAGVVVSAISAILAISGIMDHYIGFLYLIASVFAPMAAVLLVSFYLSKEETGNARIWYWNIFAWLAGFIVYQATVNLDSIFLGPTLLAVIVSAILAYIPILLKNKSKLPNISK

SEQ ID NO: 4633 - protein, 280 aa, Methanobrevibacter ruminantium
MNETIKTLTIQDISCYGQCSITVALPVISAFGIETAILPSAVLSTHTSGFTDFTVRDLTEDLPEIRKHWEKEGIFFDSIYTGFIASAEQLDYIKDIIDSRLKENGLVFVDPAMADHGEFYNGFDQEFADKMGELCKLGDFILPNTTEACFILHKPWKESFTKEEMLEMAKELKAFTKRYVILKGYEEEDKMGMIVLDKIEDTIDIVYNEKINYVSHGTGDVFASSFVGSTMLGKSPSAAAKIAGEFTKKAIEKTIGDETHTYGVKFEQAIPELYDLLKSI

SEQ ID NO: 4634 - protein, 224 aa, Methanobrevibacter ruminantium
MDWSPIFISMKTASLSIFITFFLGLIVAWLLVKIKNDTTKIVLDGIFTLPIVLPPTVVGFFLLYIFGIRGPIGSFFLDFFAVKIAFSWPATVIAAVVMSFPLMYRSARGAFKQVDSNLLDAGRTLGMSEWKIFWKILFANALPGIISGGILAYARGLGEFGATAMLAGNIAGQTRTLPMAVYSEVAAGNMGTAFDYVIFIVAISFIAIFIMDYFSIRKENQWKN

SEQ ID NO: 4635 - protein, 274 aa, Methanobrevibacter ruminantium
MDSKKILMIAVVALIAIVAVSSCSAGFLDFLGGDNATDDSLNGKEVNLAAAASLKNVYDDELIPMFEAKYPGVKVTPTYASSGDLQTQIENGLETDVFMSASNKQMNALADEGLIDNDTNLQFLENKVVLIVPKDSDLNITSFDDLKDVKGTIAIGDPESVPAGQYAKEALTNLGIWDAVESKFSLGTDVTAVLNQVAQGSAECGIVYATDAKSNDDVKVVCEAPENSLNTSVIYPVAMIKDAKDADAAKAFLEFLQTQEAKDKFVEYGFTIHE

SEQ ID NO: 4636 - protein, 129 aa, Methanobrevibacter ruminantium
MIECRNISKGKAEGELIVSDEAISFLGGVDPETGVVIDPNHELKGQSIKDKILFIPGGKGSTVGSYVIFQMMKNNTAPKAIICLKAEPIIATGAIMSDIPMVDSPSSVEELVNGQMVEVDSDNGKIEIL

SEQ ID NO: 4637 - protein, 412 aa, Methanobrevibacter ruminantium
MPSLYIKNVNIINPFSEEPLDERHVLIKDGRIESLHAEESALYANHIVLDGEDNYLLPGFIDSHAHVMANGFHKEDTMKNPLALHFYNAIENMKATIDAGVTTVRDTGLADIGVKMAQERKIFPAPRLNISIKPLAITGGHFDFYLNSGFDMELAYPGFPIGTCDGVEDVLKKTREVIRARADFIKIMASGGILSPNTSPEFAQFNKKELKTIVSEAENYNLKVAAHCHSLEGIQRCVKAGIKSIEHGTFIDRKTSELLAKKRIYLTPTLIVHQTLIKEGFPVWDNFADDKVKKLKEVVKIQKENIETAYQCGVKFLMGSDCGVIDHGRNLGELKQLVDIGLSPLEAIQAGTIEGAKFFNQENDLGSIETGKIGDVILVKENPIENIGSLVDNDNILAVIQDGKILKDKPIY

SEQ ID NO: 4638 - protein, 82 aa, Methanobrevibacter ruminantium
MNEADFIQEIMKQANLSEDQGGQVNDIFQSTFLAGNKNKDTIVNLIAEKLGVDAAQAEQIYDIAIGLLASGVLSKIKGLFKK

SEQ ID NO: 4639 - protein, 68 aa, Methanobrevibacter ruminantium
MAEKELNVVGMHCPSCVMAVELSMKDLNGVDDAKASLDTNSVTVEYDPDKITDADLVGAVKEAGFDVE

SEQ ID NO: 4640 - protein, 826 aa, Methanobrevibacter ruminantium
MAQKELDIPVDGMHCSSCSLLVEKSLGKLDEVESINVDLNTNKAHMVLKDNLSPETIDKTVESVGFTVPKEEVVIQIAGMHCASCVNNVEKFLPRVDGVVEANANLSNQKVTITYYRDMLNLKEIQKTIEMLGFEYIGLDGELDIMDEEERYQKDLRGKLYRIIVGLVFAGILMAIMHFHITIPPLTMGQLSLIIAIFPFCYVSMPILKAGWNSFKHKNLDMDVMYSMGILVAFVSSVLGTFNIILDSSFMFYESAVMLPSFLTIGRYLEARAKRKTSSSIKELIGLQPKTATLITSDEEGNSIEKEIDIEDINIGDILLVKPGEKIPADSIVVDGESYVDEAMITGEPVPKLKKEGIDVFSGTINQDGALKIEAQKIGSETVLSQIIQLVEKAQGSKPPVQRLANKIVSWFIPVILTIAIVVFCLWYFVAGAGLLFSLTCLISVLVVACPCSLGLATPTAVTVGVGRAAEYGILIKNGETLESSKDVDVCVFDKTGTITEGKPEVADIETFDMAGDKFLQVLSSVENNSNHPIAKSILNRFKSDNLKLTEEGKDDLALLEVSDFENITGKGLKANVVVDENNSSVLAGNLKLMESEGVEVTDEVLDKFNTFVSEAKTTIVMAIDGEIKGIITLMDKIKDNSKSAIDELHKMGIETYMLTGDNEKTASTVANEVGIDNVIANVLPNDKLDKVQELQKEGKRVLFVGDGINDAPALSQADVGVAMGNGTDIAMESGDIVIMEGDLENVVASIQFSKKVMTRIKENLFWAFAYNMLLVPAAAGLLFLLFGIVFKPEWAGLAMALSSVTVISLSLLLKRYVPPIKRNKV

SEQ ID NO: 4641 - protein, 492 aa, Methanobrevibacter ruminantium
MRIKYLSKQDIKIILHYLGYIMIGIGAILLFPLPIDLFYREFNYVYGVIPPLISIILGVIFSQGFREYDKLKFKHGMIISSISWLWAGLVGAIIMMLILDVSFVDAFFENISAWTGSGLTMFSDVESLPMSILFLRSVEQWIGGLGVVIIFISLLIKPGTSAFKLYKSEAREDRIKPNIKNTLKKTMQIYAIYTVIGVILYLIAGLPLFDSINLTFTTISAGGMSIKNANIGFYQNDIVYIITIFLMILGATSFTVHYKMAKTKGKAILKDIQFQLLIVSIILSAIAIAIITKLAPMDVVFHVVSAITTTGANIAPPSEMAAWAPPALIIIIVLMLMGGSSGSTVGAIKLVRVITLLKSTHLAVTNIVSPGRFVKIKISGKSINEGEMKEASSYMAVYIFFLAISWIIMTYYTNDPFNTLFDVVSTLGNVGLSTGIISGELGTIPKVVLIFLMWLGRLEIIPILLTIQIGFETFNQSLRFVKRRMMRKIKPN

SEQ ID NO: 4642 - protein, 551 aa, Methanobrevibacter ruminantium
MFYPKIEEVKEIAKDDSYKRIPISYEIFSDTKTSIEVLRRLRILSNHCYMLESVEDSKNWGRYSFLGFNPILELTCQDGELVIKGKSSFSDCGIEDEKDKCFSIKTDNPGEYIREIIEENKSPKLENIPPFSGGLVGYFSYDYIKYSEPSLILDAQNQDAFKDVDLMLFDKVIAFDNYKQKIVVIVNMKVNDEDMLKNESIEENYQKACNDIKDIVNIIKADNIVDLLNDDFKDQLTNKKTIKSLEEMKGLKTLEELDRCRKEITKHLPIELKSDFRYLFSKEEYCDMVERAKHYIREGDIFQVVLSNRIEADIEGSLFDVYRVLRTTNPSPYMFYFSSDDIEIAGASPETLVKLVNNQVYTFPLAGTRPRGKTDEEDRQLEEELLADEKERAEHNMLVDLGRNDIGKISQIGSVKVNRYMDIVRFSHVMHIGSTVEGILRENYDYLSTIDSILPAGTLSGAPKIRACEIINELEDNKRGIYGGAIGYIDLTGNLDTCIAIRIAFARDNKVFIRSGAGIVADSVPESEFVESINKAQAVMDALRLADGGIE

SEQ ID NO: 4643 - protein, 208 aa, Methanobrevibacter ruminantium
MILLVDNYDSFVYNLYQFIGEALANIKGYDLASKGDLYKIYEEIKVIRNDEMTVEELRELNPDYIILSPGPGKPKDAGICKDIVKEYINSDVPILGVCLGHQAICEALGTNIIHAKELMHGKTSIIELDEDKIFKDISDPIQIARYHSLAVENDSLSNDLIVLARTDDNEIMAVRHKNANIYGLQFHPESVLTPEGLKIIENFLNIKN

SEQ ID NO: 4644 - protein, 335 aa, Methanobrevibacter ruminantium
MIKEAILKVYKDEDLTYDEAYATMDEIMSGEASEVQMSAYLTAMSMKGETIEEITASAEAMRAHCVRLLNDEEVLEIVGTGGDGSNTFNISTTSSIVISAAGVPVAKHGNRSASSKCGAADVLEELGVNIHISPEKSLACLKEINLCFLFAQNYHLSMKYVAGVRKELSIRTIFNILGPLTSPAGASMEVLGVYERELIEPLTDVLKNLGVKSAMVVYGLDGMDEISASDKTAVCELKDGKTRTYEISPEDFSMDIASKEDLVGGDANENAEITLAVLNGEKGPRRNAVLLNSAAGLYVAGKVDSIEDGVKLAEEIIDSGKALNQLEKFIEVTNR

SEQ ID NO: 4645 - protein, 258 aa, Methanobrevibacter ruminantium
MLKKIVAKTEERLIEAKKIKSLDKLKEEVSKLEINNEFPFKEALKDPEIAIIAEVKKASPSKGLIAEDFDYIKIAKEYEQAGASAISVLTEPYFFQGSNDFLKEISQNVSIPLLRKDFTIDEYMIYEAKILGASAILLIVSILDNVQLKNYLDLAHDLGLSAIVETHDADEIRTAVDAGAGIIGVNNRNLADFTVDIENSIRLRSLVSDKILFISESGIKTAEDVGRLKKNNVDAVLIGETLMRSDDKKSMILELKNG

SEQ ID NO: 4646 - protein, 217 aa, Methanobrevibacter ruminantium
MLKLKICGLRRKEDIDIVNKYNIDYIGFVFAGSPRKVSYEQAKELSALLREDIIPVGVFVNEHMKLIVDLYKEGIIKIAQLHGDEDEDYIKNLKAKSLEQTGHEIPVINAIEINNANNYDNFNDKLLEWRDSVSDYFILDSGKGSGKTFDWSLLDKNSEFFKNSIFLAGGLNSENLDSAIKEFNPYAVDLSSSVETDGFKDEEKIKEIVEIVERYRN

SEQ ID NO: 4647 - protein, 394 aa, Methanobrevibacter ruminantium
MSRGRFGVHGGQYMSETLMNELLNLEKQYNHFKEDPEFIEELNTLLKEYAGRPSLLYYAKRMTEDLGGAKIYLKREDLNHTGAHKINNVLGQCLLAKKMGKTRVIAETGAGQHGVATATAAALLDMECEVFMGEEDTKRQALNVFRMELLGAKVHTVTTGSKVLKDAVNDAFREWISRVDDTHYVIGSTMGPHPFPTIVRDFQAVISQEMKEQILELEGKLPNMVIACVGGGSNAMGSFYNFLDDEEVELVGVEAAGKGIDTEYHAATIAKGELGIFHGMKSYFCQGNYGQIAPVYSISAGLDYPGIGPEHAYLHDIGRAKYVSATDDEAVEAFEYLSRTEGIIPAIESSHAIAHAMRVAGDMDKDDIIIINVSGRGDKDVAAIARYKGVELYE

SEQ ID NO: 4648 - protein, 260 aa, Methanobrevibacter ruminantium
MEKDIKISDAFKDGKAFIGFLTAGDPTIEKTVEYVLAMEEAGCDLVEIGIPFSDPVAEGPVIQEANIRALSNNTNTDDVFEAIRQIREKSDVPLVFLTYINPVFYYGYDKFFKRCQELNVCGIISPDLPYDEKDEILEVTKKYGVDIISLIAPTSKERIQMIASEASGFIYVVSSLGVTGMRSEIRTDLKSIISDIKEVTDVPTAVGFGINTPEQAKNISKVADGVIVGSAIVNIIAEHGENAREPLANYVKSMKDAISK

SEQ ID NO: 4649 - protein, 462 aa, Methanobrevibacter ruminantium
MQGKTLDTRTRNLILILFLIGVFMGSLDTGIIGPVLPSIEQSFHLTSRESSWIFTLFVITFMIGSPVMAKFSDFYGRKKIFILDVLLFGIGSCLIAASISIELIFLGRLIQGFGCGGIFPVAGAFVGDGFPLEERGKALGILGSVFGISAIGGPLVGAALIPYGWNWCFTINIPIAIFLIIFAWYILPDSDNDRKLKIDYLGILILSLLAIFLSYGLNQIDSSNFIASLLSLNVLPFLVIFIILIPIFLKVEKKAEESIVPIHMLKNKEISIACIETLCYGIIYSSAIFIPSLVILSMGLDDQLASLMLIPILGANAVAAPILGKILDKTGSKKLMAMGTMILAIGLIAIAIYPSNLIFFIIAGCLIGVGLVTIIGAPLRYIVLTEAKPYERGAGQAIVNMLSSAGQLIGGALIGGIIASFTGILGYQVSLIIAAIVALIAFAFTLRLKGRDEQIATMKANQ

SEQ ID NO: 4650 - protein, 454 aa, Methanobrevibacter ruminantium
MANENVELMRGAPEIAVKKLAIPIMISMLLTASYNIIDGIFVAGLGQAAIAGIGFVTPIFMILNGVSVGLGSGATSSISRFVGAKNHEGANKSATHALLIFLIASIILTIIFLFIQEPLLRTYGASGQSLAEGLKYGSPLFLGLFTFMFANGGSGILRGEGDMKRAMYAVIVSVILNTCLDPIFIYTLGMGSAGASLATIVSSAGSAIVIMYWILIKKDTWVHVELKNFKFDSNIAKDILKVGIPASMDMFMMSLAVSLYLIFISTIGGEFGIAAFTSGQRLYLFAIMPLTSIGSAVAAVAGSAYGARNGDYLSRTHIYGAKFGIAFGTAVTIILIAFAPQLATIFAYTPETAPLVPEITQFLRIASLCLPLTGAGMCSSFLYQGIGKGTISLMWTIIREVIFTVSATYILGIVLGWGLVGIWTGLAIGRITASILNFTFARFTIKKIRENFGT

SEQ ID NO: 4651 - protein, 137 aa, Methanobrevibacter ruminantium
MPFIALIHHISQNKLRYARKNPNHIDMVHEGRYLMEIHKRKNLSQDDLANIFGQSKGTIAKALRKLEDKGYVERIINQNNRRKYILKTTQEGEKLAILLEEDLSSWEEAVGIDKLDDETKNQLRKIARKTEEILKEE

SEQ ID NO: 4652 - protein, 227 aa, Methanobrevibacter ruminantium
MIGNDWDNALEDEFNKDYFIKIKEFVEAEYKTKTIYPPKEEVFNAFKLCPLDNVKVVILGQDPYHEKGQAHGLAFSTPEGHPIPRSLKNIFKEIKEEYNYPIPDSGCLESWAKQGVFLLNTVLTVEEGNANSHSKCGWQTFTDNVIKILNQQDSPIVFLLWGKQAELKKELITNPNHLVLISSHPSPFSARRGFFGCNHFKLANEFLKDKGLEEIDWQIKNVQTTLI

SEQ ID NO: 4653 - protein, 243 aa, Methanobrevibacter ruminantium
MKYLIINGSPRKKNTWAMVKQAKTNLEGEFEEIQLMKTKIPMCNGCFKCIMEGEDKCPHFETVHPIVEKIKEADGLIITSPVYAMNVTGLIKNFFDHTAYIYHRPEFFDKKALIIVSTAGAGHKNVAKYMDETLRHWGFNKNHKITYACGGKDTINTEEINKTAQKFQKDVSSKKLHSPKFMDIVFYNVWRAMAVSKDPIKADKEYWEATGLVNYDFAPNVKLGFFKGIFAKIVFAMMKKVIK

SEQ ID NO: 4654 - protein, 447 aa, Methanobrevibacter ruminantium
MAKKNTKEKIFDSSIDLFSQYGYTNTSIRQIAKEVGIKESSIYNHYQSKEAILESILNYYISEMLKEEAPIMQSNDNLDLGFEYFYKQGSDRFLSKLSEERMMKITRIFLVGSYHNEKMKAFVKEGIIDYAIKGWEELFNLMKEKEIIRKDANSKQLAESFYSYGIFLLYEHFIFNYPEDDEKFLKDFERRTTDHMKIIFNSVKINNEESKIDNNKNNPSSNHDKENKELETEIMRLEEEKDYKKVENLVRDAFWNIYRPGAYEHFIVYNLREDPSFIKDLAYIIEEDDEIIGHINYSKGNLNLYKKNNQGMEKINDWNEEAVVLGPIAINPKYQNQGYGFRLIKHTLRLAKNKNIPYVFVIGDENYYNRFGFESASKYNLFLEGTDTSEENPFFMIRIFKDLFKDKDYDRGIFYNPKVFNVSQDDVDKFDENFEYKQKRVQEGQLE

SEQ ID NO: 4655 - protein, 342 aa, Methanobrevibacter ruminantium
MFDAKFQYTNKIINNLMEISTIKEFILNSQILPSYDILLRNKAIITSSYNSTSIEGNPLDFKQVTKLFNLKQENKLDELKLNKSEIEVLNYFKTLENLDNYEKIDEETILDIHKNITEGTLKDPNMAGKFRDSPVVIGNIKTGQLNYVPPSPIKVPYLIRELLDWADVQEDLNPIILAGIFHYEFVRIHPFVDGNGRNARALATLILLLKDFDIKRYFSLDEYYNQDRQSYYNALQSADKSQDLTEWLEYFSTGFLVSLSNVKKDIESISRFDIKMNGKIKLNEKEIKILEFIEKNNSIKNKEVQDLLNLSAQRSHFYINELVKKGLIKSKGKGRSTVYIFK

SEQ ID NO: 4656 - protein, 1100 aa, Methanobrevibacter ruminantium
MKLKSKYFVFLLIICILFSISTVSANDNDMSINQNLQNDANQDINQDLQLNEAYQSDTNLNQNLQANNQENDLLKASEDKTYNDLYNDIKNCEDTFNIENDYKYTESDNHTFISINKTNLVINGNNHVIDGSNKAGGFEFLKESLNIIINDLTFINCNDYTIVNEDGGNISLNNVNFTNNHNKLGILYSEGMISVFNGALTINNCNFDSNNNTNLIYTNFAELRITNSNFSNGKGIGSPIYANRFELYIDNCSFENFTAPYGGAINFKGNTFVIKNSKFKNLNAEITAGAIFAKYFPKTNKDGPYIPGEDMLFENCEFSNVSSTHNGGAIYLNLDSSSEGFAKTIHINNCNITDASSDFGGAIASQGEILDFSNLNIINCHAKIGGAIYSSWADLSLKDCNIINNSADKDAGAIYFDYSKLIIDNSNFTDNKVNNISSGKESIIYANDVDAEIRNSIFDNGGVAVYANFASNSKFENNTSTDLFLWNNTNYIVSVENKGIKLNLTNNTINVDKLPSKFDGRDWGWASPLKFQGDNVACWAFATAGALECALLKQTGVLYNISENNIQNLQLKYFSEGDRRNSAIGYAYSGLGHSLSWYGAITSEDDPYDERGMYSDVAETDKRIHVQDAMIIFGGRNDTRNLMKEAIMKYGAVSIQYMYAPYDYTANYTEVDLQPGHFVTLIGWDDNCPPEKVNTKMAIDETNIPPGPGAWLMKDSEDSKLGEDGYVYLSYYDLSILSKDFYPVIPQAAGVAYIFENTNDYHVNYQTDITGLAGFDENYSYYSNEFVSKYDEWIGAVGTYFNESGIDYSFDIYVNGEKAHSQNGTSEFAGFRTIVLDKYVPIKANDTFKVIFKSNALPFQAYSRQHYIPNMSMISADGSNWIDYADKNRTVCLKVYTIESDKENISSRASTIIDCKNMTTTAVASADGRVGEYFVVTLKDQNGTALTNKPIKIGFNGRVYDRVTDENGSAKLQINLAYKGTYTFAIGFLGDEDYLGAFEVAKITVNLHSPKLSAPNKSYKASAKTKELTATFKTSNGNPISGKKISFTVNGKTYTASTNSKGLAKVNVSLSKKGTYSFTAKYAGDETYKATSVKSKLTLK

SEQ ID NO: 4657 - protein, 363 aa, Methanobrevibacter ruminantium
MNISSLFSDEKVNTGRQVELDIAKAFAIIFMIFLHTVMIVEAYNVGLSPTYTYIIGNVLGRPYAAVVFMFCMGVGVVYSRHSQWNLMIKRGIILYLLGLLVNVFEFFLPHYLAGYLGVNAEAFPLFGGLIIFCVDILAFAGLAFILMGILRKFEVSNKAMIIIAVIMSLIGSFTIGIDFGIPAVCSFFGHFIGAKNGHTAFPLFNWFIFPVAGYVWGQYFIRAKDKREFFKYWPILLIVAFAYFFISSRYWGGVFSEDVHLYYFLNTLDAVFCIINAHAFIGLCYWISDYLPDSITKFFSTLSRNINEIYIAQWFYIPVTIILITYFSKGLVFDDLVTTIVSICMLIISTVTALAYRKLRTKG

SEQ ID NO: 4658 - protein, 664 aa, Methanobrevibacter ruminantium
MYLISFFGLGVKLTNFNDVALFIIFVSLINAILWPILTRILMPFLVLSFGIGTLILNGLLLNFCGPLFGINVEGPAIILAPLAMSFVTTALSTILTIEDEGSYYRSVYRDAEKKRKGEVKDYPGLIIVEIDGLAYDVLKEAVDKGYMPTLKSMIDNTHTLRMWETDLSSQTGASQAGILHGNNEDITAFRWIEKKNNNQMMQCSGVTQVTTLEERISDGNGLLVDNGASRSNLFSGDTDNVIFTFSKILNIRKLYNKAWFSVFSNPSNFARIVCLFIYDMTLEIISQIKHSVKNIRPRIKRGIAYIPTRAATNVFMREINTSTLIGDMMVGDIDVAYSTYLGYDEIAHHSGVRDEDSWYALKGMNKQIERLINTNKYTPRKYEFVIQSDHGQTNGATFKQRYGQSFEDYVKSLLPKEMKMFAKMSSNEDHYAESFLPFSRKNDDLIDEKDLEELGDSEVIVLASGNLAMIYLTQWDYRLSIEEINKFFPELIPGIVENEYVGFIVIRSDEGDLAMGKKGIYNLDTGDIIGGNPLEGFGKNIARHLKRNSSFKYTPDILVNSFYDCENDEVCAFEELVGSHGGVGGSQSKPFILYPSGWNVSDEEIVGAESIYKILKENLKKLKEYSNDNTALEKEYSNDETALEKECSNDETALEKEYSTALEE

SEQ ID NO: 4659 - protein, 237 aa, Methanobrevibacter ruminantium
MDISEIIGDAIAYPIHNIKALVIYMIIGIITGILGGASFMGLLMSLTGKNALAAGGFGILGVLVLLIGALLITGYGLDIVKFGIERRDDGPGIDLVRQVLNAVKLLIVSIVYYIVPAIIAWVLFTLLGRGILTVLIVMIISIIFAFAEFMAICRLAKYDSLGEALAIGEAIGDISKVGVIKLLATIIIVVVIAMIVCFILLYVYKLNSLIGGILLGIFAVYLTFFANRAAGLLYSDA

SEQ ID NO: 4660 - protein, 249 aa, Methanobrevibacter ruminantium
MIIDTHCHIYNSEMENAKEIIKEAQKNDICLILNGTDPKSNKEILELSSKYDNVYGALGYFYTLADEISDEEIDLLDSQLNNDKIIAVGEIGLDYYHTKENKDSQKELFEKMLDLAEKHKLPVIVHSRKASQDTYDILKNHNAVGSLHSYQGSAEMAREFVKLGFYIGIGGTITYKNSKKIRKAVNQVGISHILIETDSPYLPPEDKRGENNTPLNLKYIIEELAEELDIKEEKIIEITTENAKKLFKV

SEQ ID NO: 4661 - protein, 238 aa, Methanobrevibacter ruminantium
MDEKFSRTEMLVGNEGMEKLRNAKVVIFGLGGVGSFVCEGLARSGVGNFVLVDYDKVDETNINRQVIATTKTIGQCKVDIMKERILDINPDANVEIYKEFYLEDCEIDIITSDLSYAVDCVDTIMAKIAIICKSKELGVPVISSMGTGNKLDPTMFEVADIYETSVCPLARIMKKDLRKRNIKDCKVVYSQELPKNTNDCDINKNKGKVKVKGSISFVPSVAGLIIAGEVIKDIVNAK

SEQ ID NO: 4662 - protein, 156 aa, Methanobrevibacter ruminantium
MFRKMRRAKQELSKEECIDILINEPRGVLAVLGDDEYPYAVPLSHVYVDGKIYFHGTIKDSHKRDAIKKHDKVSFCVMDKGTKSDSWWYTFKSVIVFGRMKTINDKQTKIEKLTYLGNKFFPSEEETKDEIDRLLDVTELYEISIEHMSGKVVKEK

SEQ ID NO: 4663 - protein, 449 aa, Methanobrevibacter ruminantium
MAIHPIEFRYGTPEMKRIWEQENKQQRMLDIESALAQAEGELGIIPKEYADEIKAKASIEYVTLERVSEIEAETKHDIASLSKGLSEVCEGEAGEYVHFGATSNDIVDSSNSLLLKDSIEVLEEKIERLTKIILKLADENKTKVCIGRTHGQHALPTTYGMKFAIWADELHRQYDRLQHAKDNVCLGMMDGAVGTTAALGTQGWEVHKKVSEILGLKPAPITNQVLQRDNHVEFIATLANIATTLSKIALEVRNLQRTEIQELGEYFDPEKQVGSSTMPHKMNPITAERICGVARIVKSYVNAAMENNPLWHERDLTNSSCERIMFPEACILTDYILNLTIKLMNNLIFYDENIERNLNFTNGLIMAERLMAELTRAGMGKQTAYGVARKNAIKANKEKLLLADLILEDPDASQFLSKEDVERIMDPHTYIGSAPIIVDEILEASKDWF

SEQ ID NO: 4664 - protein, 268 aa, Methanobrevibacter ruminantium
MDFSVKDFNVRLRTIRIWEVVIALVVAFFLTGFTCDYFGIYSGEAEYIIFFLYMMVFFAIASIGTHGFKDDIYGVFKASNLFKVIMIVIPNMLLAFFIQQHLAGFDAMFNNINLLALPVSDLAYEASNPLLFLFEFFSAIFIAPISEELFFRGILFNRLKIRKGVIFGVVVSSIIFGLCHFNYPDHLAHIIYTCLFGMCLCILYLRTDNLLINMFAHFLYNLLSYVIVYTPIGDLFLGGPFMDFTVIVLLFSIVFVPAYIFYFSIKLK

SEQ ID NO: 4665 - protein, 267 aa, Methanobrevibacter ruminantium
MDFNVTDFNVRLRTIKLRELLVGIVIAFILSIALLIIFPVMDSYDDLALMVFVFFLFIFFLYALKGTSGLKQDFNKLFERDNSREILYVLIINMLFAFLVLAIFSTFDAYLTLADSEWVSILDFTPTAIDPAVFLFESFTSIIIAPILEELVFRGVLFNRLKIRTGILPAMLISSFLFAIGHEFGGMTSAFVFGMCMCVLYLKTDNILMGMSVHFLNNLIFTVWDLFALDAIVFQMPVLPLTLLISIISGLLIILYLYKEIGKLLAE

SEQ ID NO: 4666 - protein, 80 aa, Methanobrevibacter ruminantium
MKTIIRYLRQEVKMSQQDLAKSAGVTRQTINALENGRYNPSLLLAYNITRILNKATYGDDVDSYLSIEDVFKFDDDEISV

SEQ ID NO: 4667 - protein, 209 aa, Methanobrevibacter ruminantium
MFLIYGYSYRVTKVSVEGMINGNDPLPEFDDVIGMFVDGIKVCLVYLGYALVPIIIFMVFALVSSAIGGYGESVLMAFGSIITLLAIIGAYVMSMFGVANMANYDGALAKAFDIKEIIEIIQSVGVVRSVGAYIGLAIICTAIFMIVGLLLFFVFGFFGIITGTLGSYTAAGGIFIAGIILGYFLMLFIVSPYILIMQSRVAGLLYNLH

SEQ ID NO: 4668 - protein, 282 aa, Methanobrevibacter ruminantium
MASITDIIKEGLKYPFNDTRKVLILGLIFLISGLISLFTQYVVYDSMTLMVNASPYTSVNGMFASIPPSNSALIFLSWIVTFILFLFTSGYIYDVIKYAIDGRYELPDFGNIFAILKNGLRTLIVGIVYSIVPALIFILGLMLMVNEASGEAVNMFGLILLFVSFIVAIFIYLIEVIAISHMVENDSLKSAFQFSEIFDIISNMGWGRFIGALIFAFIVIAIISMFFGMIFGAISTGIGILFDSALVSTLVSSILTGLLLSPYISIALGRMFGSVYKEAISE

SEQ ID NO: 4669 - protein, 265 aa, Methanobrevibacter ruminantium
MKFNSRVLGILSLLFVLTILVSSVGAAEYKLTEKDFNNTFKIGIPEGTDFQQDAYSNIAAGNVNFAMKVFDNIGNNTDGVVSVLYFKDSSSDSNLISDVIDDLNSSGEVVEENDNYIIVKNNYDAEWNAPDASTSSDEFWSFIGDLCSSGSDMNFGDGDSNIHLSDDGVNIEDSSANVSFSKNGIYVSDSDGQNVSISSEGVKVSGGSSNETVDVNADVDSVMNSYSEFADYSLCLKNPKKDQLIIICGNDLDLLKQMADSASFK

SEQ ID NO: 4670 - protein, 127 aa, Methanobrevibacter ruminantium
MSNNYLPKKLEIKYSHQIDGTKSIKLLNGTLLVNNPNPELIDINQIDEEKWIEFWDAVEKIGLWDLEEVYESCTLDGGFTWKIEIEYGNREINSYGANMEPKIIMGDKVYSVLEELYKSIEELISLD

SEQ ID NO: 4671 - protein, 258 aa, Methanobrevibacter ruminantium
MIFDFHLGSLFFKFILYLVMLLFFIYKFNSISKKNSSSNFNYNSSSNRDSNSVNNSSLSDAFRNDLNSIFKVSKIYHILFIVLANILFVSAIYFVLSYLGSISIIQFNAPLFGDFTGLGFDVTLLYLITVVILSPIIEEFLFRGIFLRRFNLELDNLTLAILISSVLFGICHNFGGILGAILFGICVSILYVKSRNVLVPILAHFINNLISFLLALIGIENFIHGNSIVIALIIILAIISNFVLFRAIVLEWPKSFKE

SEQ ID NO: 4672 - protein, 201 aa, Methanobrevibacter ruminantium
MLKFTGKEIRDLIISFIVIALAFSILYSNRDFNGILFIFPIVAIGVGAGFIFHELGHKFAAMHYGYWAEYQLWPTGLVIALVSSFFGFIFAAPGAVVIYSQGMEKSENGLVSLAGPAVNIVLGLIFLGILNSLGQVTDYNGYIIALICLLGTRINFFLATFNLLPIPPLDGSKVLSWNALVWIVAFAISVILLVVYGGYLG

SEQ ID NO: 4673 - protein, 53 aa, Methanobrevibacter ruminantium
MAKKDDKYSMPMSGAGLVRYFDDESVGPKIAPEYVIALTVILGIFCFILRYSI

SEQ ID NO: 4674 - protein, 1187 aa, Methanobrevibacter ruminantium
MDSGMDYFERLESETQRLYEIANEARSKGFDVELETEIPVAKDLAERVEGLVGPKGIARRIKELEATGISREEVAFEIAAEIASQESSETGAKLEAEKQAFADQGLRTALAIITEGVVAAPLEGISGVKIKSNSDGTKYVAVYFAGPIRSAGGTAAALSVLLGDKIRVATGLDRFKPTDDEIERYVEEVELYESEVTNLQYSPTPEEVRFAARSIPVEVSGEPTDQIEVSHRDLPRVETNNIRGGALLAMVEGVIQKSKKILKISKKLNLDSWEFLAEYAKGIGSSQEEEKSEEETEEIVEEIDDNIIDKDELFAHSKYAHDIIGGRPVLGYPSEKGGFRLRYGRSRNTGLATMGVHPATMELLEFLAVGTQLKIERPGKGNCVVPVDSIEGPTVKLKSGEVRRLDSIADAREVKGKVVEILFLGDMLVAFGEFLRNNQPMLGSCWCEEWWIECIRNSDKYKSFSNDSELYDYLIERGIDLSIEHFISHEDSSKYMDFDRESFNLNFLEKKRYTAEEAFRISYDFSVPLHPEYTYYYNDISREDLAYLNEWLDTKRDYLSTDYLNGEDLILDLAPQKRILEILGLVHKLIDKKVVIDRDHAYALMKTVGNGSALEDNDGDLSSEVKTIDYSKYLDDDHYKSKVVDILNENIDFEIMDKAPCYIGTRVGRPEKSKERMMRPAPHVLFPIGNNGGSRRLVAEAAKKRKINVEIARRQCTNPDCGLSSFMAICPHCGAPTEITKASQKDINLSTMLSKASNNIGVRKVDEVKGVIGLISEDKLPEPLEKGILRAKNGVFTFKEGTIRHDSTDLPLTHFIPREIGVTVPKLIEMGYTHDCYGQEIVSDDQIIELKVQDIVVSDNCGDYLVGVANFVDDLLEKYYGMDRFYNVEDKYDLIGHLIAGLAPHTSAGVLGRIVGFTKALGCYAHPYFHSAKRRNCDSDEDSVLLLLDALINFSKSYLPSTRGGSMDAPLVLSTRIDPEEIDDESHNLDIFERFPLGFYQKSQEPLKPADMLEFVDNVEMHLGTDRQYHDLMFSHHTSNIHAGPKVCLYKRLGSMKEKVEAQIHLAELIRAVDQRGVVEGVLSSHFLPDIMGNSRAFSKQKVRCPKCGAKYRRMPLTGKCKCGGDLILSVSKGSVVKYLEISQNLVNRYPVSHYLEQRLEIQEFGINSLFESDKSKQSSLDVFFGK

SEQ ID NO: 4675 - protein, 780 aa, Methanobrevibacter ruminantium
MGLKINEGVKVENVYNVENDIRKAKITVKKNNGVCEAFSYEKLLKSLVMVEAPYFESEKIVSTVVENLYDGITTKEIKKIVYECLEEVDSEAANKYLAKTTLKVRSSRDKIEPFDMAKIASTLVEETGASQETAFEIASEVWKELKKLNVEYLTAPMIREIVNTKLVEYGLEDLRSRYTRLGIPVYNITSLIENGNRDNANMMHNPESIHKYVADEALKQYALLHLLPSHLADAHMSGDIHIHDLEFFAGRPLNCLQHDIRAFIKYGLKVDGTGDHTSVAAPPSHMETLMNHTGEIMLAAQQNMSGGQAMSLWNVFVAPFARGRTYEEVKQSIQMLVYNLNMAYAARGSQVPFTSMQLEFGVPNFLKDVTAYGPKGQVVGTYADFEDETRMIQRAFTEILLEGDSEGKPHLFPNTIYTLREETLNGDYDDDMLLVHELSAKYGSSYFVNMLPDYRGQMANYMGCRTCLQDTWTGDWEQDCLRTGNLAYVTLNMPRIGYQSNDEDDVFEYLDNYMDLAVETLMIRRKQGLNCLNNFDILPFLDQEVDGETYYRIQNSTLSFGFCGLNEMLLALFDEGIENPDANKFGIKCLEYINARAKALQEETGLRWSVLQTPAESTAYRFATLDKEQFGDKAILQGDNGANYYTNSSHVPVNSDIAFADKIKIEGQYHKLTPGGHIFHAFMGESYSDPEALMSLTNKIARKSDIGFWAYSSAFSFCLNCKTLMKGLSNKCPSCGESADVEWYDRITGYVQQVGHAKSANGGWNAGKRQELIDRRRFEQ

SEQ ID NO: 4676 - protein, 528 aa, Methanobrevibacter ruminantium
MKHWIERIADELNEMDVEKHVIASGTSISGSIHIGNSCDVFIANAIGKALRELGNDAETIWIADDHDPLRKVPYPLPESYDQYLGMPYSMIPCPEGCCKNFVEHFEKPLFNVLDDYGIEIIPKSGFEMYKDGSYLESIRISLEKHNEIKAIFDQYRREPLADHWLPYNPICDECGRVNTTEAYDYDGDIIKYRCECGHEGEMDIKSGNGKLTWRVEWAARWKIFGTTCEPFGKDHAAAGGSYDVSSVISEEIFDYPAPYPVPYEWITLDGEAMSKSHGVFFTPEQWLEIGPAESLNYYLFRSKPMKSKDFSPKMPWLDFMDTFDRVEKVFYGEEEAPSEKEGRKFKSIYKMAQINPDSPLPFRPPFRFLVNAYQIVGEKDLEKIFAIVKKNSQLTKSFADKEFEDLSELEVSQFSERVDNVIAWLEKYAPKFVKFQVQYDSIPNLPLPDDQIAFLKDLADLMEEKEFSSAEELHDSMYEILESHGLKPQKAFQAIYKMILGQKQGPRAASFLLSLDKDFVVKRLRQEA

SEQ ID NO: 4677 - protein, 286 aa, Methanobrevibacter ruminantium
MVIFISEEEIETLKKQLADKDTKLKNQASELNHLTNEVIPELKKDNKKLKALKEELTDALETSTKKYFDQLEINADLSESVAKKGAGLQLAKVRLNEIEKLVVELETARLEEEEKKAAIPTEETDEDEVTKIYQEKEEAIEQLHSEIDKLENEIKEKDAEIDRKESLIKSKDSKIKEKNDEIKDLNDNVIPSLKAEVASKNAEVKATQEEAQKEIDGVGGKIAKLEAEIKNLNESLDKKKRDYDRLYTELNAKDKTINSLKNKNQQLTEQLEEESSKGFFSKLTGR

SEQ ID NO: 4678 - protein, 79 aa, Methanobrevibacter ruminantium
MSFGMVFFSCLGICLFCNEFWYGFFLVVWGFVCFVMSFGMVFFSCLGICLFCNEFWYGFFLVVWGFVCFVMSFGMVLVN

SEQ ID NO: 4679 - protein, 787 aa, Methanobrevibacter ruminantium
MSNIETDDSFISENSISSDINDNSLINEFTASNQINDNIAINDGLSKGDKSQLSESKSIYVSTNGSDDSGDGSEKSPYQSIKHAVSKADDDSIIYLSSGTYNGENNQNISIGKSLSIYGEDSTIIDGEDKAQLFIMNSSAKLSLNGLILTNAYKDGNLSDYGGAIINEGGQLTIINSTIKNSYGNYYGGAIYNNLGRLTIINSSILNNSAIQYGGAIYTLGVTNIQNSVFEKNTLTAEKGVGASIAAGGTITLNNTDFLNNHAIYSAAALLSLGNATINNCSFINQTTNYTAGAISNHGNMFINNSLFFNCRVRFYAGAILAPPSGHHVVTEVYNTIFDYNNAGNHGAVTNNFQDAEITMINCAITNNYIQKNVFYGDIALDDNATVQYCWWGQNNISSYYYSPHSNNEDPGQINASRWLMMTFTSSNGNISADEVNTLTVSIKQYFDNDTKEIYEYNEDINLPLTVKFFDDNKKTIATKTLKNGTASYNYIPVKGVNAVYAQITNEIIEIPVVQKKESNLSTSNLTKYYKNESQLEAKLTDGDNNPLSNKTISIELLGKTYNKTTNENGIVKQNIGLKPGQYTANIIFKDPEYKNKNITVQITVLKNSTSISAKNLVKYYKNSSQLTVKLLDNNKKAMKSKKVKFTIGKNTYTRTTNANGAATFNINLKVGTYNVKVSFGGDDYYKGSSKTVKVTVKTTKMQAKSTKIRKNSNFVATFKDANGKVIKNTKVKFTLNKKTYTKTTNSKGQATLKVSVKLGSYTIKSQYASTKTYGATVFNTKIKVVK

SEQ ID NO: 4680 - protein, 305 aa, Methanobrevibacter ruminantium
MTIKKDLLAIGHTALDYIITVDEFPKANNSAPMKTMLNLNGGAAANVAMIGASLGLKSGLVSAVGKEFIDSHYHKEMTRLGVDTEAMIISETENTPTAFVMTNKNQDQISYFYWGAGKDFHDSEVPREKIKEFKAVHLATGDPHFNCKSGIVAKEEERLVSFDPGQDLGMYSPKKLKEVISNSNILFGNHHEIKRIQESLAVDINGLMELGPEIVLTTCGKEGSIIYSLDEGKFEIDSIYRPAVDPTGAGDSYKAGFLSQFINGKTLEESAKFASSVSSFVVEKQGCQTNMPSYEDAYNRMMDFY

SEQ ID NO: 4681 - protein, 432 aa, Methanobrevibacter ruminantium
MTQISDAKKGILTEEMKHVAKIENVSEDFILRSVANGTIVIPSNVHRDIEASGIGAGLRTKVNATVGTSTDIVNFDEEVLKAQIAIDHGADCLMELSIGGDLDVIRRRVLDMSPLPVGSVPVYQAAIESIREHGSVIYMDEDDLFGAIEKQAKDGIDFMAVHSSINIETLTRLKRQGRVTGLVSRGGSFMSGWIVENEKENPLYANFDYVLEIAKEHDVVLSLANGMRAGSIADSTDRAQIQELIILGELIDRSREAGVQCMIEGPGHIPINEIPTNVMIQKKMCSNAPFYMLGPIVCDVAPGYDHIVSAIGAASSAKAGADFICYVTPAEHLALPSPEDVKEGVIATRIGAYAGDLASGQIDGSQDLAMAEARKKLDWEAQYECAMFPGAARAKRDQRPPEEEDTCTMCGNYCAVKIVNQWLDQSDSDLIK

SEQ ID NO: 4682 - protein, 353 aa, Methanobrevibacter ruminantium
MDALRALAIICVIAIHAYACSRNFVISELVGNLPSLNWIIIQFSGNTFRIGVDLFLMLSGALSLGRDWKMKDFFAHRFPRIVYPFLFWSILLGTIFLLLSYYDSFNVISSFDLVSIANYFYGVFMGIIDFAKPYWYFWMILGIYLIMPVFNKWILHSDLDDLLYFLFFWLITCLFDYTLGVEFPIRLSYFTSPIGLVVLGYYLRYTRRIILNNQYFALFLIIFSSLLMLVLSAIYSTDTHFYNFNIYSILVSMEVIGVFLLFKNFYKFNLNIGFFSRPDGFFNKSVYALARYSYGIFLIHNAFICVLVHYLGNTGIPPVLYMIILFVVSLLCSVIVMAVLSRIPYLNRVIGVK

SEQ ID NO: 4683 - protein, 309 aa, Methanobrevibacter ruminantium
MRDIMLENTDNEKGKAIIEPEIGITINGISFNHKLFETLESLSRTYSQRKTAKELKIAHSVLNRRIKNAEDKLGEKLVVTIGSGSELSPKGYELLNAYHKYKNRLEDREEIVIAGGHIITGLLQAISYDLPFKTLIYSSDDESAYELAKSNQIDILALDDPLLAFENDLNFTAIAYDHLVLISPKKEKPIEKIRDLSDLEFIGVKGSAQRLAWSTLKQENIPFNIVKEVKSQFDAFKIVKNSDEYYTFLNASYFNGNEILKNETRHVISLVQCNDEKEDIYNLMEYLLMDGQSQIGEQGFVPMKPWKTR

SEQ ID NO: 4684 - protein, 196 aa, Methanobrevibacter ruminantium
MEYMKDAIEAILDNIRDAEDYLVEEDVATFIDIITSCENIFVTGAGRSGLAAKAFAMRLMHLGLSSYVVGETISPAINADDCILAISGSGETNTIVTAAKISKNRGAKVLALTSYPESTLGQLADCVILVKGRTKVEADDENYLKRQIKGNYTSLTPLGTAFELTSLVFLDGMVSELMNAMGKTEADLKLRHTVLE

SEQ ID NO: 4685 - protein, 368 aa, Methanobrevibacter ruminantium
MEKKTTIILVILIALIACGVGITLFASPSSISTDGNTTITDMANRTVNISSSVDRVVATSPPMTTIVYMLAPEKLVGVNFQWTDEELKYVPDQYKDKFPVIGGWFGSQDGNYEEFIASEPNLVIEGIDEGMGVDLSTVEERQEKFGSLPVVAVTDNTNVTKIDNTIEFLGKLLGAEDKANELIAFNDKYLSQVQSTASSIPDSEKKSVYYASGEDGLSTYASGASHGQLISLVGGKNVADTEVKDSGSELTVSIEQVMSWNPDVIIATDEDFYNKVYNDSKWASVKAVKDHRVYLSPQSPFKWFDRPPGANIIIGVPWTAKVIYPDKYSNIDMVGATKEFYSNFYHYGLSDEQAKEILTSSGLKGSDL

SEQ ID NO: 4686 - protein, 341 aa, Methanobrevibacter ruminantium
MSENSSFSVDNLVIYLLLIALPIFLFFVSFMLGRYPVAPIDVIKTILSPIFPSLAVSPELNSIVFTIRLPRIIAALLVGAALSIAGASFQGIFKNPLVSPDLLGVSMGAGFGAAIAILANAGNALIQLSAFVFGLIAVFITFSISKTYKAGGILLLVLSGTAVSAFFNALISGAKFMADPYDKLPQITYWLMGSLSAVNFDKLAMIIIPLVLGIIVVMILRWHLNVLSMGDEEAQSLGLNPSRLRLIVIIACTLVTSAAVSISGIIGWIGLVVPHMTRIIVGPDHKILIPASLSIGASFLLLIDNISRTFISIEIPIGILTAIIGVPLFLYLLRKGYSEWN

SEQ ID NO: 4687 - protein, 276 aa, Methanobrevibacter ruminantium
MTKLVEVKDVSFSYDKDSPIVFENINFSIEKGDVLCILGPNGTGKTTLIKTLNGLHKVNSGEILLNGTNIKELSFNDIAKLVGYIPQGHIPSFPFKVFDVVLMGRSPYINLTASPREEDKEIALNALKTLGIEDLKDKSYTNLSGGERQLVFLARVLAQEPDLLILDEPTNHLDFGNQIKLLEMIEQLSELGLAVIMSSHYPDHAFLAASKVAIMKDKSFIDFGTPEDVLTEENLNKAYGIDVKLVELEDDRKICVPLRTNLELVMSNYSKKYSKD

SEQ ID NO: 4688 - protein, 190 aa, Methanobrevibacter ruminantium
MVSVEDYEEQLAKAGEFHGEICGGIAIGTKLAMYGMELMGFELNKRHKNLIVFLEIDRCMSDAVQSVTKCSMGKRSLKQMYYGKFAVTFYNMDTGEAIRVSDADANKQEKKRETRDEMIERFKRTPAEELFNVEKVHVELQPSQMPGKPHTSVFCSVCGEKVTDGRHVNRGGKPVCIPCAEGAYYELIDE

SEQ ID NO: 4689 - protein, 1395 aa, Methanobrevibacter ruminantium
MKNKSLILISLLLLITIISIGSVVATDNEEINMDNINNIDNNEDIANIDNVDNVDNSNINNPTDIRIDNSNLNRETELDSNLNKSNQIREDELEQSNAKSNLKSSKLSSTITVDGSDENQMSNPTIQSAIDSANAGDTIIITGKSYVHCHFIVNKPLTIISEIGTSMSPCPSNTKGSGAHGIFYISPEASGTVLKGFNLTNTYGDYDDYGILIRGAENVEIINCTINTVSDGDGIRIENATNTKIADCLIKDSNIGINITGSSKTTVTNNNITNNKVTGVNVGINNNDTTIHTNNITYNQHSGIDLYSGDYVYILNNFIGHNQNSKSSSGAGIYVNSNITKVEIKGNFLKQNGQYGVLNDYRVRNMDASRGAETLEINNNNYYLGHTERITYHIEYSKYAGGPFTYDSENDLYVYVGDGNGDWDIGKTVVYLGYAFYRDETVCGSTLFKAPSTTWGTEVYKLEISPISQVKKGVYSVSIVDVNGIVASDISSIYVTFYLNKNNTDAEPQSGDIYKTVLMENGTATVNLTDKEFKESGNKITACFPGLYNVYTINPYATFDVNDSDIPGSYRNTTINATDMSLVPNSGNKITARLTDENGNPVAGESLQFKISGISTTYTRTTDENGEANLKVSLSNPKTYTVNINFKGSENYNKSSKTIKLTVKKQTPKIESSNIDLLPKSGENFTVTLKDANNKAIANKEISFTLGKKTYTRTTDENGQASLKINLANTGKYTITTKSEKTSQYNEVSKSNTITIKTGANKVNIESSDKTYIPKSGENFTVTLKDANSNPIASKEISFTLGKKTYTRTTNENGQASLKINLANTKKYPITTKYAGDDTYSSASAENTITIAKAAAELTTYNRTYINKSGQMFSAKLTDKNNIPLENEKISFTIGKKTYNRTTDADGLAYLTINLAYDKNISTKFLGNDQYNAKTNTNSITITDEIETAYIDKGLKNDEIQRIIDEIKPNYDVKFLGDSYDDVNLNINKTLLIYTDVNTTLNGKSASPVFNLRGGNIGVSFFNINVNSTDGEGYGIILNNTKEAVIDGNTISNILDSSKMTDYNNGSTILPGHGIEILNSKATLIEQNNIDHFESGIYMEYSDDAVIRENTITENNYGIKYGFGNSNTQIYNNTIIDNIGWYTEEVPEGPRGYGAFLNNSATNITITDNNISNNYMGISVDANKSTGIVITRNLIADNSLEGIRFNEGYDLAENAIEPVVTDNAIYRNAEGPSLMILGEMSANPNGIYGAGQWDDSMKLKIDPNWYGVNNLRTWDYETGIVGVGTMCPRIKSTTIKFNTLEYENGTYKINFYKNGTFAINLAKFDIYATINRNTDKKAEVHFYVENGTGTFSFDKSNYLDSNNTIEISVGSLINVVDRIYSVVYAYDVPDSEIPN

SEQ ID NO: 4690 - protein, 446 aa, Methanobrevibacter ruminantium
MGGIYIIMKTFRQQLLEDPEFQNYLLQRPNLTESSLQSYLNAATNFVRFTGEPFYKTVHELRSQQNDRIENNIIIRFNPNQSRINIMQFEFIEYLKGRGCTEVSIDSYVRYMRTILSTLGIILPKSPKLDDTPQDWYLLTKDDIKYVLDTANLQYKAVINFAAVTGLRVRDMRSLTIKDFMTATEEYHGCTEVEDFLDSAPDGMIGFWELFPQKTRKFRLPCKVCNTPESSDLLLFSLNERVKYFEWKNEKDGTDLKITKNDPLFASRQRKYKNFIAPNSISWTLSQYSEKLSAERERVFKYKLEHGEISQETYDESVATIPKFHAHGLRKFFISTLAKNRVDARISALMEGHKAPLVTDSHYINNDYLKETIKEEYMRCIPDLSFENVEVRFLTSEERKSLQQKIDELQEENENMKKDMEKYIDDAVHEKMKDAFENWLNIQDSK

SEQ ID NO: 4691 - protein, 98 aa, Methanobrevibacter ruminantium
MNTLKIECSKDDYIIKTAKANSENELKVEVPENWNCDYVNAVLWEEDICEVLEKGDERMLLIPMCGELLLEGVQEDEYIKYICLPVKYQDQMVLIAKI

SEQ ID NO: 4692 - protein, 294 aa, Methanobrevibacter ruminantium
MGMKKVKIESKAKNNMTRNEKLFYKLYDDLYNEDRLILFSTYFNIYDKFIFKKDIIHYVLMNYSENEIIEAMKKIDEIQSEGIDIKTFIPKKYCPKCKKVMDSYGKICPDCGTILIEDEKKIQELQAKDKAYEEYLEKEYNIYLQNSYHNMIQGSYTIKIRTRKPKTETEIVRIPAQTVTSRGKFNSISQHYPSETYTRQKVTRAKYKECRVLFDKEKMILNIDGTATKLYYDEVCELEYPEQEVNELVTLTLHNGTVLTFKIKNGWFASDNEKKARFDAFVKTFIEQGKNLPL

SEQ ID NO: 4693 - protein, 275 aa, Methanobrevibacter ruminantium
MKTQDLINIINDEESPVFLNREVFEMDYVPDIYKYRDEQLAKMAMYCNSIPDNIAPKNLQLCGGNATGKTTTLKQFFKMLNEAFPNIVTVYINCQLFNTENTVYGKIYNKLYGVKGSINGKSNTMLFDKIVARLKKENKILIIGLDDFDSFKSRDGLNKMLYNFLRIHEAEEGIQICIFTVSNKENLKLAPSVETIFNRVPIFFDQYSLEQMYHILDDRCAFGFYPGVISDELVRVVAGKSYDLGNLRYGIKLLSAAGQKAEVFGDGKIIRNFLD

SEQ ID NO: 4694 - protein, 285 aa, Methanobrevibacter ruminantium
MFLEKCDGKDTISMSLQEKMNLILETMESKGSPFISCIHCNIPINEAEEWYKNGEIGDQDFINFYDDVNLIEESFGFEIYKKSEYPTLHTQSINQIASTYPMNRTQNEKTPLFLRRERKLYEITNIFKSHSTNEIFISMDSKSKLKHEIKYDFTLKELNEIFKNYLEEDCSIYILNDNRAFVMTLGHFQFEFDVFGSAKESYVFDVEIDDEKYDKIFIRSSYYFNIPVDELDGLAKILKQKRIIEEGFFEGQFLYHTPGNGMTYGDPVRIIENEIEKYAFRFITF

SEQ ID NO: 4695 - protein, 72 aa, Methanobrevibacter ruminantium
MQYWRIVNYSPLAVACKKRKHWTCNHSFYATFYILNFQIFKILLFMAKQQLLSRIDLNLLFLIYFQNFLLII

SEQ ID NO: 4696 - protein, 55 aa, Methanobrevibacter ruminantium
MEKLIEIDGVQYTEAQIRRALAIERDVRSPNFVDMLLGKIKPSELASRVSEKGDA

SEQ ID NO: 4697 - protein, 51 aa, Methanobrevibacter ruminantium
MCYVGNTRTLVYHTEDCFCNHWLLNENKTILEEKPVDMKPCSFCKPQFDTE

SEQ ID NO: 4698 - protein, 74 aa, Methanobrevibacter ruminantium
MVAEMVENIRKGEGDGYSIYPPFSCIVFLQGKKYSECCCKAEARDQKFALVNLVGFRREDVKVIDPRTNEELFV

SEQ ID NO: 4699 - protein, 53 aa, Methanobrevibacter ruminantium
MSMLADFEPARLHKRTWAERHDVEILAVICLAISIAMLLLFFALAEPTVAGVI

SEQ ID NO: 4700 - protein, 150 aa, Methanobrevibacter ruminantium
MTKEFEDFMRRNTGLLVFLRWDTVAYLKYLESHYDERKYECAYRLLEAIDNLFDFYQITFSKKTEREIPDQLFEKDKINKGFLSHIGKACKKQSDFYGQRWKSTRGIRDAYGHYSAGNFLFADIYGCLHRISDDCYRILNFSEYEIEEKA

SEQ ID NO: 4701 - protein, 251 aa, Methanobrevibacter ruminantium
MNEIVTTTNENNVPVDVDYAIEEWKAYQRLTRELLDETDYQTHRGRKYKTKSAWQKYARAFNINTQIIDKEIVKNDKGIVIEAEYTVRATLPNGRFVESDGSCDRRESGKREMSNHSIKATAKTRATNRAISELIGAGDVSADELDPAFDKVQHSKTNHVIEAEVAEIIESPYDKNAGFETADKIEPVDEDPVCKNWVKTICKTIKAEGKPCLKGVLIQKARTIGTMTDEERNRLIEYIKTLPKGEVNLDD

SEQ ID NO: 4702 - protein, 76 aa, Methanobrevibacter ruminantium
MIECIQEEGDFTDWEVPSSSSDIKYIVSVDDEGNLFCSCPDFYYRKSRMNPHISNPESYCKHIRQVLEEDNRLQML

SEQ ID NO: 4703 - protein, 334 aa, Methanobrevibacter ruminantium
MDNINKTKTSLAKFEEFFSTVYKDEVMEVLEKYPEERTLVVDYENLEMFDPDLADLLIEKPDEVIAASQKAIKNIDPLMKDPKLDIKFKNVSNCIDFVNADSKYIGKLISFEAKVMEAKEPKPILDIAVYECRGCMSLREIPQTINSSLEPSLCPECGGRSFRLLQDESEFLESQLLIVSSDDTSKSLKVLLLRDECSFDLYSMGQEVRITGILKSFSSNYGYEYFLECNLIEILNDSEDSEYDEYGNRNSPEYRTWQKVVIDSDRVCQCCGGSKHLEAHHIFSYQNNPSYRVNLENGIALCKWCHSKYHSYYGKDASPKSLIRFLKRFGRYDG

SEQ ID NO: 4704 - protein, 144 aa, Methanobrevibacter ruminantium
MMANKIRVNLTVDPNLWQLAKDKLPCSRSEFFENQLKMFLGIEDDESEIIKDIQTKENEINALRDKLCHVRKSKQLKLESNKSMEKAMASLNRMHKKYGKIGENQIRNLAHVHKVDFDDLKKECQDNCMNIFEFAEVPKHDSVM

SEQ ID NO: 4705 - protein, 139 aa, Methanobrevibacter ruminantium
MELFLMTIGSLDNFGKSDGENMNPEDFDCSVFFEMYKALFEILDVEVGSFAELLDVYKNVEMDYTLKRHALKQKEILYWFNTDWKEELGKEKPTEKDKEKWIRQKIGYDSFVVEQLEVKLKHIRRMYETALKHSFEAIK

SEQ ID NO: 4706 - protein, 91 aa, Methanobrevibacter ruminantium
MNVKTVMNDLIGLSKEFEGVEYEIESKNSIYFYSFPKYMKEGIVILKYSAIYDLHTILKGMDGIIVDILEVEDNPGDEKKDLLYVQIEVKE

SEQ ID NO: 4707 - protein, 77 aa, Methanobrevibacter ruminantium
MISDEWEEEYYVKVNEELEQVEVRFFSKVDRLVFAQSYSSSSSFSFEEAEILCDRICDILTNDLGNAKYYLGGKDEL

SEQ ID NO: 4708 - protein, 49 aa, Methanobrevibacter ruminantium
MNYREWVASQFELRMTEDGRVCFKTPCSYYTFSKEDFEIIREMFLNFES

SEQ ID NO: 4709 - protein, 57 aa, Methanobrevibacter ruminantium
MDRIKELNVCGTCKHSHLIPDINGEIAVNICRIGSEAVNKDGGLTYCVDWTPRRKLS

SEQ ID NO: 4710 - protein, 111 aa, Methanobrevibacter ruminantium
MLSKKEAIQMTLDNEKHYPVKCKYCGKPFTKSHNRQMYCSDSCRRNALREQKARYQAKRRLKIKQKVLIVDEYKKYGLGSYGTSANGHRKNNFSHEYMAIQKEMKRIGLKR

SEQ ID NO: 4711 - protein, 183 aa, Methanobrevibacter ruminantium
MYLAKFCPNCGNKVEENDKFCIYCGNKLRVIIPEKKVKRSSNSINDEKTSKYVEVIDGLMRYKVFPSSLPVKYIIYKVNYGTTSDEIKNILENGNYNYKINIHYFLQNKKLYFRSPKNPNMFFKFHNDRFNEEMRKDNKEIIHISSYARVHRPSLTKIFNFNQEKTFILANKHFEENIRKTRL

SEQ ID NO: 4712 - protein, 78 aa, Methanobrevibacter ruminantium
MMIYDKATVTSLIVAILLPLMSMLGIGELTQNYILAIVSGMIALVVWYYNEKHNSDLVSGTTKCDCELCYGGDDEALI

SEQ ID NO: 4713 - protein, 112 aa, Methanobrevibacter ruminantium
MKHLYEIIPYRRTVWITGFLKTTVSSAMITTGVVILFNSITEHPYFMEWDEIGIVLGIVSITIACIYIAMIDRWKERRKKEELDTIEDYINRKAEEIANMKVLRKLEELEEE

SEQ ID NO: 4714 - protein, 206 aa, Methanobrevibacter ruminantium
MTMIEISTIKITDIKPAEYNPRIMSQLEHTKLRNSMETFGVVDPIIINLKNNHIIGGHQRYEVLLDKSMEDNEFIKELHLIRLGDVGWAFPESDLEVEDDDHEKALNLALNNIEGEWDLPKLEPILTDLKDVGFDIELTGFSDIELTELNLENNLVFAEEFEPDESEEDVDLEDIYDEPVKEMLQCPACDHVDVVKRFKRVDSQGD

SEQ ID NO: 4715 - protein, 66 aa, Methanobrevibacter ruminantium
MKIYLAAADTMSEDIIRLLPVAKRLHWNLFSYYYLLTLKKMEDYDIIRKASKKRPYRQRSAQLPEG

SEQ ID NO: 4716 - protein, 152 aa, Methanobrevibacter ruminantium
MDVDNLLGYDKVLELRSLLEEVTDKVIPVWHKNRGIKDFKQMCQDYNFVSISGWRNEDVKDDQFIHFVRHAHRNGCRIHGLGLTRRKVLDRVPFDSVDSSSWLQTILYARLGQKQLDSKFATERRGDLAVLSYIKWMKTQEEYYKKWRHYHD

SEQ ID NO: 4717 - protein, 218 aa, Methanobrevibacter ruminantium
MINERIRPYLNFSFNDKKVIFVTLFVVSNLISNLLAIKVFNLGFWGLTTDCGNLLFPLGYLMADVITEVYGERTARRVILLGLFANILLIVATTLTVYMPYPSYWTGQGAYAYMFGFTPRIVLAGFIAYLVGQFVNARLMVLIKKWTNSKYLFMRTIGSTLGGELCDSCICSSIAYYGIVPNSGILLFILMQYVVKVTWEVVMQPLTYKSIAWARKDG

SEQ ID NO: 4718 - protein, 196 aa, Methanobrevibacter ruminantium
MAMPEPWERQRDENGKLEPIKAFEYFTEYLTMDKPRSMRVLCERLGKKDGYIRQLHAYSSTWNWVERAEAYDEHIILKKRLRKEKFYDELVESELPNLRKRLEYYNKNMNDIETDMTTKPTSKAHAYDKNSKAHSTTLNEILLMIGKPTEIKETSLEADIESDNKIDLENRVEVDITSDEFMESELEYMRKMIEEK

SEQ ID NO: 4719 - protein, 491 aa, Methanobrevibacter ruminantium
MTAASRVNAHGTMGLGRWSIYINNGFWKPRDFDVLIIELLQYAIQGRVSGILLGVPSRHGKSTLISKNFCSYFLSYFPNEQVILSSYSQGLASEFGGQVKDIVNHYGYLSPYKPTIRSDSKAKNKFKLNEPYRGQMLSAGAGGSIMGYGAGLLIVDDPIKNVAEAESKVRQAKLKDWWGGTIKSRVQRRSNGLPPIKIVIAQRLHLKDLHGIIKETEPTIPANDAFRILRNGGSIDPNTWVDFNLPAICDSEDDILGRKIGEVLWEEQRDYEWLMAEKRSMGSYLFNSIYQGQPVERDGEIFKREWFQDEVNHKLTCLIDPKDIPKDLPQLRYWDFGASGDAGDGTSAILTSYDGEYLYVLDLVAGKFSSLKVLKTFKRLCKKDGKQTRVMVEQEPGSGSKLLIKKFRREEDLRGYNIRADKVQVSKKVRAFDLEGLAEDRRIKMVPAHWNNKLIDQLVAFTGEDGGEDDIVDTITGSCRFWTRPRRRVKA

SEQ ID NO: 4720 - protein, 441 aa, Methanobrevibacter ruminantium
MSKKQEMMRIERLKHYAYQTGLIIPIFKNHDLIKKIENGKITNTDEIKIYIEENEKQIKRRREFISIIYDNCKYFKYDSICYKLISKVNNFEIKSLEELMNEIESEKKKNGFRKNIEEKELIKENENKGRLKEYVRIVRREYGLDFTSVKKLKLKIDNNKIRSKEELNEEIIEEKKKTELRRIVYDSDLNWDLKWELESKIRHNEITTKEELIKEIRRIEFINIIYDNNRDFKLDYVTIQKLVSKIGSNEITTKEELIKEMTEEKKKGIERRTEYKKIVNEAHALDNTSQWKLELKINNDEIRNKEELMNEIESEKKKTELRRIVNDSDLNDTSQRKLLSKIDEDIEVITKEKLKKEIQKEERIIEYKKIVNEAHALDNTSQWKLELKINNDEIRNKEELMNEIESEKKKTELRRKSEEIIRRKKERSDSYHPNANKPWKF

SEQ ID NO: 4721 - protein, 552 aa, Methanobrevibacter ruminantium
MSKNAKADAFVVTTEDGSYDIVDADVLERYAIKSESDETGSKQLKTDGWEYDDTLLEPLYDPLQLCELLEINTYHENCVDVVARDSAGIGYDIVPVTGEKEKELNKPKLTNFLENIEPNINELLYQMNYDRRATGYGALELIRKDKSKSEPVNLSHISSYTLRRTSDGKRVKQRVGTKTVWFVIYGKNYDKEGNLCDVHSETGEFHPYNSLSKEERANELLWTMEYTTKSKYYGLPKIVGAIPAIYSDISRSKYNTSFFKNYGMPSFAVLVSGDFVDYGQEEFLEDGTKNPEYDVTKTLKWKISQQLKQAIKNPHSAVTILVPSEGEEGNVEIELKPLSVETKEASFRLFRQDNRDEVIHAHRVPPYKVGINETGSLGGSNIEGATINYKNDVVLPIRFNDEFLINQVIKNDFKIKDWRFKITEHDTRDYTTDIAIIKELFLMASITPRQIIENIGERFGLTASDNPFLDEYYLNNVPLENVWNGGDVPMEAETVLDSLENDLMKDAGVMDEQLREKRQTRDDGAQGASFKEADSEYQERIQKAFDTRRAVQ

SEQ ID NO: 4722 - protein, 775 aa, Methanobrevibacter ruminantium
MMALKVRHSKRQIQNIKREYRRRLILEEQCSREIADFFRRLERKIHKVMDEHWESELGLFHLNKVSDIIQDSRQEYYDILFKYCKDSYMKGREATERRFNRKLENISMKADVNITRLEDLFKPDPTIRYNLNNKVFQASAHTMDRVDNRIMENITQSYDDGLGIDEAKDRLTVEYNGLKSWEAQRIARTEINSAQNDGAFDVYGELGVEYHQWWTAQDERVRETPQADHRELHGKIVKVGNSFSNGLQYPGDRTGRIVHWINCRCTTLPFLMPLGKMAPPGMIEFTEEDLIDIPNFEMPTIDDLMRRYEAVEPKSQWILDDFEDLINLNEDEERRLAEIQEIFKRNARDNVPPSYIVQRQYDEFMLRKNFAENLRMLKRGQNPFLNESEKQMFIKDYSRFLKQYENEIRMNKELQKMYPKEFSKVAKDVDLQFYRENYNNQFSIYHPDDIRSFEVTSKTLTSEERARLKEIEKLYPKESKRIAKEMDLKYYEKRHPERFGRFMEEEERKRLAKIERMYPKETSKMANEFAPRDVSRLRTKEDIDLYEKNFIMNKSYRKKADEIVNGNGMTITRNVKYDLKGRYEDYINITDDTFDVLRFKDYNCEIWISSKSEVSTVEIMQTLDKIPRKLMNQNHNRIIFSADRDVYNLKKNHFVGGVTKRKDNEIVIFKCKEGILSQTKTLAHELGHAWDNNLSKIANRGGAYYKVAEEEGGFVTSYARKGFEVFKTHYSEDFAEAMELYVTSPEKLRRKFPKRYEFIKNMMEDDLFVLGLIPY

SEQ ID NO: 4723 - protein, 87 aa, Methanobrevibacter ruminantium
MIIEIPGNDRTEEINLPNGQFVLITYLQENDMMSLPDGKYVCPFRMIQLFTEEGGELIGECIEENPHYNTRFYNTVFEHLDEGIEYR

SEQ ID NO: 4724 - protein, 179 aa, Methanobrevibacter ruminantium
MLRVVERTYYQQEEIKTLDCRIREAGVNTYSLARQGAVDYPTYESYNEVREERIKEAKEKYGESYYYHWRDVETYFYYLGRFFSDLEEIEKYLERTVTYKPHREELKEAMERLDKRFEEVINEFWYSLEEYEDITEDVLEQLKEGDCTVHCEFLIKEFKKFVNVICRIIKQNEINHKEF

SEQ ID NO: 4725 - protein, 96 aa, Methanobrevibacter ruminantium
MDAINVINQNKILVDVLYRGTVNLIDIVIGDALVYDNPTVVVKCYTTDLAFATTEIDEIVLENEEFELLITYEDGEFSILLKSHNLGELGYIEWVI

SEQ ID NO: 4726 - protein, 109 aa, Methanobrevibacter ruminantium
MGNLGGFRMVFVDLCENEIADMVESFYRNGDGSSRILTNRAVGEIVEHYCSFEVDGRITTNLRDFLLYSVVLYDTIGEAVDDGVNLEEVFIIEDRNCYTGKSQVILIGG

SEQ ID NO: 4727 - protein, 188 aa, Methanobrevibacter ruminantium
MRKVVNWLKAIGDNFSVDYLLLALFSSGDLILVAIVLNSYGVISPENVRELVIDYISYRKVDIFWRHLRRPRMSFEDYVLDNFEEMETGELTREQVVEFVSRQERKGLTFCNEIFIAVPLKKGSKDDIVEILWNEYFVEDYKENWLEQHENLGWNDWKKLLKKEIVENGGDDFQIFRNHLIDCVLMEY

SEQ ID NO: 4728 - protein, 63 aa, Methanobrevibacter ruminantium
MTMKVTFEDENGERTVEFGDDVDFVLIESDDDGNIEIREGDWELDGDSDDDWEEYDDWDEEEF

SEQ ID NO: 4729 - protein, 93 aa, Methanobrevibacter ruminantium
MDEFVETLFDTYWKVNENGEYMSLTDCGDFYIAKVAPCVRNWSIVIECNCFCFHCKEFVYHENGAILEIGMEISSLYLSQMEIKDLKIYMIDC

SEQ ID NO: 4730 - protein, 123 aa, Methanobrevibacter ruminantium
MGLDMFLEGIFEQDGENVREQVIYWRKSNQVHNWFVVNAQDGEDNCQPHSVSREQLEELRDLCRAVLADNDKAEELLPTRPGFFFGAIDYDEWYYYDLQYTVEKIDEVLKDDRYLYFEYCSWW

SEQ ID NO: 4731 - protein, 65 aa, Methanobrevibacter ruminantium
MECPCDNCEMLRENEPIKVIDWKSNSPFGMDLYHFEDGFRCCYNGEESLRKEDLSNHGCRLRGGI

SEQ ID NO: 4732 - protein, 116 aa, Methanobrevibacter ruminantium
MELMTREMEGKLKSFPFYSQDGKGDDAIVVMKFFNPYGLGTWYVLEAEKQENGDYLFFGYVESPITPEFNEYGYFSLSELENLKIPIKINGITVSYGRIERDLYFERVRIGDIIGN

SEQ ID NO: 4733 - protein, 74 aa, Methanobrevibacter ruminantium
MFGQKKEFVKKMYHVGDVVELVHMDDAQAPPSGTRGEILFVDDIGQIHVRWENGSGLALIYGEDRFKVVERKGE

SEQ ID NO: 4734 - protein, 50 aa, Methanobrevibacter ruminantium
MDLLYLYDDLTARREVYDSVGLSFVVKYKFSSRKEAQDFALKYGAELIEE

SEQ ID NO: 4735 - protein, 62 aa, Methanobrevibacter ruminantium
MIERRRLGMKYDIFTILDEISRKLDDGELSDEQVDFLLQMEILVEEGTITDEQAQDVMNGDY

SEQ ID NO: 4736 - protein, 55 aa, Methanobrevibacter ruminantium
MMKLSLKELGEEIEMILAEGGLTFDQVDYLLYLETCIADGSITEEQKREIICRDF

SEQ ID NO: 4737 - protein, 68 aa, Methanobrevibacter ruminantium
MYLEIDEVKCENIDRIEFDDVAMEIVLTDEKVYERIKRWLKSNEIDYDCREDRYFANLIEYVIRITWW

SEQ ID NO: 4738 - protein, 82 aa, Methanobrevibacter ruminantium
MSDSPLRNGSSLLLRNWSIPKWERNTRASLTEPSHCCTRSSEPETSSSPTKNGNSWRMLLSLSATNRAQVFLEGLYEVPLFL

SEQ ID NO: 4739 - protein, 450 aa, Methanobrevibacter ruminantium
MAKENVIDYKIERQNDNTWSYLYVTERGRGNIIASSFGELRQKVLKRGLPWNDISNLFTKKSSDSNVRRESVKNIDDESVLADVAKKSSDSNVRLEAVRKISDNYVLIDIVKNASDYDVRREAVRKINDSSVLEDIAKNNNDENVRLEAVRNINDESVLENISKNASDSKVRIEAIKKINDETIIIKLAKNNNDEDVRIEAVRKINDKTVIIDFAKNASDSKVRREAVRKINDSSVLAYVLKNDPSWIVRIEAVRKINDKSVLANIAKKDNNPSVRLEAVRKISDESVLISVAKNDSDYFVRLEAVKKINDKSVLEDIAKNDINSTIRRETIKKITDESVLISVAKNDSDYFVRLEAVKKISDAYILKDIVKNAFDSDVRIMSINEITDETVLVNLDKIDPNLRLVRDSLKKKNRRIHKFRTLEEWEEYYYDKKVPKHWITPRWHYGLDD

SEQ ID NO: 4740 - protein, 231 aa, Methanobrevibacter ruminantium
MVVKCPNCFSPRVSKCEDTNIKWQCDKCKCKFNHGAFDINAEMEKVEQLTIEKIERERERTEQFERAIKEAKEQFERERTEQFERERKERLEREKREKEREKIEKERERKERLERNRIKIEERERERIKRNERIRRENERNRIKSDKREREKSEEKRIKRNERIRKANERNSIKREKRERERERNVMTIDEYYRSIGYGSTGKSKVWSAIIIPILLVICIILILMFYGGGM

SEQ ID NO: 4741 - protein, 347 aa, Methanobrevibacter ruminantium
MINILEVVTKSRDSLLITAPVLIPGERDCEFDYGEEPLTEGQIRQIAHEYLANYSLVDKNHEFFETREVIGVPVESYITNEPISLKGLDGTVNEYPKGTWIATTRITDEEEMEKALNGEYTGYSITTVSKKFADKQIQLPRRVLMKDIKDPVGFTISLVRKPCVRGAKFCSMKEDIENGDVVSENIDDKLEEETKGFVQSIKGIFNKEDKDEDKNPEDEDIELDIKAIVDEVTKDFVNTDDFETFKNELEKALSDKFETLGAELFKSLKKSLEKDKAEEAKNQEDDESDEDDDEEEAKDNGEAQNVQSSKSIPNHDIKDNQKVAKTGAARVYEIMGRDNTGSAVRKL

SEQ ID NO: 4742 - protein, 345 aa, Methanobrevibacter ruminantium
MGNEATLNQLVNEQEKAVFKSMRTDMETGKAVLNVEQLGYFLREATLDNTILRDADFKLMKSFKKHLNRVGINGRVLTNGYDVNGETDPEIPAADVDFGANELDVKKLKAMCEIEDDEKEDNMTQAQFEQTLLQMMGERIGEDLEYWALFADSEVARSDDPLLNTNDGWLKKCANHISSRSIAPSNGMFDIEDGPEAMFDAMIKALPPRFRKNRRMLKFYVPFEVEDAYRNILINRGTGLGDSAQIGFNALSYKGIPIEHCSTLDDEDGRGMLGNRVCSMLTNPKNLAYGIWKNLSVEPERIAKNELTRYWFRIRGDVDYYFRNGAVVSVMNSSDAEALPELSRA

SEQ ID NO: 4743 - protein, 134 aa, Methanobrevibacter ruminantium
MISHIIVLLICFIGLVEAILMALVDWEDLAISVRKSPRKLYNVLKDELGLPEWNELSVIERRSMKKRYAVIRDSFPELPPWEELSVIDRRSHKRLYKLIKSVYDGDYDDSPSLEGPPAAVGPQKEIPLEEAEYP

SEQ ID NO: 4744 - protein, 137 aa, Methanobrevibacter ruminantium
MTWIGTEDVIEFTGVKPQTFRFEKGDTSSLETLLEKWILQAEGLIISYCNYDFNDLEEIPPAVVNVCLRLTANMVALAQARKDTPVIQVKEWNVQTVSSNIFSNDLKRDLTPFVHERKSYKGDEIDFFVITGDDDSW

SEQ ID NO: 4745 - protein, 147 aa, Methanobrevibacter ruminantium
MKLQIDVEELKPLEPRFKKVAKRTVVLTANELQRNLKKLSPVDHGRLQGSWVIFQTGELERTVKSSAKYAIFVNDGTGLYGPLGHKIRPKNGKFLAFTPNKGKFKGKLVVVPWTRGQKPQRFVERSMEMTERRVQEFMIRAMMEMDS

SEQ ID NO: 4746 - protein, 169 aa, Methanobrevibacter ruminantium
MRFVNTASLVPQTVKAYLEREICEGGLLEDVETLIPSVNSDVPVDPPAIWIVQHPTTRWSGSQPNLSNKIAMSVPFEFVCVEYSDDLEEAEILGISLASRVGSSLMKNFNKVKVDDSMPNRFFHKLEFETLYPVGEVTVVGKSERIPATSIIFNFVYVVDWLKCNRRYD

SEQ ID NO: 4747 - protein, 426 aa, Methanobrevibacter ruminantium
MGIRVVGMKEEARYGVAESAPDFHQEVSKAKASLNSTPNTKSSGSRMKKKARAGVYKPTANIEGEVDLKRIGHYLKAFLDNYHFTDGGSNPNVHEFWGGENNKLSSFTLWVTFDIFEKTIVGSLLDNFKMEVSDEYMKFTADFVYKTEESDEIENIELYKVKLLDGDWALMFYDVSVEIDENAPPGIVSSFSFDGKNNINVDKTIGLGSRGPQRKAAAQGRDISISFVSTLERETLELIQKAEYGEVGTEPSECKLCKIPLKLICNVCEDTTDRLEITFPECIFAVDYELSEADEIEVTFNLDAMGTGYATKLDGTRVLTDMYCRLVNDQPEIKSGEGVTSATVRLTVKDDNNQPVASNAVTIVNRVTDESYEATTGSAGGCSFNDVEPGRYDVIVEGYDVVAGSIISVNDDEESFDITVEEIEED

SEQ ID NO: 4748 - protein, 146 aa, Methanobrevibacter ruminantium
MVVVKKSDILKGVKKIEKVKIEALDGDEMYLRPLSQAEINEVDEIEAKAMGIFETNETAHRGRRQKPKSVVESKGKINLELQQKAQHQAKTKAIFLSLDNEKNVGEEAWSETEIEQMPHKLFEELFNHVKRLSGIELDEDDVDTFH

SEQ ID NO: 4749 - protein, 1099 aa, Methanobrevibacter ruminantium
MPSSNVMNIIVKAEDMASSVAQKVENSFRKLGNTIDSTFTTSLSNTKFNQELTSFGTDLDKVTQRLKQVGVNGQSSFNQLTNAERRTLEKLSEFDPVSAQVLQHLSRIGITGQQTFNQLSVSEQKSLMNMKSTAQQLEEVNSKLRVVGIGAAQAANMLNQMKLDPSVGSNLDRAKLKVSEMGYSLDSTKGKILVLGTAIQTSLGNKWDSIKTKVQTTATNIRTALGNALTSVKSKVQNLGNAFSGLGGIISSAIGAIGMASISQLTVGLAMNRERMTALTNATMGGAKAGDQLLNGFTGVNKVFKDLNGNSTNYFMGLDEMTNHSLVSLDDLGQAMSTIKMSTGMSNEELMMFSSTVNDVGQRAILMGKSGEEAISLMQAAGRGLNGEFDMLKTNFGITKDTLTDLGWSGAADDVKGYQEALDKALEKGGDMDGMLDTTTGHLETLKKNFRVAGRHVGEMFTPYIDMAVQKLNGLKETCPGLFENLVMIAGAVSGFATVAPSIAPMISVFGDVGSAIKRTAGFLGLMEVAEDAVTLKSTFLTIAQIAGADAAVLQTAANSGLTASFWAMAAAILANPLTWVAVALIAIAVAVYEVGKSFGWWSDIGSMIGAVWAGIQRLWSAFINNPNVQGFLKDLSNAWNDICEALAPVIDWARKAWAELFPPSATGSFDIVRAIIDVFGQLGDFLGKVVNAVKSAWNALGGFAGFLPMLLGPVGMVVMALRMIVCILLGCSPGIVPALQKTQSVFMSVFGAIAEFIGGAVSNVVAILTRIISALTGIFTRVSSIVSTYLAKMISSVISWASSIVSKAKSASSKFLTNVVNYFSKLPSKVWNHLKNIIQKVTSWATSIVSKGKNAASKFLTAVVNHFSKLPGKVGTYVSNTASRISSGANKWVSNARSKASSTVSAVTGPISKLPGKVYNEFMGIGSRMLSAGSALVSKARQIGSNIVSGLLNAMNIHSPGTIQQKVVAEFENTLSRVGSMDSTALDVGQSVGNSIVRGFTDFGLDTGSFNADYSTDYNLNRKNDDNLDVNIKQELEFVFDFKNLPNDVDEDKLLEMLKEMVTDKSVIQALVSNPDFQSMDTKVKNSIIAKVKRARGV

SEQ ID NO: 4750 - protein, 1012 aa, Methanobrevibacter ruminantium
MASVTKYPSNVSQTTGGKFVSFSNLANIKNNADGAHAVSSVLIKSKKQSPNRPSTVSCKGFGFSLPEGAEPTKITVTYRHRKNAGSDYSSKNKTHICNIGGPTISLLGVSGFSSKGSGCTTTMTTHTKAFSVHGKLSRAQVNSANFGVKLDYPTNSNTYNGYMRISYVRVTVEYITSQYSVSVKHVSGTYEDEDYVVSLGISNKNLTSYNPTCTLTVPAGFTYKGVTGAATGTVTKVNNRTFSWNPQLQGRAGSRQISLAFEPNVTFPEGTDSYSGTFRLSESLNGANSSLNAVISKRPAPSGSETAGESTQVLENEDTLSGNDSYLILNVGEEFLFSVEFTDAENAVYNRIGNGEDDWGRIALTLFKLVDGSWIGRSHYDVSTQLEYDESIPEEVALAEGDKWSLNKTLSIGQVGTYRFSLRYENEHNHELDYDMRQFLAYVRPSEEQLGNPCFTVLRLSDEECDRLGSLHTYIAQAYMKHITDDTHPRDWYRNLRLGVFNNAIADNITVTSEEVDGEIIETVEDSTDYESLTNEDIFNNAEYWSDALANVNEFDNLECEFTYNEDYPLCIIMTGDYNEADGYDYDVGTVEYTNPCIVEKDVYKQREPSGNYPIPLENVLSNDDSSELGIEQFNISTPIILYTLPFDEGYGTNEEMTIRGIEVSGTLEQSDELTVNAKLKSPTGISGTRSIIIEENDLTLDSTNEFRIGGFGDLWGFSTFDLTNLDDFELELTVNNNIHDTEANINFQDVKITFYLEFIQDQKINIKINEEDLSFYGVFTDDVIIPEGLETDTSFLTIDGTDTNDAYRQNIKEKEIELILYIAECDFQSSTDMLRQLSKVLVNERDDYNRPIPNRIEFSHYPDVYFEYVMESALSVESDISTYNIKAKLTIPSGTAFSKKTYSTGVDGYVQGIAPVNPVITFKPQSDTVEILERKSGQRFNMTYTAGWETMIAEIDCESHTVVLKTDEDDSEMTDISGACDFNVDWFSLHGEYQFEGTGCNIRTVSYNERW

SEQ ID NO: 4751 - protein, 1102 aa, Methanobrevibacter ruminantium
MGIAIVVMDNEENFLQFLDPDLCTINETIEELGLRTLEFNYKFQDYVEDRDLFRIGNKIWISNSQSLEDCLYVINTPVENSVYQENYFACEIEEVLAELYYAPLFSQTELTSANGFTLRTTNGEQTVDVDWNALNYWFGLYFNIGVVQECLGTYANRITVNGTMNRLNLLRSIEEQTGNRFVTRYEKDLLDNTIHRYLDFLNPVNVSKNWKLNIEYDFIYEDDGEYCEAYTSDGNPISEIYDDIEEEDDIVDFPPSTPRLNVDPEGIEFRIVNEDFEVINSDGNVYVDDRQQTPLVWSSASVGFTGENRHVLITLSKEKSFVELSVNGKSFVMLDNAVGDVVSTGFVNPSSEPVQRSSTVIPDDSYFEIFDVSRNRAVFRTCINREIGHVHEEVLDFGYNLEEVFFETNEEDTFTAISPVLSLDDDSEGLTRANMNTIISNYTNLSIPKGKIIPMILERVNVKATTLANAKSSLGTFDVSRNYYSRPVQPNDSIDTSDSSNNTWEFWRATAYWRAPFAKFGGDLHVATDAVLKTQYTDISGRSDNGDERRVTRPKMGMVETGDEDAYAIYNDVALKLKEKMYPEFNVSVDVANLRKGRFNDYSLYDKVYIKLPNSTELVTARVTKTVKDANDISRNTVELSNYTFSSTIKNIQNETFIDAYNVSFKYPNSKTLSARLVNLDYDNSNPDSVQYPANQMITFTVYNKDSQSIVASYNKLTNAQGYATINMKYDPGNYEIDIGFGGDEEYLDCSTSVEANVYGKKVVEKPVVVKTKSKTTKKTSSKKKASSKSTAKTKAKTRSTKRYYSKYGVSPDGKYLMAIGRPSASGELAKYGYKFYRTVFVRKCPMCGSTEIYWSIFWAGNEHGSWGKFPATGRRESGSAEGQIFCKKCDADWSIFGNNHNSSHKDLKIYKKPARSTKSEAYTLKKGKMYYDTVTVTVKEKKNTSSKERVVLANDIPKAIVQLALSIVGNSTGLAAAKKIAKWCGHKRNLKWVEYRNFKHGVSWVRRKRKCNCCDGARFMLTLMDAAGCTEKLRLQYVNVSGGKGGHVFTKITVKETGSWCYVDPTCKFENGKNPWNHYIKGYGSPPGHVYNYNGPINPPF

SEQ ID NO: 4752 - protein, 505 aa, Methanobrevibacter ruminantium
MVEKITVSPQEVRGYGNVVDEKELEDYGSYRCDVSESSEVIKGVEERIFSVSGVPAPALSIANVTEDTRRGRCAHISASFEDGEGDGLDDKAISLKSGDDVLATITTGSGENVFDVVLYDSAQLYAVFDGDDYYPPAVSEAITVNPAKSLWDVEFILDEEEYEVGDTAILSGTVGTIVDEIVDGEIVTRRQMEANVTLTLVTDLGIRRCSTNANGEFVLQVPNIQQNQWRVVIAATSTHLVFNGLIDVPVHDYSLVISGSENSTAASTILVVGLTDFNSMVEGATISIAGSDGSSYTAVTDSMGGATVNVGRLNGATTFTATYGNVSSTVTVVPPLDWYDASNYTAGSGRMPSSRASSIYLQAVGGRWLNKEFTDSESYVLEFDLILSKNNREGFYFGANPNSNTNSGISIFKDISNTMIETFDSTGTAIRLESSLSGSYFNTGTHHIRIERDYDVAYIYFDEDLIFEFDDEILSYGAEDQMYNTVGILSWGSGIIEFGNFELSD

SEQ ID NO: 4753 - protein, 52 aa, Methanobrevibacter ruminantium
MNDESCRNCVFRNEDYPPFYCDFGDDNPVICTVKMKKMREYKKEKLRSCLDG

SEQ ID NO: 4754 - protein, 228 aa, Methanobrevibacter ruminantium
MVRFSRDMLQDGAKRMFKWLRKGEGLPNYLIMYDMDRNKEYKLVPKEYAGLYESRNIFWIKNGREPNYVTLTSVARNPLVMDYQNTNYTCCPTSLSLASQMLYHYKSESECAKALGTSKGSGTSPAQLIANAPKLGFKIIPIKRDSKEVKKYLKKGFPVICHWQVNQSRNCKGDYTGNFGHYGLIWDMTSTHYVVADPAKGVNRKYKFSCLDNANKGYRQNYYVVCPA

SEQ ID NO: 4755 - protein, 749 aa, Methanobrevibacter ruminantium
MKKHCFYFLGDSFADICNEAMFCEKHLVEGNYLDSIIRAGKASEIITVNICELEGQDGLISSGQKKRLEMLGYKGIISYDIYKRLNHIRKIRNKAVHGHLSDIEDNANILHAYLYLICAYFYKEYRDTNFSAEDYTGPIMDIASKPKETASETSEDNENIGEFISSPLDDYLFEKYDDSYLLNELSKLKDSSKEAVEDDNLSEFKEYLHIDRSIQEDFLKALNRATSFNSSHLIMLCGSVGDGKSHLIANLKKKNPELFNQFAIHYDATESFDPEKNAIDTLASVLEPFNDNNLNNSTEKLILAINLGVLNNFLESSYANEDYTKLKLIIEEANIFESNEVSDNIYGDKVSFVTFSDYNMFELNDDENSNYTSSKYISSLFNKITQKEDTNPFYVAYLKDKDSHFINPIIYNYEMLMDEEVQKTIIDYLIKIFIKYRKIISTRDLLNFIYEIIVPPEFLKSEDLDNINDFMDYSLPNLLFGYPERSDLLKLCNELDPTLHRNESLDKFIIDLNINDDTEKILNRYFDFTRFNFLEEYGEYLVDFREFNNSEKEKVTNILIRFAVFYGKSIIKNNFKDKVYLNYLKYLYAYNTQSHKDYKYLFTEVKDAIFNWKGSYKKNTICIDTLDSFKVYKNLKLKPSVDKFEKSLLDGLFLGNRFKTDIKIYFSVESNKKKIPLNVDFSLYQYIMKLYNGFKPNQSDKDDLIILDEFINNLLDEDTDDDLYVISLETYEEFLFESNDFGTFEFKRG

SEQ ID NO: 4756 - protein, 456 aa, Methanobrevibacter ruminantium
MDFSENYNILLKQMTCDVNKRKLIHQINQNSPLLPFKTNTPKKANFENGFDIILGELSRILLNKTIEKNFKLDNIVSNLIDNNIEIEDGTKEYITKLLNEYLFDEKNDLKISHPNLYLYIPLSNNKSSNGEQEVALFLRDIFCKNNQNLINFFESYDSNHIILNLILKNTPNLHHKITETKYVIHFEEIANLFNEDINYAILYKKFFMENIGNIFAYYYFFYISQLILKISKGFNDNNEFEKLYYLLDWESASKNRKSLNSYSLLKHHSKPLYAKMAVIDQINTLLGTNNLLEKDISEYFNNLDINSKNNFLHFLKKWVSDYRYVRNFDDKELPDNLLELTEILFESLKNEKLGVDGAVQSRYALNLEDIAKKYLLKRRGSYGYVLNINRDMLLVLTALCVKDKKIKLNQLFIEFEKRGVYFDKYSKEEVVNFLTKLNLIDKKSDSGDAQYVKPVL

SEQ ID NO: 4757 - protein, 1740 aa, Methanobrevibacter ruminantium
MLNQFYDYLSNKLLNYFDDTKILSGEKFFISFDEDDQIMSFYNSLRSIAETNFSCSEFIYVHTISGKEYNTYSININGVKFVISESLTINVDFLVTLRNQVTSQEGVWKDTALLVICNEAIDSIGKGMRNLQKEGMPLNVKSISKNLEDEINDSQILNYSDKQIAKFSLNIQEEELFQTTLWDYETILSIINKGFVSDEDLRELNLFKDDQLNQNSPQKMLKRLKENYDTFNEVNKFSQYGDKKEQLKNMFTDSGVSILSKDDWYKAEWKMVKKSKDDFINQQNPLNYNENLEKITENGLNYWEIPNSFTKTGKRKRNIIVFNPNHSHEVSLKFSFDQILSNSFLNTNSKKFTIARGKSLIVNFTLDSSEPIFKTIKYKHKNENISEFTFNIVVLNFEPEIFNSIKSRFSVNVKSKQIIVTNDEDSFDIVFGTGSKEIEKLIKENGEKLYLYDDESLIISEQSPAWNDGKLSFKLYKDNNYAPFLIKEKSKKTLPVNSYVIWNLKRRNMENFIFNGVKAVQDVNSFYLVEEFKEFLKMEREIIKQDIFYAKRNIDGSLEKIEVSFSNELETAYMDIFNYYKTFDDSPEDNLPSLVYLNDDLKELYKKFITIFNKEISEIEENSILSDFKYKKNLLKLGRIETDNKIMYSPLSPLNIAYQLEVSKQCGNEDLSVNILERLVPNNLIPYICSDDGKELFRPIYQEEAHEWLIYEKSEEVSIGTTNVFISNVVTEKLNQFVKHFNYLFSFNNSSPIKINLINIKDDKEVVKGVFNFIRSRLPDKTKTKKVIPVEINIYNDAEKSSFDNLFDCQSEIQLLEEFGIKKLKSDIFDPIDIIHMIQNNISYYKHPFKKEEYEYAHLSFYKVKSHNNIANDNMDKIETGLSLNGLLSSVTSTTKHSEYRTGFGTNNILNMSNPLIKTVINLNELVENSKNFGKNTYSKNKSVITTVELEEDNIEELYDKSHWVTFIEPTFGIEYFDSSDSNLIIIHYSDQYSSSSKYDTITVTNKSTQYEEIIRDFLQSKYVKVTDEELYDVIKMFNSINGEWLLRVISNSGHYDREKLSIISAIKYCLSILDHKDIVWIPVSMEEILRIAGNVKLDKNKGIFDSKLIKGNHSDDLLFIGVKFNEDNRIEVIFYPIEVKIGLNNASTIKKGKSQLDNTYKLLKTQLQNINVENSEFRNKFFRNFFIQILLSNEQKLVTNHIWDEKGLDRIEEFKAELLNDEYDILYGLEEYIGKGSLVSFKKESHHISIYMDVDKQVIELPEDFAYYGLATPIREIHDEIQSDNTDILAETLLSHVDISEIRAKNNDICDSNEDMSIDDDFDNLSEFEDSFIEEESEISEEPDEELTDATSSSDNESIENIGESPSKISNVRALIGTQKGYNHKVYWEFGHPSLANRHMLIQGKSGQGKTYFIQRMLKELSIQGIPSIIIDYTDGFKPSQLEPNFKDSLGDKISQYFVVKENFPINPFKRNTIMIDKDIFIEEDNSTIASRFKSIINSVYGLGIQQSNTLYQTVLDCLDKYDDNFDLNILKEEILKDESNSAQTVLNKLNELLDKNPFASTDFDWSVLDNKDGKVYIIQLTALSKDIQTIITEFILWDLWNYKLTNGSEDNPFIVVLDEAHNLDFSNDSPCSKILKEGRKFGWSGWFATQSVKGSMKIDEIAKLENADEKIYFHPTDVSTIAKDLSKDNEDKKIYEKELSQLTKGYCIVQGSAIDSSGNLYQPNPVTVKIEEISFDEN

SEQ ID NO: 4758 - protein, 1054 aa, Methanobrevibacter ruminantium
MESKDRIENTIFNDKRMDAYIDKYFEEFTLSSEQEEALNIWIDKLNNDQLTSEKGNYHNFFEIILEDLLGYKRSDVKHEENIGDEGHPVEFVLEKDGKDYVIIELKGTTYKDLTKRRPGQQSPVEQATNYASAKKETEWATVSNYDEFRFFNPTARDNYISFKFRQLKDLEIFKKFLLVFSKFSLIDEDIPKKLLNETKVIERELENEFYQLYSDTRLMIIKELEYSSEDINRIEAIKLSQIILNRFIFLCFAEDLALMEEETTADVLLTPLKHRNLIGNTMWNRLNELFIFANQGNKHRRIPAFNGGLFEDDLSNLKIRDEIEDRSFFENWNLKEDFEDKYEDIAKLIGVYKDTLNPIFINLLIISTYDFDSELDVNILGHIFENSISDIEELKNDNQEQRKKDGVYYTPEYITDYICRNTIIPYLSISGKASTVHELLYEYESSNSLDVLDSKLTNIKVLDPACGSGSMLNKSVDILFEIHEALHASKYAGDSSLDRFFDSLEKRKEIISNNIYGVDLNEESVEITKLSLFLKLATTVGLKEGFQLPSLDKHIKCGDSLVDDESIAGNKAFNWYESFSEVFESGGFDIIVGNPPYVDIKEMDEKTAKYIFDNYETSFNRINLYSTFVEKSYYLLKNEGIFSFIMPNSILFNSTYSKIRELILNNTSILNIVRTSDDVFKDAKVEPIILIFKKGYDEGNKTKILIKKDDMDEIPINNYSEHFFTQERWFENNSIINIFSDDFTFDLLKKIDGNNERLIDYCDFSLGLTPYDKYKGMSEDIIKNRKFHSKIKLDDTFKELLDGSDITRYNVKWGEKEYIKYGDWLGAPREEKFFKNPRILIRQILSIAPKESRKRIFAAYTEEELYNAQIAFNLVLKEGFDDKNLLKYFLGIINSKMMTWYYEERFMDKNKKNFAKILIENAKNLPVIINSNFLDEIVSNVDSIIELNKEFYSVRNAFQTWLKIEFEIEKLSKKLENYYDLNFEEFLKEIKKKKVVIRPNQIQDLSELFNESLGKIEYLQREIKEADEKINLLVYELYGLNHEEIEIIENSFND

SEQ ID NO: 4759 - protein, 86 aa, Methanobrevibacter ruminantium
MDDETLILIEYIRNAPTREMVLKSFEGVDFIRPIQISRKTGIHPNNVSKKLKDLREHELVYVINPEYHVPKLYRLTEKGKNMLQFL

SEQ ID NO: 4760 - protein, 686 aa, Methanobrevibacter ruminantium
MNKKIILSLLLVLLVAISVSAVAAADADVTYINDAADVDDVADEKVAPLTASADAQDIQTKLDNAKPGDTIELENKTYDVDTTFNVTKQVTIKGQDTVIKASGASQGGSGALFIANEAGTAFEGITFINTDGHKNYGEQVSGYAIQLAIENGTVDNCKFIDWSSGVYGKGASFCSITNSYFNGSSEQVTNGGKKEYGTKAINLMGSHDITVTGCTFEGQVLDAISIASNSGNNIMTDNTFIDNCYAIYFGGASTQGCVIANNSFIRCGYCVDDKGNVIFKDLPIISTQKAANGYIIADNTIEANEGSIFMKAESGNTAHGYPSKIGDINITGNTITATAGANPEGITFMYILSNSGPLNPYAPIAIVNNNLDAGITPVTVWYADWDNENGTVIPAADKAVTSINIAEIAAADGTVTVELVDVNGAPQAGQTLSYKIDDGNATEIETDENGKAVINVPIDENATAQTVAVEFAGTNDLAASSAQVSFKNTATKRTATQINANNMSVVTLAPNTGDTNDNYFNATLLDAEGNPLVNKEVKIGFNGKEYTKTTNENGVAQLKINLGYKGGYTFAVAFLGDDEYEASFGVYLINVAAQTPKLTTKAATYKASAKTKSISATFKTEQGSVIANKKISFTVNGKTYTGTTNSKGVATVKVSINKKGTYSFTAKYAGDNTYKAVSASAKLTIK

SEQ ID NO: 4761 - protein, 696 aa, Methanobrevibacter ruminantium
MSLSIFVLVIGGGFINKRILLIFVFLIFFISIGSVVANDLDSNSVNQDNYISDVDSFDGSNSVLSSSNLDSSIDKDNYLNLDSNNNLNLDSDKNSVSGSDLNLNNADLINSVSGSDLNLNNADLINNSTTNDSSNSNNSNNLENLTNLDDSKGASNQKPQKYLIPNDSSIGSAYIQKIIDNAAPGSTIQFTGSFYKNIYLKIDKALNIISKSGTVINSSYRLPVFTISRGGSGTNISGFTANLANSFVEASDVSDISISKNKIFTKRKAIVLENVFNSKIVRNSFLRFETAIDISKSGGLTISNNNITPDNGYNVGISLKDIYRDKVSILNNNITGHDRRIESTGIYFGPNAKNVLIEGNIIDEWYTGVDFPNSVNNVSILNNTLNHNGDGVIINGWINNFTFNKNVVTNTGRVGVLFDYDFYGTKGDFTLEKNFFTQSGQLDLRNTGDQAVTIGENFASRRCVRVAMKNGFSIKTRQNGNGYYFSIVDKNSRGVSGLPNFSATISINGVSYNVNFINSVAYVEVDGASGENDEVLLDVGEDKRKLSDWGETQNLSSSEMEYYKKIYDDLIKSMVEETNNDNQDMKKVEDKNGTGSTPSGGNGGGDSGISDGRSSVSSNGDSSPASAGTSNVAASSASSSAGPSAAQADTPESSTVKSLSLDEETFRVAGVGGLVFLIICVIGLYYREDIMDMIKE

SEQ ID NO: 4762 - protein, 227 aa, Methanobrevibacter ruminantium
MMDLIFEYLIVFILLFATNIAFLLRYSSFNKNKFIPFVLGYAIIVFALTFVFSSLNLQKESIDFIPYILFAVSALMLIISIRYVGFGKNYGINDDKVVLYGTILSSFLSIGALALGLKSDNLFLSGLELAILSVVVIFLVYKISKIFNNAKRPYYAVIGEYMFLEFILLLILALTFSSVRELDYSMFGSFLILTPTYKVLYMIIAIVILLVLGVLYNDWVLKRLKRK

SEQ ID NO: 4763 - protein, 213 aa, Methanobrevibacter ruminantium
MILQGTEILTSFIHIVSESLLAPVVIVLVIFLIYAILSFGGFLNEWFTKKPLKSAGLEKLLQDISSSDSPEDLKAVIDASALYKEQKEILVKITDNYNLGPEARKAFASKLIEEEESNLLKLTTKTDILVRLGPIFGLLGTLIPLGPGLSALGTGDITTLAQSLTIAFDTTVTGLTIGALGYIVSKYRKQWYESDLTTTETIAEAILEKLNQF

SEQ ID NO: 4764 - protein, 105 aa, Methanobrevibacter ruminantium
MLRKRKRFSDDGDEDPMSGISNLSDAMLVLALGFLIFAIMALQVNPDMMAKTQESQAQQATSQVSTGQDFNSSANAGASLEQSGYSEVGKVYKDPDTGKLVMVQG

SEQ ID NO: 4765 - protein, 540 aa, Methanobrevibacter ruminantium
MNNKKIIMSFLLVLLIAISVSAVSAADIIADNQDSISSNDNSINEIATEDISKDINDKSLSDGVSTGGNNWIVKPSTDGKSDANSIQKAINLDNTKPGDSLLLTDKNFTLEKSVSLNKDLTINGGNIYNQNNLTDLFIIDPKSEGGPKNITITNVTFYVNGNENIVLANGENYGTTYIDLANIKISNCTILPINPDSNINDTVLLNIKSDRTVGQTGQSTGFVLVSGNKLNGINTLKNNDYVLKDDFVIQKADPILNTALICPNMTITTYDKNTNDTPSYYEVKLIDQNVNPVINRTIQIGFNGKIYDRTSDENGIAKVKLTLAYTSVYTFAVYFLGDESYASAFDVSTVTIIKKNATITPKTVSYNVNAKTKTLTATLKDKNNKALANKKVTFTVNGKTYTATTNSKGVASAKISLSKKGTYTFTAQVLQGTISIIQFPKKGKLTLNPLSTNLTVKKYTFKKAATKKIQVTLKSGKTVLKSKKLTIKVNGKTYSGKTNTKGIATITIKLTKKGTYTYTANFAGDNTYKAISKSQKVVIK

SEQ ID NO: 4766 - protein, 273 aa, Methanobrevibacter ruminantium
MSFKSPADTAKAVASAATAKGEMPIIKLAILGFLAGAYIAFGGLLAEVANTGAIAGGVPVGISKLLFGAVFPVGLIMVVICGSELFTGDVMFMTMGLLDGKTDIMGLLKNWVGSWVFNLIGGLFVAYVLAYLTGIMVPEAFAGGAITIANTKALGGATFMAAGKSTASLTWVQCFLRGIGCNWLVCLAVYLANAADDVVGKFFGIWFPIMAFVCIGFEHSVANMFFIPLGIFLGAEVTWAQFFINNLIPVTLGNIVGAAVFVACAYWFVYLRD

SEQ ID NO: 4767 - protein, 683 aa, Methanobrevibacter ruminantium
MVEIKYVPSICPYCGTGCGINFVVKDGKIIGVEPWKRHPVNEGKVCPKGNFGYQFINHPDRLTTPLIKENGEFREASWDEALDLVASTLKKYADTDPNKLGFYACARSPNENIYITQKLARAGCGTQNVDHCARICHGPTVAGLATTFGSGASTNGYDSIEEADFIFCIGSNNMEAHPLFGRKIIRAIKNGAKLVVADPRFTPTAKLAHEYMQFKTGTDVALMNGMIKIIIENGLQDDEFIKNRTKGYEEMKEVAMKYDLDKVAEITEADPEQIERVALEYAQAENAAIVYSLGITEHSHGADNVMSTANLAMLTGNVGKIGGGVNPLRGQNNVQGACDMGALPSDYVGYQKVANPEITKKFSDAYQIELPTTPGLTLVEMMNAAHSGDLKVLYIHGEDPVLSDADIKHTKEAIANLEMLIVQELFMTDTAAEADVVLPAAGWGEQEGTFTSGERRVQWLRKAQEPPEGTMLDWKIMEEIAVRMGRPRELFHYENAAEIWEEIRELAPSYYGITHERLLKPEGVHWPCLDPEDPCEPLMHKDKFAHPDGLGVFQALEHRGPVEVVDDEYPLLLTTTRILFHYHAAMTRRCETLDKEVPTGFIEINTEDAAERGILNNEIVKAYSRRGEIEIPARVTDDIKKGIVNIPMHFTECAANMLTNSDSFDPKCKMVELKACAIQVEKL

SEQ ID NO: 4768 - protein, 402 aa, Methanobrevibacter ruminantium
MAVNVNDMFYAYSGNEAIKEKGEYGGVVTTIMKYLLEEGIVDAVVAVEEAADLYDAKPILITDPEDVIKSAGSLHCGTLNLAKFVSKYLDGARDMKIAVTTKPCDAMTLKELMRKRKVIEENVIMIGVNCGGTMPPVPTMKMIRDVYELDPADVIKEEISKGKLIMETAEGEKAISIDELEEEGMGRRENCQRCTMNIPTNADLALGNWGVIGELAGKATFVEVCSEKGADILDKVIEAGLIETQEPIEKGVTIRANIDGIMVKQAMAQREKDFAGTSGDILEVFAEYKEEFSKCMKCYGCREACPLCFCDDCCLEAEGPEWVPGGYTPAAPFFHLTRMVHMVDACTNCGQCSEVCPCEIPVSKVWATVNQKVRDIFGYYSGVDNEEPLPFTEFGPKSYRQY

SEQ ID NO: 4769 - protein, 235 aa, Methanobrevibacter ruminantium
MRIISIVGLKNTGKTSLTSKIIKELTNREFKVASIKHSHHQMEMDHEGTDTYKQMESGSDFVVGIGGRTYFNINERLDLERILFLIKLIENPDFVVIEGFKSYPYAKIATCKEVEDEYTIKTVNSFEITDEELLDLVDLIEERSYDILDTLFVSDCGYNDASIIGQAFAQGKLDYNPDTQAEVNLAIDGINIGLNKFVSNYIKQTVLGILNPLKIKEYGVEDFENIDLTIKNKKD

SEQ ID NO: 4770 - protein, 61 aa, Methanobrevibacter ruminantium
MACNDDFENNVTLAINGNDIELNKFTDDIIKETILGLLKAIKTSEYGVDEVKDVEITIKNE

SEQ ID NO: 4771 - protein, 311 aa, Methanobrevibacter ruminantium
MKDKVRDDYERPIISLRISITNRCNVNCIYCHHDGMLDSSSEMTPDEIYEICRIAKKLGVEKIRLSGGEPLVRPDIVEIVEKVNSLDFRDISITSNGIFLDKLAGPLKDAGLDRINVSLDTLDEETYKMIVGKNVLERVKKGIIESCAVGMYPVKINMVVMNNINNDEIMDMFEFTKKHGVILQLIEIIESESCDDNDFNSKYHYPLAEFEKHLAEIADEIKVREFMQDRKKYFIDGGEIEVVHPVDNTNFCKNCTRLRITPEGKIKPCLLRNDNLVNLIEFIREGASDEELIDIFLKGIHNREPFYKEEN

SEQ ID NO: 4772 - protein, 2309 aa, Methanobrevibacter ruminantium
MKIQRGIYIILTLLVLFSLSAASAADDLTDDIISADENEELILDETVIDDVSNANDNYDEELIKANDEKFVYAGNDSDELREDPGTYSGLSSEIGAGGNIVLTHDYYTYDSGDTIIISISNSVIDGNGAIIDMAGSTIRAFKVTASGVTIKNLTIKNANVTTDDLGNTDDEGAAIDFEKSGTIEYCNFINNSANAAGAVYFYKDNSKAINCNFSYNQAVYSGGAVCFEESGTIENCTFVNNTAVYDILGGGGAVCFNGTGNAINCNFTNNTAQGYFSWAGAICFNTNGNAINCTFTNNKAHDSGGAIEIYGNGKLENCSFDKNSANDGGAVKIYGATKISNCNFTENKAAELSGDGGAIYWNASAGKLENCSFAKNSAFHGGAVSFEEDGEVTNCNFTDNLAGDSGAIWFTADGTVENSTFIKNEAWDEYGGGIVFYTSGDVRNCNFTDNEADKQGGAVYFNGAGTVENSNFTNNKAQDGGAIFFSEDSTVKNCIFVKNCATDIRSDRYFERCKYVFYKNGEVTNSSFTENNATEGGAILFKGNGKATDCNFTNNSAKFGGAIDFESHATVENSSFNGNKASSNGSAIWMNRAGGIVSSSVFVNNRANTGTIFFRNDNSTSHLTINDNIFLNNNGVAIYFDKNDSDSNTDYNWFGNNATNYDIAPVANNAEINTWLFLNTTVNPDMISILDSLDIAFKLYAYTPSEVSEYDNIRLKAVDLTLTPTNGIFNTTKTELGKTVQYIPESDGIGTLTASIENASYTTTLKITDGTTFFDLDYIINANNNNTIVLDRDYTYNSTFDYNFTDGIVIDRPVTIIGNGHTINAAEMVRIFHIQADNVKIKNITFTNAISNGYGGAIYWQGANANLSSCLFENNSAVMAGAVAFYGSTGSIVSDCSFMNNSANNGGAIMWQVSDDSVVSDCSFMNNSAIQGGAIYWSSNDGVVSDCSFVNNSAVRNGGAIYWEKNNGNVSGCIFVNNSADNGAIYFNNQNFGQNLTINHNIFLNNDAVAIYFVRNDSASNADYNWFGNNATNCDIAPTSNNMEMNTWLFLNATSEPEGISILDSCDIIFKLYAYAPSGVSEYDSSRLKEINLTVTPTNGRINTTQAKLGEKVHYTPESAECMLTASIENAFYTTRLKISDGTTFRDLNNLINRNDNDTIILDNDFIYNSLFDSKFKNGININRPLTIVGNNYTIDATGMARIFRIQADDVEINNITFANAKIDGNGGAIYWYSGARGIVSDCSFVNNSAKMYGAAIYWNGANGNVSDCSFVNSTVTDEHGGAIYWHGANGVVSDCSFVNNSAKKYGGAIFWNAANGVVSDCIFVNNSAKSYDGGAIVWNEGLNGAISDCSFVNNSANDGGAILWNEAAGGTVSNCSFVNNSANKSGAAIYWDSGARGVVSDCSFVNNSANRSGALYWFANDGVVSASIFVNNSGDNGVLYFNNTNKRNLSINDNIFLNNDVVAIYFVNSDSTSNADYNWFGNNASNFDTEPLTTNVEISTWLFLNATADPNPVEILNSSDISFKLYSYNATGISDYDNSQLQPVNLTLTATKGDVDSIAKLGETVIYNPTSLGTGSVTAKVENVAYSIEINNIKSNPNLSVESDELTYGNNIAIALNYESAATGKVNITLKGKKSDYTFADLDLNETISLGILAADEYEVIVEYSRDEIYTNASARGTLKVNKANSTLTVSDIEFDYKDMGSGEISFTNATGVEAKVINHDEAIVFVRGNTITVLNLSADSYILEVTTITDENHNEVSKNATITVRKVNSTINVNDIVLYYGESINLAVTTDGAIGISADIDGENVELNENIVTIPDDLESGNHTLTITTVPNDNHKEASKTVNIVDCRIGNITVVVDGVEYSIPAVNGTAITTNMPEEIEKLKENITDLTGQLEEAQTNATNLANNLTIANQIVDKLIAQLEEAQANATQTINDLTHQLNEAQTNATKIANDQTNANQIVDNLTGQLNDAQTNATKIANDLENANQIVDDLTRQLEEAQANNDQTINDLTHQLEEAKVNATKIANDLENANQTVDNLTTQLEEAKVNATKIANDLENANQIVDNLTDQLEEALANATKIETVVVDGKEYPIEYVNGTATVTTNSTGPQNITHERKATQIIYKDMETTAIDTKVDGRIGKYFNVILKDSEGNILANKPIQIGFNGKVYNRTTDENGSAKLQINLIKADIYTFAICYLGDDDYNGSFVVSKITVKAQKGTLTVPNKSYKATTKTKTLSATFKAASGKVLANKKVSFVVNGKTYSAKTNAKGVATVNVSLNKKGTYSFVAKFAGDNTYAAVSKKAKLTIK

SEQ ID NO: 4773 - protein, 149 aa, Methanobrevibacter ruminantium
MPKHIVSGLKYLESVELRKRGLSQKEISSEIGVDRSTISHYLNGRNISADSIELAKVILELNPKDFILIARVLFGDYNEIRQLISIFNMNHYDPQIDDGCIGCGLCVDLCEVKSISLDSLKAKINPRYCCGCLMCVEDCPTNSIKILEV

SEQ ID NO: 4774 - protein, 367 aa, Methanobrevibacter ruminantium
MVKNIKETEGKNFCIKRSLGEERVLSFKDHVCVGCGLCEATCPVEAISLDEVAPIERKYVDTYFSGHEKIAQNYALFTNDNEIKAKLDICEDKCVLCGLCSGVCPAGALELAIDGVSIKENEAYPHLVTSAEIDEDKCLFCKKCEAACPRESITIDRKLPNRADLVTGEIEVDEEECIYCGACAELCPAEAIVVDKATGEESIVIDKEKCVYCLVCKKACPVDAIKAVCRSCSYGEYDLDPAKAAITGNAIIDSETCIKCGWCEGVCPADAATVKQAFKGTLEIDEEKCGTCGACIDVCPCNVLSFPKSTGPGDRGTHLVKEEDYCIHCGACAKVCPNEALTVTRTDVDYTPTSSKSWIAAFEALKN

SEQ ID NO: 4775 - protein, 76 aa, Methanobrevibacter ruminantium
MELKVDQDKCLGCGVCVIACPVNASISPENAGGHGSKTTETIMMVENGFIKLFSVDKCDKCGTCQMFCPTEAIWLE

SEQ ID NO: 4776 - protein, 178 aa, Methanobrevibacter ruminantium
MHYANTYLERPVVGDLENVAQEGTTKVLKCMLNTGSDIYQGACKKRGSTLKEEYKNASGTCYMDPRDMVKLGVKNWDTVLVKTDYGEVVLNAAKSRDAPHEGTIFVCKGPWANTIVSHETYCCSDPTYKGIHATVEKTDRKVLLMADLMRWAYKKYVDEEDDDVIENMESLGERPVYN

SEQ ID NO: 4777 - protein, 463 aa, Methanobrevibacter ruminantium
MTYEPPVTDYDYIVENCTCAFCGCNCDDLDFLVKNGHVVAVRHACRLGASKVMEDMDQRLLVPMVRNEEGVLEEVDWDTALDTAAEYIANSIRPVFYGWSETSTECMKEGVELGEYIGAVLDNQATICHGPSLQAMQNAGYPIQTLGEVKNRADVIAYSGSNAMNSHPRHLARYAAFPRGYFRQRGRFDRTVITMDPKFSDTAKMSDKWIGFEQNGDYGFYNALRAVLKGKKLQSESVSGIPAEDIYELAAEMEAAEFGVLFFGLGLTHTLGKQRNIDIAIKLVQDLNTNSKWGLTPMRGHFNVNGFNIFMAYETGWAFGVDFCRGYGRYMMGETNTIDLLVRKEPDCFMVIAADPGAHFPNGANQHLADIPVIQIDIHWGPSTELADVVLPGSFISVECGGTSYRMDGVPIWMKKAIDKPETCRDDEWIVRELKERVMKLREEPNVADEYVPNEGLACLLDK

SEQ ID NO: 4778 - protein, 572 aa, Methanobrevibacter ruminantium
MEYILKNGIVYDPANEVNGEKMDICFKDGKIVEDVSADAEVLDVTDKIVMPAGVDPHAHVAGPKLVVGRLYRPEDERRGVAQKTKTTRAEAGFSIPSCPTTGYRYSRMGYGTVCEAAMPPLEAKHTHEEINTIPNIDINPLPLFGNNWFVMEYARENRIDDLAAFIAAMLRVSKGYGVKIVNPCGSEAWGWGMNVHGYDDKAPYFDVTSREVVRALAKANEKLGLPHSIHIHPNDLGHPGNVPTTIATLDSIKDIAKSTKPSASVRDQTIHCTHLQFHSYTGNSWKDAASGAEECADFINKNPYVTCDVGQVTFDETTTMTADAPMEYDLFKISGLKWANKDIECETAAGIIPCIYSPKTPVSTLQWAIGLELFLHIENPWQVCLTTDHPNAGPFIRYPKIISWLMSAPKRMEMIDNGEVHKWASKRTGLAGLEREYDFYEIATISRAAPARIHGFADRGALTPGYNADIAVYDINPNDFDPSRDPEGVEKAFSNAYYTIKDGQIVVKDGDIVSTKQSHTIWTNVIGYEEEEKQIIDSIMPFFTQYYSVKWENYQVHDHYVPNPTVVDVEAK

SEQ ID NO: 4779 - protein, 288 aa, Methanobrevibacter ruminantium
MKTITFDQKKTSSIALEFDELITDNIYAWTEEDFAEYKVPIGNSRFPITDYFDITVEGEAESPAEVKMILNGDCNRVKYIGCKMSAGEVVVNGDADLHVGAEMSGGIVTVFGNVAAHAGREMKGGKLEIMGNTKEFCGASYIGEWRGMSGGEIIIHGNAGKQCGECLVGGKIHVLGDCDILAGIHMTKGTIEIDGNVNRWPGGQMKNGNIVIHGKVGRLLEGFVEQGIVTDPELDGVTYPGRYIEYKGDIALNGKGTLLIDAEKNRDRLSTWIEEDDEYNAIREYRDQ

SEQ ID NO: 4780 - protein, 100 aa, Methanobrevibacter ruminantium
MVKEILMDPDDIIEYVRNEVKVDDIFELSYNRVFAPGTVLGITPEDEETGEGLILSLQLNGELLNQAVDIDLHAVKDEIIEARHLPGGDEDKLIVIEATL

SEQ ID NO: 4781 - protein, 100 aa, Methanobrevibacter ruminantium
MVDKELTMTSDEVLDYIKNNFKEFDKVDIAYNRVSAKGDILGVDLSDYKGKPSCRVMIALDGEIISDTIEVDFEEYKEDIIELHHWPKDESKESVYIEVI

SEQ ID NO: 4782 - protein, 345 aa, Methanobrevibacter ruminantium
MSEKFLKVNIQKELKEFELDIDFKLNKGCLGILGPSGCGKSMTLKSIAGIVNPDTGIISLKMDEENIYFDSEKKINLKPQKRNVGYLFQNYALFPNMTVEENIGIGVSKEKREKTVSEMIKRFHLEGLEKRYPRQLSGGQQQRVALARILAYGPDVILLDEPFSAMDTFLKEQLRIELVNSLKDFDGFSVLVTHDRDEAFQFCDELIILDKGKIIAKGETHEIFENPKKLDVARLTGCKNTSRIEIIDDYHLKSLDWGLTLEVSEKISPNITHIGIRAHDFAPAKKDEVNSFDTENSSLLEMPFEWEITLANGLWWKREKQIREHEFVVPDHIKVDPKNTILLEE

SEQ ID NO: 4783 - protein, 564 aa, Methanobrevibacter ruminantium
MSESEHRMIEILRILNTHEKPIGSKVIADELKTKGYNLGERAVRYHMQILDEKGYTEKQGYSGRVITELGKSKLEKGLIYDQVDFTLSKFKERIYLTDFDYKKKEGNVIVNTSNILENKAFDIIKEVFAAGVCVSPLINAKKTEINGKKGYVMKTICGTTIDGVFLKNGIPSIPQYGGLVDIEDYYPTKFSELISYRKTSITPLDAFIAKGMTSVLEVAEHGTGTIPANFRIIPESGLEKAKEIFEKLEKAGIGGILEIGEISENILGIPVPEGMVGISIIGGITPFCAAQEMNYKVDIKTGEEFINYNKLKELESSKHKIKHAKKVDYKKTPFILTKSLNRVNQVDYDIETGHGNIVSNISYLQKEDLDDAISIMKKTYKALPKYMNSHFSIVDHPDDKSKVGIATVCSLSIDGILIKNGIMSTPQYGGLLELGKPPLFVEMISYNGSSIDPHKIFIFKDLTQIAKRKNPKKILASIKEVPYIARPETEEILEKISKEGFSIFKVGKPRELVYNAKVDNYNFGIVTGSGLNLIAAIKEKGINIEAKAVETVLPIEDMSLIYEQ

SEQ ID NO: 4784 - protein, 448 aa, Methanobrevibacter ruminantium
MEKRIQNIMERMKADNIKFIRLQFVDLHGIPKNVSIPCELDNMEDLFTDGILFDGSSIPGFVGIEGSDLVLKPDISTYSPLSWRPEESASCRFICDIYNPNGEPFEGDPRGILKKALAKIKEEGYTYNIGPEPEFFIVDTDDDGYPIPHDTAGYFDVEPVDKGTDFRREITTNLQELGFEVEASHHEVGSLAKTKSHSSSDDALKTADAVITFKQAIKAIVANMADFDGFDYRVTFMPKPFFGESGSGMHCHQSLFKDGENIFYDENSETGLSQEAMWFIGGLLKHSAAITAVTNPIVNSYKRLVPGYEAPVYITYGIQNRSTLIRVPAARGKATRIEYRSPDPTCNPYLAFAVMLEAGMDGIKNKIDPGESVEINIYELTDEEREEKGIELLPSSLWEAYHTFEESEIMKEALGEHIFNAFLSAKYEEWDEYRVQVFNYEHKKYLNY

SEQ ID NO: 4785 - protein, 4187 aa, Methanobrevibacter ruminantium
MNDKTNDFFSEYLSGLCLDFDESTLIAPNKNGEKEKCIIEKSEYEIKKDNLVGFAKSNSISINELILASLTLTLNKFNFSNETLIFNQNNVPFAAKFENRQISIREFLEKIHENYIKTLEFDEYFDKDDLPLNPEFYFTFDEDLKSDAEYSNYLSIVENDETVSLFLSYNDELYTKEFINLFISSLEKILEEIATSDIDKTNICDIAIVGENEDLIFTEVEMPLIHRRFEKQAVEKGDEIALVASDATLTYKQLDEKANVIANALIAKGVKPKSNVLVMLSRDSNLIASILGILKAGCAFIPIDPEYPQERINYIYENSQADYIIANESGEKSLDIEELLKDGNSDDPELDVDPDDLAYMIYTSGSTGNPKGVMISHKNICNQASNPKSTYESLLCITTISFDVSVDDILTSLSNGLKLVLADDVQIKNIPALIKLIDENKPEILEITPSRMGSYLEVKEFCNVISCFKCIFIGGEKFSSKVYEDLRKYSDAVVYNSYGPTETTITSNNKAVTDVNDLTVGLPHINYVTDVRDIDGKLVPDGVMGELYIGGTGVGKGYYNMPEKTAEVFLTINNIPYYRSGDYAIKLPNGEIDIKGRIDNQIKLRGLRIEIGEIESNVGKYPNIKQAVVVIKEINDNEHLCAYYTADEEIDSDDLKEFLKDRLTRYMVPTVFMQLDEMPQTPNGKTDLKQLPVPQLKLSFTLPESETEIILHEIASSISKTKEFGTTDDLYAIGFTSLTLMKLNARIYEEMGVNLDIISLLNDPTIKNIAKEIENNDILDLNGVIESSKDMVYYPLTENQMGIYYECIQSGELAQYNLPSVIRFGSEIDADRLHDAIIKTIEAYPYLKTRIVLEKGKVMLKRDDSIDIDDIPIINVDSISDEQIEKENLKLFDLHNDQLFRFKIYKTPSETILFSDVHHIISDGESLDKLFTNISNAYQGIEIEKETINGYINSIIESENENSEKYELSRKFFQDKLTQEIDSTVLTPNLNGNFEEGILKSISKNIDSELVNRFCSENRITPNVLFMAVTMLNLNKYTFNDKTLITTIFNGRSNSSYINTQALLVKTLPIVSINDDRTLSFKEYLSSVNDIWMETINHSDYPYTKISEEFGLKPEFFYAYNNLDAEEIAIDGKTYKVKYLKSLEVNYKISLEVNETWDNIELFLEYNDQLYSADYIDTFLNCIIDVINQLIESDIEELSIGEIELGKGIETPLSFTPVDMPILHKRFEKQVTDKGDETALVASDATLTYRQLDEKANVIANALIKRGVKPKSNVLVMLSRDSNLIASILGILKAGCAFIPIDPEYPQERINYIYENSQADYIIANESGEKSLDIEELLKEGDFENPDVDVGPDDLVYMIYTSGSTGNPKGVMISHENICNQVSNPKSSYDSLLCITTISFDVSVDDILTSLSNGLKLILADDVQIKNIPALIRLIDENKPEILDSTPSRLASYLEVKEFCNVISCLKCIFIGGEKFSAKVYEDLRKYSDAVVYNSYGPTETTITSNNKAVTDVNDLTVGLPHINYVTDVRDIDGKLLPNGVMGELYIGGTGVGKGYYNLPEKTQEVFLTIDGIPYYRSGDYAIQLPNGEIDIKGRIDNQIKLRGLRIEIGEIETNIGQYPDIRQAVVVIKEINNNDHLCAYYTADEEIDTENLKEFLKDRLTRYMVPTVFMQLDEMPQTPNGKTDLKQLPEPQLKLALVMPESETEERLYDIVSSLVDADEFGITDDLYAIGFTSLTLMKLNSIVYEQMGANLDISILFNEPTVKNFAIEIDNSFEKDSGLEELIESAKGLEYYPLTENQLGIYYECMQNPDVIKYTMPTTVRFDSDLDANRLKQAVIDTIEAHPYIKTRIVNNDGELRQKRCDDVAIDDIEIVKVDSISDEDIVRNDVGPISIEDSQLFKFKIYETPDEIVLFSDFHHIITDGVSQNNLFRDIADIYENREISEEIIDGYIYSLLEKEAENSEIYQSAEAFFDDKLTQGIESTVLTPDLNGNPDEGKIKNLSYAFDSELINEFCNDNSISKNALFMAGTILNLNKFTFSDKTLITTIFNGRSSPSYFNTQGFLVKTVPFIINNENRQASLRDFIKSIDQSWKDTLTNSAYPYIKIAEKYQLKPEFFYAYHEFLESDEMMINGKEYIPQELAGVDMVTVESKINLAVYDNGDEFNLILEYNDQLYSEDYVKTFIESLKSILVQFLENDMDNYRICDVKLKDDEEVHEFVDVEIPFIHKRFEKQVDEAPEKIALIASDGSWTYGELNQKANRVANALINKGIKANSNVLVMLPRDSNLISAILGVLKAGCAFIPIDINYPRGRIDYIFENSQADYLIADRGIENSIDINELLQEENASNPQVEIDPDDLAYMIYTSGSTGNPKGVMTSHMNITNLFSKDEGSVIYNAYSKMKRTLALSTVSFDAFLLDFMPLTFGLEVVLANDSEIKNIKELAELVKREKPDSLTFSAPSRFKQYLEYEEFAKQVPDFRYIGLGGEMVPQDLISRLLEYPNLELYNIYGPTETTVTCNTHKLSDAENITVGRALHNCITEVRDIDGKLVPNGVMGELYIGGKGVSRGYYNMEEKTKEVFLSINDIPYYRSGDYAIELPNGDLVIKGRIDNQIKLRGLRIELGEIESNIARFPHMKQIVVVIKEINNAEHLCAYFTADEEIDIKLLKRYLGNKLTEYMVPTVFMQLDEMPISPNGKTDIKRLPKPKLNLDYVEAEGETEEKLVELVSSIANTTNFGTTDNLYELGFSSLTLMKLNSMIFNEMNVNIDITSLFTNPTIKSLADKIDNNIEFEIDIDEIIETAKDMDYFPLTSNQMGIYYECMQTEKIKYTMPYAIRFESSIDPYKLKDAVIRTVDAHPYLKTRIINTDDGKILQKRCDDVEIEEIEIVEIDSISNRQIMDRDIKPIPLDDNQLLRFKIYKTPTETILFADFHHIITDGVSQGIFFNDLAKAYNNEEIEAEKIDGYEYSLIEEKISLSEVSENFFKKQFSQGIESTVLTPNMNGNPDIGNIKLISDQVGSSFVRHFCKDYSISPNVLFMGATLLCLNKFTFSGKSLITTIFNGRSNSNYDNTQGMLVKTLPIIVNAENRDMMVEDYIKLVDKAWKDALTHSNYPYTKLAEDYQLKPEFFYAFHESLKSKVELDGRTYEAIDLDGTVSTDYKINLDIFDDGEFITLYLEYNDQIYTEEYVNQFIRSIKYILFQFFVHDMDKLRIRDIELVEGEIPEFEEIDTPIIHKRFEKQVVEKPGDVALVASDATLTYGDLNEKSNRIANALIRRGVKPRSNILIMLKRDSNLIASILGVLKAGCAYVPIDPEYPSERINYIYENSQADYIISYETSENSLNVYELLEEEIVVNPNVEVLPDDLAYMIYTSGSTGNPKGVMISHKNICNQAQNPKSTYDSLLCITTISFDVSVDDILTSLSNGLKLILADDVQIKTLPELIKLIDENKPEALEITPSRIGSYLELEEFCNVISCLKCIFLGGEQFSAKVYEDLRKYSDAVVYNSYGPTETTITSNNKAVTDVNDLTVGPPLKNYVTDVRDIDGKLVPNGVMGELYIGGMSVGKGYYNMPEKTEKVFLTINGIPYYRSGDYAIQLPNGEIDIKGRIDNQIKLRGLRIEIGEIESNIGKYQDIRQAVVVIKEINNVDHLCAYYTANCEIDSDDLKEFLKDRLTNYMIPTVFVQLDEMPQTPNGKTDIKRLPQPKVELNYVAPKTRLEHEICAIFSSILNIETVGVEDNFFEIGGTSLIASKLIIELLKQGYSVRYDDIFRNKTPRALAKLLSGEDIGEEDLDLTDDIIKNYNYGEINELLQENTWENFFDGENLELGNVLLTGATGFLGIHILYEFIKSEEGKIYCMLRKGKFDSCQERLIDVMNDYFDEDFTDLVGSRIIPIEGDITEIDDFKQLEDEPIDTVINSAALVKHYTADDYIFRVNVDGVINGLKFAQTRNNIKYVQISTISVLSSYSLNEEAYPNQEYDERTLYYEQDLENKYVCSKFLAERAVLQAATKGLPVKIIRVGNLMSRYSDGVFQKNYDTNAFLNNIKTIKKLGAMNPAMASEKVDMSQIDYVAKGILALSKTPEKSRVFHCMNNHYISHRDIVDALNTYGYGIEEVDFEEFKQIYEQNMNENIQGIITADFSIDDFDEEDDFEENVEIEQTVDILHSLGFDWPEADEEYLKRLFDYLNKFDYFE

SEQ ID NO: 4786 - protein, 539 aa, Methanobrevibacter ruminantium
MALNIASVVDASFVSTFIGHNAQAALQVLEPLVLLITIFEWLFGLGGQILALNKKAEFDEGGSNHYFTTAMLATIVLSVLILLVCFLFKDSLINLLHPTAGALPYVNAYSPYLFISFPIATILGVLCQFIRVDGQPNFASGVIIVANIINIILDYLFLGVFHMGIEGASLAMMIGYAVGLLCTLKYHFDSKRTFRFVFSELKFGTWIRSTIEIIKIGLPGASMGFFNVLLIYIMNLIVGGVLGELGLDIFNVCVVALLLISILIMGFAETLSSIVPIYYAQNDFYNLHHIVRNSIIITLVCSVIFTAFLLIYPDGLLMFFKLHQTANDGLVENAIRIYSLAFIPMAFSTMLLFYYEGIERTVESGIITVISEFLGPLFFTYLLYPFIGITSVWLSFPLGFILSIVAVSIYVKVVERKDSEYSGLFFIRRGLIEKTRNYTLESKNDAVKSEMFNHLKSLNVDDSSIETLDKIIGTIFDSNNEKVHVEILLIDYGDKIVINMKDEGNREVMKDIEKSFSQDKIKVSEVLGFNNVEYLIDGA

SEQ ID NO: 4787 - protein, 249 aa, Methanobrevibacter ruminantium
MPERYKGFGYWDIATRQMGIVSKSQQTRFKDAKVAVIGCGGIGGETILMLARMGIGELIIVDKDEFDLSNLNRQAMSSIDTLGLSKADVSKEKVRLTNPYTKVTAINEFINEDNVEYFKDCDVILDALDNLYTRVILTRFARENGIPYVHGAIHGTKGQVTVFTKDTKSYEEMFSLPSLGKELGEETKEEISKLTKGVPPVIGPTPNIVGCLEAFEAYKLITGIGEVTYAPKILNFDLLNLESFSVLEL

SEQ ID NO: 4788 - protein, 389 aa, Methanobrevibacter ruminantium
MKYRTLGKTGEKVSILGFGAMRLPHFETNDQIDVKTSDEILSYGIDNGINIIDTAYSYHANNLSGKGKCEEYIGNFLNEHSYRDEVLLTAKMPSWLIETKEDMEKIFESQMKDLQTDCIDLYMLHSLNEDYWKMYREIGAFEFMDSLLESGKVKHIGFSAHTEMDWIVDIVDDYDKFEFGLTQLNYLDERYQSGREGVEYIHKMGLGTMIMEPLRGGRLIQNIPQDIMDLWDTAEEKRTPLEWAFQYLWNMEEVDTVLSGMNSIQQVKENIEIANKSEINSISKNDLNLIKEVAWEYKQRKGNDCTGCQYCMPCPHGVDVAGCFREYNIAKMLNNPAGSAMHYFSLESDTRADKCIHCDDCLYHCPQMIHISEDLKKVDEFFGRKYDYF

SEQ ID NO: 4789 - protein, 498 aa, Methanobrevibacter ruminantium; identical to SEQ ID NO: 4553

SEQ ID NO: 4790 - protein, 81 aa, Methanobrevibacter ruminantium
MKRTINERWELWYNRILPYIIIFDFILITVSLILNVSEPTMAHIEHFDLLVCIILLGEFFYFLYKAPSKKKFLLDRDIFCF

SEQ ID NO: 4791 - protein, 89 aa, Methanobrevibacter ruminantium
MPVNFPGTILGYLRMLRLIRVISFARMGSFEDFFKKTEFHKIIIAIAIIIMTFTALFYVFGTSYNPFDYFYFVIVALTTVGFIDKPLKK

SEQ ID NO: 4792 - protein, 110 aa, Methanobrevibacter ruminantium
MNNIAYLLLAILFETSATSLLKVAEGFTKPLPTIASIILYILSFYSLSNCLKTAPIGVAYAIWSALGIVLVTIVGIIAFKQTPDWAAILGLLLIIIGVGVLNLFSKMSLH

SEQ ID NO: 4793 - protein, 128 aa, Methanobrevibacter ruminantium
MTIKRKFDKLPPYCQFEKNLNLIKNKWTVYILRDMILGKKYFSDFKEDKPELSNKILTQRLKELEENNIIEKNIKDNETSYHLTEKGHRLQNILYELAIFNLEEEYHGEELEKIKKEFEQLKYGGNQK

SEQ ID NO: 4794 - protein, 266 aa, Methanobrevibacter ruminantium
MKEKIFINGRGGCGKSTFISLIAKELSKNNKVLIIDMDEGNLGLNKMLNVDVADTSLMEYYGGRDKIMGEILKVGIKGMVLEKINLKDDAASDSIDILDNMKLSDLPSDYVTWNGNIGFIESGKINDPDEGCACPMGNLTRDFLNHIELQDNEVILVDTSAGIEHIGRGVIESADKLISIVDPSSDAILLANKIGSLSKEASKEYMVILNKIDENTKDLVLEQLDDDISVVGELEYNSHIAQSNLSQKEINLEEVEGEIKEICAKI

SEQ ID NO: 4795 - protein, 275 aa, Methanobrevibacter ruminantium
MDLLFYVVLLLIGGCFAGFMAGLLGIGGGIVITPIQYYLLTSIGCDPKTSLTVTFATGLAVICVTMINSTRKHKQNNLIVKQHLKPMMVFGFVGAILGAVISQYIDVEVLKILFGVICIVSTVFLVLIKSPTSLDNIKTDAGLFYSIAFACGLASGLIGPAGGAFIIPIFVAYLRYPITNTIGTTSALSIATTLAGVICYIVLGWGVQGLPDFSLGYVNLLQFVFLTITSIIVSGYAANLSKKINPTKLKALQVIVISYIGLQMMGVFDIILSII

SEQ ID NO: 4796 - protein, 72 aa, Methanobrevibacter ruminantium
MYKVWKNCIGCGECAKACDFNLIQTFDDYILMDIEKCRHCSKCVETCQNNVFTKSVIFKHFLYLLYYKIKKS

SEQ ID NO: 4797 - protein, 135 aa, Methanobrevibacter ruminantium
MKIAIRYYSKTGNTEKLAEAIGEAIGVAPKTIDEPLNEDVDILFLGNSVYNAGADSKVKEFLKNIDVNVGSIVNVSSAALIESTYKQIKKEAEKCGLNMDDREFHCRGQFKFVHRGHPNEEDINEAVNFAKSIVR

SEQ ID NO: 4798 - protein, 181 aa, Methanobrevibacter ruminantium
MAKYIVINGSTRKGNSYAIANFIKEKIDGDVEIFNIKDKEIGFCQADNACKAKDECIVQDDAYDLINDLEECDGAFIITPIFFGRLPGMVDALIDRFYSKFNPAKEMKAPDESKKIGIVFSYGGGEADYTPVAEHVAFEFGVLRFGAHKNVMCSENNDPKGFESKDDQQSQINELISWVCE

SEQ ID NO: 4799 - protein, 233 aa, Methanobrevibacter ruminantium
MSESDEIIKRLDRIENELITIKENNYNQNLQTAIESIRDTYSNSIKKNFADNLGEKCSEFYLPNCKNEECKQFIVQEFKELFLNTQETDLNKLNEQLDEKFYSVCGVECSPCYNNFKEYFFEELKMINSINVSYELNENEPIEKLDVDMLISDVFEPLSSKQRVIIIESLYVENKSYTQLSHLTKLRGGNLLFHLEKLQDAGLISQKQDRGEYLLTKKGYTTLSLINQFQKLM

SEQ ID NO: 4800 - protein, 631 aa, Methanobrevibacter ruminantium
MEIIDLFGAALTGVKEQNVDLLFKSGLYMLMYTVISMIAVYVISFLTTRVASKSAYTVREKIFHILMNLPREEIDKFKISGLVTRSTRGMSSEQGFIVMILEQLMLIPVTFVAIVYEIALIDGTYALFFLGFIGVLSAIIIFRMKQIVEIFFRAKKTYGKLNLLFLSKINDIAGRIPFNKQEYEVEFEKACENSYDKNVIYIKSQCYLGPILMWGLYVIVLVTLAMVNSGYTIGFETDSVIDSFIILVYVAYFITTLANIPALIDRWPRAYATSVRLEEVLNIEDKIIKSNTNDNLKEIEIVEEDIAQEAKGIWDERKGISEKFTALLKEDKAKVRISMILLTISTLCMVYAPKVAGKTVDLLASNWNSTNDPAIYISLALLLVLYSVGYLFKLPPKRIMGATGEKVAYDLRVKLFDKLDAVGSDFIQENSKGLVLSRLNNDVMNIREFVSSKFTEIYAQILFIVFVIVLIVMTDFRLSLIYLVILPVYAVCFYVCDVKSKNYYDGHQMQLGRLMSYFERGLSNRDSFHEKGFKKMNQTVIDYYVKSKNVTNFMVPVTTLLTNISKITVYIAGIYFLAGNEIQIGTLLAVIMYGQLLTDPIKKLSSSMATIETSFSSIKRIFAIIDYKNDK

SEQ ID NO: 4801 - protein, 347 aa, Methanobrevibacter ruminantium
MPEFKLIEKLLYKSEQNDIEAEFIIGNETLWSSQKVIAEIFGTTSANISMHFSNIIQEGELDEKEVSISSKDLFKDNPNFIKKSLKKSNNRGRPQKWYNLDAIISIGYRINSKEATQFRRWANKILKEYMIKGFVIDKELLKKGGRFTEDYFDELLETIREIRASERRFNQKITDIYATSFDYNKDADITKEFFATVQNKLIFAISNHTAAELIETRSDIENPHMGLTTWKKAPNGKILQSDVVISKNYLNQNELSRLNSLVEGFLNLAESRAEDRIPMGMKDWKELLDDYLKLRRLPILVGKGKISAEEAREHVLEKYEKFRVVQDENFISDFDQMILDIKRLEGK

SEQ ID NO: 4802 - protein, 44 aa, Methanobrevibacter ruminantium
MKLVKRNQKLHDPDSPLLIGDVKDGDVVNEVNEPSYIDLQTKLF

SEQ ID NO: 4803 - protein, 110 aa, Methanobrevibacter ruminantium; identical to SEQ ID NO: 4792

SEQ ID NO: 4804 - protein, 128 aa, Methanobrevibacter ruminantium; identical to SEQ ID NO: 4793

SEQ ID NO: 4805 - protein, 266 aa, Methanobrevibacter ruminantium
MKEKIFINGRGGCGKSTFISLIAKELSKNNKVLIIDMDEGNLGLNKMLNVDVADTSLMEYYGGRDKIMGEILKVGIKGMVLEKINLKDGAASDSIDILDNMKLSDLPSDYVTWNGNIGFIESGKINDPDEGCACPMGNLTRDFLNHIELQDNEVILVDTSAGIEHIGRGVIESADKLISIVDPSSDAILLANKIGSLSKEASKEYMVILNKIDENTKDLVLEQLDDDISVVGELEYNSHIAQSNLSQKEINLEEVEGEIKEICAKI

SEQ ID NO: 4806 - protein, 275 aa, Methanobrevibacter ruminantium; identical to SEQ ID NO: 4795

SEQ ID NO: 4807 - protein, 72 aa, Methanobrevibacter ruminantium; identical to SEQ ID NO: 4796

SEQ ID NO: 4808 - protein, 38 aa, Methanobrevibacter ruminantium
MKLVKKNQKLHNPNSPLLIGEVKESDDVKEVNEPSYIY

SEQ ID NO: 4809 - protein, 267 aa, Methanobrevibacter ruminantium
MEIFKVVCELIIPILIFGVLFAVGKFIHVRLLNSKSRILNPGEYFPDEELETLKQVYYLVMMLIFFAFILYIMIVQANEVFAIAVLQILVSVYVALTLDYSYLKNKILFFLLVPFEAIIFLVFNDFLMIWPIYLMHILVYAYFIKVYFDKFRKYTETNGLGITIILLFAIVFISFIITLFVEGVEPLNSAVMVSNAFTSNGYAILGNSGIGKLTSLVLVWSGYIISGVGTATLTAAIMMRHNQKREKELNKRLDELESLIKNSNNKE

SEQ ID NO: 4810 - protein, 654 aa, Methanobrevibacter ruminantium
MEIIKGKEIPKKSLKRSLIVFIGNMIGIYLISILGLGVEISQTGDIFLLVLFLGIVNAILWPILTRIAMPFLVLTFGIGSLILNGLLLQLLAPSFGIEIKGAAMILAPLGMAAVTTVLSSLITINDDSSYYRSVLNDAKKNAKNEVKDYPGVIIVEIDGLAYNVLCEAVEKGDMPTLKKMIESEDYNLRMWETDLSSQTGASQAGILHGNNEGIVAFRWIEKSNGNQMMQCSGISNVPELEKRISDGNGLLVENGASRSNLFSGDTDNVIFTFSKIMDFGKLYNKAWYSVFSNPSNFARIVSLFLADIVREIWSQITHSIKNIRPRINRGIAYIPTRAATNVFMREINTSTLIGDMMVGDVDVAYSTYLGYDEIAHHSGVRDSDAWIALRQMDQQIKHLTDANKYSPRDYQFVIQSDHGQTNGATFTQRYGQTFEDFVKSLLPEDMTMFAKMTSNDDHFVGDYTPFARKDKKIEKEKEEAKELSDSEVIVLASGNLAMIYLTQWTNRLSYEELNSYFPELIPGLINNEYVGFILVKSQEHGDLAIGKNGTYYLDRDEIDGENPLLGFGDNIVKHLKRTSSFEHTPDILVNSFYDEEADEVCAFEELVGSHGGAGGDQSKPFILYPSSWNVSDDEIIGAENIYKLLKENLAELKK

SEQ ID NO: 4811 - protein, 275 aa, Methanobrevibacter ruminantium
MEIMEIIKDSFLFPSKNLGTFSIYVVLSVLVATFTFGGIFSYLLGFIGSEYILIGGLTLVFAMLIGWVMSGYEISIIKSGIDLDDEVPEFKWWDNFITGFLNFIVAIVYFIIPAFIVGVVGYLININDKLMAVAQEISSLYPNIFLTSSPDIAFEALSQAIIELIVPLAILIIVALIVFVIFLFLQSMAEARLANTGSLSEALNIFEAAKDIKRIGVRKVIIVILLVFVIIGVIGMVTSVIFNYVPTLSILSIIISPYLVFFAQRATGLLYSDIA

SEQ ID NO: 4812 - protein, 153 aa, Methanobrevibacter ruminantium
MEPNKVSGILSIILGLIFIIFPLVSSGLVSIMIGVSLLFLGIASILTEFSALNIIIGILAIIFGLLFIFNIDALSFLLGFQFYIIGILMILIGVAGIFAGEGVSKIASILIIILGVIALGLGGFSLTQPIFAAVLIGVALITQGVRLYVAPKN

SEQ ID NO: 4813 - protein, 506 aa, Methanobrevibacter ruminantium
MNETIKENSWVPLIVVALASFIVALDATFMNVSISQVVVDLNTDVSTIQSIMSFYTLITAAFMLLSAKLQDIVDKKKLFLIGTALYGVGTFTASISSSAGMLFVGWAAIEGVAGALMMPATVSIISGTYSGEKRTVALAIVGVMGAVAAAVGPLFGGVMTTFLSWRYGFAVELIIVFVILIFRNSIPHFEPTESRSDLDISGAIISFIGLVLLVLGILSLSKDFTTSIGIIVVGLIALVAFAYFEIRRKRNGKVPLLDMELFKDRNLRVGTIILLLSYLAMGGGLFAVSLFLQSVLQLNAFNTGVTTLPLTLGLLIFAVLAPSLTEKLSHKKIMAIGCIMAIIGCLMLSYQFRLDTTLWTLLPGLLVLGAGLGFIMALCTDISLSNIPAESQNNASGVNSTGTSLGESMGTAVIGIILILGVMGGISTAVDTYAPDHSGDEQFQLEVANYFQKVATIDDLKQDSTLVDVANIIIQNTMAFVMQVTALIMGVVFLLTLRLKDNKIKQ

SEQ ID NO: 4814 - protein, 416 aa, Methanobrevibacter ruminantium
MSNVKDMSLADEGIRKIKWVQKHMPVLEHIKKQFEEEKPFEGITIGSCLHLEPKTVNLGLTLQAGGAEVAMTGCNPLSTHDDAAAGAAALGLHIYGWREQTDEEYYEAIDNVLSHKPDVIIDDGADMIMYLHEKRPELLENIKGACEETTTGVHRLEAMHADGALKFPVIAVNDAYTKYLFDNRYGTGQSSLDAIMGTTNMLIAGKNVVVCGYGWCGRGVASRAAGLGANVIVTEVDPIRALEARMDGYRVMKIREAVKIADLVVTVTGNIDIIHGDDFKYMKDGCMLSNSGHFNVEINRGDLEAQSVSCEEVRESIEMFTMKDGRKIYLLADGRLVNLAAARGQGHPAEIMDMSFAVQALSAKYIVENDLSLGVEKAPDSIDDEVARLKLKAMGIEIDDLSERQKDYLADWREGT

SEQ ID NO: 4815 - protein, 221 aa, Methanobrevibacter ruminantium
MSYFRYIDNGEGPTKLFIGGVHGDEGKHVLPLIKLLKREDFSSGQIYIYNFDRTPYISTIHREFYQSEQGKKILDLVDYYKPDFYTELHSYNIKHFDRLTSLDRLDSEGIPPLIDCGQYVLCSSVSPLIRRKHFTKEAICQTLEFPIFRGEDLKLSDDELLEKYDFDYDLSVKEYMAFLRLITLSKNRDDFEKRVLKDYKKQADLALKYVKIIYGLNFPRY

SEQ ID NO: 4816 - protein, 328 aa, Methanobrevibacter ruminantium
MGVKFKDIVTAEEINLKDLEGRTVAIDAYNTLYQFLSGIRQRDGSPLMDANGNVTSHLSGILYRTASIVDKGIKPVYVFDGDVSEYKTKTVEKRRALREEANQKYEEAKAAGNIEEARKYAIRSSRLSPYIIESSKKLLEYMGIPYVQAKGEGEAQGAYMVKNGDAWAVASQDYDCLLFGAPRIIRNLTLSGGLSNLEYLELDKVLTEIDLSREQLVDVALMVGTDFNEGIYGIGAKTGLKLIRQNSLEDILVQKGITDVEVEPDELREIFLSHDVNTDYKIKFKSADKEKLCEFMCEEHGFSETRVLNVADKLKKLSSTQKSLEDWF

SEQ ID NO: 4817 - protein, 187 aa, Methanobrevibacter ruminantium
MATTDNDINVRLIEKINQVEEKYNQNFSNTQKILMTTDGSITAILDVLYGKIALKTLEQHFEEATAESAKLVNVDVGDEVNFREIIMHKDEQPLIYAKSYIPLKRLSKEIKEDLVRADIPIGRILKKYHIESRREINIIDMEKANDKLIEIYNTDEDFLARDYTIIKDGEILMWIKEYFPISYFTEI

SEQ ID NO: 4818 - protein, 417 aa, Methanobrevibacter ruminantium
MNITEKILSQKAGHEVEPGEIIEIGVDLAMSHDGTSPPAIKTFEKITDKVWDNEKIVIVFDHNIPANTIGSAEFQKVARNFIKTQGIKSHYIHGEGICHQVLPEKGHVEPGMVIVGADSHTCTYGAFGAFSTGMGATDLAMVYATGKTWFMVPEALKIEVEGSLRPGITSKDLILNIIGEIGIAGATYNTAEFCGETIDNLDVESRMTMTNMAIEMGAKNGIMEPNKATIEYVCNRTGKSKDQLNIIKSDKDSNYLKEYLFNVDDMEAQIACPNDVDNVNPLSKVEGTHIDQGFIGSCTNGRLNDLAQAAAVLEGKQVHDDVRLIIIPASKEIYQKAMDLGYIKTFLDAGAIVSNPGCGPCLGGHMGVLSEGETSISSTNRNFKGRMGDPNSSVYLANAGVVAASAVSGFIQNPDSL

SEQ ID NO: 4819 - protein, 392 aa, Methanobrevibacter ruminantium
MQYYISPFNKEEEYKFPKNITIYDTTLRDGEQTPGVCFSKEDKLEIARKLDQFRIHQIEAGFPIVSSREADAVKAIANEGLDAQIICLARTKRADIDKALDCDVDGIITFMGTSDIHLEHKMHIKRQEALNICMKSIEYAKDHGLFVAFSAEDATRTDLDFLKRTYSKAESYGADRVHIADTVGAITPQGITFLIKELRKVTNVDIAMHCHNDFGLAVINSIYGLLAGGSAVSTTVNGIGERAGNASLEELVMSLKILYGKDLGFKTKYIQELSELVAEKTKLGIPYNKPVVGKNVFRHESGIHVDAVIEEPLTYEPYLPELVGQKRQLVLGKHSGCRAVKAKLDECGFKVTNDQLCQIVKKVKESREEGKYIDDNVFKDIVRSIDANYVDL

SEQ ID NO: 4820 - protein, 181 aa, Methanobrevibacter ruminantium
MIEVEVKAKINNFEDIKVKLNEINAIKTKTEKQIDRYFNSPVNDFAKTDEALRIRETKTEKSHNLFITYKGPKIDSKSKTREEVEMKIEDSDKCAKIFENLGFIEVRTVKKNREYFKLENFEISLDDVEGLDPYMEIEIALEDGSDYNEAQDKIFDLFEQLGITDGFERTSYLELLEEQDK

SEQ ID NO: 4821 - protein, 181 aa, Methanobrevibacter ruminantium
MTDVDIKIENIVASASIGKDIVLTEVAKALEGVDFNREQFPGLVFKLQDPKTAALIFSSGKLVCTGAKSIDDSKLAIKKTVDLMRTIDTEIPHEFDIKIQNIVASANLQSTLNLEAVALELENTEYEPEQFPGLVYRLSDPKVVLLLFGSGKVVCTGAKTKQDARLGVENAKARLSELDLI

SEQ ID NO: 4822 - protein, 687 aa, Methanobrevibacter ruminantium
MIKLVVFDLDNVIIDGEGIDEIGKLVNIEDQIAKITEQAMQGEIDFETSIKKRVGLLKGASTDDIKTLANEMPLMEGAEETVSSLKENGFDVAIISGSFDIIADIIKEKLNVDNVFTNSLVEEDGILTGEVTGPLVSGSKVDVLSKFIEDKGYSLEECVAVGDGANDISMIESAGYGIAFNAKPALKENADIIVETRNLTDVRDVIINLNSENTEEGADVDKEVEIETEVVESTDVVVENQEEQVADATEEVVEVEEAEEAVEEAVETEEEAVEEETVEAEEEAVEEEAEEAVEAEEEAEEIEEAAEEEAEEATEEEAIEEAEEEADEEVVEEAEEEVAEEEAEEIEEAVEEEAEEEVAEEAADEEVVEEAAEEEAEEATEEEAAEEEAKEEKPKKSKKSKNTLPEPDFELADTIEGVRAQKDEREAKIAQVADEREAFNREAKEQRKIRDELNTELKLNLAKAIEFRDQRNEINREVEENKRARNKVNEEIKNLEWSSGKKDRIRIENEIKKIDKIIETRVLDIKKENQLVKTANDLRKQLAEITEDNKVKEEAEKLKKQSEEYHAKVVELSEQAQEAHEQMLSYFRKTDEIRTAADEAHKLFIQARKNASAKHEEFKVILSEIHVINKRLGSNRARRRKSEKTSNAPGKRNREEKEKAEAIFDKFKNGKKLSTEELLLLQKYDIN

SEQ ID NO: 4823 - protein, 81 aa, Methanobrevibacter ruminantium
MDDIMDLENKKDDKNQNKEEIIESSEKEVKMEICYTCGKEFDMNSDEGAHYHYGEYPMCGYCTNFFGFYKEDMMGGKAKKE

SEQ ID NO: 4824 - protein, 741 aa, Methanobrevibacter ruminantium
MHEVIISEKPKSAEKIAKALSPNAQKKKYNRKINYWEFEENGKKTTVLSAVGHLYSLTSASSRDRLGFDLTWVPAYEVEKQKYTRDYINAIKKLSKGADKFVHACDYDVEGTLIGYNALKYACGNNAEAKASRMKFSTLTKKDIVEAYNTMRDIDIRQVDHGIARHMLDYYYGMNISSALMKAVRASSSRFISLSAGRVQTPTLSILVDREKEIQSFVPEPYWMIKAKSDYDIIADHVEGKIFDEERAKKIYADCQGADADVTSVKVTESIRKPPIPFNLGGLQSEAHTVFGFSPKRTQVAAQNLYVGGYTSYPRTSSQKLPESLDFKNIFAGLAKDPEFKKHIFDLPAKLKPNEGKKTDAAHPAIHPTGVLPSNLSADEAKIYSLIVYRFISVFSENSKLETMKVNLKVADEKFTFSRKRVSYEGWLKHYPFKKQENDAFPPINKGDQLKIHKILVEEKETKPPARYNEASLIKELEKRELGTKATRADIVAKLYDRKYIEGKKIEVKPLGINIIDTLNEYCKDLTSEELTREFERELEGIDTDKYTKEQILENGEKEVKTILAEINQNKKQIGEKLYGAYQETNVVGECSCGGKLIKRYSPRTKNTFVGCSNFPKCKVTYSLPKGANMLKKTCPTCGLPMISIKKASGKGRDHVCLDSNCGKDVSRRQAPEVVGKCPECGKDLLKRSGRYGEFVGCSGFPRCRFTCSVDELNNLGKDKNKEDVKENKGVSKKIVRSEAK

SEQ ID NO: 4825 - protein, 900 aa, Methanobrevibacter ruminantium
MEKQQVKTILKSVVIIAILLIIVFGLRAQSVDIGGVPNELKSHYVDENGLPYFSEMDSYFNYRMTENYMDHGYFGDTKVNGTGWDMHSYFPSGRAVGDYQPMIAYVTSFLYGIINMFQEMSLLEVAFWTGAIVSSLAVIPTYIFTRRITNDYGAIAASLIVVLGPNYISHTFAGFFDTDMFNITLPLFFILFFVEALKTDKLSYRIIFSLLAVASIALYSLSWTGYMFYVAVMVLVMIVFFVLCFYFNIEILEPFKNYGNKLEWLINQKELFATLIVLVVGLIGLLLAVGVGGIIEGITGLTGGFTLQAGAADVWPNVLISVAEMQIPNLVTGGLVGSFLANTGGVVNGVGGIVCLFGVLIVLYTFVQRLFRLNSVKVKGDTAKPHKSKRKATSVRTEQKRFSVSLKDIGSFGSTDEINKSKRHTVLYLSLFFVWIVSSAIAVTQGTRFIQVLVVPMGICAGIFVGYAVDYVKNNVDNDKVLLLIAVIASILIALPITQIAYGLDNAMTIGLVVLVILLAISAIVIYAKKSIKDSDVSIKKALVVVLITLALVSPTVCGAFQTTAATVPGSSDPMWFAMDYVKENSTNDTVIISWWDFGYLFQVASDHPTSFDGGSQTGDRAYWVGKSLTTSDYAQSKGILQMLATTGSNASMLLSEYTGSNVTAVHALDETLGKSRSEAQKILTSKYNLTNDQAKAVVKQSHPSNPNNVSFVLSSDMIGKAGWWSYFGSWNFDTLNSTNYQYYMANDYVPIKQNTQGNITILNESGIIYQAVVNRGKNGTNETTAQMETIWDNNRSKIDLNGTEYNPLKASNLICIENSYLTVNKTLNKDGNYTLYLLGSGDDYTAILMDNNLKDSVFTRLFLLGGIGQDTFELSNMQDGVSVWTLRDGSSNSDDAGSQ

SEQ ID NO: 4826 - protein, 364 aa, Methanobrevibacter ruminantium
MTIEEKIKAIEEEIQKTPYNKATSHHIGKLKAKISKLKEEQIKRSSGGTKGEGFHIKKSGDATAVLVGFPSVGKSTLLNEITNAESKVGAYQFTTLEIIPGVMEYNNAQIQIFDIPGIITGAAGGKGRGKEILSVARTADLIIVVLDVLNPQHINVILKELRNVGVRPNETKPDVRIKKTRKGGVNVSSTVPLTYLDEKTIRSIINEYGIHNADVLFRDDVTIDQFIDVIEANKSYVPMMVLLNKVDLVDEHYLNEIKKELPPFIPISADKQLNIEALKEEIFNNLNLIRVYLKPQGRKADMEDPLVVKKGSTVIDVCGKLHREFVKNFRHAKIWGTSVKFPGQKVGPDHVVEDEDILRIILKK

SEQ ID NO: 4827 - protein, 200 aa, Methanobrevibacter ruminantium
MSISDKIEENKVIFISGTPCTGKTTIATKLNDFLTNNGFNSYFIKINDFAIENDLVLGKDPDKLYTVIDIGRLDEVLNKEINNFLDENSSDDSKIVVVEGHLSHLCNGADKMIILRLNPEKLLKRLEERKYSENKIHENLEAEALAVCSAEAYDLYDDKASEIDTTNKSVDETLELVLKIITGELESPVGSVDFMDWFLL

SEQ ID NO: 4828 - protein, 123 aa, Methanobrevibacter ruminantium
MARGKRPKWMIDIAQERMDILFNRAEKEYKKNPERSHRYIELARNISKKYNTKIPQPWNRRYCKKCYKFLVPGHNCAVRLINNEINIYCGECGHVMKIPYIREKKLKRRAKIDSYTFKKRDYE

SEQ ID NO: 4829 - protein, 71 aa, Methanobrevibacter ruminantium
MTINIGKAGVNDNVIEEIKRQLKSNPIIKLRFAKNVARNKDDLINSIVEGTKSQLIDVRGNVAVIYKKQSH

SEQ ID NO: 4830 - protein, 146 aa, Methanobrevibacter ruminantium
MTTVFDVPAELLINTVADEFKDNNDKIVAPEWTKLVKTGVHKERKPENIDWWYVRCASILRRVYIDGPVGVRSLRTFYGGKKDRGVNPEKFRKGSGSIVRVALHQLEDAGYVEKVDAGRIITPQGRSFLDNTSAELIKDIPELSKY

SEQ ID NO: 4831 - protein, 123 aa, Methanobrevibacter ruminantium
MSELDELRKKRMAELQRQAAMNADPQMAQQQMAQQQMAQQQLAQQQEMEAQLKQAMRQILTPEARGRLDNLRLTKPELVQNIEIQLLQSAQAGSLRGKVTDEQLKVLLKNLMGQKREIHITRR

SEQ ID NO: 4832 - protein, 193 aa, Methanobrevibacter ruminantium
MKACVLYSGGKDSSLMGYILNQLGFDVELVTANFGVYDSYIPASKSAESIGLKHRVLNLDISILEKAVDMILEDGFPNEGIKYLHEAVVEEVANHYDLVADGTRRDDKTPKLNRNQIRSLEDRKDVQYMNLDSFGYKTIKYLVGNLFELKHEKSNKDTSSDYEVEIRLLIDQKGGNSSEIFPEHYQTNVVGLK

SEQ ID NO: 4833 - protein, 51 aa, Methanobrevibacter ruminantium
MSRNKPLAKKLRMAKANKQNRRIPIWAYGKTQRKLRYRPKPRHWRRNDLKV

SEQ ID NO: 4834 - protein, 86 aa, Methanobrevibacter ruminantium
MAEELERTYVIPLRKVKNVKRTIRAPRAIREVQNFLMKHMKAEEVKIDASINEFIWERGIQKIPSKVKVIAVKDEEGIVRATLAEN

SEQ ID NO: 4835 - protein, 225 aa, Methanobrevibacter ruminantium
MLKRINLTGNPNLGVYISVNDEIAIVPFNVPVEMESVIKETLEVDIIKTSIAGSNLNGVLATGNSNGFLVSPFTYDREIELLESAGINVAKLPGKYTAIGNIIAVNDYGALAGPNIGEETIKVIEDTLKVPVKIYPFADTKIVGSASIVTNKGALLHRDTISEEIDFIEDFFKVEANIGTVCKGMPLVGACGIANSQGVMVGESTTGPEMARIEESLGFLDFGNF

SEQ ID NO: 4836 - protein, 74 aa, Methanobrevibacter ruminantium
MITKNYRVKGSFVMGSETQVFTKELRAIKEEDIYEKLYSIFGSKHRIKRNQIKIDSIEEISDDEVEDPIVQAIL

SEQ ID NO: 4837 - protein, 145 aa, Methanobrevibacter ruminantium
MEDQQKLQQILSQLEVYKQQSELYKTQIDAVQASLAEIKILESTLDDISGKDTIETLVPLGAGSFINAEIKNEDKVIMSLGSGVAVSKTFAEAKETTAAQKKELEETLDKLFADLQQITDIVAQLSPQAEQLMAKAQAQMGQPLY

SEQ ID NO: 4838 - protein, 576 aa, Methanobrevibacter ruminantium
MAGINLFSSLKKKFADASSKLRNKVEEEAKDEDNIELIEESKDEFDDIDEDLIEYIDEEDEDDDWDFDDIDKEDKSKEEPKEESKEESKEESKEESVEETVDEAIEEVEDVSADEDSDEEVKDSDEEKKDSEEKDSKDKKEKSGFFSFLKRGKKEDKKEDEEEIEDSKEEEVPEEEVKEASDEEVPEEETSEEESEEEVPEEEIEESEAEPVEETVEEEAEESEAEPVEEAVEEEAEETEEAKEETSEEDEEEKPKKKRSLFRRGKKDKEKDSEEEFDAEEAKGKGGFLSFIREKTISEDDVEDILFELELGLLESDVAMDVSSVVVDSVKNDLVGQKIKRSSDIEEYTYEALKKAVYNIINIEGKSMTELLEEKVAQGEPLVVMLVGINGTGKTTTIGKLANFYIKKGYTPVIAASDTFRAGAIEQVAYHADKLGVKLIKHEKGSDPAAVAFDAVQHAKAKGKELVLIDTAGRMQTNTNLMDEMKKIRRVSKPDLVVFVGDALTGNDATEQARKFNEAIDIDGVILTKADADSKGGAALSVGYIIQKPILFLGMGQSYDDIKEYDPDWMLEQIFS

SEQ ID NO: 4839 - protein, 564 aa, Methanobrevibacter ruminantium
MNLDSNVKTGLIVAISIIFLFVLSLFITSAPTGVDNSARFGILTLLPPLIAIALAFITKETILSLFVGVFVGEFMVSVSDLNIISSAVNAFLAMGGQIISCMADPWNAGIVLQCLLIGGVIQLITKMGGAKALADALAKRADTPRKAQLITEFLGLCVFFDDYANSLIVGPIMRPVMDKLKVSREKLAFVVDATAAPVAGIAIISTWIGLEISLITQGFESIGMNVSGFGIFLQTIPFRFYNILILIFIVISAVTLYEFGPMKEAEKRARARKADEPVKSLEATSFDDVKPVEGIKLSVWNAIIPIAVLIIGALIAFYWSGYTTILGGEDQALIHLMKTSPLSFNGIFEALSASDASVALFQAALLASIVAIVMAVLQKILTIEEAISEWIGGMKTIVITGVILLLAWSLGGVIGDIGTADYLVGILKDTIPVFILPTLIFILGALISFATGTSYGTMSILMPLTIPLAWAVNPDMGFVIVCTSGVLTGAIFGDHCSPISDTTILSSMGTSCDHIDHVRTQIYYAIFVASISIIFGYIPAGFGIPWYISIPVAIVVDVSLGLRR

SEQ ID NO: 4840 - protein, 443 aa, Methanobrevibacter ruminantium
MANSNQSEWDSNIAFILAMIGSAVGLGNIWRFPNVLYSHGGGSFMIPYIVSLFLLGISFVLVEYAVGYRFKSSLIKVLYSVKSKLEPVAWFIALIVFLITTYYICVVGWDLIYVVLSFTKAWGSNPDLFFSSIVLQSTDSIEGLLHIVPMVFISVLALWAVAWYIIQKDLNDGIGKVSKLLLPLLLIIVVTIVLFSLTLPGASIGYTQIFTPDWSALTDLNVWLAAFGQIVFSLSLGMSIALTYASYLPEGSKLTDNALIVAFSNSGFEIFNSIGIFSILGFMTLNTGIPFDQLVTEGTGLAFVVFPKVFNIMGPWATIIGPLFFLCILFAGVTSVMALLEVVCYSISEKFNFSRRKSATIVCIIGFIVSVIFTTSAGSMILGIFDAFLNNIALLFAVLLECIIFGWIYNFDNLIETLNNNSNIKVGKVWKNVIKFILPICIC

SEQ ID NO: 4841 - protein, 882 aa, Methanobrevibacter ruminantium
MDDETNNNQWNSSTSFILVMVGSIIALAGIWRFSYLIYENGGGSFLIPYILAIVIMVIPLLVLEFGVGFKYKASLPRIFYNIKSEFEIVAWFILFLIFIVLICYTCIMSWDLIYIVLSLFKGWGNNPSVFFTTTLLHSTSNPYGLTYLVVPIGIGLILIWALIYFISRREINRGISLVTKFSLALTFVLVIILSVFALQLPGSRTGLMALFNPNWEYLLDYNIWLTAFGQLIFSYGLAYGIASTYSSYLPEDSKLIDSAWVIVLISLIFEILMSVLIFALLGHMALGKNMPITSLVSDSFSLIFVVFPNVFNVMGSWATIIGPLFFMVIFIGGLGALFALIEPLANAICEKFIWTKDRAIKTLVLAGLFASFIFATGMGEYFLRIVDGFITQFAIILVVLVEILVFGWLFDLDDIRNVLNNNSRIKLGKYWVYLIKFAIPILLIVIWILGVYNLIITGDRQSLLVQSILASIIVIVPLALTVAPFNGEYSLGSITGGYNYFRDSGDDEEAKSNSKPDLKSRFTSRFTSKDNDVDNGTEGYEEKTYVEKTIDDYEGYDGVVAITDDEEENSSLKSRFSWDKFKKSKNGKNVLNNVDLSAKEFDPPSDDDYDDYETYNSLDDGYSQGSDDFDNSMDDYRSKSKSKSKSKSKSKSKSKSKSESKSLFEKINLFNKDQGENDYLDDNYGYNSNDNYEDDDSSFEDVFDDFDYITPIREEEPKSKPKTKSKPKSKTNSKSKSKAKGGNKKPKFISAEDLDGIESLDDLSSQPNKKPASKKTSASKKKSSSKSKKESGSKSKKASEPKEEPKPKEEEIEYEEFSDDFFDDGVFGEEGYEALLDDYVEPKPKSKKKKASSKSDQSTPRDSKPYYDYEKKGSDSVFNLDD

SEQ ID NO: 4842 - protein, 243 aa, Methanobrevibacter ruminantium
MIKNHLILYFFISYLFLVHFFTYLTISIPIIFYHFHFLSLFVHDFSINLHIYPYFQNIKFIKDKNIPIIIKIGDYMDKKMTVLLVALFCLLCVGSYLIFEPARHISYHEVNLTDTCVAKVPVTDKVSSYTDNLNIHYYSDYENDLNITSFYDVAPESSSQGHLRMDNLKKEVLGTEKGSAGNLTYYKNNNAGTYTMYVEDRMSHNYILLSAKDLTIFTNVYSSLEARIVVNETDIDSLDSSYA

SEQ ID NO: 4843 - protein, 578 aa, Methanobrevibacter ruminantium
MNTAEILVNLLERDGNEFIFGHPGEQILPFYKALKDSSISHILTRHEQAAAHAADAYARVSGEYGICISTAGPGAMNLVMGASTAFKDSVPMLVITGDNDYDKKDSDIFQSFPINSVFENISIKSFHPYDGKSAVYNMIEALILLHKFPKGPVHINLSRDVLLEEIDFDSIDLRDIGLSNIPSLNLNDSDIIENFDLFDDSLDNLYDFSQKLSADVDITIQSAIKKLKDSSKPLVILGNGIVWSKATFKLSDFLSKTMLPVVTTYHSKGIVSDHDRLNLGIVGLRGNSLSNYAYENSDCILVLGAKLSERTIGASDFDIAKEKMIHVNIDENCLKGKINICMDVNEFLDCLLDELDQDNGTFDYDDGWIDEIYSNYEELIVGGIEEVEENFNPLRPPYAINRIIDAFKGAYFLSDAGTHTTWTTLLAKSDSFGKLLFSGGFGPMGYSLPGSIGVAFALKKRGIDERVLVICGDGDIQMVIQELATIREYDLNIDIFIINNSQLGIIRQWEETVYDFDKYQVDLINPDFAKLADAYGVDSMKVESKEDLQLAIEMSLDSNKAFLADVCVCEENIPMPKK

SEQ ID NO: 4844 - protein, 115 aa, Methanobrevibacter ruminantium
MDGLEIINSFNKETIYEFSEAFTIFEDEIYFIFKVDIISINANPSKTKDKNKNKNKENKDNKKAQRIISHLEIEPIAYLLKKAENEDYQIEAIDEKYTEFIGKNKDKLLKEFLNQ

SEQ ID NO: 4845 - protein, 282 aa, Methanobrevibacter ruminantium
MILNLILIILIALIIIFSIILYNGLRIILTVEKEKAEARYKLKITLLKIPIFTKDSSEDKATESEEEKEEDGEEEESKDKKGLMEKYNEIKPILKELIKSKKELKKYLKDILKSIDIKKLEGHLILGLSDSFTTVKIASWIWSIGAIVNSKKPVSLTVDPRFTEIITDFEGQLELKINLLKIIFYSLILVSKKDIRELIKVIYAYKKAKDKENEEKENSNEELYKKEKDTEIKENSKEELYKKEKDTEIKENSKEELDKKEKDTEIKENSKEELDKKEEKET

SEQ ID NO: 4846 - protein, 171 aa, Methanobrevibacter ruminantium
MIDEEPIKTTVEELRKLIHISNYIGDAIETEDKLLIPVSKAAVGFGIGEQKADNSLAGTGAGVSVEPITMVVVSKGNSGVDEIRTINLSKGNQTNKTLNEIGLILTDVLKEFLPSKGNDDYIDVDDVSEVDIQDADIKEKVEDAVEESDLKEKVEEEVEEAEESLGIEIDD

SEQ ID NO: 4847 - protein, 388 aa, Methanobrevibacter ruminantium
MNEILLMLPGPTTADPRVLQAMSKAVVNHRGDEFGEIYTETTKLMSKTFQTKNDSYILTGSGTSAMEAAVSNLVNRGDKILNVVGGKFGERFADISKMHGIESVQLDVEWGTAVTPDLVEEALEKDEDIKAITMVHNETSTGVAAPIKEVGEVMKNHDALFIVDTVSSLGGDYVDVDKYHIDACVTGSQKCLAAPPGLAAITFNDDAWAACEKVEDNNYYLNMPKYRANGNKDPAQTPYTPSVSLIYALKAALEVLHEEGLENRIERHHTAAAASRDAVKALGLELFPDEAVSSATVTAVKMPEGANDDQIRGTMLNKYKVQLAGGQDHLKGNIFRIGHMGVINYQELAITFTALGLTLKGLGLVEDAGAGVAALANHYIKFKLLEKV

SEQ ID NO: 4848 - protein, 366 aa, Methanobrevibacter ruminantium
MSFRTKRVIISTLLVMIYEFFLMKYLFLLFGGLDDIYLLLLTILFGILNMVPMFFEEKKSRPITRLLDTISGFWIWMSLFYLFVILIIYIGGVYIDWPFYIIVILVLLVPLLTVYSYFHAHKIIIHERTIQMDNINEDINIAHLSDVHFGSTRHDKIIRDLSDKLKELSDYCDLAIISGDIVDGSSAIEEDDFLPLKDVNMPIVFTPGNHDSYLDIEDVFGACRNAGIIVLDDEGMEFGNLNIFGMTFIFGMTRKFEEFEVVSTGVLGDFVKEDKVNIIIFHVPKNWEDFSKLGFDIQLSGHTHGGQFHPLTWICDLIWYNRGLFKANIGGKDRYLHVTTGVGSMDYPFRWGTDSEIVVLKLRKND

SEQ ID NO: 4849 - protein, 421 aa, Methanobrevibacter ruminantium
MLKRTVKKNGDELFPLGLGAMRLPTKNNSIDKDLAREFILYAIDNGINYIDTAYAYHGGESESFLGDILSLTDSDGVKYRDKVKLSTKSPSWMVRSREDFDAFLNEQLRRLKTDCIDYYYLHTIDLSILERLKGLGVYEFLEKARSEGKIKNIGFSYHGAPNEFNDLIDDYDWDMVLVQYNYLDVNAQAGIRGIRYAYENDVAVFIMEPLKGGILAGELPKEVDGLFKGVDSNKSSVDWALSWVLNQKEVTCVLSGMGSIEQIKENMNIAERVEVDSLSDDELAVLEKAQGIFNSMMKINCTGCGYCLPCPKGVNIPDCFNIYNEKYLFNKKAFGPIPGAMVNYYMVVGGITNKQSNAGLCNHCGRCKRLCPQSLDIPSHLDSVKSEFEKFGFNYQIKFIRNIAMPSINKISKVFDVFKHS

SEQ ID NO: 4850 - protein, 1435 aa, Methanobrevibacter ruminantium
MYISEIEINQNIILNTEGNKIYLNNSPKSNIHDNWFGNTLLNYDEVPYEGCTNWIFLNGESNQVSLENPISFEITFTLSSFNKNTKKISNYDDRKLPFNLTAHAEHGILNPNSNLLGKTTIYETEIINVERIIGNIANIDSEFEIMEFLVTDGTTFYDLNQLINNNSNNEINISGNYTYHDDIDFEFKEGINVNRSLIINGNGFTINGLNSSRIFNINGDNVTINNISLINGNGYEDTYDSDGGAIYWKGADGTLIQSNFTNNSGYNGGAILWEGDNGRIINNTFKNNSAFDGGGAITITVERGIIINNTFTNNSASYDGGAIYLIASSGEIINNTFTNNSGYKGGGMICYADNLSMINNTMESNIASDDNGGAILWEGEIGRIINNTFKNNYASEEGGAISIRGEIGEIINNTFTNNNASYRGGAISIIITSGEIINNTFTNNSGYSGGGILCYGNNVSIINNTMESNIASYDGGALYVSMDYAMIINNTIKNNNASDNGGAIYWDRYKGIISLNTIANNNANHGGAIYYEGYSSNLNYNIILNNKNSEIYFDNVRTFNGSNNWFGNNASNYNLNPNTSFEYDNSPNVTLSDWLFLNGTANPKIVNAFESSQILFKLYSYDGILISEYDNSLITDTKLNLSAERGRFDKTSASFNEPINYTAIEGGRDTIRGAIDKSGYSINLTNRRVSSKIAMDTKEINYSRNASIKLNYNDFAGGNVTIRLMGENNEYLFENMTLNKTIFLGVINRDSYNVRIEYSGDRSFLEENISESLIVNKAGTKIVPTNDTIDLGIGENSKVNYTFYVIDDEGQYITNPEDIGNISFKSDGSAVEVDSKTGEINTIKEGTANILIRFQGDENHLDSNASVYVISSNKIRTKITAENLTTDYKKDDYIIARLTDLTGKPIANAKLIVELNGTNNYTTNSKGEIKVPTKGLDSNEYIAKIIYEGDESYRFSNASVRLIVNKLNTEITANNITTIYNITKELVIRLKDVNGDPVSGVELTVDLNGMNNYTTDDNGQAIVEIKGLIPNNYTAKITFEGNGNYNKASTESDIEILKIPSILNGTDMTVNYKEDKYLTVSLKDKDNKPIHNASISVELEGIKNYTTNSDGQIKVPTSSLPAKNHTAMIRFEGNEIYEKSNATAKITVNKISGKLTASNVTARYGDNQNLVISLKDSKKNPLSGFKVSVDLNGKKNYTTDSSGQIKVSTKDLVPDTYKAIIVFAGNENYTGSNASASVRINRINTTFKYTNMNTIAFDSNIEGRIGEYFRFQLLDEDGKPLSGKQVFIGFNGVKYNRTTNETGEARLQINLKYVNHYTFAIAFLGDDYYKGSFNVALINVTEQIPVLSTSAKTYKSSAKTKTLTATLKSSRGHVLAGKKISFTLNGKVYTANTNSKGLASVKVSLSKKGTYSFTVQFGGDSTYKKVTKSSKLTIK

SEQ ID NO: 4851 - protein, 463 aa, Methanobrevibacter ruminantium
MKFKKYLFILLIALICIISVSAVAASDANDPISQDNNQGLVLEETNQDLSITKTKEIVESSTNKEISLEDNKVISKENKKTSLKDEETDSFTNLNNLINIDNPNNHTISLNCDYVLLEEDCTYIDTEILSSSNLTTSHILRDEGSLPIDLNPKTYKARLMVENSNDQSIEVIKTTNIEGSSFWLLNQTINNNSNSEITLDSNYTFNSSADSGFINGIYINRSLKLNGNGITINGLDEGRIFIITADNVTITNVNFANGKSDKGGAILWLGKNGNISNCNFTDNMATSGGAIFWGNTNLTDYYSNGQGDDGTIINCNFIGNEAQKGGAMFFHTGGATIKDGCTFHNNTGGQEGGALFWLNYGGRIENNCNFTFNTAKGSGGAIYCPQVEILNNCIFQNNTAQSKIEERIMKGGGAIYLQKGGTVRDCTFIGNIALNDESDGLRFYKGGEPFTLKGMPPFPTAPS

SEQ ID NO: 4852 - protein, 1391 aa, Methanobrevibacter ruminantium
MKLKRYSYIIMIFLVCMISISAISAADDSSIATDDSNKIINDNNNQDIVLEENGPSTNIALEDKNYKIEKPQLKENSPGNFTDLNYLINEDETTRHNTTITLDRDYIGGEKGIRIDRPLIIDGQGHTLNASQNNRVFHITSENVTLKNIIFTGGRSDYGGAIYWQGDNGKIINCNFTYNTATKYGGAVFWGDDEFEGTADQTIAKDGIIINSNFISNKANVGNGEAWENGGGGEGGAVYWYANNGTICNSYFHNNRAGGQGGAITWKGNDGIICNNTNFTANSAGDSGGAVFWRGDNGTISNNCEFNNNIAYGRTSDGISRGGGAIFCHGENGKISNCSFMENSAKPESESGKGGGAIYAEYNTFITDCIFIRNSADYYGGAILIFRTGDVYRNIFINNTALNGNTITLKGIGHSTITNNIILNKTNAIYWNESDYTIEANWFGNNATQYSEPYEYSQTWLFLNATANPNPAPFNIPTEVKFKLWLYNKKTKKITEYDNSLLPTIQLSLSQTKGSINKETAGLDDPINYTANEVGTGSITGKMEWITDSIFFEIVNDPKLEVSVNPSEIDYGDNITLHLGYEDEATGTVNISFKGSTHEKTIENIPLNKTITITESILPDEYTVTVFYSGDNQFSRASKTADEKLKINQKNPNMTVTSYEIYVNDTNGVMFSIKLDKDATGKIILTGDIGREINLTEGSIKDGKRIIEIKNNGFDLGKYNVTFSYPGDEIYWEYETTALSEIKVIETKIIPQKEEIVLIIGDKSKINYTINPSNAVGDVTFTSNDTNVVKVNGSGDIEAIDKGQATITIKFSGSKDYAPSNATVNITIGREMAKLTAENITVTYNAEGYLKVALKDSKNKSISGAILIVDLINKTNYTTDSNGEIKVPTKSLAAGNYTASIEFEGNDKYLPANTTAGVTIEKDNPRLTSNNITNKYHTEDYLIVSLKDSASGPISGAELTVYLNGSETYKTDGNGQIKIPTKDLLPNIYVANISFAGNENYTEANASASINITKLDTRLNATDTITKYNVNKDMIVTLKDIDGNAISGLNILVDLDGVKNYTTDSNGEVKVPTKSLAAGNYTANIAFEGDNIYIGSNATAKVTIEKESTEISATNVSAKYGSNQSMIVTLKDSQGNPISGAKVSVEIDGKKDYTTDSNGQVNVPSKNIVPDTYNATITFAGNENYTSSNTSASVVIKRVKTALNYTDMNTTAFDSNIEGRVGEYFSFQLLDEYGKPLSGKQVFIGFNGVKYNRTTNETGEARLQINLKYANNYTFAIAFLGDENYSGSFNFAIISVSEQTPSLSTSPKTYKASAKTKALTATLKSYKGTAIPDKKITFTVNGKTYSANTNSKGIATVNVSLNKKGTYNFTVQYAGDSTYKKISKSEKLTIK

SEQ ID NO: 4853 - protein, 262 aa, Methanobrevibacter ruminantium
MKNILISNDDGVMGPGILASKQALEGLANVVVVAPQENNSAVGRKVNIMKHMYLENYELADGSMAYGLSGTPADSVNVGINYVCDEVPDLVVTGINPGINISRLQITTSGTVCAAIEAVGLGIPAIACSLFLDDDCFKQDDEGNWYVDTDYSFAQKILAKLVKKVLDEGMPDGVDLFNLNIPSKPLSDKIKITRLADSMLKFNILERVDDDGNDTVMNVPELIEDYEEGTDGYCLLVERRPSLTPLNVHFGAEISNLEDWEF

SEQ ID NO: 4854 - protein, 244 aa, Methanobrevibacter ruminantium
MDINEWEEWYEEILNTFGFRREDDEKTADLLDEILADHGFLTIDEFYDEIMLKKGYTDKFIVFGAGPSLKEHIRFLKENYDLSKYMLVSADGATTALLEEDVVPDIVATDLDGKMSDLLTANSLGSYFVIHAHGNNEELIDLWTTSFNKILGTTQSVPVGNLYNFGGFTDGDRAMFFVVELGAKEMVLAGMDFGTVVTKYSRPNIEGETGPADEIKTKKLIFAERLLNWIRENEDVEVINLIDS

SEQ ID NO: 4855 - protein, 208 aa, Methanobrevibacter ruminantium
MKEIEFDLKNNPFYNFLSSRYSMSARLNVEKMWNYSKENDLSFFTLSLAALINSLNEIPEMRRRIVNGKVIEYDYLDAVCPIMDEDSGIYKEMRVKAPQRFDEILDWHDYVQEHERKILNGTEDAFEVKTTERDELNIANFSCIPWVDFDSITNCTASSNQIQPLITWGKVNEDYEMTVAITVSHIFVNGRELAYFYQFAQDNFNNLF

SEQ ID NO: 4856 - protein, 372 aa, Methanobrevibacter ruminantium
MAIEDILMFDETIFNDINAFNPDYMPPNYNFRDSQMEGMAMAIRPAIRGGRPTNSVILGSCATGKTTAIKKVFELVEKTTDKVVCVYINCQLHTTRFGIFSQIHKKIFGHQPPETGVPFSRVYEKVMDKLSSDGKSLIVAFDDVNYLFQTPHANKVFYDILRAYEEYEGVRTGIFAILSDLEFRFALDKNVNTVFIPQDIVFPPYNYSEIFSILKDRAKAGFFPGVVSDEIIEEIANQTYEVGDLRVGIDLLRVSGNIAESNASRTIELEHVEEAVAKQGSVNLMETINSLNDLEKTMIKVLIDRDEVVTAGALSKEFKEQAGVSYATFNRTLEKLEFLRLVDTRYTGKGVRGNSREIILRFSPEDIKRCNL

SEQ ID NO: 4857 - protein, 63 aa, Methanobrevibacter ruminantium
MMVSHNNRTCDLRKKQNLRDPLTFNNLRINIKDCMVIFVVFTVLLLSILAVSAAPSPDFMLWV

SEQ ID NO: 4858 - protein, 157 aa, Methanobrevibacter ruminantium
MILIHCGAIMSENNQREKKFEYFEVTADIGFYAYGNTLEEAYENAALAMFNVVTDIDKVKTSETREFEVESEDLVSLLYDYLDEFLFLQDTEFLFFSEFKVDIDKTEDGYKLNCIASGEEINWDVHVPRSEVKAITFHKMCVKKEDGVFKLRAILDL

SEQ ID NO: 4859 - protein, 482 aa, Methanobrevibacter ruminantium
MSIRESLVKVRENVWELPSDYKKEMRVPGRMYLDDEAVKTIEEGALEQVSNVACMPGIQGASIAMPDIHFGYGFSIGGVGAFNYNNGVVSPGGVGFDINCGVRMLRTNLTEDEIKPHLKELTEVLFKNIPSGVGSKGQIRLKDNEINEVLDYGAWWAVERGFGWEEDLKFLEENGRMEEAESEVVSKKAKKRGVPQLGSLGSGNHFLEVQKIEEVYDDNVAKAFGLEPGNVTIMIHSGSRGCGHQICSDYLRKMDKAYRNYKIKLPDRQLACAPIDSPEATGYLKAMAAGANYAWANRQMMSHWVRQSFEEVFKRDAEDMGMSTIYDVAHNIAKKEVHKVKNSHMEVLVHRKGATRAFCPGRREIPKEYRDVGQPVLIPGTMGTASYILHGTDVAMEETFGSTAHGAGRVLSRTAAKKQYTAKDIEKELNDKGIHVKANSAPVLAEEAPGAYKNVDSVVKTSHDAGIAKLVAKVVPLAVTKG

SEQ ID NO: 4860 - protein, 257 aa, Methanobrevibacter ruminantium
MIAIIGGSGVDEITDMAESIEKKIVDTEYGSVQVSLFEIEGKEVVFLPRHSEGHTCPPHKINFKANIMALKELGVSQILATNAVGSVDLEIGPGSIVIPDDFLDFTVNRDRTFYDDDVVHIDMSEPYCNRLRNALLENSDCVNGGLVDGGTHICTEGPRFETPSEIRMFKMIGGTVVGMTTLPEAVLAREKEMCYASIAIVSNYCTSIAKHKLGVEEIIEIMAVKKEELISLLFNTIKNLPVDYDCECHHALGDAEF

SEQ ID NO: 4861 - protein, 208 aa, Methanobrevibacter ruminantium
MNIKELFIESLKDNKKLIIGLYAFFIIVFIAAWIITGPKMQAIASNVTAMNGPGGAQSSAIELFIHNELGGIITYLASVFFGIAAIVLLGYNALNLGSIGQLFNHFMPNGGILYLIYLIPHGIFEITATVLQSAAGILLFLFIWRFIKAFRSKDTNGASDAFEMTKKTLIQSIVLMVIATILLLIAAPIEAYFSTAFSEFIMGFLGLR

SEQ ID NO: 4862 - protein, 130 aa, Methanobrevibacter ruminantium
MNEFGQLQLIWIRRLARETGRITALIEAGNLSVIDLVRYKKSISSMDGFCRFVIESQDWDDVRRIPEIVEDVEEKLFLHFYEMIDRFDGEGAHLDFSKEDEGKICLNFDDASLEDIVFTIIDDEDIDVFL

SEQ ID NO: 4863 - protein, 67 aa, Methanobrevibacter ruminantium
MRNNLKIYRAIENITQKELADELGVSRQTIVLIENNKNDPSLELAFKIAHKFDVKIEDIFINDSNKK

SEQ ID NO: 4864 - protein, 99 aa, Methanobrevibacter ruminantium
MENLLNLKYTCKDCDFTWITLNGEHSICPKCHSENIDLLGEVKDLDIEAILAHNKMRGGCCGSARGKGPLTCGKPMPDHANPNIPHHNHNKKTCCGYNE

SEQ ID NO: 4865 - protein, 355 aa, Methanobrevibacter ruminantium
MNVSDLKRDHYMLKGPLAKQGYDWWWHSLTAYNKETGEPRPFFIEYFVCNPALAEDEPTLGQDPKNIEAGKKPSYCMLKVGAWGKEPKQIHNFYSMKDFECPDDKLDVKIGEFSLTEKHMTGYCKVTEEEARDHPEYMCDAGEMKWDLDIDKQITFNVGYGANTLFRKLNSFEMFWHAEGIKTQYSGTIELDGVEYEVIPEKSFGYADKNWGADFTSPWLWISSCNLTSLITGEKLNNSAFEAGGGKPKAFGISLPRKLLIGFYYEGKMYEYNFARFWNMVKVDFGFKEGEELNEWFINASNKDSKMEMKLYCKRDEMLLFNYEAPTGKKLHTRLWNGGNGFGEIKLMKKGRHID

SEQ ID NO: 4866 - protein, 229 aa, Methanobrevibacter ruminantium
MLWTDFIVLAIVYIYVVAIFILSEKVLKSRPEVSRKFLHIMVGNMIFAMPFFSDPWIMLLFITLPVTVALFFLTEYSPIQIENSVTESGHALGLLFYALIWSILLFVYPIMLDPNYLWIVAMAIVPLVYGDGFAALVGGKWGTIKYHVFGGEKTVVGSLAMLSVTAVLSVFVWVFYSSIGYTLPELNLWYILLISAVATLCEALSYGGVDNLTVPAVTSVLYYIVATVL

SEQ ID NO: 4867 - protein, 352 aa, Methanobrevibacter ruminantium
MKHRLNLDNKDPNYILLKEIFKIMDSRKSKSILASYGFKNLNRTIFTFKIIFISMFFGIDIPFILNELKSKKELRKYFNISEVLTADQVYKIFSEINSEKLIKCLNRILNSRNMVKRRGKKTFIVDATPVDVDINFHRNKKTKEHLEKINLKWSYSSSKGYYIGFKATVVLDYDSMNPVCILVHSGAPNDAKLFEEILENLQKRRIIRKGDTLIFDKGYYSYKNYQIGISKYKIIPFIFPKEKFSRTRLDDILTYLLAVFNKTKRIMKEKRLYNSLKMELMKKIDSWEKFKPIRGKIEDFFKLLKQGLNMREIHKYTPKSVEKTVYLNVFLGALIISQGFYSKTAIQQLSEN

SEQ ID NO: 4868 - protein, 735 aa, Methanobrevibacter ruminantium
MTDVELKIKVAETLSQNDVGKNIAKLDMESMFKLGLKDGDIIEIVGSKNTAAIAVASQSDMETIIRIDGTTRKNSGASIGEEVTIRRADVKEAKKIVLAPIDARIRIGGDFNRAFANQVMVQGDLINTGIKTPQRRVSGSGFFDDIFDDLMNVPGIGAMSQIKLAVVSTSPGGVVKVGPNTKLEINEEPVDISKLEGVSNLVDISYDDIGGLKEEVKKVREMIEIPLKKPELFEKLGISPPKGVLMHGPPGTGKTLLAKAVANESDAHFIVINGPEIMSKYVGGSEENLREFFEEAEENAPSIIFIDELDAIAPKREETNGEVERRTVAQLLTLMDGLNSRGQVVVIGATNRPDSLDGALRRPGRFDREIEIGVPDKDERKEIMEIHTRGMPLAEDVDLDQIANTTHGFVGADLEALAKEAAMRVVRRIIPDLGSDDEIPPEVLEKLVVTKEDFKSAQREIQPSALREVLVQVPNVTWDDVGGLDDAKQELKEAVEWPLKYPNKFKEFGVRPPKGTLLYGIPGTGKTMLAKAVANESEANFIAIKGPELLSKWVGESEKGVREVFRKARQTAPTVIFFDEIDSIASSRGGESGDSGVTKRVVNQLLTEIDGLEELEDVAIIAATNRPDIIDPGLMRPGRFDRHIKVDAPNEDARLAIFKVHTKDMPLAKDVKLKKLAKRAEGYVGADIEAVCREAAMLALRDDIEAKEVSAKFFDEAMDKVKPKSSNEEELIQYF

SEQ ID NO: 4869 - protein, 279 aa, Methanobrevibacter ruminantium
MDRHVIEALGRARITVENGKVVDVGEPMIEYCPLFDKHRGIKELTKEEIEKNIQFRIDDFGMCTKNRQLRLKDFLSFGISEILSTLLDENLIDCAVMVCEGCGTVLVTESEMAQGVGGRVSGLVETSPISQSFIWKSFGQDRVVDSETARIDQVDGLRLAIDNGYKNIAVTICLAEDGIILRELEKEYEDINVYIFAVHSTGLGREEAEIIFDTADVVTGCASKHLRDIGKELKVFSVGTSIPIFAASDKGEEFIKLRLDKIGGPKKKTGNSKQPNPLV

SEQ ID NO: 4870 - protein, 211 aa, Methanobrevibacter ruminantium
MSKDVVLILSGGLDSTTLLYKLLNEGNNVTALSFNYGQKAAIEIERASEICKMNDVNHFVFDIRNIVDLLSSSLTDKDNDNVQEPKSTVVPSRNTILLELATAFAISNNLEEVYYGAIKADTGDYPDTTPEFLKQINELNKVNNYEYIPVCAPFIDTDKKDVVKLALELGVPIEKTWSCYVNNDGTPCGECFSCKSRIEAIKEAKEELGIE

SEQ ID NO: 4871 - protein, 119 aa, Methanobrevibacter ruminantium
MLTLVSEHRIYGCHKLKDQGGKCTQWHGHQYRVILTLQAPYKDLDYRNMIMDTYDIEAIFNEFIGVDHLNLNEFMDSENPTMEEMSKFFYDGLKDKIECLVSVGVYETPETGVTYTPME

SEQ ID NO: 4872 - protein, 202 aa, Methanobrevibacter ruminantium
MIKIKVSEIFTSFQGEGPYIGTPATFLRLYGCNLNCPWCDTDISTYEILSVDEVFEILMTQMEFNNIRILVITGGEPTLQMEELKRLIKEIPDEIKIQIETNGSIFEYVPEIDYVISPKEDKETVFKNYYKYDNVFFKFVICSQEDIDEVIYLKDKYNYDKTIWLQGEFSKDGEMADLIRENFPHLENVKLSVQTHKYLNQR

SEQ ID NO: 4873 - protein, 140 aa, Methanobrevibacter ruminantium
MYKKIILPTDGSEYSNREILRATKLLAEDGEVIILSVATELRKTAFQRSKDIDRANKESIQEAKEYVAAMKKGFDDSVNVRTKVVVGFPAEAINQVAEEEGADLIIIASSGKRGLHRFVIGSVAEKVLKDSEIDVLLVHD

SEQ ID NO: 4874 - protein, 193 aa, Methanobrevibacter ruminantium
MADKKPTAENWPVVSGDYIVGDPESPVAVTTLASHNEDIPAAAGAAIAGPCKTENLGIEKVVANIISNPNIRFLILCGAEVQGHITGQSFKALYENGCDPEKKKITGATGAIPFVENIPMEGVERFQQQLELVDMIDNEDGGAITAKVKECIEKDPGAFEEDSLVIKIDEERYSKKSSFVESSSESEKIESEA

SEQ ID NO: 4875 - protein, 149 aa, Methanobrevibacter ruminantium
MKKESIFNDEVSLFNSIYVMHKAFEKFLKTHVNDLNINKAESKFLGEIYYNEGISQREIARNLFVSEANIAKTYKILEKKGFIYKKVDEKNNTRRQLYLTEKGKESFEEIIKLYEEYHHFILSDYTEEEIRKHEEMMKGIADKSLKFLK

SEQ ID NO: 4876 - protein, 256 aa, Methanobrevibacter ruminantium
MKNYFDIKDKVAVVTGASSGLGWQIAQAYASQGAKLALFARREERLQENVKEIEDKFGTEVMYAVTDVGDYDSITASVQKVMDAYGRIDILVNAAGMGNNKMVVDQSNEEWARHIHIDLTGVYYMCKAVGEIMIEQEYGKIINIGSIHSRVIFPGGGISAYSSAKGAVMNLTKNLAVEWAKYNITVNAIGPAVFETELTVDSIEMDGFMDLIAAYCPAGRLGKPGELDGLAIYLASDASSFCTGQLICVDGGWTAI

SEQ ID NO: 4877 - protein, 424 aa, Methanobrevibacter ruminantium
MTQMTEAKKGNVTPEMQAVAEFERVDVGKILNGLASGRIVIPKNINRDTKACGIGQGLTTKINANIGSSSKIEDIDLEIKKAKLAVDFGADAIMDLSTGPKLLEFRERIMDSVDVAIGTVPIYEAGVVTLNKGNEIIDMDEDDIFNSIIHQAKDGVDFMTLHCGINQDLVYKLQEAKRMMGIVSRGGTFLASWILHNEKENPLYSNYDYLLEIALEYDITLSLGDGLRPGCQSDATDTSQIQELVTLGTLVKRAQEAGVQTMVEGPGHVPLNQIRANMEIQKTLCHGAPFYVLGPIVTDLAPGYDHITSAIGGAIAASSGADFLCYVTPAEHLSLPSLEDVKEGVIASKIAAQAADVALGLDTAWEKEVEMAQARKNFDWEKQFDLAFDSVKPRHYRNKCELDDDEMCAMCGEYCAVKIAKGDF

SEQ ID NO: 4878 - protein, 550 aa, Methanobrevibacter ruminantium
MKYEELVNVYEALGATTKRLEKTEILADFLKTVELEDLQKITLMALGRVFPPWSEEEQGIGDKLVMKAVGDAVGVSVAVVEDAIRDEGDIGAAAEKLYGKKTQMTFFSQPLTVNFVYNQLRKLAKITGNRSTAKKISNILELLSSASALEAKYICRTILEELRIGVGEGIIRDAISQAFGVDKALAERAHMLTNDLGLVAKVAKEEGEDGLKKLSLIPGRPVKPMLAQLSEGIEISINEMGCALCETKYDGIRMQVHKKDDEITIFTRRLENVTMALPEAVDLIREAFPDEDFIAEGEIIAIRDGKPTTFQNILQRVRRKHNIEEAMEKVPIKIYLYDLLYFKEPTIDEPIIKRREILESVVDCSNPNLALSSLVKVGPDNIDDAVDLFNKSIEGGHEGIMIKDCDEPYIPGIRGKKMLKLKAEPETLDAVVIGGVKGIGKRGDFIGSYVIALRDENDQLQPIAHVGTGLSDDDLANLTEKMEALKITEKGTRITVHPKIVFEIAYSEIVKSPEYSAGYSLRFPVVKRIRDDKGVDDIDTIERLESMFKG

SEQ ID NO: 4879 - protein, 132 aa, Methanobrevibacter ruminantium
MELNDEIIFKVALITALVGMIGMLAFASYIEPKEITINEITRNNIGETVSVSGVVESVKLSSSGSSCFLELNDGTGKINVIVFESVLVELKDAGNDLNDFKGHNIKVVGSITEYKSSMELILANSNSIKLES

SEQ ID NO: 4880 - protein, 70 aa, Methanobrevibacter ruminantium
MYEKDKLVLPNIIKEEFDCIELNEDTIFDWAIEDDKIILKPRNIVTTDDIIGIIDDDGGEWDIDNEIYSL

SEQ ID NO: 4881 - protein, 77 aa, Methanobrevibacter ruminantium
MGFLASSKIYGDYQIDIPKEVIEEFNVERDSIMEWIINEDGRISINFRKKYSIKDLVGAFHLDDEVSSVDLKRSLYE

SEQ ID NO: 4882 - protein, 454 aa, Methanobrevibacter ruminantium
MVEKRLFGTFGVRRNCEMMVLTPEFASRLAASYGSIVQGTVAIGGDTRTSTPMLKHAITAGLLSSGCDVVDLGILPTPAIQYAVRNYYDGGIIVTASHNPPKYNGLKFVDEFGIGTPDDMEIEVEKLYFDEEPIRASWDKIGEVFTNESIIKEYIAETLKRVDVEAIRARKLKVVVDCGSGAGSYTAPYILKELGCEVTTLNCQADGFFPGRDPEPIEPNLQDLIATVKNLGADIGLAHDGDADRTICIDEKGNFILGDKTFALVEKHMLKENGGGIVVTTVATSQAIYDIAEEFGGEVIATAVGDLLVARKLKDTDGLFGGEENGGLIFPDFIYGRDAAMTVAKILEILVKEDKPLSELVAELPVYYQEKLKIECPDDQKQDVMANIANEIKDTTDFELDTTDGVKILKEDGWVIIRPSGTEPIFRCFAESDSMDKAQEMANWGISLVEKYKN

SEQ ID NO: 4883 - protein, 267 aa, Methanobrevibacter ruminantium
MISDRQKTLLILILVLVLAFAIIFLGYSISLGNNQTAGVKLNDSNKIYINQSYPAEPIPDAKIDTSGVNSVLLGQNELGSVELLGPFGNSDSEIKIAYSIGMHPWESKVHKALFDTVLAKNSSLKYCYYIYKINVTNYNTDDEGRMDGQLLAQEFVAPHIINGDYDLFLDIHSNKGTVGGTYEQTNFAFAVGQDEKSEAFVKKILDKMPELVYYFPADQSSPPYITLPVEQAGTPTVNYETFSYEDINTTYDLIDKLVDVVDNLEFK

SEQ ID NO: 4884 - protein, 237 aa, Methanobrevibacter ruminantium
MCDLILNLIIKIDDIMIIKNYSNEPTDEAKVDSSLYDAQLIGENDLGTVHLHGPFGNEESDIKIAYLIGMHPLESKAHRALFDTVLDKDGDLNYSYYIYNINVIGELDEATEGRMDGQLLAQEFVAHHIIDRGYDFFLDIHSNRGSRSPGTYEISNFLFAPGFDEESSKYMNVLLSKIDELVYYAPEYRTSPEFITVPVQKSGIPTLVYETYSYEPIELTYELSEKLVDAVDSLDFD

SEQ ID NO: 4885 - protein, 378 aa, Methanobrevibacter ruminantium
MPIMSFGSQNINIITNKKAMTIRKLWKTPLKKGDRLHCYWNLASKEKKKIFEAEVTEVETITFKELKDNDELAREEGYEDSKEMVKEFKKMYPDRIADDDLFQIIYFEKLDINKWKGEKIDQKEMITQRADILFDTGKYDKSVLCYNAALKIDPNDVYLLNKKGDNLGRLDRFEESIECYDKALEIEGDNEYIWNNKAIAMLNSGNIEEALVASDGALNANPDNPVVLYWRGFILEILSEFDKALEVYDKLITIDDTNPEVWNARGNVLTDMDRLEEALQSYDKALELCLEDSEIDASAQNRKGNALLDLGRFEEAIQCYDRAIELEPLNTSFLLNKGVVLMEIDKFDEAEILFTKVLALDPSNDDARVLKLECLENM

SEQ ID NO: 4886 - protein, 240 aa, Methanobrevibacter ruminantium
MEYGATITSSIEYPKKMSFVIFLAKCPLSCPYCSNSELLYGGEEISLEEIIEKIDDSAFLSDAVVVSGGEPLVQLEDTIEILKYTRKIGLNTKLDTSGVYPNRLRKVLDLGLVDYLAMDVKAPFNKYKEVIHSDIGDKVKESLDIANEYDDVFLECRTTYCPALLEEEDLFKIVDEVECDLYTIQQFRNRCTLDESLDGAEEPNPHNMREIAQKIKELHPNQDINIKTAEFGQQKIELEN

SEQ ID NO: 4887 - protein, 374 aa, Methanobrevibacter ruminantium
MKARKAVEEIDPYVPGRSKEEIAQEFGVKKEDIIKLGSNENPWGPSPKALEAIKEELNNINRYPESDVELLKKEFARYSNVKPENIIIGGDGADEILDTLAKTFIEKGDEFIVPLPSYMYYEFLFKPYGAIPNYAKWNLETNTLDLDSVLDAINEKTKMLFLCSPNNPTGALITQDEFRPILEKTNKSRGGVCDAIVVIDEAYVEYAEGTNVNLLEEYDNIFIIRTMSKVMGLAGMRIGYGISSPEIIEYMHRIKPVFSLTKLSYVAALATIRDTEYIEESIKKGIESREYLYNEINKMKSVKVFKSYSNFMLIDIHNTGYTAAELTREFMKRGMIVRDCTSFKGIDEYYFRISICTLEEDKKFIEAMKDILNE

SEQ ID NO: 4888 - protein, 158 aa, Methanobrevibacter ruminantium
MKLKEPVKIFPGAQVIGDVEIDENCSIWHGAIIRGDVGPIRIGKNSNVQDNCVLHTSANLTLKIGDNVTVGHGAVVHGCEIGDNVLIGMNATILNGAKIGKNSIVGAGAVVSENKEFPENSLILGVPGKLIKETTQEQRDNIAWNAKHYVELANEYDE

SEQ ID NO: 4889 - protein, 439 aa, Methanobrevibacter ruminantium
MKALILSAGEGTRMRPLTLTKPKTMLPVAGKPIIQYNIEALRECGVKDILLIVGYKEEMVKNYFDDGSKFGVNISYATQTKLEGTANAISYGKDFIEDSLITLNGDIILDEEILREIIEDYEESGADTLMVLTEVEDPSAFGVVELDGEKITNIVEKPKKEEAPSNLVNTGIYIFNKDIFDKIDKTKVSPRGEYEITDSLSLQIEDGKFVKGHKTEKEWMDIGKPWELIEINESLLNNIKGEIKGTVEEGATLHGEVFLDEGSLIRSGVYIKGPVYIGKDCDIGPNSYIRGNSYFGDDVHIGNAVEIKNSIIMENTNVSHLSYVGDSILGSNCNIAAGTNIANLRFDNKTVKFNIKNKKVDTGRRKLGAIVGDGVKTGINSSLSPGVTIGTRATIGSGVLLYDDLPSDMRVLLKQEHIIQNKKENGQIRLEEVEEDMNK

SEQ ID NO: 4890 - protein, 53 aa, Methanobrevibacter ruminantium
MVKYVCMHCEYTWDSETGDETYKVPAGPIEDFPDDWVCPQCAAGIEGIITEED

SEQ ID NO: 4891 - protein, 448 aa, Methanobrevibacter ruminantium
MANKKLFGTSGIRGKIGSEVTSELALKIGKSLAKYLNNTGKVVIGYDTRTTNRMLEQAITAGLIEHGVDVIKIAMVPTPLVGYATIKLGADAGIMLTASHNPSEYNGIKLWNANGMAYTPEQEEKIEEIYYNEDFGKVEWDKIGIISHNDEIKKQYIDDLLDIVDIKPGLKVVIDCACGAGSELSPVLFRKAGCEVITLNSQVDGFFPGRNPEPNIANLSSLMKAVVATESDLGIAHDGDADRMITVDENGKVSDFDKLLALVSKKFGGTVVTTVDAGLCMDEAMEEVGGKVLRTKVGDVNVAEVMIEENASFGGEPSGTWLHQDFCMCPDGILSGLRMAEIVSKEGKLSELLAQFTDYPHMREKVICSKEQKIAVMENMEELLKNAFDDIKEINTIDGIRLSFEDGSWVLVRPSGTEDYVRVTLEAKTQEKAEFIRDTCVKIIKENI

SEQ ID NO: 4892 - protein, 412 aa, Methanobrevibacter ruminantium
MKGMILVMDGLGGRPLKELNNQTTLQAAKTPNMDKMAERGITGIMDSIAPGIIPGSDTAHLSLLGYDPYEVYTGRGPFEASGVGVDVIPGDIAFRCNFSTSDEDGIITDRRAGRIREGTKDIVDVLNTMVIEGYEDIEIIFKESTGHRAVLVLRGEGLSGEVSDADPKVEGNKPKEVKGLDGSPEADKTADILNKLVVKSYEMVKDHPVNLKRIEEGLPPANIIIPRGAGEVPEVEPINEKYEVNSACIAETGLIMGIGRFAGMDIIEMEDVTGGVDTNLYNIRDTIVDQVNNSEHDFFLVNIDGADEAGHDGNAKDKLEFIEKVDEIVMSELLKLEDIYIFLTADHSTPISVKNHSGDPVPIIINGPEVRVDDVKEYNEYAVAKGGMCRIRGADVMNILTDLMGYAHKFGA

SEQ ID NO: 4893 - protein, 232 aa, Methanobrevibacter ruminantium
MKEALMINWGYVVLLFILGAISYKRKSLDMLGALIMIFMGITIIFSAGVSWFILIVLFFILSIMATRFSKPYKKEIGQYEKTRTAKNVISNGLVAFLMAAFGSYYLPLAGGFIGAVATATADTLASEIGVLQEPRLITSFKKVPAGTDGAISILGTSAAIVGAGIIGIASFLLGIMPDPLIAIKISVISGTVGCFIDSILGAVLERRNFINNEHVNLLATISGAIIGIISVM

SEQ ID NO: 4894 - protein, 192 aa, Methanobrevibacter ruminantium
MAKKQRRRVRDTWKEKSWYTIKTPIAFGEKEIGTTPARDPELVYGRTVEVTMRELTGDFSKQYIKLQFEVDNVAGDIASTKFTGHKTTTDYVRSMIRRGTSRIDAPVIVTTQDERKLKLHVLAVTTRRAKSSQQKYMRETITELVSNVASEKTFDELVEISVNGRLASEVYHKAKKIYPLKRVEIIKSKVLD

SEQ ID NO: 4895 - protein, 267 aa, Methanobrevibacter ruminantium
MCEIFGFSSSREEELNDYLKTFFSHCEEHPHGWGLAILDSDKYQIRKEPVKARSSVMLGNILLNPIVCKNMLAHIRLATIGNLDFYNCHPFVKKDNSDRRWTLIHNGTIFDCQDLCRYSTEEEGETDSERILLYIVDTINNYESVKGEPLSLKERFDIVSSLIKGMSCTNKLNLMVSDGEQIYVHTNLKDSLHYLKKDHSIFVSTQPLDDDDWKEVPLNKTFSIINGDVLFESDSHSNEYFETEEQLRFIEKFLESLKTDSDEEYAW

SEQ ID NO: 4896 - protein, 241 aa, Methanobrevibacter ruminantium
MCKDGISDEALREKLYQAFLEPTKKDKKEYIGIEIEMPIINLNKEAVDFKVVHKVTRDFSEEFDNFELEGIDYDGNIYALRDKASDDIICYGCSYNNIEFAMGKEENLFSVNERFLKYYSYFKDKFEEHGHTLTGMGINPYRKYNNEVPIPNERYLMLFHHLKSSSDYVGMEFHQYPAYGMFSSASQVQLDVPYDELVDNINVFSKLEPIKALLFSNSVFWKRMKTIFALEISYGNSVPMA

SEQ ID NO: 4897 - protein, 217 aa, Methanobrevibacter ruminantium
MYNQEFEDIDELLSYLESLNIYCVMRDGLYINFPSMGLKEFFSKDKITGEYYCKGEYKKREFEPSLDDIQYLRAFKFINLTFRGTIEYRSVCTQPIKDSMSVAAFHVGLKHKTDELNELFLKSGIYKNDCDANELRKLLIRREIPDFVDMEKIYGLALKVLDLAKEGLLERDLGEEVFLDSLYDNLNNRTNPGKRLLDSLDGGKSLEEIIKEYGEVE

SEQ ID NO: 4898 - protein, 474 aa, Methanobrevibacter ruminantium
MDKIFNLSQIKNNLSSEQLKEGSFGIEWECLRVKENGELSLSPHPEIFGDKLTNPYITTDFSESQIEIITPAFDTIDEAFSFFSFMSDLVNSSLSDDEYLWFQSLPCILPESDKIPIAKYKGRGLGEESMEYRKGLAKKYGLKKQLISGIHFNFSFKEELIESFYDGVIGDKEKISYKEFKDSLYLKISRNYIRYVWLIIYLTGCSVAVHNSFTLDCQKLMNHKDNQGSVYSDRGPSFRNSSCGYKNLEHLYPSYASVEEFTRDIQSFIDNGHLSEAKELYTQIRLKPRNPSDLLGSLNNNGIQYLEIRTLDINPFYKCGLIKNDMNFLHMFMIYLLIKEESDYESWQEDALYNEEKTAECGYEDGVKLIKDGKEVVLKDWALSILDEMEMMVESLNLENKSVIELMKLKIINSDLTYGRRLARLVEKDGYIESQLKLSRNNKLRSKYLVEETNLLNDERFKEYVPIALQGLSK

SEQ ID NO: 4899 - protein, 112 aa, Methanobrevibacter ruminantium
MRIAVATSNGEDVNLHFGKASSLYIYEYDEENDETSFIEHRTVEIEKDSKHQNPKIIKALADCEVAICEEFGFKASIFAEDAGLKLVKDEGTVEEVLKKYTDHVKFLKNVKI

SEQ ID NO: 4900 - protein, 523 aa, Methanobrevibacter ruminantium
MKMIKQTLGLNVEDKKYYLKLIIEAVLIGLFSGFIVSLYRLGLDHSESILSYILKYIQGDLTLIVLWFVILAIMGLITALLMKWDPDSLGSGIPQVMGEVKGYFDVTWWKTLIAKFIGGTLTALGGLSLGREGPSVQLGAMAAKGVSKYLPNSKTDEKRLLVCGSGAGLAATFSAPLAGFIFTLEEINKGFDRSIVLVGLVSAVVAVLVSNVFFGQSPIFPFTSLNLPLEYFWLLIVLGIAIGILGYIYNVGMIKAAEMWDKLSFLPLEIKFIIVFLVTGIVGLFLPEVLGGGYSMMHLIELSLPPLSVLIVLLIGKYLLLIFCFGSSAPGGIFYPVLVIGAYIGAIFSAIVIPIFGLNPLIAYKFIMISMAAMFASSVRTPITAVVLIAEMTGVTNSIVAMIVVVILAYIIPTILDNDPIYETLLMRLLKKNKGIDFDKTKSVLEEYVVPMDCALIGTKIWELPIPKSAMVVSVVRSGNTLIPDENLELKYADELFIIMNQNTYPEDNNKIESLIYNNWKEE

SEQ ID NO: 4901 - protein, 435 aa, Methanobrevibacter ruminantium
MKIGIIGGTRGLGRTLAWYLKDFDFDVTVTGRDSIVGAQVSEEIGVKYSNNNKKIVQDSDIVIISVPISSTESVIEELAPFMKDGSVMLDVTSVKEGPSKKMKECLSEGVEFIPTHPVFGPRTTDLKGQIIVLTPIKKGKWYPRIYKFLEDKGMRIIETTAEHHDDMMGIVQVLTHFSYISTASAIERLQVDLKDTQNYESPIYNLMIDTIARIVSQNPYLTYSIQHENKKGEKIRQALFDSMSELKDALSKEDEEEFVEIALKATKHMGDIQGALGRSDKAINALTQEYNILLQSIGEEVGLKHIYSDTIHVGKIKKIDLDFLYLEDENGKVKKLKMSNVAILSEKELFEWKINNQKTYSRDISAMFTKNSNPHIIKDTLKLMEDIIDVEIIDIYDGEPVKEDQISYTFKIEALSMEAIKNCRDILIGFGGISR

SEQ ID NO: 4902 - protein, 353 aa, Methanobrevibacter ruminantium
MKVTSEDESKGTVELFPETLDDLWHLSHIVAEGDIVYSKTTRRIQDTSGDLIRGDRGVKKTFTLGISVKNVSFHLFTGKLRIIGSIVSGPEEFVPLGSHHTIEAKLHTPITIKKERWSSYALKRIERAIEASKKLSAIIVVIEDDVADFGLMRQFGIEYYGPIMGNVSGKRIIDKNRKKNIEKFYEKIVDYINKFDNIQTIVLAGPGFFKNDFFKYLELKHKDLAKNTIIESTGSGGRVGINEVLKKGTVEKLATENRVAYEISAVDAILKEIAMNSPLVVYGKKQVHEAINMGAIEKLLVLDNLVRSENMEDSMDMVENMSGEVLVISSQHEGGKQLEALGGMAANLRYAIS

SEQ ID NO: 4903 - protein, 318 aa, Methanobrevibacter ruminantium
MFFELLIVFLLCFFGTGIVSIVFRFLGKRGYMGNLYETVRGGTPRAVGIVPFILISLFMPSGFNNLVLVMGLCALIDDIIGRKTIANLPIEIGQLARGIGMLCVIGLGYPIMGVSSILVVLLIQPMNIADMQPGTAAATTIIMSFFTLLAVVIMQVGPVLEIHPYYYPLLVLVTCLAYCPLDFAGKIMMGEVGNHTFAISLGICFYALGGFIGTLILFIVTTGLIAYLRRYNLSRFLINKLHIPNPTFGDLFMDVLTGGGLGDLFRKILLKSNQYDVDNEILIALGFRRLLYNPYSPNLEKVVQKDSRTKRADLRRFY

SEQ ID NO: 4904 - protein, 181 aa, Methanobrevibacter ruminantium
MADVFDVIKNRRGVRAYKDEQIDDEDIEKILQAAIMAPTARGEAPWHFTVVQNKELLDEINDSVHSILTNSGDELLEAIAASGRNVMHNAPTVVFVSAKSDATNMQADCSAAIENMLLAAEGLDIGSCWLGLVALFFSVEENLKKLHIPEGYTPLYGVSLGYKVEENEPNPRSDVLVNWLK

SEQ ID NO: 4905 - protein, 457 aa, Methanobrevibacter ruminantium
MKETKKIKNIVIGAGPAGRLASFELGKLGEETLLIEKKYIAGTCLNEGCMVVCALTDISRFWKNCQRFSEMGLVNGLLELNYNSICENIKKTQKFLRKLNQEENESVSNKVLYGEASVEVDEDEKIIVTVKLDNDNELQKEEYKGKETLSFEAENLLIATGARPFIPNIPGAEYALTSSDVINLDEVPPKLNIVGGGIIATELSNIFSSFGSEVKIIARSEILKDLEPEIKSYVVKKIINDVEIHENTNVLKINEDSIETDNGEFEGKTLIATGRVPNSEILKGLVDLNEDGSIKVNEFFQTSKPHIYAAGDVTGGITLTPYARKEGISAARNMAGYLNKFEEMIVPQSLTLDLDVSFTQKTDKEADPDKIEDVIIPGLGGPHAFWRILRGETGLTKISLNTETDEIVRASQISPSSIDDTAYLAFLMNLGIKKEAFDDFLEVHPSTDAYYKILKIM

SEQ ID NO: 4906 - protein, 88 aa, Methanobrevibacter ruminantium
MCIAAPAKIVEIDTESNICAADFGGVRQNAKLDLLPDAEIGDYVLIHAGYAIEKLSEEAAKESLESWNELMEMLDEEDRERELQMNGL

SEQ ID NO: 4907 - protein, 164 aa, Methanobrevibacter ruminantium
MCEEIKLLKDLGCPEWVIEHSKGVSRKAVQIASNFDDVDIELVRVGGLLHDIGRSKTNSIEHAVIGAKIVSDLGYSQEIVNIVERHIGTGLTEEDAKELGLPIKDYTPQTLEEKIVSHADNLFNGADEVDVDFTINKWKRKLGENHPSIEKIKEIHEELVGRFE

SEQ ID NO: 4908 - protein, 302 aa, Methanobrevibacter ruminantium
MKVICTVDESLYRPEVVRWRERMAMMEPLGEVVVALPCSMKKPYSNSQSHQKFKRATKGYQEVIVTSPFGICPREMENTFPIQSYDVTVSGDWSFDEVRISGELLRDYVGDKPVIANVHGGYEEVCREYLDNCVYVCQDGRPTSPDSIYHLREELKKYSKVKHRDKVLNELRSIAKYQFGPEAYKIISDDVVAKGRYHRTIYSEGKQLALLNRDIGLYTLNLEGGRRLAELDIHVVEIDFDLKTNSVFAPGISNADLSIVPKDEVVVVRDGEVVGVGKAVLTGKEMIESTSGIGVKIRHRKK

SEQ ID NO: 4909 - protein, 95 aa, Methanobrevibacter ruminantium
MSEELALAVKDAVSVVNDPHMGVSIVDMGIVQSIAIEGSTAELVIKPTNPGCMSVTRIAAQAKAEALKVEGIDKVKIIIEGHVMADSLNEMLNRD

SEQ ID NO: 4910 - protein, 167 aa, Methanobrevibacter ruminantium
MWESLNSKFSKYPARMTVAQKMFELGLRIGEDNKIYCGNLKISDSALAAAANVDRRVIKSTVNVIVQDEDLFEVFSNIVPAGTLLKNIAKNLGLGVVEIEAGEESEGILAAVATTMSEHDIDIRQAYAGDTKFEGNPVLTIITENPIPGELLNEFIKINGVLKVSVL

SEQ ID NO: 4911 - protein, 357 aa, Methanobrevibacter ruminantium
MLSDPIIQKNFPGTFEFEEAMVIIDCLKEWPKSRLCDDKAIARKAAKTIDIDIKTVRDVLALLEVNNCAYNIKINELCIKLIKHYRSGKLTHKKIAKKLKIDDNIVDQFIEENESLLEETKKTYSQETLMALNDSFNDFIKGRKPLKINKDEEEDNPDEDSKDEKATDEEFKSGEVEIKEEVEETKEEEEVEEEKPAKKRTVNQKFWYLTFDEVIDCLKNGYATDEEISEKIGCKLNIVRKILYSLYDMHLASYKRDKDKETQWYTYDWKFNESEYKKLELNIASAELKKLNEDLEYEANNMFFICPVGHYRLDFEDASTVEFICPECGAELEFDDNSEVVEALKDQIAYIEEMISE

SEQ ID NO: 4912 - protein, 300 aa, Methanobrevibacter ruminantium
MTDNPNYKEAETEQGQVYKYVEIRGYQVIPIETHYIKPNESIDFMIDDISKLCKSGDYLVIAETPISVSQGRLVDEADYTPSLKAKFLATYWSKYFWGYVLGPILGIKERTIKNLRKLPEESKRHKEVVLQLYGWKHALKPASEAGIDLSNAPGTCVSLLPENPEKVAKEISESLMEKTNQDVTTLIIDTDATYRRKNKYFTGLPIAIDGIEADKGVFGYALGQLSENMGSTPLGCSREISVEEGIKIANIAEDYQKSLSTAMETIYSAKDVLNSDTPEVTVESLDSIIHTPAVLVRKIE

SEQ ID NO: 4913 - protein, 189 aa, Methanobrevibacter ruminantium
MEKSITYFENPGAENTDAVIELVRERLEGSNIKYVAVASSTGASALKLNEALKDLDVTIVNCSHHVGFREPNKAQISAETKTELEEKGIVTFIGSHALSGVGKSISKKFGGVTPVEIIAAVYRTFSQGIKVCAEISIMLADAGLVPVGEEIIAIGGTGSGLDTAAVLTPANMTNVFDMKFHEIIAMPRP

SEQ ID NO: 4914 - protein, 389 aa, Methanobrevibacter ruminantium
MKFIDDAIKESEESIEKTASPKKSDDELDKELLDIISRSRAKIIVVGAGGAGNNTISRLTEIGIEGAETITVNTDAQDLFYSQADKKLLLGRQTCGGLGAGGEPAIGEESAEESEEDIRAELEGADMVFVTCGLGGGTGTGSAPVIAKVAKKAGALTVAVATMPFSAEGVKRRENAEIGLEKLQENADTVIVIPNDKLLEVAPNLPLNKAFMASDEILGRAVKGITELITKPGLISLDFADISSIMKGSGMAMIGMGESESGDRAIESVHEALSSPLLDIDISNAKGALINISGSSDLTLQEAEKIVQIVADRLDPEANIIWGAQIDEELQNMIRTTIVVSGVKSQYNSSSSGSDDGEFTDIDDFTDADILGEDTAPNDPLDEFLDGIF

SEQ ID NO: 4915 - protein, 59 aa, Methanobrevibacter ruminantium
MNYQEELSDFWKQCKRVLKVAKKPDREEFFDFSKVTAIGIAIIGVIGFVIVLFGQLLGL

SEQ ID NO: 4916 - protein, 163 aa, Methanobrevibacter ruminantium
MEDDKNSIFALKTSAGQERTVARLLGMKADKPGVDIKAIVVPESLKGYIIVESATNLDMKNPDMKVRHLRGIVGAKRDGTIDPSSQITLEEVKKFLKPQPIISSIQKGSIVELVSGPFKGEKSKVVRLDESREEVVLELIEAAVPIPVTVKADQIRIIKKEAD

SEQ ID NO: 4917 - protein, 160 aa, Methanobrevibacter ruminantium
MAKDTVEVLLEGGTATPGPPLGPAIGPFGVNMMQVVEEINEKSADFAGMKVPVIITIDSNTKEFEIEIGTPPTTALIMDELGIEKGAHEPGAEVAADLSVEQALKIARMKFDSLLSNDYKSATKEIMGTCVSMGITVDGKDPRDAQKAVDAGEYDDILVE

SEQ ID NO: 4918 - protein, 212 aa, Methanobrevibacter ruminantium
MTQEIIDAVKEAKEQAKPRNFTQSIDVIINIKDLDVRKPENRFSEEVALPHGRGKPVKIGVIADGELALGAKNAGVDVVISKEDLQEFGKDIKAAKKVVNSVDSFIAQADMMPLVGRFLGRILGPRNKMPKPVPASAKIEPLLERQQATIKVGVKQQPSIQILVGTQDMDDEKLAENIEAVLAVLDRNLEKGRNQIKSMYIKATMGSVVRVI

SEQ ID NO: 4919 - protein, 335 aa, Methanobrevibacter ruminantium
MAHVAEWKKEEVNELKGIIDSAEVVGIVNLLNIPARQLQEMRKTLSGKATIRLSKINLMKLALEDCVNEKANITELSDYMEGQPALVCTDMNPFRLYKILEDSKTSAPAKAGAIAPEDIVVPAGDTGFPPGPFLGDLQQIGVPAKIDKGKIVVQKDTTVVEAGEPVPKAVAAALTRMDIKPMEVGMDLKAVYEDGSIFKADVLAIDEEETFADIQNAFTRAFNLSVFSAFPTSETISTIISTAHTKAYNVAIEAAIPTGKTSDMLIALANAKMLALAGELASDAIDDEIANKLANVAVAAAPVVEEAEEEVEEEEEEEEDKSEETAALGLGALFG

SEQ ID NO: 4920 - protein, 103 aa, Methanobrevibacter ruminantium
MEYIYAAMILHTTEQDINEENVTKILEAAGANVDDSRVKALIAALEDVDIEEAMETTAMAAAPAAAAPVAEAAVEEEEEEEEEEEDEEQAAAAATAGLGALFG

SEQ ID NO: 4921 - protein, 241 aa, Methanobrevibacter ruminantium
MICPECGAENQDSAKFCKQCGTSLNPVATMKKTNSDESRPIKSGIFNENNSSPSSFEAKGSGGDNKNLIIICLTVIICAVLIAGGLIFLSNGSNNGNDSSDVGNSISLPDNSVNQTDDSQNQTDTEPAPKKSSVSDMKILSGSFTTGSSLSDKTWCSVYVGEKYAGEDVKISVLYSRDGSDLNQGKIVPKNVGSDGTVSVPSADAFKYYPDHALVTIYDSNGNVLDTQEVIMSAKSGTQTF

SEQ ID NO: 4922 - protein, 201 aa, Methanobrevibacter ruminantium
METKNLIIICATVILAVVIVLSAFIYVNMGNETHISSNIADTLQNGDEIVVKLVDKDNKPLVNKTISLNFKDENGKGNAVSYDLLTNDKGEVYYNVNLTEGKYVFSADYAGETFIGSSSLNKSVEVKKDVKTANLSSTDTTKTAKTKTYTDWQEDYETGRYDEDGNPIYRSIMSTSGGQYEPGIYECYWSANGPISERRIG

SEQ ID NO: 4923 - protein, 115 aa, Methanobrevibacter ruminantium
MKCPVCGCENPDGYKFCHDCGNPLIMPDYDEMNNDYPSFDSKKLIIIGYIIAILFGWGTFILSAIFGSYGFIGFIGLFFPGFMLNSKDSNIRKHAYIQLAIMIVGILATFLVLFR

SEQ ID NO: 4924 - protein, 241 aa, Methanobrevibacter ruminantium
MNKKLKIILYILLALIIIIAGISLWYLMDYSPASADANSLINGTSEVSVSKINNGLFLDGPGNDSAVIFYPGAKIEYTAYLPLLINLSADGVDCFLVEMPFNLAFFGTNSADEIINNASYNYSNWYIGGHSLGGVMASRYAHNHFDKIKGVILLAAYPADSLENGSVLSIYGSNDKSLNKESYDDAKKYMPSNFTEYVIKGGNHAQFASYGNQTGDGVATISAYQQENETIKDILLYINGS

SEQ ID NO: 4925 - protein, 910 aa, Methanobrevibacter ruminantium
MLKIFEDLGYKKQICKTCGQEFYSQVDRDTCGDAPCDEYGFIGNPATDKPYDLYGIQETFRTFLEKEGHEPISRYPILAKRWRDDVFLVGASIFCFQPWVTSGLVEPPANPLEVEQPSIRLNDVDNVGRTGRHMTCFTMGSHTVINKPDNFIYWEDETIRLCHEFFKSIGINTEELTFIKSWWKGGGNEGPCYEVCCRGVELATLVFMQYKTLENGDKEEIPIKVVDTGYGLERIAWISQGTPTAYDACFAPVVDKLKEITNVSVNEEILARNAEIAGMMDIEDIGDIRDLRQQVADSLNISLEEYLENAEPMEAIYIIADHTRCLAFMLADGIIPSNVKEGYLARLVLRRTIRFMKELEMEESLSDIMAIQLDFLREFYPEIAESQEHIMNIINLEEERYAKTIEKGKKTVKRTIKRLKKEGKTSMPLETLIDLYDAQGMPPETVEELASGDKDFEVFVPDNFFTIVADMHEEDKVAKKETFELDVPETELDFYKDIYQKESDGTIIEVVEKDGNLNIILDRTIFYPEGGGQPSDIGIISIEGTIYEVVYAEKLDGVVLHRIATKEDEDVASLVEDLRKYIGTEVHMAINWNRRITLARHHTGTHLVIAAARKILGQHIWQAGAQKGLARSRIDLAHYKRITIGELDEIEKLANEYVMMNIDLDINWLSRDDAEKKYGLILYQGGVVPGSQIRVVKIPGIDVQACAGTHLSRTGEVGPIKINKTERVQDGVERIDFSAGLAAIDSIQNDKAIIKESSDVFSVTNDQLPKTCERFFNEWKAQKNEIARLQKEIANLKVSTLAENAFEVNGLKVLKEILDANIKELQKIATDFTDNDKVDLVFIGNNEGKIVGSASKNAIDSGVQVNNIIKEAASLLGGGGGGRPTLAQGAGPNADKMADALDLAVELLNK

SEQ ID NO: 4926 - protein, 815 aa, Methanobrevibacter ruminantium
MIKKITILSVILILFLAVSTVAAIDVDTNDNLDDGSSSNSDLISSSSLDSSSSDDVSSGSSEVSSSDESLDGNNLSDGNVSSSDESVGADNLSDGNVSSSDESVGADNLSDDESSSDALSEELPKTETVIKADPINYNYASVKGLTINLTDSAGLALSNKTLTVKVSALNKTSNLTTNSKGQAIFKLSASVGSYDVFISFTGDESYAPSNASSKITIKKSSTKIKLSNIHGYLTISNYVSVTLLDSAGKPIKSKSVTIQVNKAKYNVKTDSKGIAKVKVANKIGTYSVNAKFSGDKNYYASSNSSKLTITKMKVYIKAPSVKYYMTNSSAPYLTINLTNVKGSPLAKKKVSVKIGKKTYTLKTNSQGIAKFKFTKKVSSYNCKINFKATSNFYGASVNSKMTIQKMPTSLKAPSVSINSTNYGKVLISLKDGKGKALKNTTVTVNVTELKKVFTLKTNASGVATFSFNGEKTFNLKIKYAGNKNYAASSVSSKINVKQIKVKLSDVIGASRVLIDYVNRTKDLPSNVQYNNYNFTVTQLTYLASKAVKNINNKNYGDIVLISVPKSYKSSGEIYDTVYKKDFVKIANSVVGSSYNYKNKEYVSYSIYKVPFKVYSISFAKVLNFYGNNKKLPNYSLFTLADFAKVKDNGGYNFYLTTDNIAGKKSDLNMLKSLAKTLKSMGYNAVIVGIGPDIHNVAYRYGCTGNNSVLLACFGGVDVGCIEEWAGDLGDLNGHSFVNSYQGAHVLGLWFTKPYGASVSLNKKVGIAWDADYGFPLNTPAKYMKSHNISYIETGTVANACKLLSEGKMGGPQLIS

SEQ ID NO: 4927 - protein, 386 aa, Methanobrevibacter ruminantium
MRYFMNYDLIIARYGEVALKSNRVRRRFESRLVNNIKASIDAEVKVNQARIYIFPKEFDDAIEKLERIFGIVSYSPAISTKSTFEDIEKTVGEYAEHLYEEGLLDENTKFAISCRRVGQHEFSSQEMAAFAGAVVVRKYSCPVDLSNPELTIYLEVRDGDAYVYHEKIEGPGGLPLGTQGKVVSLVSSGIDSPVATYLMMKRGCQVIALYCDNEPYTSPEALQNFNDLIDQLNLYASGAPIKRRVVKYGEYLSTCKAEAPDKMTCVLCKSGMYKLAGKLAKKLNAEAVIDGSSLGQVASQTLPNILATREDLDVPVLSPLIGLDKLEITRIAEKIGTFEISKRDDGGCKAVPRYPETNADLEFVKQVKEEMNQDEELEKAFKTIVY

SEQ ID NO: 4928 - protein, 208 aa, Methanobrevibacter ruminantium
MRDCSNCNRESCLLQKVAGIIMVFGSLYYILAELISAGFFNDSLINTYLFHTISELGVPVANSPLSFLMNSAFILIGITLLLGYFAKFRDFIIKYKLIISILAVITALGVIIVGFIHAGNPLTDGYHSLGAVMAILGGNVMLILVSRAMAEFESYQKITFILGIIGFIVFWIMFFNLESLYMPVFERLSVYTLIIWNFMTGFYLYKNS

SEQ ID NO: 4929 - protein, 188 aa, Methanobrevibacter ruminantium
MNTNRFETFFDAIIAIIITVLVLKLSQPAAPTVPAFLALNARFITYAICYLALFIIWYDNHNLFQVVEEINNTVLIIYAIQMFAISLLPYFATWVALNVNSIAAETMFGIDFLAILILYVLSIYAVYRADPYNCGISKNNFRKIYCYIPIIIVLIGIFNKLYSLYSRNICLHSDCTDLLAFLFKTSKT

SEQ ID NO: 4930 - protein, 173 aa, Methanobrevibacter ruminantium
MITVIVLEIPMAVDGSWGALLDIKLEFIVYAVSFIVCFNFWNYNNNVFSMVNKIDHKVIWSIGIAMFFLSLIPYLTTFVALNPDAFLPSFLYGLDFIIVAILTIFTINALKNSDKANIALQIALADNQPYVTTIVFVLFGMIVGYFIYPLAIVIACLFSIITLWLISYYKKHG

SEQ ID NO: 4931 - protein, 366 aa, Methanobrevibacter ruminantium
MKTTVSVIKADIGSVSGHCVSHPALMEKCDEVLANALETGILEDYYITRCGDDIDLIMTHRNGELNEEVHKTAYDAFIQATEIARDLKLYGAGQDLLSDTFSGNVKGMGPGCAEMEFKERRSDPVIVYCMDKTEPGAFNLPIFKIFADPFNTAGLVIDPSLHDGFSFEVFDVMEHKKVVLDCPEEMYDLLALIGSTGRYVIKRVFKKNGEIAAAVSTDKLNMLAGEYVGKDDPVAIVRAQSGFPANGECVEPFAFPHMVSGWMRGSHNGPMMPTSQEEANPIRFDGPPRVVGLGFQVTDAKLVGPVDLFDDPAFDETRRQSANIATYIRRHGPFEPHRLPSEEMEYTSLPGVMEKLEPRFEDMDDD

SEQ ID NO: 4932 - protein, 125 aa, Methanobrevibacter ruminantium
MSFCPNCGVERKEGSHFCHHCGYDYREANSSGMGSSSSSDSQVNQNPSFNSQVNQSSTYNVPTKQNPHNFAKITGYILSFLIPVFAIVIGIYLILSKNEEVHKHGIIIIGISIVVQILSMIFMMG

SEQ ID NO: 4933 - protein, 170 aa, Methanobrevibacter ruminantium
MILKTARLILRPWKEEDAECLYHFAKNPKIGPIAGWPPHKSVEESLEIIKTIFAKKETYAITINDKAIGCVGLLFYPDTNHKWENEGVELGYWIGEEYWGQGLVVEACNELIRHAFEDIDINKIYASFKYENHQSKRVLEKLGFKYYCDLKNKDYTGEEFYEIAMFLEKK

SEQ ID NO: 4934 - protein, 63 aa, Methanobrevibacter ruminantium
MADVDVTEIRIILEDLSKDQLTEILEKNGYTSKGSEKFLIKEIMTKISHDIIIDELDQLGVLD

SEQ ID NO: 4935 - protein, 80 aa, Methanobrevibacter ruminantium
MKDLESEEKIAIDIAKLERNLNQVEDIKFEGKEKEVYDRAIDYWNDSKYYLEKKDTRTAFGCIEYSHGLLDALRMIHGLI

SEQ ID NO: 4936 - protein, 198 aa, Methanobrevibacter ruminantium
MLESLRPFLTKILEPIASRLNINPNIVTIISPFLAIISAYFFATGNLIGGALFILLSGFLDVVDGAVARYHNRSSPFGAFLDSTMDRFADAIIFIGIIFGGYCNWFVGVLAIHSAITVSYVKARAESQGVECNTGIAERAVRLIILMVGAVIAFIFNSDIIFTYFIYILVVLSYFTVGQRVYHVWKELNKKKIPQRRL

SEQ ID NO: 4937 - protein, 221 aa, Methanobrevibacter ruminantium
MKIFKMNPENPDMDLIDEAIDIMAQGGVILYPTDTVYGLGANIFNNQAVQRIYKIKHRERSKPLSVLVSDIESLELIAHLDDHSREVVNKWLPGPFTFILNKQKTVSPYVSSSTKVGVRIPDNKIARELASIFPITTTSANIANEETLSNPHDILKQIGDCIDLAIDVGDLTGGKPSTVIDLTSAKPSLVRKGLISNDLESIKEDIGDMDSNKNDIDDMNL

SEQ ID NO: 4938 - protein, 231 aa, Methanobrevibacter ruminantium
MKILSTMQDYEKISTNSPLDELLDGGIDKRTITQIYGPPGVGKTNVSLNIAVNVARSGKKVIYIDTEGGISVERIKQISGEDFDNVAKNIVVFEPTSFKEQEEDLELIEDWLASNNSEVELIVLDSAVALFRVEDDKSRSHLLGKQMQQLAKFAVDYDLAVLVTNQIYASFEEDSDEMAPVGGTIIQYRSKIIIELKREEGSSERIAILKRHKTRREGLAIHFSITNNGIE

SEQ ID NO: 4939 - protein, 386 aa, Methanobrevibacter ruminantium
MIQKKKYAKAAKIIPEGYKSANQFFESVFQDKEMIWMGQNTNELHIGHNEEVHKAMIDCIESDEYCKYPPPEGFTELQSLILKDLDLEDLSIYINAGATESLYLAMNAVLSDTDNVITPDPGYLIIDNFASRFAGEVRAVKIYSEENNYKLTPKLVRENMDENTRVILLIDPLNPLGSSYTEEEIKEFAEIAKENDLFLLHDITYRDFAQKHTLAAKYAPDNTITCYSFSKIFGMAGLRLGAIVSTQEVIDVVKSIIINDVGTSMVAQAGAIAALKTKPQWIDRVKDTTFENQKIIKEAVDQCEGVFLPVYPSSGNMMGIDLSGAGIDSEDMSQYLIDRKVFTRQGSYTSNTFGHKYLRVSYSIDPEKVKVFAREFVLAVEALRTK

SEQ ID NO: 4940 - protein, 591 aa, Methanobrevibacter ruminantium
MSRISILDKDKCQPKKCNTVCMHYCPGVRMDEDTIVIDEKTKKPLISEELCSGCGICTNRCPFGAISVINLPEALDDPIHRYGQNSFELFGLPSLKEGTVLGLLGQNGIGKSTIMRILSGELIPNLGNYEEEATWDKVIEYYKGSSLQNYFKALQAGEIKTIHKPQMVDQLSKVVQGNVKTLLSNVDERGKLDEIIDDLDLKNVLERDMQNLSGGELQRVAIAATVLREGDFYYFDEPTSWLDVRQRLNAVKVIRSLAEAGKSVLVIEHDLATLDALSDNVHLLYGEPGGYGVVSGNKGVRVGINAYINGFLQEENVRIRKQAIEFSIRPPTPEDDGEVLSEYSDLKKEYDGFTLEAEAGKIYHDEIVTAFGSNGIGKTTFAKILAGVEKPSEGNILEKVEIAYKPQYIESDFDGTAQDFLFANAPTYGSNIFNSEIGKPLALENLLDKKVKKLSGGELQRLALAVTLSQDADTYLFDEPTAFLDVEQRLIAARVIRKIVESRNAASLIIDHDIVFIDYISDRAMVFSGEPGLNGKASKPADLRTSMNQFLGDLDITFRRDKETKRPRVNKYDSYLDREQKEQGEYYYLKE

SEQ ID NO: 4941 - protein, 112 aa, Methanobrevibacter ruminantium
MKQVMVVRTDIKMGKGKIAAQCCHAAIGAYKQADKEKIRKWENEAYAKVVLKAPTLQDLYNLREIARANGVAYYLVTDAGRTQLPKSTVTVLGLGPDEDDVLDKITGDLKLL

SEQ ID NO: 4942 - protein, 271 aa, Methanobrevibacter ruminantium
MNKIKKHESKFTNNRLLNPAEYMPKEEVETLKQVSYLIVLFLLFIFFIYSFWPMANMKFFSFLEIVLMVYIALNIDYSNWKNKVLFFFLVPYGSIAWFLFEELTNSLFDIFHMIILLYFMKVYYEKFREYTETNGLGITILLLFTIIFISFILTMIVEGVSPIDSIAMVSNAFTSNGYAVLGSSFGGKLNSILLVWSGYILSGVGTATMTVALLSKHFNKRIKENEKTNEAQYAELKEMIERNNEEIKEILKENNLEKKTEEELEKKIIEP

SEQ ID NO: 4943 - protein, 236 aa, Methanobrevibacter ruminantium
MNYLNQNYATVFMGNDFLLIIASLIIMIFIFGYGSVITKDVIRGGKKLPKIYIKECTIYGIKCVIVALIYSAVQTLVMVDLSHRFLFPEFELEHALTDITGTLQMFTANNPILIGEYVVISIILTYIFVFFMEISLARLADGGKLLESFNLLAIKRCIDTIGWKKYTIDYTKLLLAITILTYLQYGFQFLGFFDYITDLIFGLLVFIIQFIGIGQIYKIYKIKKYSNLDRPTKKSV

SEQ ID NO: 4944 - protein, 304 aa, Methanobrevibacter ruminantium
MSNKKSFLAKIEEIILMQTKPDYMDSYEKVNDLIKERLNAQEKPPKSALFKSTYLNGTQIFHYGNSQSKNLIVYIHGGAFINEIGFQHHFFCSYISKKLDAYVISPVYPLAPKHSCNETFNQITDLYKSLIEENKSNGDNKNNNYNNSNNNKSIYLMGDSAGGGFVLSFCQYLKTVNLPQPDKIVVYSPWVDISMDDSPYDNESDPILGEIGLREIGKSWAGELDTKDYRVSPLFGDNSGLAPILIFAGDNEIFYKDILKYYEKLKEDNVDARLVVGSGMFHIYPLFPSPEASEAFKELKKEFE

SEQ ID NO: 4945 - protein, 347 aa, Methanobrevibacter ruminantium
MSKNRIEWIDLVRALAILTVLYIHATDGIYIISSDLIPYWTPFSRVFQFISLFIGRIGVPFFLMITGYLLLDRTYDDERVKKFWNKSCKGLVIVTIIWSLIYAVSIQLVAYSSIQVNTIEAGNLFFSHMWYMPMIIGMYLSMPFVANALKNFDPRTINQATIVFSCLAFLLPFISIVCEMQGLQNVNIQYCLGFSGGVYGIYIILGWLVKKGLFKKYSSNSLRLLAIVSFIICVLFQWYAFSIDFSFSLWYEFPFILTGSFALFELCSRREKVRGFRGVEFLAKYSFAVFLIHNLFRIILLPMVVYLPYTEPVKAIILWILLIITSYAAAVIIYRIPKFGKFILYMR

SEQ ID NO: 4946 - protein, 99 aa, Methanobrevibacter ruminantium
MELIKNYNEKELTIETGNKIDTTTAPDFENEIMDEMGNFDSLTLDLKNLEYISSAGLRVLILVQKKLKADDIPFVIINTNDNIKNILTMSGFDKILNIQ

SEQ ID NO: 4947 - protein, 210 aa, Methanobrevibacter ruminantium
MIKLAYCNVEELDLKRAYSLVSKSRQEKIDFYRFDKDKKLSAGAYLLLKRLLSEVNIKDFEIIIEKYEKPRIVDHENIYFNISHSSKMVLCAISDKELGVDIENIDGEIDLNIAKNFFYNDEYKSIMNCDNPSDEFFKYWVLKESYMKYTGLGMNLKLDSFEIVIGDEIKLKDDDSDLKFNLFEIEDYKIGIASHYNVYDLIEYDLKELY

SEQ ID NO: 4948 - protein, 624 aa, Methanobrevibacter ruminantium
MKTKLKQILISFIVTTIFYFALSQTFITQLGLGSPQIGLLYVFGLLFGPFGALGASLSNVAIDVYHGYTFVQILPSAIISFGVSLLAYKLWYSGFKSDEYTKPRLDTIYHLCLFLASIIICGMIYSVGHGNLAYILISPDIEESIIIPSFLNFTNVAFIMGIAGIWLFKRTNLIETPKKSERRLNKNLYRLIFSLLMVMTIVSFIFIIRNSDNLTIITGLIIVVALMYAYMTKPFIHEIQEVNENSIIAKIVRNFIIITLILGFFGGLVSIASFDYVETSITLNIYLHLMPILVISDIIIILFFIPGIIILKYIGDNVVKPITSFSEIEGFIKEDEKIEAEGLIKVYSEYVNEQNEIGTLARSYTELINHNNNYIENIQKIEGEKERTNAELDIATNIQAAALPTEAIKTDAFIVNGYSKPAKEVGGDFFDYYELDDGNLAIVIGDASGKGVPAALVAMITQVVIKQTLINNHDPSEVLFSLNNQLCVNNPESMFITLWLGIYNKTNKKLTFSNAGHNPPLIKENGKFKYLDIESGIVLGIMEDFQYEDEEITIDGELVTYTDGITDANNNDGEMYGEDRLLEFFNKFKSDKDPILPLLKDINDFTKDTEQFDDMTLLYLKVND

SEQ ID NO: 4949 - protein, 125 aa, Methanobrevibacter ruminantium
MNSMNFKVEIDELHRLNEFILNELPHEDFMVNLIVEEIFVNIVNYSQTEYIIVNLDYKEPNLTIEFVDNGIEFNPLSKEDYEAPDSIEDAKIGGLGIHLTKEIADELDYHYEDGENHLMIVKKVE

SEQ ID NO: 4950 - protein, 105 aa, Methanobrevibacter ruminantium
MSSSKEYLEYILEQLSELDEITYRAMMGEYIIYYRGKIIGGVYDDRFLVKPVKSAREMMPNANMELPYEGAKEMILVDDVEDKEFLRELVEAMYEELPAPRKRRK

SEQ ID NO: 4951 - protein, 156 aa, Methanobrevibacter ruminantium
MDILAKLLNDKLAFAEISYTIEEAKSISDSNKIPIMICSEILKENEPFAHSWDVTSDSIAAYIASLLDAKLLIATDVNGIYTKDPSLSGAELIKEIDVNELLTFEESSIDLMLPSLLIEYGLDCYVVNGEYPKRVLSIINNEDCSFEYTFIRNGND

SEQ ID NO: 4952 - protein, 53 aa, Methanobrevibacter ruminantium
MEKVNCQSCKQEIPLIEPYVQFNCPECGRPIARCESCRTFGHSYKCECGFEGP

SEQ ID NO: 4953 - protein, 89 aa, Methanobrevibacter ruminantium
MGEVVNTLKVMPESPEVDLEALKVAITDAMPEDAELHEITEEPIAFGLVALNVVFIVEDGEGGTGPTEDAINAIEDVASAEITDSRRLM

SEQ ID NO: 4954 - protein, 416 aa, Methanobrevibacter ruminantium
MFDLLAACFIGIAIGTGTGMVPGIHVNTAGAIMFASSGFLLSFLSPEFLCIVMVSMSIAHALIEFVPSMLLGVPEEGTASSILPGHRMVLEGRSKEAIRIVSVGGFGAIVVVILMLPIFAVALPFLQDLSKPYTWMILTVVSILMIYKLSNGRLAFMWSILLFVLSGILGWIMLQTPISSGISLMCTFSGLFGISTILFSLNDSSSIPHQNKYYDFVIDKDTIKSIFAGGTAGAILGFLPGFGPAQGSIIAQGVCGTSADGDDTKNFLLANSGLNTSDTLFSLIAIYLIGNPRSGIAVYMSYLISEFTLSHLMIFTFASLIAVSISLIICLKLGDGFSNLMQGVDYRKLSISVILLMIVILYIFAIIYEGPILYLTLALITSTAMGLLPHYLGVSKSHLMGVLILPAIIIYMQMFM

SEQ ID NO: 4955 - protein, 504 aa, Methanobrevibacter ruminantium
MAKTIIPKYKVSKFEFTEEERRTLEELRENLIDLAISERMSNFNEDLILNDIIRFLDNRLFSNADYVRNIDFEKLDSFNPSKYKHIGNPKRYSQFYAIFKDEIEKYKNNLARNMFQELIGYGEIGFLIDDDDLEEIMVIGLNKPVFVYHREYGMMETDLIFKEEEKILSIIDSIARETNRRIDQQSPILDTRLPNGSRVNATIPPLSADGPTITIRKFKKDPLTIVDLIRYNTLNTEIASFLWLCVDGLGVKPANIIVSGGTSSGKTTLLNALSIFINPKERIVTIEDTLELQIPHKHILRMEARTVNIENQGEITIEDLVKNSLRQRPDRIIVGEVRGKEAITLFTALNTGHSGFGTLHANSSRETITRLTNAPMSVPKIMISSIDFIIMEKRIYKSDGLSYRRITEIAEVVGIEEGTIQLSKLFEWDSKKDEFKNLTILSKTLENIASLKGVHISILNEEWKNRKKVLDYLVRNDISSQDDISKVLEDYYINPDYVLNMISN

SEQ ID NO: 4956 - protein, 183 aa, Methanobrevibacter ruminantium
MVIFIFDKFFIQLSDSIINFLVSISNLFLSFFDKNNDSKEKWGNETNQFDSSKYEELNYFNNFKSVNLNYSDNSNSGDDLKNENYSFISNLNLSKIFNNENIFEYLENKYLNKQAMFITPNGTNENESNKNFLYNLKIKLVVLILDNRFFQIRSSQDLLKLLFYVLFNYNKSFFHSYCCICFF

SEQ ID NO: 4957 - protein, 201 aa, Methanobrevibacter ruminantium
MFFILFALFILYLPKIRHENDYSSISKELPYALRQLSTELRAGKSLFDALDSIVDSDYGVLSREFSRVLEEIKYGETSENAFLNLEKRVNSKALSRVIYEILASLRIGSNLSHSLNIIAEDVNFDMRMKLKEYSEKLNAFIMIYTFLAILAPVIILTMLLAASVVIGDIVPSSLLFILYGLFFPMIIVFLAFAIKKLEPKL

SEQ ID NO: 4958 - protein, 502 aa, Methanobrevibacter ruminantium
MYELIKESINSDESALELAKSKKDVISVVDAISDLSFEDTMKLGTRFKKFPIGCDLTEVVVGTCASDLEKMDLFGNCMLANMIGAPIHICAYAFSDIAEKYGQRGVEIMEEVYNITDVPLDLDHFGKYGAMRFPKHIVGCGGDCYNQGPSFTECPRGRIHERLLDKEKAELDDKETWVQLSSSVAINLSSEQCNDGHAAPLEEAQDLADLAKKYGKGLEAIMFVGDGYDELITGFTKAIEMGVDVFVIEGGPFNRCENTNESFAKTIAMSRVLCPGKVVATNGAYESECRAGLRSGLNVIITGFPKNHHGYMCGFEPGTARRGKFGLPRVIKIMNEEISAGPTRVPVQREELLALTHAVKLAGPENIYPKTIGSFAIGDAHWATIQNSKMYKEMYLPKTLEEIADSVNGNSVSLHGGRFVSWLVAKELDKKGIDEIIITDSNPWVEKVSVDNLQEELNATIIRGHADDKGAGMIAKESIVTTTIPKIHNAIKSKIPHAVNII

SEQ ID NO: 4959 - protein, 338 aa, Methanobrevibacter ruminantium
MKVAILGAGCYRTHAASGITNFSRACEVADATGKENISMTHSTIEMGAELLELAGVDEVVVADPVFDGEFTVVEDFDYAEVIAAHKAGNPEDVMPAIRAKVGELAETVPKPANGAIHFTHPEDLGMKCTTDDREAVADADWIMTWLPEGGMQPAIIEKFADVIKDGAIVTSACTIPTPGLNQIFEDLGKNVNVASYHPGAVPEMKGQVYIAEGFADQAAIDTLKDLGAKARGSAFTLPANMVGPVCDMCSAVTAITYAGLLSYRDTVTQILGAPAGFAQMMANEALTNVTKLMADEGIDKMDDALNPGALLGTADSMNFGPLSEIVPTILESLEKRSK

SEQ ID NO: 4960 - protein, 333 aa, Methanobrevibacter ruminantium
MIESILEKAKNREKLSRNELIQLFEIDDEETLKELCKIACDIRNECSDVIKLTSTIHLTNKCQVQPRCKYCGFAAKTSSIGYYDAFYKSDEEIRQAAMCVERSGIPRISCSGGHGYKGKQAVNAAKIVKGETSLEILVNVGADLTQEAVDELKKYDADTVCCNLETTNEDVFNFVKPGEKLSDRINICRMVSDAGIGLSSGLLIGIGESYEDRVDHLLFLGSFESLEEIPIMGFNPYVDTPMENHPPCSIEEQLKTIAITRIMYPRIRITVPTPTIGPENVELPLMAGANNLATVIPEDYPLVVKGVGNPEYGNLHEVISVVENLGLEVQLHA

SEQ ID NO: 4961 - protein, 157 aa, Methanobrevibacter ruminantium
MAFEESIRKASIQSYEGTRKGDTIEEIEAIQNYIRNAKIVVPNKNGIKVEVINEVLAKFNIPPAEYLQVNTNYADFSRMPAIAKAMIAVDQSDADLVIARGRLGIPGSGSFLVFMDSKSRILTAATSPSHIIHNQPLEKTVYKETLEALKKVGFKEE

SEQ ID NO: 4962 - protein, 135 aa, Methanobrevibacter ruminantium
MNNQDYDTGISSEVFTVKSNIKLIDIFNLILEKKARAVMDLFDSLTNKETIHNESSIIIIGTYFTGIAIAKYLSYNGFKNITIVDIYPHLEGFIDSNLGDPIDVNKSSKGKFKENIEFSSDLGLIRSADVVIDTT

SEQ ID NO: 4963 - protein, 146 aa, Methanobrevibacter ruminantium
MGGIDESQSESIYTKVFLIEDPIAEDNDDLLKNKNNIYSRISLVNSYNKFILKTEGLNTKTSGTMTLTIDILRQSMNEILSREGVLYCSSEMTFFEEIVFKENDLDKFFELIGSPVIKVSTIAPFDCEEIIKCFIDKIYSEILIRW

SEQ ID NO: 4964 - protein, 242 aa, Methanobrevibacter ruminantium
MYANDIFNIIDELVPRKLALKNDKFGYFGKTFDNFDIKNIKVILDLLPEDDLKFDKGDLVISHHPPLFMPKTPTYVVHSNWDIVQGGANDALAYYLGLKPISIFHKQTGIGRICSSTKTLDQFLALVCYKFGPENVRLVHDGDFDKMLRKIAIVSGFGLSNKEFIKLAKDRSVDAFLSGDLNHSNAIYAKKLGITLIDVSHHIIEIPGLFALKELLRRNEDITVPVEMIDNGVPWKYISADF

SEQ ID NO: 4965 - protein, 214 aa, Methanobrevibacter ruminantium
MIQEMENSLIPKGSIDLVGFGRLGLRTGINLIQVHRGGPAKITVIDGQKISESDIIFLLKGAKVGTYKSDFLKEISTHSKDFREVVSITEDITEDNIDLITGDVVVIEIAGGNTVPTAAKIIKKAHENGSKTIGTAGIFGIGDEEIVVADISEFDDSNPAIEELRKEGILDNHLVISTNRFIRDGIPITPYVLDDIANIITREALKLLIEKNNE

SEQ ID NO: 4966 - protein, 202 aa, Methanobrevibacter ruminantium
MITIATAECFTHGILAREIHALAQDYDDIFASSYWGLVNKVQKDCIKDAILEDKCSIFDLRDLSVSCGLFIPTLDAVKSVLKIENPLEPLTLIDGIKVYDDDGDREMAILMAEAAKKVSGSDIGIGTTAGIGYGGIAIVDDDIVISTSSDVYADLVNVDSDDLYMRQRSGIEKTLKILIYYLNDNLDIINQMNNVKIYNKSE

SEQ ID NO: 4967 - protein, 722 aa, Methanobrevibacter ruminantium
MIFTIEYDKGTRLRVRCGKEAFTKEESYGLAETLIDYDFIDEVKVSHRNGSILVLYNDPKKRIEILRIISKISQDNLYETKASDKAALEELNDKFAIKIAKHILKRYLFKIILPIPLRKLRMLYHASSYIWRGLDSLTSFRADVALLDGTAITASLLTKNYKSVGSMMFLLSISEMLEDYTMQKTKSTLKSSLALNIDSVWKVEIDDEGNEIESQFPLSKLEKGDKIRIRTGAIIPVDGVIADGDAMINEASMTGESLAVHKDNGKAVHAGTVVEEGSIVIEVRSVNDETRLNKIIDMIEDSEELKAGIQSKAEKLADSIVPYSLAATALTYLITRNVTKALSVLMVDFSCAIKLTTPISVISAMKEASDNRIMVKGGKHLEAYANADTIVFDKTGTLTNAHPVLEKVIPCGKYDRDEVLRIAACIEEHFAHSVATAIVKQAEKEGLHHEEDHSEVEYIVAHGISTTYDGKKAIIGSRHFLEEDEGIRFTKKQEKLIEENAEEYSVIYLAIGKKLQGILCIADPVRDEAHEVISQLKALGIENVVMLTGDSENAAKRIAKDLGITRYKSQVLPEDKASIIQEIKAEGHQVIMVGDGINDSPALSAADVSVAMRNSSDIAREVADISLLSDDLYDLATLRLLATGMLDKINTNYRHIVMFNGSLIGLGLLGVIPPTTSSLLHNLSTMLFGYRSTKSVLGEKEEVVIDTNVINNDGALIGQSGK

SEQ ID NO: 4968 - protein, 92 aa, Methanobrevibacter ruminantium
MVDRHEIVDKMYENKHTLLFVGGIATAIVGAKILKSQTTKDYAAKGMAKVLTCKSDLEESIQDIKDNAEDIQTDAKAAQKEAICVDVTEEEE

SEQ ID NO: 4969 - protein, 77 aa, Methanobrevibacter ruminantium
MIKKLSELKSGEQGTLSSYGTGGDLELKRHLLGMGFIKGADIEVEKVAPLGDPMQIKVKGYSVCLRKEEARNIDVEV

SEQ ID NO: 4970 - protein, 671 aa, Methanobrevibacter ruminantium
MANLKIGLAGNPNVGKTTLFNNLTGLNQHVGNWPGKTVAQAKGSYKHSGNEVEVIDLPGNYALSAHSIEEIVSRDFIVDEDSDVIVNIIDAANIERNLYLTVQMMELGANLVVALNMNKYAQDKGYTINADKLSELLGVPVVEIEANSDIGKEQLLKTIEQAAANPVDSSKKLVYNNELKEHLAELQAVIEEDKNLLDVPSSWIAIKLLENDEIVEEKIEGSSKRNNIVNETQKVKDHLKGIFGEGSEEVIANARYAFIDGLLKESLTKPDHLKTTISEKIDRIVTNRILGFPIFLVIMYAMFEIVFTFGAPFQDLIDEFFGILGDAIIGSLGETMLSSFLVNGLIGGVGGVLVFLPQIILLFLIISFLEDCGYLARAAFVMDKLMHKFVGLHGKAFIPMLLGIGCGVPGIMATRTMENEKDRLITMLIVPFMSCSARMPVYLLLVGAFFAANESLVIFSLYLLGILVAVIVAFILRKTTFKEMDAPFVMELPDYKLPTIRGIIMHTLEKSWGFIKKAGTIILVASIVIWMLSYFPAGVEYGSADSAIGTIGQVIAPVFAPLGFGEWQPAVALLFGLVAKEVVVGTFSSLFGVAEEGAEIAAAMHGIFTPLTAYVFMVFVLLYIPCFAALGAIKQETGGWKYPLLMAGLTLVVAYVVAFIVYMIGLGLGLG

SEQ ID NO: 4971 - protein, 65 aa, Methanobrevibacter ruminantium
MQCSMCGYEFDPLEGGPCGACGQCKGCNKAFCPRCGYGNSLSTVKEFDYISKLQAKLRAFKSKAK

SEQ ID NO: 4972 - protein, 208 aa, Methanobrevibacter ruminantium
MHIPDGFIPLWQCAIYYVILIIALYFAGKWAKANLDEKRIPLLAVLAAGIFAIMSMNMPIPFGTSGHMVGGALVAIVFMAPEAAVLVFTAVLLIQALFFGDGGITALGANVFNMAIVGGCVGLYTYKGLNGIIGKYPSIFLGAWLATLVAAVVCALEMAIAGTFPLSVGVASMALYHAFIGLIEGVLTVIVIFALEKYRPDLLAWNRE

SEQ ID NO: 4973 - protein, 97 aa, Methanobrevibacter ruminantium
MELSKSDKYLIVVGIIFCLALAVLSPYIASGDPDGLEKSAEDANVGEDVEAPVMEAPFPDYTYEPLEKIGEIGVLILGALITLIVAWGIGYALKRSE

SEQ ID NO: 4974 - protein, 276 aa, Methanobrevibacter ruminantium
MAIEEVRNLEVIASKDTIIHNLEGRVKLIAILLIIVFCVFSDRLIVPLVLEIFLLIVMYLAELSFKDSFKRIALLLPFGGFVIAFQPFIHPGNIIWQGPYPWLFITDTGLNWTVLLFARLIVCLTAIVILSSTSPMQEVVQSFRKLGMPRDLAMILTIMVRFLFIFVDELRDIRQSMKSRNFDPFNKKIPYKWRVKQVGYSIAMMFLKAYEKGETIYLSMASRCFSDNSRLYHAKTIIGKHEYIFLACVIGIVIVLELVVLFYSGNLDYLGVSLSL

SEQ ID NO: 4975 - protein, 449 aa, Methanobrevibacter ruminantium
MSLIYSITSTITRNIEKILRESLLFTIIFNILEFIENQWVNSYFKGLYPSERFLSIVNKSKILKEEIFSPLIVLVTFTLFILLATDPVPRDLQTTIIIAFLSFFIGAIIFPRFILNNQLNQLNDETNTDNKESKTDKSKQIPLFNSYDVYSIGFCLSLIGIVFLFLSIASVGGLPILKSSLRYSLKPAFTMPVFLIIPGIGLMASHYLNQYKNNEISRSQTRFRFLVLTAIGIGTVLTLQYRTPIIAILLMMIIIGYYGKILSVWEVILGALLGVCAIIGIGYLRSLNELAISSNTNIFSTLNSRANFTMHVLNLLNYISGNFGLMHGKMIASAMPGSDLGPRMMVGKLIAWRTEVTVTPTLLGQMLVDFGKLGVAVEMCLLGFLLGTGYKIVKITENSFYIALYGLILTYSIVGVETGILDIQILAYFFISAFIYFAVILKDKGIRIY

SEQ ID NO: 4976 - protein, 263 aa, Methanobrevibacter ruminantium
MKKPGILNKITIIDILIIICIIGAVGFAVYHMVDDDSTKASATSFDYSTNNKMLETYMNYYKDGKIVTSSLIGTKSNTGEKIEMNGTVLWLGDNQNDKVNIEINNDGKPILAGFYKDTPNADVFIEQISLETNGDSYANITDFVVSPKEIKNLKEIISKIPNDTEYEISTSIAIDDLDSVTAQKLANALNKNKKPCIVLKNSGTVILEVNRANQTDFEIADNVLGDFKGQTSEIQIRIYNSTAQDSIDIQNAFNVLSIANTSH

SEQ ID NO: 4977 - protein, 53 aa, Methanobrevibacter ruminantium
MIDLDECGVCEKCIPVCPKELIEKKGYTMIIKDGCDDCGICLDMCPLGAIYEE

SEQ ID NO: 4978 - protein, 327 aa, Methanobrevibacter ruminantium
MAGLISGIVALFTSWLGVSGTVIGSVFSSFLYQFLSSYSAEKYEERVGEGTSRKPRNIGSEIVYIFPIVVIVIIEVIFILSDMHYVFDKIFDILEYGIFQNNLFRLMGLGLIALGVYPLLSSTNIEKINGEIVLVAGIYLFIRGMVDINDLTMQVHNMFFADFDFFIAIIVVLALVFVIFNVLRNSTQEYFNKEDGDYDAVNDEFTQKRFSKPRRKSKARKIDTSSFHKGQEYKEHYLNSDFNDKGHNQSPNPDSNMDDYHNDDLNNYQTPQEDLPIYEEEIIYLHNPEDPNNPIKKRILKRVNPDSHYDDDYDETYIIDDAKNDNF

SEQ ID NO: 4979 - protein, 105 aa, Methanobrevibacter ruminantium
MRFCPKCGKMLMPKNDILKCACGYEEKISAEVAEREYKFKGERKKENKVIVTDNNNIALPTTKITCYKCGGTKGVWWTVQTRSADEAPTYFIRCVKCGNTWRRSN

SEQ ID NO: 4980 - protein, 297 aa, Methanobrevibacter ruminantium
MTTNDKVSDYISFPKTFESYRWYKPILVFIISFIITLILGALIVAVFYLIMGPDFIISIFKGGAESLNTSMNIFFTDLIIIAFIPSLYIASKIVKDRPFSSYSSSRGGWNFRLYFKALAIPVILYIIYLGAESLILGSEGTSHFSIAFLAVLLISVPLQCIAEEYIFRGIIMQTLGSWIGIPLIAIVIQAIIFTLGHGYDALGLLETLVLGIAYGFFAWKTNGIEISSALHTANNFSLGLFIMLGLEASNSSFQLYDKIGGIVYLIILCIIMYYVGKKTDWFGEIPEDSQNIGLLNF

SEQ ID NO: 4981 - protein, 173 aa, Methanobrevibacter ruminantium
MIEIRFHGRGGQGAVTAAEILAKAAFKDGKYSQAFPFFGVERRGAPVMAFTRIDTEPINLRYQVYNPDHVIVLDDGLLNVVDVYSGLKENGEVIINTHEKVESESHKVFDVDATGIALEILGVNIVNTIILGYFAKKTGEVSINSLIEVIKETFPGPIGEKNAVAAQKAYDMA

SEQ ID NO: 4982 - protein, 80 aa, Methanobrevibacter ruminantium
MVSIGCAIYEPGSTRKNKTGSWRTFKPILDKDACVDCNNCLMFCPEGCVNKEHDIDYDYCKGCGICKVECPVQAIKMEIE

SEQ ID NO: 4983 - protein, 382 aa, Methanobrevibacter ruminantium
MAKEIMTTNRAVAEAVKLAKPQVVPVYPITPQTTISEYLAQFVADGDLDAEYIRVESEHSAISATLGASEAGVRVFTATSSQGLMLMHEILFAAAGMRAPIVMADANRAISAPLNIWNDQQDSIAQRDAGWIQLYVENAQEAFDTVLQAYRIAEHEEVMLPVMVCLDGFILTHTVEPVDLLEQADVDTFLEPYVPKFAFLDPEKPMSLGNFADPEYYTEARHDMQVAMDKSMDVIKEVGAEFGEKFGRTYGLTEPYLCDDAEIILVCMGSMASTVRYVVDNLREKGEKVGLLKIRAYRPFPFEEIDEIVKNADKLAVLDKNFSFGIGGALFADLKAKCHKETYGFILGLGGRDVIPEYIEEAVELTKNPVKEVTWLGLKEDE

SEQ ID NO: 4984 - protein, 288 aa, Methanobrevibacter ruminantium
MEFPEEELLAPGHRGCAGCGAAIAVRLALKALGKNTVVACATGCLDVMTSPYPETAWEVPWIHVAFENAGAVASGVERALKAQGKEDVNVVAFGGDGGTADIGIQSLSGAMERGHDLTYICYDNEAYMNTGIQRSGATPYGASTTTSPAGKQSFGEDKPKKNMAFIMAAHGIPYVATASISYPEDFMKKVKKAAETKGPAYIHLQQPCTTGWGFKPEQTIQLGRLAVETGAWGLFEIENGEFRVTYRPQERKPVKEYLSAQKRFKHLDDEQIAIIQEFVDNQCEELGI

SEQ ID NO: 4985 - protein, 166 aa, Methanobrevibacter ruminantium
MEKLIVDNELCDGCQDCEKACAGVHGVPRITIHELDGSYFPIRCQQCEDAPCEIICPTGAMSNLGVDVTKCIACGFCAMACPFGAISIQYSNAHKCNHCADREEGPACVRACSKRAIAVHDIANVIKRKQREHIEKMYGLDKPAKKKGLLSVITTDTRARKPLDGE

SEQ ID NO: 4986 - protein, 142 aa, Methanobrevibacter ruminantium
MDELKVNPELCVDCGLCERNCPNNAIRVHDGVPLFCMHCSPEKAPCLAVCPKGAIVALGGAITIKQDKCIGCGLCHSVCPIGAVTINEIGQATKCDLCADYDTQQCVEACPTHALTNDTEKIIHDKQEKISEGFKKVQTLLK

SEQ ID NO: 4987 - protein, 144 aa, Methanobrevibacter ruminantium
MTFMNNGANIKQFQLLKFINENCNDDHVISKISIVLRRDKIEAPYYMNTKIRLSTCMDGEEKGVIHAMDILNHSRKHNLCEYKYDEIKSLIFDLFDSDHKSDQVEFSQNDNRLKISFMSKNDEEFRNLFENYHELFEKIDGLVD

SEQ ID NO: 4988 - protein, 84 aa, Methanobrevibacter ruminantium
MSDPLIIKKELLFNEYTGHEDGNCLEWVDGRLSNSDDHHRIPCNLEDAFEIAKKQKAVLVIQPEFQEQCIFADFTGEEIDENWD

SEQ ID NO: 4989 - protein, 279 aa, Methanobrevibacter ruminantium
MITEKQIEDTIYQLYKQAAIVLGDDVKSALEDALKREDSELGQLNIKAILKNIELAEEKSIPMCQDTGLPIIFVKLGNVQVENLYEGIRKGVARATEEVPLRPNVVDPITRVNSGNVGDKVPIVDIELIDEDYIEFTIMPKGFGSENNNALKMALPAEGIEGVKDFVVETALKAGGKPCPPIVVGVGIGGSSDMALKLGKKALLGKVGERNGDPTLAEVELECLNRINKDGKGPMGLGGRTTALDVKILKMDTHTAGLPIGVVIQCWADRHATARLRDD

SEQ ID NO: 4990 - protein, 529 aa, Methanobrevibacter ruminantium
MILIITGHLAYPLVKEMADKSKKETVVHIAETQVAAFLTPNQIIKEIHEYFEDRLDDIDLILVPGLIRKDTFLIAEEFGIPCYKASTDAADLAMVLDLVDELELSQSTPADKLIIEEKKKQALKFIEDFEKDMEKREELLKKENNILVRNLPVGEDFPMRVLSEIASAPILSKEDLIKKAEFFVASGSDMIDIGMIAGEDRSDEIPDLIDTLRPIVGDRPLSIDTLNPKEIEAAVNHGIDMILSLDNGNYHEILPLLKEKNVPAVILPTNFSEGYVPHSPADRVASMQKLVEACDGLEVVCDLILDPVNSASLVDSIIAFHDFHEVDKKPMFFGIGNVIELMDTDSVGANAVLAGIAMELGASILFTPEESGKTHGSVRELAIASKMMFLAKNRQSIPKDLGVDLLVFKDKKKRFDLKQDDNVPIVKQDRPIKFVRDKAGSFKIRVEHGISVKDSYIVATHFKKTKPTISFEGKTASEIYEEIIEKGLVTRLDHAAYLGKELEKAEIAMLTGKEYVQDFDLFKDPEEFI

SEQ ID NO: 4991 - protein, 118 aa, Methanobrevibacter ruminantium
MNINGDLMNKKITVDILMFIAIIVEFLSLPILIHEIVGVGLLFLIALHLKYNKRYFKTIGKGKYNLKRTLNLIINIGLLASLLITIISGIFSSQKSLKGMKIGNHKISHIHKSSSYLV

SEQ ID NO: 4992 - protein, 386 aa, Methanobrevibacter ruminantium
MNANPKILLYILMISALGINTPLSIVGIISQIAEYFNTSIAISGLYVSSFTFTIAICGLFIPVLFSKYNRKRTFVSILTVFAISNIAIIFTKSIYIASFFRILSAIFYPAFISIALTVCEEIAPKGEEQDYITKILLGISIGSIVGLPITTGLGTIFNYQVAMSWIFAINLLSLILIIIFFPKIKGKAKSYEMPFSSLKSKEFLLATIGIMMMPIGASIVYNYQPYFLQVVSHVYTYKLSIFLFIYGLFSIFGTWLGGKLIAKRDKATILIFQLICGGVFVLLYLFANYLIPVLILILIFGILDGMGYNLIQYIESSVIPDSPELANGVFLSILNGGIALGIAIGGFLVDGFGIMSIFIFGALFLLLAFIILYYIIGIMKMPLKYS

SEQ ID NO: 4993 - protein, 290 aa, Methanobrevibacter ruminantium
MTDEELTIEEIEKKLESTGYISNKEISTSVFLSLSLNKPILIEGPPGVGKTELAKALAQSLERDFFRIQCYEGITFEQIVGEWNYQKQLLHLEAFKGSKKGEDSIFEEDFFIRRPLLTSFMNEKPSLLLIDEIDKADEEVESFLLQALGEKQITVNDLGTFDLQNDLVVMLTSNAQRNLLEETKDRCLFLYISYPSVEREMAIVKARLPNAEDGLVKKVVNMVHRIRTFNLNKKPSVRASIDWVNSVMHLDKDYKNVDAALEDSVGVAIKTEPDKAKVVKEIFRNEYMND

SEQ ID NO: 4994 - protein, 386 aa, Methanobrevibacter ruminantium
MTERIVRLSNDLRKKGMPVSIRSTQTAIDAYALLGEDDLPTLKDAFRSIYVKSKYDIPKFNESFDGFFTKKQVKNLTDELNKSSRPNSMKGKLSQHEWKITKQKGKGGKQIQMGAEQAMEYFAGRPVLEDRDKDLARDNDILNSDLSKLNKYDERVFELCVELGRKIANKQSRRKRLARSNKIDMRRTMRQNMKYGGVPIDLVHVKKKPHRKQHLFLNDVSGSCEWISSWFFMLMFACQKTFKDSRMFEFDNRTIETTEFLKEKYMVNAFAEIRLLRMRNMMVRGTSNMYTAFQSFMKQADISNKSYIILLSDCRDWAGPKVDGVPASVELVSQMSSMAKKLVILNPEDKKKWDVVDSCVSLYRGAGAQVYEVSTLNQLAEFVADM

SEQ ID NO: 4995 - protein, 305 aa, Methanobrevibacter ruminantium
MQSCTKCGNPKIIIKKPASGQALCKDCFIESIEKKVRQTIKRENFIDRGDKVLVALSGGKDSVVTLDILNSYRERHIIDLCAVTIDEGIAGYREDGVEIAKAHAERLGIPHKVVSFKESFGIDLDEIMAKENHRGSCTYCGVFRRWIINRAARDFGATKIATGHNLDDETQAILMNYLEGNTENLAKIGPKTESNDELFTVKIKPLREIPEKEIGLYAIAKGLDIHLAGCPYAEESFRMEISNILKDLTKDHPTIMYSTLRGFDKMRPAIKEEFKSNFVYKRCERCGEPSSNRLCRACTFLEELD

SEQ ID NO: 4996 - protein, 66 aa, Methanobrevibacter ruminantium
MSFKLKIKDNVEEREIDGELTIKKLLDDLDLSSETMVTKKNGEIVIEEETIEDGDEIEFIQIIYGG

SEQ ID NO: 4997 - protein, 239 aa, Methanobrevibacter ruminantium
MSSNATGTRIHQYIKKETGCYDPYFYQKKEGNEIALSLMPMVREILKEDNDLETYVKIAIVGNILDFGTFDLDTDFESLIFEGLKKELVINKIDEFEEALKKYDNVLYLVDNTGEIVFDKLLIEKIKEYDVDITVAVKERPILNDACMEEALEAGLDEIADLITTGSDSVGVVESMISDEFKEILLDSPFVISKGMGNYEGLTEMDLDGQDVFVLFCTKCNAISKDLGLPEGSHILSKL

SEQ ID NO: 4998 - protein, 274 aa, Methanobrevibacter ruminantium
MKFGFIGFGEVSYTLSKLLLALDFEILSSIEGRSQKTIDLINSLDLTLLDSFKDVAKESDVLISANSPDIALDIAKNYGNLTNGFFLDFNNISPKTVFEIEDILSDDKFIDSAIIGRVNSDELNIYLSGSKAQFLLDKIKKEIGSKGIDINKMDFKINVKLISDKIGDVSKLKMLRSSYTKGVSALLVESFELAEKLDLEEELWEILSLTENRDFERSSKSRIDSSKKASKRRYEELVEVLYFLDNVDNVDESKIMARATKDKFEYLKNRENKE

SEQ ID NO: 4999 - protein, 432 aa, Methanobrevibacter ruminantium
MIAISADFDPVHKGHEQLIKKGKEIAEEKNSKLVIYLNKGYSANHAPFFTPFDARCRMAKALGADEVVGVEGLHHRLILSYSVPIRLAQMHEDGVTDYITAADISLEEIKNYAERFINEGSFLGIPQDFPSRNVIRWYAINEFLSKKFNRKIDFHLIPEVSSPKKISGRFIRKEILNNNLTISKEIRELLPKTSIEILEEEIEKGNVPGKRNMKVLKHKMNTYSRSNLTNIAYLNGKVINRIVEGRFYKEDDESIWASFRRADYGPVMTRLAASCIEEEVTKDEVLKLMRHYESKGVIPPEQNVDKIIERAWYVALEVDKGVPAKEANEKFRKKENLKLNPMLSLEAGLNLTKFEAKKIHEGIEAKIFVDKDNKISCEIKDKKIKVKTALKLPSMEVTYLRYILDSRYIPVSGELIKNKRNDFRVKITIHDY

SEQ ID NO: 5000 - protein, 157 aa, Methanobrevibacter ruminantium
MSIIAIFLGIIVIAFPLLGIIAASDILGLSVLLLSIFLLLNGISEVEYNTTKGLLNTIIGLIMLVVSLGLIFNPSIFSFLTAITIYLAGIFLIIIGLVVIVGNRENKYKFWMGIIGIILGVIYIILGTYIHNSFVLGSLIGIWLVATGILNLLSDGY

SEQ ID NO: 5001 - protein, 362 aa, Methanobrevibacter ruminantium
MEIRELTKEIRDRSIEYAKPKDLDNLSASWYQEDLLYSGKGKTIFLILPTPGCSWALGPSGGCTMCSYISDCYLKPIETSKIIELFEMELGKWDFAEDYKNGEKIAIKLFASGSFLNPEELPKEARNYILQRLADLDEISEIVVESRPEYVKKEIIDEIFEIIGDKLFEISIGLETSNEETRLNKINKGFNNKSFERAIDTIKQSKESYDIKSKAYIFVKPILLSESEAIEEAIETASYCESIGVDRVSCCPATIHRGTLIERLWRRGSYNPPWIWSTVEVINRIRENVNIPALMDTSGFGSRRGPYNCKKCNKELKHKIIDSNFDQSQIEHDCNCKSEWIAEVKFSNLNRSKTQTKHLPLY

SEQ ID NO: 5002 - protein, 318 aa, Methanobrevibacter ruminantium
MKFGIEFVPQIPLDELVRLVKIAEDVGFEYAWITDHYNNKNVYETLALIAANTETIKMGPGVTNPYVRSPAISASAIATIDEISNGRATFGIGPGDKATFDALGIAWEKPVSTIKAAIADITTLLDGGKTEAGAALGGAKKVQDAIPIYMGAQGPKMLETAGEIADGVLINASNPKDYEAAMPMIKKGIGDQDKDFDVAAYTATSIGTDSEAAKNAAKIVVAFIAAGSPPPVIARHGLPEGFNEQMGEFLAQGNFGGAIGAVTPEALDAFSVCGTPDEFIPKIEALADMGVTQYVAGSPVGKNVEESIKLLGDVIASF

SEQ ID NO: 5003 - protein, 69 aa, Methanobrevibacter ruminantium
METNRLEAFYDAIIAIIVTVLVLELPQPETATIAGILALKVSYFTYLVSFLVCQSLAISPLDICSCEKN

SEQ ID NO: 5004 - protein, 104 aa, Methanobrevibacter ruminantium
MFVISLIPYLTIFVANNPNSLLSESLYGLDFILVDIILFIMSRYLIKINENSEYLSEVLDLKNAIIIPFIFLIIGFIIGFLGYPIAISIVCLITIVRSILYSIK

SEQ ID NO: 5005 - protein, 160 aa, Methanobrevibacter ruminantium
MFIEKRCTGCREGSACYLTCTIAPCSIEHGNIDYCFECEEYPCDKYDGIELYDSLITHRNQKKDLQKAKTIGIENYHKEQLEKKEIINHILNRYNIANRHIFFCLAVNLLEVDDLKQILKDCDESTKDMDLKERSDYIKHELYEFAKKRNIILKLNTGRY

SEQ ID NO: 5006 - protein, 83 aa, Methanobrevibacter ruminantium
MNYVEEAVQLFEDGYMCSQAVLEVFCEEFGLSREQAFKISISFGGGMRKGEVCGACTGAIMALGLKYGDFERMAQIRRNKRSL

SEQ ID NO: 5007 - protein, 151 aa, Methanobrevibacter ruminantium
MDDLPEMISIWNEIVEEGNAFPQEEVLTLKTGLDFFNSQSHVGVAFDGEILGLYILHPNNVGRCSHIANASYVVSSKARGKYIGQKLVLDSIEKAKELDFLILQFNAVVEDNLSARQLYEKLGFKQLGVIPKGFRLDNDEFANICPYYIEL

SEQ ID NO: 5008 - protein, 219 aa, Methanobrevibacter ruminantium
MNYQEISNIIKESLNLKTSPVSVKLFEKEKDAEEIFEKTNKTIHCQAIITASKGKSFYGTIDEIGCPIGAGILGLKELPEKILNGSQFDKMNVTSSQESGKALIDSVAKNNRIEAIAYMPLEDSKIEPDVVVVIAKPRQIFDLIRANTYQEGKRMDNSVGGTQSLCGDIVVNSIQTNEPHISFGCIGSHMATELSEDQVIIGIPISKLEEIANSLNIIN

SEQ ID NO: 5009 - protein, 249 aa, Methanobrevibacter ruminantium
MKFKFNTPLTEGKIIKRNSQFTLDVEINDNIEKVHCPTTGRIGNIDLKNVAGLLSKSDNPKRKTKYTLEAISISNLNRKDKKWIGINQIASNKYIELFLKNHLLDGMLPEYSEIKREVSLGKSKLDFLVGSTYLEVKTPLQTLQIEYDTDIKTKKVSSFSSTDRFIKHINELADSLESNEKAILLNTFQYDNPGYEILNPSTNYIEVSENVDRCIEKGLEIWQVNMKIDHEGVELLKYWNTTSNFRKIK

SEQ ID NO: 5010 - protein, 169 aa, Methanobrevibacter ruminantium
MKSKDKIVKSLIELMETHEFEEITVKDISELAEVNRSTYYRNFKSKEDIIKYKLESIMDEYLKEFESKTDKTKETYIRTILETFLKHEEFLKIIHKQNQSYILQKVLANYFGDVLKDTSKKERYQVYYHIGGIYNFTICWIENDMKDRPEYLAKIGAEITSNIEPYLLK

SEQ ID NO: 5011 - protein, 352 aa, Methanobrevibacter ruminantium
MKHRLNLDNKDPNYILLKEIFKIMDSRKSKSILASYGFKNLNRTIFTFKIIFISMFFGIDIPFILNELKSKKELRKYFNISEVLTADQVYKIFSEINSEKLIKCLNRILNSRNMVKRRGKKTFIVDATPVDVDINFHRNKKTKEHLEKINLKWSYSSSKGYYIGFKATVVLDYDSMNPVCILVHSGAPNDAKLFEEILENLQKRRIIRKGDTLIFDKGYYSYKNYQIGISKYKIIPFIFPKEKFSRTRLDDILTYPLAVFNKTKRIMKEKRLYNSLKMELMKKIDSWEKFKPIRGKIEDFFKLLKQGLNMREIHKYTPKSVEKTVYLNVFLGALIISQGFYSKTAIQQLSEN

SEQ ID NO: 5012 - protein, 329 aa, Methanobrevibacter ruminantium
MGCMGFGDPENGMHTWTLPEKESIEIITNGLHNGINFFDTAIGYQNGTSEQYVGKAIRENASREEVVVATKFLPRSQEDIGNNVSGRQHIHNMVEKSLINLGLDYIDLYIYHMWDYNTPLYDLLEGLNEVIEEGKVKYIGISNCFAWQLAKANALAEMEGFAKFVSIQGHYNLIFREEEREMIPLCHTDNIALTPYSALASGRLSRLPGEESKRLNEDYYAKLKYQNSEQQDLKIIERVNELAQNYGVSMTEVSLAWLLTKVTAPIVGATKMHHVEGAVSSVDLTLTEEDISYLEEPYIAHDLVGVMADNKVSASDNEKVWIKHTKNKI

SEQ ID NO: 5013 - protein, 177 aa, Methanobrevibacter ruminantium
MKIIVLKGSPNINGSSNLLADNFIKGAEEAGHVVGEIDAAHADIAPCSGCVSCGYEGPCIISDDMDIFREKILEADMLVFVTPLYYYGMSAQLKILIDRFCSANSSIQSSHFKSALITVAYNSSNWTFDALEAHYDTLVKYLNLDDQGRILGYGCGTPSMTKYSDYPKKAYEFGKSL

SEQ ID NO: 5014 - protein, 466 aa, Methanobrevibacter ruminantium
MPNFFSGGDLISNNKPQETFRGKTDRAIKKRPPWKEYNLHIVCFVLVAISMAIGVKEIRITDTISVLLLPLIYALIMGLALFLAKPIKFIGKKQSKVAEGAMVLFIGVLIAKLAISSGQSIDIIFNVGPSLILQLLGDLGTLIALPVALILGFRREVIGMASSICREPNLGVIIDKYGFKSPETRGVLAIFVIGSIIGTPFISFLSSICISLIPYHPYAFAMASGIGSASMNAAALVPLVHMYPAMATQLEAFAGCSNILSFCLGIYMCIFISLPLAEKLYKWLSPIIGKGEGRTIDDEYAIEGVKDDKYATSEDLSSGKIERWVTFLVLFSIIGTVGNFIGYHTPLLDVFIGMLIISIITLIGMCLERIIPWDIPSIIYISLLGIFLAIPGVPTSDIIITYVSQIELTTICTAFLAYVGIAIGNDWEEFKKIGWKGIIIAIIVISGTYLGSASIANLVLFVTGMI

SEQ ID NO: 5015 - protein, 297 aa, Methanobrevibacter ruminantium
MARSDKTLEDILNIIFYDKPSTQDEIAEKLKISRRYVTQLLKPLIEEDIVKRAYVIDLNKYDEIYGSSDPIFNLKQHSAFFLIENMLSSMSEHVKEQVQMSFDAILTNDKDLAEQALKLDFTTNNMYEKVRASVETVVDVDPHSKLSKILLFSEAAYNYERIGDYSGHIAKFVINEKTAVDDELLDILKKMHKYAQKSISYATDAFINGNIDSRGNLMDTEEKIHETQQKAMNLIANQMVETSFEDIEMSNYYIYISRVVKSFERMGDISVEIMDLAAEFHKDIPRPTTPRSFREKI

SEQ ID NO: 5016 - protein, 644 aa, Methanobrevibacter ruminantium
MEGSELQNIKGIGDKLSQKILLNLGGEEELNRVINELDLERLIQIEGISQRKAIEIMNQLLGNPAQKFLKSERAIQLYEEIIEKILKYSNTNYSKNRILLLAPIKDEFIIAERLSFVMSAKERVSKLPLDELNKLMRNLHEPKNAKANYDASKAILVESAEDSDYLMDLGLNKYYTILTASDSPFFKEEISGYELVYYIYSEGILDFGDMPNLIMISKEAEDYQLVPEIILDYFKENRELFENVCKIRKILGESTVLEDVGPVLEELDNYKTQEIDLDGIVQEEKTYIDEELKTRIHNVDLEGDEVLDLLNNALPPKIEKIFDEILSKSKENIKAKSGIDFDPFIKKYPIEIDDMEMERIKMEILSSSENNYFDMKITAAEHLALIKEQAEREVKETIEFDFEYALGSFAYHYKLNAPEFSNEYALEGALHLELCLKETEEDNENGEIQRIDYKLNEQENVALLTGANSGGKTTLLETISQIAILAQMGLPVPANMAKIKLLDEIYHFSKKRSLDAGAFESFLNVFMPIVTSDCEKLVLLDELEGITELEAAVKIISSFIEMIKDSNSFAIIVTHMANELMKYTDIRVDGIEATGLDENYNLIVDRTPKMNYLAKSTPELIIKRMYENSSPELKKVYGKILEKF

SEQ ID NO: 5017 - protein, 1017 aa, Methanobrevibacter ruminantium
MKLPELLAPVGSAEHLKTAILSGANSIYLSGENYGARKYAENFSLPEIREAIKYAHLHNVKAYVTVNTLIKEGELKKVSEYLLQLYKMGVDAVLVQDIGLINIINKHIPKLNIHASTQMNLHNIEGIKWAYDHNIKRIVLPREIEMRELKEIVEYAHSLGIEIEIFAHGALCYSYSGHCLLSSLQGGRSGNRGRCAQPCREQYELSINKSKRISPKNEGNYLLSPRDLSLYENLDEIVNLGIDSLKIEGRMRSTDYVATVVKNYRKRLNRLRYDKTSKSLNRNINESIKKTKKGKKGRKSDLKKIEDKEKIESLKKIQKEENRNSEEELGLVFNREFTAGHLIPKNNPMIMNRKKPGHQGLYIGNIHRYNPQTEEIHILLNDNLIHIPEKGDGILIESRINRENSDERNNKSNKNNKNKQNESKSNKKDKNKKKIKRMENDENYHSIIQTYGFDISSKPVLKDSKDKHWRKREKDKDIEGKLLVIKRVRENKRIPFPLEKGSKVYLTKRNSLINEVKNLKSDKSKHMIKKSNLELYFRIDSDNYPHLKGNLKLDNGKVITLKIRGEMPWEEAIKKPITNETIKKQLMKIGDLPYYIEKITVNNNKSLFTPISGINELRREFFDKLEEEVINSYIPTDEDIKIAEENIKELSKELDRKIDLKAKVKSEQENNDLKSNAKLENKNKNSKNLSIYINSLESLKEINKINDLSNTLFNRIYLEIPPNRRLDEITKDRIENYNPNDSKELNISYCVNFLKSAINLAQDQDYELIWKLPDIAHKQSKESIVKILGILNKMNLHINIMTSLIGLDDSLKDKFKLELYGNYPLNVYNAYSVMELKNYKTLCISPELYKKNIEKLMEDYYTNKNNEGLSEMEILVHGKIEAMTTRKELISKKQLKLIDKYNKKMRRDKMDISSNEFYLKNRKDQYYPIRTSINEDNLIILNSEEFCLIDEIDYLKSIGIKNYSIDCRWKGIDYIRDIGMVYRDSLDNDDYDLGEFKEIINKHSEQLTKANFDIGLK

SEQ ID NO: 5018 - protein, 861 aa, Methanobrevibacter ruminantium
MTLPELLAPAGDYDILVTAVNAGADAVYISGERFGARAFAKNFTLEEIEKSVEYAHLNGVKIHVTVNTLINNFEVVDVVQYLFKLYKLGVDAVIVQDVGIIELIKTLIPGLEVHASTQMTLSDYDCILWAVENGISRIVFPREISVDKIREISEKLKSSNLNMELEVFGHGALCYCFSGNCYISSYNSGRSGNRGACAQPCRKQYKLKYKNYNVGNGFLLSTHDLAVYKGLDKIEEAGVFSLKLEGRMKSADYVGTIVNAYRHIIDGDEGDYEKDLHLVFNREFTDGYILNQSPGQVLGRESSGHEGVYIGKIIEKKGEQIKISKENKDFSINLDIGDGIGFKYKDKIKGIYIDNIKEQTDDYIILNTTRNVREGDKVLLSYSKSTHDKLKKFHNETIKQHIPLSLDIYWNEDLSLNVTGRFQIEEKGINNKNIIERFNFNYISETKFEKALNRPISKEDIEKQMLKTGDSSFYIKEMNIHGMPENTFIPIGKLNKIRRRLLEKATNLLLDYYKPSKKEVRATNKKVNQFIKEYKTYSDIDLRKEKLNLSIFVDSLELLEMTRKLPIHKYYFDPSFSFNSPEEYFEKIKDLLKEAYSIVGNSNNPNNKSKSNEDERLVLVLSSFISDEEIEKLSKIIDELKEEGISIPIMYDTPGIGKSFNTDIYGNHNLNIWNSYNVKNLSESGFKSLILSSELSHKEIKELVSKYQYIKGDKETDLNIIIQGNLEVMSSKDDFSNLNDGKDFIINSADDYAILEDKKRKKFKYKVVFDYNKHSHFINKDCLCLIEEVELIKDTGVDSVIIDTRFSSAKYSSTIISLYLQALKEDNTYDLSLLKDQIRNITLSRLNQGNFINGRLHEKDC

SEQ ID NO: 5019 - protein, 196 aa, Methanobrevibacter ruminantium
MYIVLEGIDGAGKSTQINYLKGWLEDNGFKVETIVEPTDLEVGNLIRQLLTRSDATSDTMQKTLGLLFAADRLVLMDKIEKLESERTVVISDRSFYSSLVYQKPQDWIREINKFAKIPDLVLLLDLDVKKSVERCDGTDEFENEEFLTGVKENYLALSRENDNFKIIDANNGPNKVASDIKKAVAPLFDICVDCIR

SEQ ID NO: 5020 - protein, 68 aa, Methanobrevibacter ruminantium
MEEEPIYEMKLTNGIGEQMLAHVFEKFDVELKQTEFGPKLQGTKEELEKAQEYIVEMMKKRLEELDRQ

SEQ ID NO: 5021 - protein, 321 aa, Methanobrevibacter ruminantium
MNIEEKIELIQEGTLEIIELEELKQKLEKETPIAYTGYEPSGKIHLGHAVTIMKLKQLQKLGFKIKILLADYHAFLNGKGTVEEIAETAEYNKRCFQGLGLADDTEYILGSSFQTGSEYTNDVYQLATITTLKRAKRSMDQVSRHDDNPKVASVVYPLMQTADMSALNVDIALGGMEQRKIQMLARENLPRIGKEAPVCIHTPLIHGLDGDDKMSSSKGNYIAVDDDEKTIKEKIRKSYCPQGEIEGNPMIEIADFFVFSQQDTFVIERPEKFGGNLELTKDELHTMYSEGKLHPMDLKNGITKFLIDFLKPVREFMESGE

SEQ ID NO: 5022 - protein, 346 aa, Methanobrevibacter ruminantium
MFCPECGATDVEMVDGICKNCYLKKFQLMEIPENITVTICKHCNAKLEEGKWKDEYIPEDEIIYRTLENNIKLNDLAENEEIELEIDQMRGTIAECYIEAVATVLGEEIVETHTPNVKIKYSVCPDCSKRNAGYYEAVIQLRADNRELKEDEIIKAEEIIGRTLDKQFKKDKLAYIPQVAKLKEGNDYYIGSLKSAKKVVEHLKEELGGKVKESPRLISEDKSTGKGLYRIWISLRLPKFEKENIIKYNDKIYRVEAIDGNRILLANLENQDSLALKWREYDSIEKMENLNGIQKAIITAKSPKSIQILDPDDFSPLDLDMNEKLEGFNIGDEIDILKIEGRIFII

SEQ ID NO: 5023 - protein, 135 aa, Methanobrevibacter ruminantium
MDDYENLLNRAIDQLPPEVFETKRFEPVKAYSVIQGNRTFIQNFKDVADSLNRDPQHILKYLLRELGTAGNLEGVRAILQGKFNHFLINERIDEYIEKYVICHECNRPDTKIIREDRIFILKCAACGAKAPLKPL

SEQ ID NO: 5024 - protein, 665 aa, Methanobrevibacter ruminantium
MSPTNKTKASLARFEEFFSTIYKDDVFEVLEKYPDERSLTVDYNDLEMFDPDLADLLIDKPDEVITTSQKAIKNIDPLMKDANLNIRFENLTNNVPLSDLLSKYIGKFVSADGIVRKTDEIRPRIEKGVFECRGCMRQQEVEQTSSSRIMEPSMCTECGGRSFRLLQEESKYIDTQSARMQEPLENLSGGTEPKQMLMVLEDDLVDELSPGDKVRITGTLKTFREEKSGKFKNYIYVNHIEPLEQEFEELHLSEEDEAKILELSQDPNIHDKIINSTAPSIRGYREVKEAIALQLFGGSVKHLEDKTRLRGDIHILIVGDPGIGKSQILKYVSKLAPRSVYTSGKGTSGAGLTAAAVRDELGGWSLEAGALVLGDQGNVCVDELDKMRSEDRSALHEALEQQTVSIAKAGIMATLNTRCSVLAAANPKFGRFDRYKTLADQIDLPSPILSRFDLTFVIEDKPNIENDRKLAQHILKIHQSESVNYEIEPDLLRKYIAYARKNINPVLTDEANKVLEDFYVSVRSAGVEEDTPVPITARQLEAIIRLAEASAKLQLKDKVEAVDAQRAITLQRKTLEQIGLDPETGQLDISRVEGGTTTSDRERMQKIEEEIKLLEQEFERAPIDTLKENMKEKYDMSPEKVETLVKKLKGKGIIFEPRNGFFNTA

SEQ ID NO: 5025 - protein, 130 aa, Methanobrevibacter ruminantium
MLISVLGVIVIIIMVVAAAYVGFSVVSSSLTGGISSGTQYDELATLKSNCSSLEAQFNITGTKIYAMQNITLEREFVNAQVELIKVQNDLDSVESALASGQPASEVDKRIQQSKEDLKIAQQAYNSLSVK

SEQ ID NO: 5026 - protein, 213 aa, Methanobrevibacter ruminantium
MGSRWQVEKKKDPYYRRAKSEEYRSRASYKLKQLDKKYKIIKEGNTVVDLGAAPGGWSQVALEKVGEEGIVVGVDLNRIKPFPEKNFYGIRGDFTKEIVQDKIMELTNGKAKVLISDAAPSLTGIKTIDHLNSVDLVETVIKIADNILETEGNMVIKAFQGPEYKRLLDEIKQDFRKVKSTKPPSSRHRSKEMYIVGLGYRKGPGSRKSRNKE

SEQ ID NO: 5027 - protein, 179 aa, Methanobrevibacter ruminantium
MLIGLISDTHIPDRRMKLPQKVLDAFEDVEMILHAGDITSQSVIDDLEAIAPVHAVEGNMDRVVGEMNLPPSKIVEAEGHKIGIVHGEVYPRGDTQQLYYTALELGVDILVSGHSHVAQLEKIKNVILVNPGSPTNPRLSDPSVAIMEINGNDINFEFVKVGNPVCSALNFFKDKANKE

SEQ ID NO: 5028 - protein, 363 aa, Methanobrevibacter ruminantium
MGKVSKEKILEILDGYDKENITIATLGSHTSLHILNGAKEEGFRTAIVCEKGREVPYERFEVADEFIMVDEFKDIVNEDVQQKLRDMNAIVIPHGSFVAYAGLDNVEDKFNVPMFGNRDILRWEAERDLERKLLVNGKIRIPMKYDDPSKIDRAVMVKFPGARGGRGYFVASSPEEFDAKIDAMKERGWIEDEDVAQAHIEEYVSGCNYCIHYFYSALNDEVELMGMDSRYESSIDGFVRMPAKGQLSIDISPSYVVTGNHPVVMRESLLPQAFEIGDKLVKSAAELVKPGLNGPFCIQTLVNDNLEVVVFETSARTDGGTNTFMEGSSYSYLKYGEGMSMGRRVAREIKNALENGGFEKIIT

SEQ ID NO: 5029 - protein, 170 aa, Methanobrevibacter ruminantium
MVDAEKAKQPKERKNKNSNLPDIDFKALIFGAAAYAFFPLVAYQYNLDILMVFAAIGPLYIGYTAKTELKSIILGIVGATPLLYLAFSGMLGSYGSGEMADIIMTVGILGLGALMGYFGGYLYRDRQRNKAKAGGIVVEDTPKKEKQFEDTGSVKKNVANLFLPKSRRKK

SEQ ID NO: 5030 - protein, 124 aa, Methanobrevibacter ruminantium
MAKMNAVILGFILTLVVYLFFGRYEFWGLLIVGFIVGYIAHEGILGGMWNAALAGAFGTIISAILFIILVTIGGTAMMGFLGGLAGFTVSGITSLIDIVFTIIKYMIVMGITGAVGGALSGEKE

SEQ ID NO: 5031 - protein, 322 aa, Methanobrevibacter ruminantium
MMDLIYILIIIIIAIIAYKSIKIIRPYEKGVVERLGKYNRTVERGLNIVIPFIETIRKVDLREQVVDVPPQEVITKDNTVVVVDCVIFCEVIDAFNAVYNVVNFYQAITKLAQTNLRNIIGDLELDQTLTSREMINTELRETLDVATDKWGTKVVRVEIQRIEPPKDIVEAMSKQMKAERMKRATILESEGYKESEIKKAEGDKQSKILAAQAEAEAIKQVADANKYQEIAIAEGKARATEITYNAIHAGNPTNDLIAIKYLEALENIADGRATKIFLPTEVSGILGSVGGIAELFKDDPEALEKFESIKVLENAKETADNE

SEQ ID NO: 5032 - protein, 139 aa, Methanobrevibacter ruminantium
MYLEFWIILAIILIIGELLTGGFYLLSIGLGSLAAAIFNYFQFSITIQIVAFILVTVIFIILSRPLFNRLNRNTIDKKSNTERLIGLNGEAMEDIGQKNIGAISIKGEVWKAISDEEISKGEEVKIIGIDGVKLKVEKL

SEQ ID NO: 5033 - protein, 865 aa, Methanobrevibacter ruminantium
MIKKQTKTYSKKQIYKNLHPFVREWFENSFEDFTPAQKQSIPEIQKGKNILVSSPTGSGKTLTAFLSVINELTTLADKGELEDKVYCIYISPLKALDNDIERNLDTPLKEIEKIAGKPLNIRKSVRTGDTTQYQRNKMLKYPPHILITTPETLSILLVAPKFREKLSHVKYVIIDEIHSLAENKRGVHLSLSLERLQALIGGFVRIGLSATVSPLEEVARFLVGYEYGTERDCLLVDINYLKELDIEVISPVDDIVIADSEDTRLATYALLDDLIMEHKTSLIFTNTRSATERYVYNLKKLYGEHFNSNNIMAHHSSLSKELRLETEEKLKKGELKAVVSSTSLELGIDIGYIDLVILINSPKSVSRALQRIGRSGHRLHEKSKGRIIVTDRDELVECSVLLKNAKEGKIDNIKIPKNCLDVLSQHIYGMGIENPWDIDYAFDIIRKSYCYKDLSRDDYEDVLSYLAGEYVELEERYVYAKIWINYEENTFGKRGKLARMLYSTNIGTIPDHSAVIVKCDGEVIGKVEEDFMEKLKKGDSFVLGGRTYKFKYGKGMTINVSPASGPPSIPSWYSEQLPLAFDLAVDIQRFRYILDSKFQYGRSKEEIMEFLHDYLYVDDFAANSIYEYFNEQYLYAQIPHKQKLLVEYYTGFGGRKFVIFHSLFGRKTNDAIARAVAFLASDFNKRNITISITDNGFYLSSDGKMGALEALNRLNPQNFENILIKSLDKTETLASRFRHCAGRSLMTLRRYKGHEKSVGRQQVRGKILLKHIQEMDNNFPILKESRREATEDYMDIKNAKRVISWIDSGEMEIKTINTIIPTPFAFNLVSQGYLEVLHQDDKAEFTKRMHRAVLDKIKEEMDNQF

SEQ ID NO: 5034 - protein, 283 aa, Methanobrevibacter ruminantium
MVEKLSIDEAIEALKDEDVANRKLAIKSLEHKSDDKIIEPLIEATKDENAQVRFGAAEILGDIGDSAVDKLLDEFNKESGSNKRFLAVALQKTGSEKAVDAFADALNDEDFGVRKVAVRALGELRAEDKIDAIAECINDEDGGVRTAAIFALGDIGTDKSIQIIKDARRKEKDKDFKKYCNKAIKQAEKVQKSGGKVKSSKGQPMSTIKEMEKQDPEAAIKAYEVHVKSGSTKDTPYKRLAILYRKINDYDNETRVLKLAIEVLSKENPSKVGWFEKRLEKMT

SEQ ID NO: 5035 - protein, 268 aa, Methanobrevibacter ruminantium
MDIFNYIFQIIVSVLIFAAIFAVGILLRDKIVHKLNFFVNPQNYLPEEEIQTLKQVYYLILILILVVCILNFFFDNNIILPNSPEFYVFNSFLDIIVSVYIAIIIYDGSKKSKILLIFLIPIPSIAFLLFGESLIEYWDFVRIPALLYIMKIFYDKFHIYTDKYNLEKSILLLFSIVFISFIITLVAENEDPLNALVMVSNAFTSKGYTILGESTIGKIDSIFLVWGGYIISGAATATLTAAILIKHFNAKIEKFDEKFEELEKLISE

SEQ ID NO: 5036 - protein, 281 aa, Methanobrevibacter ruminantium
MNKIKIALCQMNVVDNKDENIKKAIEMIKESKKQGADLAILPEMFNCPYENEKFIKYGETLEDSRTLKSISETANEENIYVLAGSVPELVLNDSSNENNLYNTSVFFDNEGKILGKHRKVHLFDIDIKDKIYFKESDTLSAGDDFTIIKTPFARIGIGICYDIRFVELSRILALNGAEILIFPGAFNLTTGPAHWELLFRSRALDNQVYAIGVAPALDKEASYNSYGHSIIVSPWGEVIEELDYDEELKIVELDLDLIKQVREEIPVLKNRRTDLYDINEK

SEQ ID NO: 5037 - protein, 392 aa, Methanobrevibacter ruminantium
MKYCQECGNASYDSAPVCGNCGAKLGPKSEANSTPPSRDKKAKSTSTSSESSIFSSKSDGFSSKIGKKIGSFQVSSTNTAVENKQEREEAFLKQTSKPSFSKTATEGFKQKDKGIKNPATKYNMPKKEETVDAKAKEAPKREAPKKEIKRESPKKEVKKEAPKKEIKPNIVKKSDEGSSGGINLKKIGIIAIIILIILLIAGIGLNQMQNQTTDEVMNYTDGIINFTYSGNWSVYNNTNADSNMTDLAFKTKDKTLIGFTTIQSDEITYEKILSDVNDTAHSLNGEILEYQEVNVGGVPAQEIIISTQDQGYSRYLCILHDGVYYCFVANNAKSDNQNLTSLNTTEIQNMINSISFKDVVAGDTANLDTSYQESSYQEESYDNYNYEDTSNY

SEQ ID NO: 5038 - protein, 166 aa, Methanobrevibacter ruminantium
MVKKEKIKCDNINYAVYRIDDWENDYEINIIGTAREIPVTQPTLEHMLKQMDHIRQSVFEIGGKKVNGMIGLSMQFNPSFASRDIDELIEQEQKEFDSIMAELNALELKDAKDVIFLDTDEYVIYKLEYDGHSLSPKPYNDYAKQHHLDEIKRLKELSGERFVLEL

SEQ ID NO: 5039 - protein, 241 aa, Methanobrevibacter ruminantium
MSKIQQLQEIINSSDNIVFFGGAGVSTESGIPDFRSESGIFKSLEKYGDVPENLVSHTYYSDHTEEFFEYYKDTLVFDGAKPNPAHLKLAELEEKGKLRAVITQNIDGLHQKAGSKNVLELHGSIHRNYCQICNKEYSLDFILKSEGIPRCDCGGVVKPDVVLYEEPLDNRILAYAIDYIQNADTLIIGGTSLVVYPAAGLINYFHGGNLVLINKSETGFDYMANLVINEPIGETLSQIRV

SEQ ID NO: 5040 - protein, 190 aa, Methanobrevibacter ruminantium
MDFISTLLIAIALAMDAFSVSLTKGFTLKNLTKSQALWFGIFFGGFQALMPVLGWLGGIQLEWLITTFAPWVAFILLLLIGSNMIRESLSGDEEDEKDSDKFSFKELTLLAIATSIDAFAVGITYAVLKVDILIPIIMIGVVAFIFTIIGLYLGKKIGNYFGDKFEIVGGVILILLGVKILLEGLGILVL

SEQ ID NO: 5041 - protein, 260 aa, Methanobrevibacter ruminantium
MKYKILENPNYKEAYELIEEGLVKKATMLLFACCKVSYEGRALSELDYGERIIMIKPDGCFLIHQDNKVDPVNWQPPKSKTKALIKDETLYLESHRRKPPELLEVEVKKIHYARYNLIEDYEELERAGYEKDMGDMIWDNPHIIEEGFRPTVREYATEHGFIDILGKDADGNLMVLELKARKAGITAVKQIRRYLTDFENRENKEIRHEEEKQKVRGLLVAPSIGDDALELLEEEGIEFVSVEPPRELKKDKKVTLDAFK

SEQ ID NO: 5042 - protein, 458 aa, Methanobrevibacter ruminantium
MEMNENVEMITGDPKKAINKLAWPLIASMLLIFLNNIIDSIWVAGLGPDPLAAIGYVTPLFMVLVGFGNGIGAGATSLISRYIGAEKRDDANNAAIHSAILSVVVSLVLTVIALLILESLLKLMGAGSVLKYAMDYGVIIFLFTAPILIPPIFGGAFRAEGDIKRATVPIALVAVINMILDPIFMYVFGWGISGAAFATGLAPCFGLCMMLYWIFIKKDTYLSYNRKDFHNNLNMYKDILVVGIPASLEQLIMAALAVTVNYMLTLVSGSVAVAVYTAGWRIISLGLLPAIGVGTAAITVTGVAYGAKKYENIRTACRYSVKLGLISSIIVCILLFIFADQIAYIFSYSEASAHLLPLIAGFIQLMCLFILYVPFGATAGNVFQGLGKGTTSFVLTTFREFVLVLVFAYLLGFVFHMGETGIYYGMLIGGFIGSVIAYGYIEYYVDRLIKGKVKGSDI

SEQ ID NO: 5043 - protein, 255 aa, Methanobrevibacter ruminantium
MQKVINSHCHIYPDKIAAKAVKGIRDFYDLHMSLNGTVDDLIEDGKKVGVVHYLIHSVATTPKQVESINEFISFEVNTHPGLFTGFGTPHPDSEDIERDLDHIIELGLKGVKVHPDFQQFALNEERAFRMGEAINERGLPIMIHCGDFRYNYSNPEQLRPFLEEFPDLTVIGAHFAGWSMWEKATEELAGTPNLIVDCSSSLYSLTPETAKDLIHAYGADKVLWATDFPMWESVSEMEMFNKIDLSEEERNTYSL

SEQ ID NO: 5044 - protein, 332 aa, Methanobrevibacter ruminantium
MFDVESIEVEYFTLKEFKFKNGEVLKDAKVEYITFGTPKYDDNGIINNAVIYFHGTSGNCHSAKRLCESMGSGDILDTDKFFFISLSTLGSPNSASPSSTGLMNKFPEYDIEDMVNFQKQFVEERFGITHIKGLIGNSMGGFEVLTWGCVYPDSVDFIISLVSSFKVGGHNYILSKVIDNIFTSDPDYNDGAYDLPISDSLKRSLKLSSDAMYSFGLSREEYRNNLTNEELTEFMAEFAEESLEEDPNDVVYMNKASIDFDISEDLKNIKAKVLIIAINQDQYFPPNLDAIPMSKMIENNKLVIFDSCMGHVGSGELFKIEDDLREFLTEFY

SEQ ID NO: 5045 - protein, 134 aa, Methanobrevibacter ruminantium
MEITYKDTHDFKEEDLKDLFLSVEWSSGHFPDKLVIAMKNFETVYSAWDGDKLVGLVSAMDDGIMTAYVHYVLIRPEYQGKGIGKELLKRTTDHYKDYLRIVVVSYNEEIEFYEACGFEKADDASPMFITELWT

SEQ ID NO: 5046 - protein, 94 aa, Methanobrevibacter ruminantium
MFSVKVDDYGETEDDMHFVTYMISGLSEAELDYLIANLEGELALEDGNLFLNIFYSKQFFPFGSDDAHFKLDDFIKREEIEMTYFIASFLEDMK

SEQ ID NO: 5047 - protein, 313 aa, Methanobrevibacter ruminantium
MISKETFDKDKANFKGTYRPLLKEIDNPTLLQIDELHGIAGALSGKNQNIHNNILLLLASIGTIITIIFFIYFEWDISAFIIPCVLLMFILIGIHLVSNKLNYHDKYLEYRVLAESLRLQFFLSYAGAQEKVIDILPWFIEHGVPLVKEVLGTLDFTELPQKREIRDNWIIHQKKYHEGALQKSKKKMRTQKIVTYASITVTIATYIIALIFEYLIPASTFNLNGDIIHLGIKLAMAGMSAFTLFLGSYYGKMSLSEKIDDHERMVELYGIIEDRIRTEGETDEILSYAAREFLIENSTWYAYQSKNKPDLVV

SEQ ID NO: 5048 - protein, 305 aa, Methanobrevibacter ruminantium
MTTELQNEIIQLKEEKNAIILAHNYQPKEIQEIADFLGDSLELCMKAKEIDDKDIIVFCGVDFMAETAYMLNPDKKVLIPDIEAECPMAHMLTGEQVIEAKKKYPDAAVCLYVNSLGEAKAESDILCTSGNVKKVVESIEEDTILFGPDTNLGEFVQPFTDKKIIPIPGDGHCYVHKLFHKEDIDDARKKYPNAEIIIHPESNKEVQDMADYVLSTGGMLSHIRDSEKQEFVIGTEVDLITRLEAEFPDKTYYPLLEGAICKTMKLHTLEKLKDCLVNEEPLITVPEDIAERSISAVERMLDASK

SEQ ID NO: 5049 - protein, 268 aa, Methanobrevibacter ruminantium
MTTTEWLYQILLNLLDLSTIISIIVIIIAAAIIIKLGEKSLLRIEKKYEINLTAHYLLKDILKYGIIIIALALILNLIGIDLQNIILSLGIVSIVIGFASKDIVSNFISGIFVIGDKNVQVGETIEIDGRKGAITKVGFRNTTMIGMDNFKVTIPNSVLSTKTYKNFPMGEDYRLRLDVILPHGFDIFEYKQKMTEAMEKYEYINKDKEPVILAREINEEGSKVEISFWINDYKDRDPGKAVILEESNKLIYDYLMDEKNAGILRIVK

SEQ ID NO: 5050 - protein, 303 aa, Methanobrevibacter ruminantium
MEIIFLGTSSAVPSRERNHAAIVIREFGEVFLFDCGEGTQRQFIEANVSPMKVDKIFITHFHGDHILGLGGLIQSMGLRQREEDLDIYGPRGLKKVMNAITHTGYFKIDFNLNIHEIDEGIVVETEKYRIETTKTKHSVPNNAYSIIEKKKPRFIREKAIELGVPVGPAFGKLHRGEEVEIDGKIIKPEQVLGPPRKGLKVTYSGDTRPSFKLIELARDSDILIHEATFEEEDRLHAYEHDHSTARDAADIAREANVGKLILTHISPRYQEFSVLEREAKEAFDNVEVAEDFKVFNINSKDKE

SEQ ID NO: 5051 - protein, 276 aa, Methanobrevibacter ruminantium
MDDIIKFMLEEDEGFGDITSNALIPQDKVFYAKLISKDEGILAGIEIIKEIFLEYGIDILSSKNDGDEIKKGDILLEIEGNARKILLLERTALNLLMRMSGVATKTHRVVSSVKEVNDKVRVAGTRKTAPALQKYDKIAISIGGGDPHRYGLDDMVLIKDNHIAVVGSVKDALRLAKENVSFSKKIEIEVESADDAVIAAENGADIIMFDNMSPKEAQDSLDALIDNDLRNGVLIEISGGITEDNILDYAPLDVDIISLGSLTHQASSLNFSLDMD

SEQ ID NO: 5052 - protein, 85 aa, Methanobrevibacter ruminantium
MAELDNNIKEKLTEVFKEELGKDDFELNYLITDNEITFFFGISEGKELSLDGIEKISSIIDGGYEGNSIVNQEYRYKFNLDPCSD

SEQ ID NO: 5053 - protein, 698 aa, Methanobrevibacter ruminantium
MENRYQEHQSDFKYLLIINDDLECEIKIRREGNASEKNLKDNIFTIKEASDKELEDIGRIYDLFDQFAIENTRYEKIQMDKKAFIKFALNIKPILRDNNAELISSKEIIESDLKLIMDTDLKENEFSLKKLNRIKWIVRLNKGRIALRDFDKQTENNKEILITRNYFFILNRNEFLDIKFYASSLLKTTENSEILKLALSEEIDGFKFEVGENLKRLINPSRVYEVPRTLKGELRTYQKIGYSWLVQNIRSGFGSILADDMGLGKTLQVLTAILYFKEKGLLEERPSLIVVPPTLISNWEHEIRKFTPELSYYIYHGTNRRFPLEDYDIVLSSYGVIRNDLDLFLDKEWFLYIIDEAQNIKSPHTQQTKAIKEVNAYNKIALTGTPIENRLTDYWSIFDFTNKGYLSSLSDFKDSYVFRIERLEDERSLENFLAITKPFVMRRLKTDEQIKGELPDRIVNDIYASLSKKQIKLYNAVLDGIFEEIDELKGIERRGTILKTITSLKQTCNHPAQFLGSGKPKIKESGKMELLITILENIMDMDEKVLIFTQYVKMGEIIQDLVSKKLKREVLFLHGSQSRNEKAEIIDRFQEDDNYKILIATLKTGGVGLNLTAASNVIHYDLWWNPAVENQATDRVHRIGQEKDVMVYRFITKGTLEEEIDSIIKTKLDLAEKAISVDETFITEMTTEELKRALSLRL

SEQ ID NO: 5054 - protein, 144 aa, Methanobrevibacter ruminantium
MAEDEKIEEIEEIEDKEEENLPFAKAEVVRLMKENLDDDKMIRERVKVEMNKFLGDILKQVCEQLNDYPYTTIEYEMLKESIYPYTNIKRINQEKERILLHLNAIKADCDALAMDVEKTLKLKDVADEDAFTPLSEAQDEEMDE

SEQ ID NO: 5055 - protein, 171 aa, Methanobrevibacter ruminantium
MNEALTKLLDLMQDYNVILPNEFVSMARGISMIESVATTLDPKIDVMASIEPIVKEVMEERMNIKESLSNKKGSLVYYKNMLKTLPPLLTNSVHKINNGDMKLRFEIDRIDHIVSKFSLVVIIAALLMSSSITMTINRGPMLFDMPLIAVLGYIVTFILGAIAVANYIYSR

SEQ ID NO: 5056 - protein, 221 aa, Methanobrevibacter ruminantium
MKHRLNLDNKDPNYILLKEIFKIMDSRKSKSILASYGFKNLNRTIFTFKIIFISMFFGIDIPFILNELKSKKELRKYFNISEVLTADQVYKIFSEINSEKLIKCLNRILNSRNMVKRRGKKTFIVDATPVDVDINFHRNKKTKEHLEKINLKWSYSSSKGYYIGFKATVVLDYDSMNPVCILVHSGAPNDAKLFEEILENLQKRRIIRKGDTLIFDKGYYS

SEQ ID NO: 5057 - protein, 36 aa, Methanobrevibacter ruminantium
MDDILTYPLAVFNKTKRIMKEKRLYNSLKMELMKKK

SEQ ID NO: 5058 - protein, 43 aa, Methanobrevibacter ruminantium
MREIHKYTPKSVEKTVYLNVFLGALIISQGFYSKTTIQQLSEN

SEQ ID NO: 5059 - protein, 115 aa, Methanobrevibacter ruminantium
MIELNKKYVFHVPLYKYKDEELIPIDMDDILDELIDEFYQNGYDSLYMTNIETYYKYRFLTEILISIFVSTERLAKENQEFPDRIFKKWFKKNNKILEQEAFAYEYNNKMFIEKL

SEQ ID NO: 5060 - protein, 199 aa, Methanobrevibacter ruminantium
MTKDDIITGKQAIIKMDCPVCGGNKTANYITQTHELAYFGEIVESTIQCEKCGFRHSDIITTEQKDPAKHSLIITKKSLNSRVVRSQSATVSLPEIGIKVEPGPKSEGYISNVEGVLIRFKQATESALRMFDDEESQKNANAVLDKINQVLAGELETLLLIEDPFGQSKIMDVRAKSEPLSDEELKNLKTGFTVIDDEQ

SEQ ID NO: 5061 - protein, 315 aa, Methanobrevibacter ruminantium
MKPYVILIGSASGIGKSTVAAELAKTLNIKHLVETDFIREVVRGIIGKEYAPALHSSSYNAYSSLRNQENYKNQAELINAGFEEHASFVLPAVERVIDRAIKDHDDIILEGVHLIPGFIDIEQFTDKASVFFFILSSDEEDHKNRFVKRAMEIRRGGKQLDYFKENRIIHDHLIEQAQKHNVPIIKSYEIESTVKKMLSYINETCETIYLKNTVDELDKVGEIILDRYSGSIKNISYPIKGFKEPLIRKIDVSEIREYDKFIKNLNKFPEKKEELKELYSLTDYRAYRICAINNETIEKIKNDLDKEGLLFKEDM

SEQ ID NO: 5062 - protein, 350 aa, Methanobrevibacter ruminantium
MYSITSVEDLQELNPYVIIGCGGGGEKFSNLEGIETVGFLDDNPEKQGKLFCGLEVASNLSDLFESTDANTVAVMLPIGAEGAALKYAVEALANGKNAVVSFRSLSLCENESLLKLASQNDVVIKEISPRLDVVREICGTAPEKCCEVLPKISYEPKAKVVFVGGTSQECGKRTTTKSLGIEAEKRGMKAAVISTDEMGLEKPTVFNFRAGSLSAMDIPSAILSSMKYVEERDSPDIIFIEGQSSLTEDGNPHPRGLSACILIGANPDAVIVGHRPNHPYREPRGIDYEVKAIEAVVPTTKVVGLSINLRNKDEGMTVEDFEKEYGLPAADMYDGGASKLLDAILDYLDE

SEQ ID NO: 5063 - protein, 94 aa, Methanobrevibacter ruminantium
MTKMEIELNDEQLEKVKILESHDISVGDAIDMLFEARDRVISIIDDIDEKDLEDDTPNTEEAKAEQTQLTVKTYDIAIEDYKSHISWANDFFKL

SEQ ID NO: 5064 - protein, 114 aa, Methanobrevibacter ruminantium
MVVQEHICINEEKIQEHSLQLKSLESDADFKDKRMDELYRKIDKIEEKLDVLNNNINNFLLRNSQENKKMEIRLTKIETDIQNQKLESQRRIARMGIALTAITILINIYFKIMH

SEQ ID NO: 5065 - protein, 322 aa, Methanobrevibacter ruminantium
MKIAPMNKDKGGEKILDYSILNHKGFNSFEEKIKRIKVHKPYDKILKTSFKKNPNGFLEILEKGAIFEEFVDSEIINAFFRELHSDIIIRVYKKRIYIIEFQSSRLKLEDILRFGLYRASIAHQEKKDIHLYVVSKEPIKRDKIENKYGDYWFTIHVKSLTDMDYNKALNRTNNKIENEEEEFTEEDFVYLEISPLMTRKKKKQRQLLKRVAEMTNKLDGRISREKLIEIKSIQFVLATELLNDNEKAKIAKVISMQSEGKEEVFQGYLTKEERKQTYEEGREEEREEIVKSLAELDVSPDIIAKATKMSKAEIATLTTTII

SEQ ID NO: 5066 - protein, 169 aa, Methanobrevibacter ruminantium
MEYRLPRMEDEDDIRDFIRECCYVEECYVMLKQELLLSDYSKWVSLIHRYASLGNGKWGRSLLLLAYDGSRLVGILPIRYEISEDYAFLYGNIGYHVRPSLRNMGYATKMLKHGLEICKEKGMARVIVGCDRDNLASSAVIKKCGGVRLRTFNDSYGVNDYYGIYLSSE

SEQ ID NO: 5067 - protein, 217 aa, Methanobrevibacter ruminantium
MKTTSVIVLLVILGYGLKVTQDVINGGTSLPKISLKELLNFGVKGTIVYTFYLTIQASLLGLISLAMNFPEFELEEMILNLHETIELFFEHDPISFILFIILGLLIVYGTIFFMEIALAILADGETLKAAFDFKRIKRTVETIGWKEYAEDYTKIVAAVVILVFINGYFHSYGWISIIIGVLTDILAFTVEYRGIGNIYRGYKQKINQETALEDTSN

SEQ ID NO: 5068 - protein, 468 aa, Methanobrevibacter ruminantium
MKKTKIIASVGPASDSVEVMSDMVEMGMDCARINLSHANQEDILKIIDVVNEVRKICNVPLAIMYDTKGPEFRTSEFKHGGVLLNEGDTIKMSKTCIQGNKEEFGVNHKEAIDFINVGDKVLIDNALLEFEVIDKKEDYVLLKALGDGKILNHKTINVPGVDLKLDFISDVDKEDISFAAGHSCDYLALSFVNSGEDVIAARKIVEDAGGDALIISKIESRMGLMNLDEIIDESDGIMVARGDLGVEVPMEHLPIIQKDIIRKCREKGKFAIVATEMLASMYESPRPTRAEVSDVANAVLDGTDCVMLSGETTIGKHPVHAVEMMDRICNYVESTIDYSKHTFYKGKVAISDTIAKLVIGASEYSDIKLIVTPTLTGFTARKISNLRSSSAILACCPSNDIARKLVLNFGVKAVITDIYENTDEMIDNVVDIAKMEFDLNKGDLIVVTGGFPLGKTRNTNSLRILEID

SEQ ID NO: 5069 - protein, 496 aa, Methanobrevibacter ruminantium
MANENEWGSNLAFVLAMIGSAVGLGNIWRYPYVLYSNGGGAFYIPYLIAILVLAIPLIILEYGVVYNYKSSFTKAIVKIKPKLEFYGWILPVVTFIMTIYYSTILGWDGIYFILSFFKGWGSDPNTFLTVSLLQSADSISGILNFIPVIAISMIFIWLIIWFISHRNLDEGLGRVARYFVPMLFVIMIVIVAFSLTLPGASIGLAELFDPDWSLLYNYSIWMAAFGQIFFSLSLGMGAGFTFASYTKRDIDLISSGLCVVLANSLFENFAALGVFSILGYMSLESGVAVSKLVSQGTTLIFVAYPKVFNILGGVALILGPLFFFTVYVAGVTSILSSFEVLSISIQDKFAFSRKKATTALCIVGGLASMVFATSAGGYLLSIADIFVNNIMVLFSVIVQTILFAWVFKAERLVDFFNAKSRFLKLGRWWLILVKYICPILLTVIWIGELYNLIKMGSTEFVVILGVLLAILLIFAFIFTIRPAKTDEWFKTEERIK

SEQ ID NO: 5070 - protein, 205 aa, Methanobrevibacter ruminantium
MGEEELIDQYMKPHGEEGIKIIESMNEEHQNISEFAFECVNLGAYDDIIDIGCGGGVNIEKFLNVTNGHVDGLDYSDVSVSESIKRNQTSVDGGRCNVILGDVTDMPIGDESYDLATAFSTIFFWPNLVETFKEVKRIIKPNGQFMIAQGTDGTNPEDQEWIDTIAGINVYTANELEEYLLDAGFKRVDVFTKENTYLLVVIGKK

SEQ ID NO: 5071 - protein, 165 aa, Methanobrevibacter ruminantium
MDFNKEKFKMVLQYIIYKCGIKNTVGRTVLHKLLYFSDFNYFELYNKSLTNECYRKLARGPVPVHFESVVEELIDEKKISLKNRRLPCGKLMNRYFSLEKPEIDLKEDELAVIDEVIKDLSHMNGKMIGEYSLKDMPVKQAHDNGSIDYNLVFSRSLQYSKRTDD

SEQ ID NO: 5072 - protein, 118 aa, Methanobrevibacter ruminantium
MLDIPKEDPQVRRFIKLVKEEGYSYEKALEEVGADYIDERDWEYFGFNQREGDYRDFYNLRHPPKEHHYLSGSNSSSGSSSNKRQSSKWDDLKCYMSVLGPLIIIFAIAILWGVFKGG

SEQ ID NO: 5073 - protein, 161 aa, Methanobrevibacter ruminantium
MDSKKILVILGLTVLAIFLASSVSAGDLISTGGYNPDSLIILEGADFNIPDGFERIEDKSIANQTRNSGVFSSILNREVYGNPKGEEIVISVVDFDNFDANLPILSMICKGCQKKELLGYPGFIGSDGNSTKFSYVFDNKVVSISAPNEDLINQVLVVEDA

SEQ ID NO: 5074 - protein, 40 aa, Methanobrevibacter ruminantium
MAKINYSYSKKYCIIVFIMMFFMKRNYSKKNYKIGKTDIL

SEQ ID NO: 5075 - protein, 112 aa, Methanobrevibacter ruminantium
MKDLIGFCGLDCELCQAYIATINDDDELREEVAKHWSELNNVEISPEMINCMGCRVEGVKTPFCDFMCPIRQCALENNYDTCADCDKMEGCEKLVMIFENNDNAYKNLKHHY

SEQ ID NO: 5076 - protein, 182 aa, Methanobrevibacter ruminantium
MSRRFAVIDTETNWNDEVMSIGVLIARCKNFKRTDSRHYILPKAEAVGGMYSKSMRVTSHEILTKHRNDAIDDLRYLLDSNGVDDLFAYNASFDNRHLPELSDFCWRDIMKVAAYKQHNPSIPNHMPCFKTGRLRRGYGVEPMLQILGIEDYCESHNAIIDARDELKIMELLGYDIDFYPEI

SEQ ID NO: 5077 - protein, 202 aa, Methanobrevibacter ruminantium
MTVIMSTNTMGYADLDLRPAEMQRSTMYISINECPNCGYAEFDFSREPKIKREYLESEEYQSCEGIEFKSERSKPFYKAYLINRKEENTQNELNFLMHSIWSCDDSEDCENARKLRRIACQLLETILSNIEKHKEWADKDTLMLMKSDLMRRGEMFDELIEEYETVSFEDTLLNNINQFQIKKSKEKDSARYTIGTVISLYG

SEQ ID NO: 5078 - protein, 208 aa, Methanobrevibacter ruminantium
MNTKEKIFDVSLDLFSKRGYDSVSLREIAEEVGIKKSSIYSHYSSKEAILMDIFEYFTDLFEYDDLINSKELVLSEDNDVLIENPELFYHMGSEAIRGMFKEERNLKIWKLIFIQMHYNEKIRNFFQKEMLLKPLIFWENFFAILKEKGIIRADSNPQLLAKEYYSFPIFLLLEICAKYDDIPESCLDDFFKQAEEHARFLLDCVKVK

SEQ ID NO: 5079 - protein, 363 aa, Methanobrevibacter ruminantium
MDSKFNIQEYLANGVEVILKDAFKATLKNPKEGLYLAKFAKHARKASEIRREYSKKGQNIPVFLIASITSSCNLHCVGCYSRANNSCSDEAPLNQLSADDWEDIFKQARDIGISFIVLAGGEPMIREDVIKKASKFPEILFPIFTNGTMLNEDYLKLLDKNRNLVPILSIEGDEKLTDSRRGSGVYKQLMDSMETMKKKNIVFGASLTFTKGNISSLLSRDYIEKLHDLGCKVVFFIEYVPVNEETVDLAPSDSERELLLSELDELRSDYSDMLFLSFPGDEKESGGCLAAGRGFFHINSHGGAEPCPASPYSDINVCETSLLEALESNLFRSLRDGGLLLDDHEGGCVLFEHKEEVESLFDN

SEQ ID NO: 5080 - protein, 137 aa, Methanobrevibacter ruminantium
MSFTDNLKKSLGFEEGEYGSGYTFDEGYNGEPDPFFEGILIPYKFPETKAFMEIILIKPKSVDDMDYIFDQVVEENNPVIMDLSFMEKKGAAEFKQAGEKLKVLRQQYNAEAILLSKSDDKNLIIVTPARVKLIRKE

SEQ ID NO: 5081 - protein, 251 aa, Methanobrevibacter ruminantium
MIDTHMHADARSSEDFEKMFIGGIDTAISCSYYPYKVNNAEILLNHLNRILNFEPKRAMEYGLELKIALGIHPANSIKDNEIIFDSLKEWIDNKDIIAIGEIGLDENTELEKEVFKKQLELAEETKSKVIVHTPRKNKLEVLKDIKEIALENINPKLVVIDHINLNTIEEIIDDDFTIGLTVQPQKMEVEEAIEILDKYDFDKFLLNSDISNKPSDPLSVPKTVRTLKRLGYKQDKIDKVAFKNAESFFNL

SEQ ID NO: 5082 - protein, 270 aa, Methanobrevibacter ruminantium
MYYHDYVKEQLRFLNNSEIRLRILAYLSKKPFSLADFKNSSFVSYSSISSNVYKLTDEGFVEKIDKNNFRLTNIGKIYLISLMEFHDTINTVNNFSDFWLDHDVRALSSKYLKRISQLEGSKLIQSRPTDIYKTHEEFRNLFKDSDILKVIFPYLHPEYPRLIRTLLSNGSKIEILVPRVICRRFIKSVGESLVRSSIKQNALSIKFIDDEVKLALAISNKWVSIGLFKRDGSYDQSRLLVSDKKDAIKWAYNIFKSYDKKAELVDLRSL

SEQ ID NO: 5083 - protein, 272 aa, Methanobrevibacter ruminantium
MIGDINFELDSENFRIMRFLLSSFMRTDLLLTLVNSSSRLCSLRSNLGKSSATILHGVSELEAFNLISKDSKYYCLSSKGFIYGLALDKLCKNLYIFQSNPEFWQNHFIDGLPSEFVENAYLIKDSVYICSDKLDMEKPIRDYFKNIKNSKSIKIILPIFSELYLEMILKTVGSDHDLELIVDEEVFTSIKKSRYYRRIIRLSKGGKIILRKYIGDLNLFLTFSDEFMSLNLFDKDGFFDDSETIFNNTPDGVKWAEIMFDYFLDNSNVVVL

SEQ ID NO: 5084 - protein, 570 aa, Methanobrevibacter ruminantium
MNHEKMSNIARKRGFLWPSFEIYSGVSGFTDYGPLGASLKNNIMQKWRKQYIAGEGFHEIEGPTVMPKEVLKASGHVDNFTDPMTKCKDCGEVFRADHIIEEAIGEDVESLENEEMDEIVRKNDIKCPSCGGELANIWNYNLMFKTEIGAKGDKVGYMRPETAQGIFILFKRLSRFFKNKLPFGAVQLGKAYRNEISPRQGVIRLREFTQAEAEIFLDPRDKTHPKFSQIADEILYLSSQDVQINNKETLEITAQEALDQGVVSSETLIYQLYLARKFLKELGIPDEVLRFRQHLPGEMAHYALDCWDVECLTDQYGWVEIIGIADRGDYDLKAHTEFSNEELSIYIEYDEPKLVKKTIVKPNLKLFGPAFKGDSPKIKTYIENLSDEEVIELKEKIESKGKFTLELDQSFEILKEHLLFEDIEEEVKGERIIPHVIEPSFGIDRILYCTLLHSFKTEEDGFDKEYFKFANEIAPIQVSVFPLMNRDGLGEIATEITHNLREAGFTVDNDTSGTIGKRYARADEVGVPIAITVDYDTKEDDTVTVRNRDTEEQERVKIEDLKEVIETKYL

SEQ ID NO: 5085 - protein, 195 aa, Methanobrevibacter ruminantium
MAILSDRDIKKYLNEGKITIDPLEDEKQIQPSSVDMRLGDEFKVFKVIRKPFIDPKDPEDLASYMESTIVPEGDAFIIHPNEFALATTYEYVKIPDDLVARVEGRSSMGRLGVTMHVTAGFIDPGFEGRITLEISNIGAMPVALYPGQRVCQLVFETMTSPSELPYGHPERNSKYMRQRRPESSRIKFDYELNEK

SEQ ID NO: 5086 - protein, 291 aa, Methanobrevibacter ruminantium
MRKGFYEDISTFLVKHTFHTRFFLSRLTKKSKIAKKIIDRLLFQGDEVYVLPNKNTVQKTKSATISANIEVNQSFQKDDSEFVPSEILKIAIREASDIVIMNKCLCRSSNDCQDYPQDLGCIFLGPASRKIASKYGRRATVEEALAHVDKADAEGLSHVIGRNKIDTIWMHVSPKEELLTICHCCPCCCLWKVLPDLDNDISDKIMRLEDVEVHPISDNCKMCKKCLGDDICFGGAISLENDKITIDQNKCVGCGHCVQTCKFNAIELNYTQKSVDSVLNRIGELVDYKKH

SEQ ID NO: 5087 - protein, 263 aa, Methanobrevibacter ruminantium
MKYKDKKSERGKVKEIVEDEETIRLKENIYVVFVECESPGNVGFLARTMGNFGLNKLVLINPCTLKEEAYYQATHARDTVENAMIYDTVGEFVKDKKIDFIIGSTGAPGGSYNISRIPLKPEELAKSMNYNDKIAILFGREGNGLTNAEVDMCDLIVSIPTDPSYPIMNISHAAAIILYEIFKNRNEFPVQGLEESTAIEKEYLIKDMEELIDNLNIPEHKKKNGLKVFKNIVNRAFITGREAHTLIGILRRLNLKIKHGDEY

SEQ ID NO: 5088 - protein, 508 aa, Methanobrevibacter ruminantium
MITVYVKRFDSEKDEEPHIEAYEIEESPGMKVLDALEEINRKYNADISFRSSCKAGQCGSCGVKINGNGALACKAQIKDNRLIEPLDFPVIKDLVVDRSSADEKVKQLQLSLNCDDETAHEKLNPKDIKDTKKVRSCIECYTCLSTCPVVKHFKEDFLGPYYLRYLSKFDFDPRDESDRLIEALDSGMYNCTSCGKCGSICPKSINSFGDAIEKLRAMAYARDLGPLDAHKMFRENVVASGRSVSKPEEPFIETIHKKWDEEGKYYTDDESNDENKNKEKVALFTGCMVDYRAQEVGYALIDVLKANNIEIDIPEGQVCCGSPLLRTGQVDAVQELVDKNKEVFKDYDKVITICAGCGATLKNDHPKYGSNLNVEDISEFLVDKLDTSKMKPLNTKVTWHDPCHLSRGQNIKDQPRDIIEMIPGVEFEELELPCQCCGAGGGIKSGRPDIALELAKDKAEMVRVTGADYVTTICPFCQINLQDGLNAIGLDNVKTLNLIQLLKMAYDE

SEQ ID NO: 5089 - protein, 663 aa, Methanobrevibacter ruminantium
MAYDQLVTSEKGDKLFLLGNEAAVRGAIEAGVSVAATYPGTPSSEIGNILSVVAKSADMYFEFSANEKVAMEVAATAAASGLRSFTFMKHVGLNVAADSFMTTAYSGVKGGMIILVADDPSLFSSQNEQDTRNYSRLSSIPILEPSNPQEIKDMMVYGFDLSEQFGIPVILRTSTRVSHMRGIVEMGEINSPKSTTKEVKSDKHWLKGYFVKNPREFVPVPANALAMHERLVEKIGKIEDEANESPVNEVVSFESGVLQGKYGVISSGGAFNYAYDIVAGENLGMDILKIALSYPTPKDLIYDFCKNLEGVFIVEEVDPILEKDVLAVLGEKNLDCPVYGKIDGTFPMVHEFNPDIVKESFNKVISDLADDEELKAEYKDEFGKDLTGDLIETVEKMEFSQSLNDLVDNIPTRAPTLCAGCSHRSAYFASVKAYEELGYDKEDMIFASDIGCYTLGISPPYETADYLLAMGSSVGDGCGFSIATNQHVMSFIGDSTFFHSGLSPLVNAVHNKNKFVLTILDNRITAMTGGQPNPGIPIDGMGDEAPAISIEDIVEAIGVKFLKIVNPHNIKKTVDIYKEALEYDGVAVVIARYPCTLIKGQKRKPVMEIKDSCVKCLHCVEKLACPAISYLDDKVTVDEALCKGCTVCIQICPNKAIGVKKGD

SEQ ID NO: 5090 - protein, 212 aa, Methanobrevibacter ruminantium
MDNINSSSSNSDNSDVNYSIYISGVGGQGIIKTSVIIGEAAMLEGYDVVMSEIHGMSQRGGSVSTELKIGNFKSSIVEENKADLILAFEPIEVLRGLDKANKDTALIFNTFPIVPSTLTQTGETYPDIGDIIKNLKDNFDSVYPVEGNGLAKDAGSILSLNMVLLGACVANDSFPLSKETVETAMKHNLAPKFHEMNLKAIENGYNAIKDSL

SEQ ID NO: 5091 - protein, 196 aa, Methanobrevibacter ruminantium
MNGGVKIESTDIRYFYRNIVKSGKKYRIKHNNKDYGEFSKLSDALYERDCLFYCKFDYDLLVECDLPNKYENMELPPFPEHRPRGQIKGLKFNKKEREGEIVFDHKERKFCVIRGEEHFGKYNTMVEAYYVKKILMENDWDKACLIQNKRIREDIFLNQKIKASTPKLNKYCPNCGNKVKEEDIICKICGIRLVKD

SEQ ID NO: 5092 - protein, 612 aa, Methanobrevibacter ruminantium
MKGNILKNIDEIIKSDFKSAFSNPIVVIVLIGIIILPSLYAVLNIYACWDPYGNTDEVVFAIANLDNGSTFKGDYINIGNELVTEFKNNNDFKWTFVSEENLRTGVFNGTYYAGIVIPKNLSENVVSIATDNPKQAKLEYVVNVKTNPVASKLTDSAANRIYMALNAKIVKIIDLAAYEKLGELQKGLASGSQQLSSGGYQLQSGSAQISSGSHQVSSGAKQVKDGKQQVSTGAETVKSKASDLDEGAQTVQEGSNYINQKSEELQQGSDEVQAAADPSLMPDGPVKDYVDASVELANGSGELAKGSSQLANGSVQLANGSVQLANGSVQLADGSVQLADGSVQLADGSVSLAAGAQLLSSYAVQALFTASSSLGATANELGSVTGINKTLLGNYLYAPIALEREEMFSVPDYGSDIAPFYIVLSMWVGAILTCVMLKTGLSTGTKYSALEMYGGKLVIFVILSILQACVTIIGCNILGIHIVNLPLFIFSCILVSVVFMILVYSIISALGQVGKAIAVVLLVLQISATGGIYPIQIMHGFFQTLYSYMPMTYGITLVREAQLGTVWSNYWPALAILFAIGIITVIVALLIKVKADKASHYFEKRLEESGLF

SEQ ID NO: 5093 - protein, 91 aa, Methanobrevibacter ruminantium
MYEDKLYDKAERRVDEKIKFYRHLYSYIAVNVILAVINLIFFKGDWWFLWVSLFWGIGLVSHFIKTFVIFNYFDDHHRDSMIENEMAKMRK

SEQ ID NO: 5094 - protein, 148 aa, Methanobrevibacter ruminantium
MDKKMIVSVAFLLLILAVALVSVFDESNSSESKVNLIVYSEGPKSLSELVNEIKTQDYYEGYDNETVAWMESLGNKKFYYGDGIIVIMSATDASKLPSLYVTDVELFEHFECNVLEKRSLGNVEYPKDVLYVKNVKYIGEEYGNFSGA

SEQ ID NO: 5095 - protein, 153 aa, Methanobrevibacter ruminantium
MKVQLFVSKDLEEPYAEIYTDNLTDNIQKAMVLLENDESDDDVDEGNSILAVKKGSDIVLLDFEDIFMIKVEDKQTKVFSQNAEYSIKKPLYQIEESLDSDFVRISKSTIVNLRKIKRVAPSLRGMMFIELKNGLKDNISRKYLTDFKKALDL

SEQ ID NO: 5096 - protein, 143 aa, Methanobrevibacter ruminantium
MEIIKRIGIGAFVGCFVVMLVMVLGTYSLGPQNVSFSGTEIINAFFGSIVVGWAFAFSGLIYEKEDIPLPIQVIFQMVIGLGTLFAVAVYLGWMPISLGIGPIITWIVIAIAFAAVFWLGFYLYYTFLARDINKKIELSNDFD

SEQ ID NO: 5097 - protein, 379 aa, Methanobrevibacter ruminantium
MKTIVNGLILKGLELEAKKENILIDDDGTILEISKEVKEGEIIDADNKIVCPRFLNAHTHIGDSIIKDEGEGLSLDEVVKPPHGIKHVALESADDDVLIEAMRESMWDMYNMGVSHFIDYREGGLDGVKLLKEAAKDIPITPIILARDSSFYGEDANYHMVKMALKKLLKESDGIGLSGFGEISTTVAEIICERCEREDKISSIHVAENELNQIASLEKTGKSEPQRAFEAGFNQIVHMTNPKNDDVELLARSDSSLTVCPRSNGALAVGVVPLYEILNKGVRPLIGTDNIMINSPNMFRELEFTLKIMKGVSRNHIDAREILKMATTNADSSISNLPIDKSYIGEGQKAELMIVNKKSNNPYLSLINRTEANDIVKII

SEQ ID NO: 5098 - protein, 291 aa, Methanobrevibacter ruminantium
MIVKDVASTDVIHVTVPGSRDEALRIMKKEDVSVVPVIKKETGKLVGILTRSDMITNPDEEQIAMLMTRNLITAKMDDELSTVAEKMVTNDIRRVPVINDDDELVGIVTSFDIVSLAIADMGIKDPVENYMIKTIPSTWDETPLNVAFEVMKFFGLKSVIGLNSNNKMTGILTETDFIAESEIISERTEHSSSVGTEGDKWSWDSTSVLYIEKNHLKFTDKVFKDVASGDVVTANTKTKVSVCTEKMKSLDVEQLPVLGIEGELVGLVRASDLIKSFIIGFNFSFSFIFTF

SEQ ID NO: 5099 - protein, 359 aa, Methanobrevibacter ruminantium
MKANPKIEKVKQILKDYKKIALAFSAGADSTLLAYLAKESDCDVLAITYDNQIFPEGFLEFAKRRADELGIKHEIIENSFLMIYDVAHNTPQRCLTCRRLMYGSIKQVANERGYDIIIDGNNITDLIHDRPGILMKYANGIESPLIDANLESYEIHDFLEENDIEYSKSTTCLATRVKANETVTEDKVNRIDYCEGFIKSTIGADVVKLREEKNIATIELGNNDSKKILDKEKLEIIFNELKEAQYDKILLNIDFTEDEEELILDSELQKGKENLILRKKLPFDIEISKTGKVINEADNEFISDIQTIEEIGYIKLKIDKKESKIFRDGKISIENNKNKEDAKESLVKILPLIRRAKPF

SEQ ID NO: 5100 - protein, 213 aa, Methanobrevibacter ruminantium
MTKIIVYLGLSIQEEEAKTILDADYRTPVKRGDILKAISEKPDIIGIIDGVFHHTPAVAHKEIMKALKMGITVVGASSMGALRASELDDLGMIGIGYVYKAYRSGKITSDDDVALSFDPERNVPISEALVNIDYKLDLAVKEEIISEEDKEYIHNIAKDIYYPKRSYQYIFSKVEMEDEKKTKLIDFILKEKDIKYLDAIEALEYIKSISEEE

SEQ ID NO: 5101 - protein, 419 aa, Methanobrevibacter ruminantium
MFEDVEIQFFKGTHRVRDPKETIEINENKLRTAGITRLTEITDLDRIKIPVFSAIRPTAQEGGVSVYAGKGATKEQAKASAMMEGFERYSAERQDIDNERTFVDTYNNIKSSQELKALDPRDLLLPKNFTTQNVENSRLEWIESKDIISEETIYVPSNAVFHPYIPTREVIPSPLAIFKGNTNGLASGNIIEESVLHGIFEVVERDAWSLFELTKRNKKEINQDTIENDIINELLAKFNNEGINIKLMDITADLKITTVAASADDTVLKDPALLTLGVGTHLDPNIAVIRALTEVAQSRATQIHGTREDTIRADFMRKSSYEGMKRMNKHYFQKEEDTIDLSDIEDKSSHSIKKDIETSIEEVQKVGFDKVLYTDLTREEIGINVARVIIPKAELYSLDEERLGTRALEYDRKARRGLV

SEQ ID NO: 5102 - protein, 347 aa, Methanobrevibacter ruminantium
MVSSENKVHDFHIKNILKRLEEKDLDAMMVANFNNIYYLSGYLSTSFAFMIVKENPIIFVSGMDLENANNNSSIDIIKYESADQMVEYLNEEEIKDLAIESDLTANAYQKFKDFNLTISPAISIERMIKTDDEIDKIFKAGEIAHKSLLELDVRSKQEKGAEEWECAYELGYLMRKNGASTESFDTIFASGPVSSLPHSTPRHHKLDTPVLVDYGCKFEGYCSDTTRTFVYNEKQEEISKIVLEAHDKAIKAVKEGVKSCEVDKVARDIITEYGYGDKFIHSTGHSFGLDIHESPSLSLKDETILEKNMFVTIEPGIYLEGEFGVRIEDMVLVDKKAKIVGNLPPIL

SEQ ID NO: 5103 - protein, 309 aa, Methanobrevibacter ruminantium
MFVEDLINNLSNFIESRLSDKILIFLQEYFLKAGIFTLASQIIAILFISIVFTLILALMIALLFSFDILMAILLAIFIPLLSFILFVFIKSERRREELENSIPDFLRQLASMLRVGMSLENALVDLSEHGNGPLYDELRRVVVEIRMGKSFDESFRNMAKRLDSKDLERSFKIILNAHKSGGGLADVISDVSDDLRAMLILKRERKSSVMMSIMFLVLASVVAAPFALGMVGVYSSFMIELNRSSAICQLAPTVALIYLIIHSILAGFLIALIMYGDIKKGVKFSIPITALAFFLFYLINVFGLSFFGF

SEQ ID NO: 5104 - protein, 74 aa, Methanobrevibacter ruminantium
MFSIYLKNDFNRLFKEDKAQGSVELILLIGGIIVIVLVCMFVYKSYMGGLGDELESNELESLNNSFEELSSKFE

SEQ ID NO: 5105 - protein, 471 aa, Methanobrevibacter ruminantium
MKVLIDGEDFDSGDHYEVKNPYDGELVDTVPICFRQDVDRAIDAANRAKKELQDMSAKEVSNNLYSAYEELESRSEELAKLIVLEAGKPIKQAIGELNRSCETLKFAAEEAKRIYGESVPIDATGSVDERFLAFTKKVPLGVVGAITPFNYPVNLALHKIAPAIAAKNAVVVKPSTEAPLAALKLVEIIDNHFPNGVINSVTGYGSEVGDALVVSEGIDKISFTGSIATGLFISSRAGMKKLTLELGGNDPLVVLEDADIEKAVSAAVSGAFLFSGQVCIGVKRIILDNKIADEFIDLFVKEASKLKMGNPMDESTDIGPLINENASINVETAVNNAIKDGAELILGGNRKDCFYEPTILDGVNMSMDLVANETFGPVAPIIRVDRIDEAIKVANDTRYGLQAGVFTENVHSALRCANEIDAGSVLINKESTFRTDAMPFGGFKSSGMGKEGIKYAVEDMCKFKLIAFNCR

SEQ ID NO: 5106 - protein, 241 aa, Methanobrevibacter ruminantium
MWDTAKDYRILVAMHARELFLRTVQTGSFRGNWNKKATIEETKKMEADLKSLLYCYLEGDALANCEDVQKLEDKAGRIIEFLGGEDWNHKFMQGAPKDEREKTEENIAKVRFFLDTILGLRNRFKFGPIDDPIMGIDVKVGEIMSVSKHPKADSLMICNVNIGKRALKVVTNDLTVKEGNRVGVSLLPPATFMDVVSEGMFLGMNGSILKEVQGDLGNMPNGIPMESLNETKNMITAFLDS

SEQ ID NO: 5107 - protein, 138 aa, Methanobrevibacter ruminantium
MVEVTQLYDLDIYTLAGQYVGQVHDVVLNIRYGTISRLQVKALEPEKKSAGFRDIFRGGFQFVPEEEVGRTYQEGLLNIEFDRVTAIGDIMLIDPQDLKRPKPPVAGEEMSIRPRPEAPKQVPQEVPQEVAPKPKEVI

SEQ ID NO: 5108 - protein, 253 aa, Methanobrevibacter ruminantium
MIVGILGCGAIANTIVNEFLSDDGIDIKYFYDTDIERAENLAQISNGIAVLEMDEMLDNVDLVLESASPIALKVHALNIIENGKDLMVMSVGALMDKEFRQKIHKAAQANNAKVYAPSGAIVGLDGIKAASIGKIKKASLTTRKSPKSLGREVEEEEILFEGKASEAVERFPVNINVAASLSIACNMDIDVKIIVDPKVDRNVHEVLVQGDFGEFRSSSENVPFAANPKTSMLAAFSAIKLLKSFSECFSVGT

SEQ ID NO: 5109 - protein, 252 aa, Methanobrevibacter ruminantium
MKDYEIYSNLKVPKNSNIILRLDGRKFHSLAKYLALKKPYDNNFAKLMSEVSLDIFNQFSPKFIYTFSDEISILLDEIPFLGRVEKLNSVFSSIASSSFTYHLLNDFKDDFNMDKLDEDDRNVIFPVSFDSRVIPIVNEDIYDYFKWRQDEAWRNCVNAYGIWALKKEFSPQIANEKIKGLKSSEIHELLFKKGINLNDVDTWKKRGIGIYKIENQIEGFNPVKEEKTVSYRSEVFVDYELELFNKEYFYRF

SEQ ID NO: 5110 - protein, 306 aa, Methanobrevibacter ruminantium
MGFKDLISKLNEKNHFEKVCIDQTVIDSIIYYSKKSYPDEFLAMFDGFVKNEVLYISGLIFLGGERSHTSASFNDWLLPPDQKKWGTVHSHPGLNARPSGADLTTFSKYGSFHIILCEPYSLETMMAYDSYGNMRGFEVGNFVDGKDDEIYKDLEELRKEIEEEDGELTPSIFDLDQDLSFFDSEEVKTNKYSHELEDEFGNLALDNDGSNDFDSNNFSEDINSNNPNSNDFTSNRFYPSRNVSDEDLGSIDLNPQVIRIGGEKVNGQSPKLGIIIEFRDGKPILKSYTVDSQENEDSQEKEDSDK

SEQ ID NO: 5111 - protein, 524 aa, Methanobrevibacter ruminantium
MKALVADAINEKGIENLKEVCDVVVDTSITPEELLETIGEYDAILIRSRTKLPAEVIEKADNLKIIARAGVGVDNVDVNAATKKGIMVVNAPESTSITVAEHTMGLILSTIRKIAIADKSTKAGKWEKKAFMGMELRNKTLGVIGMGRIGSQVVNRCKAFEMDAIAYDPYLPPEVAKNMGVELYEDIEDVLTRADIITIHVPLTPETEHSISTEQFKMMKDTALIFNCARGGVIDEDALYEALVNGEILGAGLDVYEKEPATNNKLFELDNIVCTPHIAASTKEAQRDAAIIVANEVITLFKGGMPKNIINMPRMNNSEFEETNDYLELCEKLGSFITQATSSPINKLEITYKGEINKLPSKDLFTRTILQGILNPVTETAVNAVNATTVAKARGISITEAVSDDSEGYDTLIKVAAKTKEGQMSAEGTYLHEAKIIKVNGYWVDVKPEGNMFIAKYKDIPGSIGAIGTKFGEENINIGIMQVGRDSTGGEAIMILTLDERPSKEAVKKIKDLDNVSDATCLKL

SEQ ID NO: 5112 - protein, 112 aa, Methanobrevibacter ruminantium
MVKFEEFPISSANYIPGYKVVEEKGFVYGLTVRARGLGGDIGAGLKGILGGEIKQYVKMMEESREESIGRCIEHAKELGANAIISVRLDSDSISQNMQEVLAYGTAVVIEKE

SEQ ID NO: 5113 - protein, 257 aa, Methanobrevibacter ruminantium
MVLGNAPFLADAYFGHRTRLYNLDLLRNPNNVSKIIEKSYDCGVRSINLANKENLLKAFGMACDNGVEMQAVSTIGKTEMDYVIPDYDEARREATWKEDIENLAQFDNSIMLVDEFLIDSYDWDFITDILDAINDTGIPSGIITSFPFKTSLELIDSPLLEDKNLFDFYMIPVNKLGYMMDVPHFKSDKQEELKLMLDKIDKKIIINKILAVGIQRPEEAFNFLNTLDFADMVSVGIASEREAEETFGIFKQNLDFF

SEQ ID NO: 5114 - protein, 269 aa, Methanobrevibacter ruminantium
MDYLKKIPAIRWKDGKYEEVEEKTVSDENIYFYIDLLPPRKFSTYPADLEDFGVGYCLGDGLVNSYDDILSIDIDGKHITIKTKFNHGADEDNKEADEEKPDVDADVLGYQSVMSDSAGGWRSELKKIEPIESDLVVNASEIIENMKRLTAKAEIWQATGSVHVAQLVYGDKFITREDVSRHVAVDKVIGAAAKAGFDLSKCYVTYSGRMPADMVIKMVRVGVPILVSNAAPAGSGYEVAVKGNITLVGFVRSNRFNVYASTSRIDLDK

SEQ ID NO: 5115 - protein, 143 aa, Methanobrevibacter ruminantium
MSDENKDNRVYNLLITKGTDPEGQYEFYKERIDSQKDFLYAEYNTQDNELNDDLFEEVDVIVLLYGLYHDNTEICDELIKKSKELSIPFLLVRSFGVEWILQDLESKADAVVGWNGHCIVDAIKTLVDGGGEWIKPCDIEEEY

SEQ ID NO: 5116 - protein, 55 aa, Methanobrevibacter ruminantium
MELNSKHYTIILIIAIIIAVIMTYMTGIKNPIIIGLCILAIIVILANLYLTKLKK

SEQ ID NO: 5117 - protein, 326 aa, Methanobrevibacter ruminantium
MAVTNRNQLIREVYQLLNKEGFETSNIYDQSCFDIVARKKLLILLLKILVNIDSINESHVEEIRQISNVFLASPIIVGLKSKNHILEEDVVYERHGLPAIGLQTLKNMIIYDEYPEILADRGGYYVQINGNVLKEYREEYNLSLKDLADLAHVSRATMYKYENGMVRANTETAMLLEEILNTKITLDIDLFEPYQEDIKLKADTSNLNQTQGTNAQNLAKLGFGVVSTNKSPFDALAKAEIATKKKDNPLIANLNVQDEQNTKTLKKMAISLKDLSLVTSSDPFFVLADDKIKDSIDGIPVIKSWEMKEFENSKEFLKLIKERRNN

SEQ ID NO: 5118 - protein, 430 aa, Methanobrevibacter ruminantium
MEILYFYSSSVIIMDYFYIGIDDTDSPDGMCTTFLASSILNEFERSNIKIIDYPRLIRLNPFARFKTRGNGGVSFKLDIDEDTDLAKEIVLGYVRELSMFDCDNTNPGVVFYEGEITEEMVDYAFKAIYSIITIEEAEEFANHIGAEIYKFKKGRGIIGSIAAISCPLEDYTYELLAYREPSRYGTLRNIDYDSVVRMDKETYPETFENIDGKYLAIEPKTPCPVLYGIRSNSPEVLEKAREMVIPNETIADSCIFKTNQHTDMHIQNADRISDMKQYSCYRIRGTVKERPHIIEGGHMFFTLYDDSGEIECGAYEPTKDFRKIVAKLREGDVIELYGGIGEQNTFNIEKFQVIKLNEFVYRNPVCGCGKRMSSAGRGKGFKCKSCGKRIESDEKVPEKIDRTLINGKFYETPVSARRHLSKPLIRMDLD

SEQ ID NO: 5119 - protein, 416 aa, Methanobrevibacter ruminantium
MAIGVKEIKITDTISILLLPLIYALVLGLALYLAKPIKFIGRKQSKVAEGAMVLFIGVLITKLAISSGQAIASIFQVGPALLLQQIGNLGTLIALPIALFFGFRREVIGMTSSICREPNLGVIIDKYGFKSPETRGVLAVFVIGSILGTPFISFLSSISASLIPMHPYAYAMASGVGSASMNAAALAPLMHMFPSMATDLEAFAGCSNLLSFCFGIYMCIFVSLPLAERMYKWLSPHIGHDKEETIDDEYAIEGVKHDKYASKEELSSGKIKRWATFLLIFSFTVAVGNYIGYHTSLLDSFIGMIIISLITILGMSLERIIPWNIQSIIYISLIGIIVAIPGMPTADFIVRYVSQIDLTTICTAFLAYVGIAIGNDWEEFKKIGWRGIIITLIVISGTYLCSAGIAHLTLVATGMV

SEQ ID NO: 5120 - protein, 987 aa, Methanobrevibacter ruminantium
MGGEIINNEKLKLILILTLIFSILIMNTVNASDNGIIAEYADISTIPNDEKVSINENDYDTNYYELPDKKLDHLESNDNQNHLEMNDKKLNDGNSNNDFNYIQELINSHKDGDSIFLEDKTYIGNGSPIIINKNLNIYGYGYKNLSDLDIKTILDGNSKSNIFIINKGIQLNLYGLSLINGNTSYEDGGAIYNNGLLSIDSCSISNNNAGGGAVYSSEGSEIEIYNSLFENNSGLLGGALDLENANAIISKSTFKGNRCNGDGGAIYNNIGKLTISNSTFSFNKGARGGVIYNNHGTLSIYDCEMFLNSASQLGGTVKNWGSCEIYNSTIKNNTADMYGGGLYTFEFKMTVNDCLIENNYADEGGGLFADADSRLIVINSTIINNNAKIGGGIDAKQAYLTVNNSSIINNNAKSNGGGIYADKHPAEIHNTNIKDNNGNSGGGVFIGDISAKISDSTLNGNSGETGGAIFNKGKLIIEKSTLNSNEANYGGAIYNQKNLTVNKSSFDSNKAYEAAGIYNLGDFLIESSNFTKQSVSHKAGVILSVNGNIKIKDSIFKQTSGADEGGVIFTREGNIFIDSSLFLLNNALSYGAAIDNSAIMTIQNSLFSRNKAFGAGAIDNGGDLTVTNSTFTNNKVTNNGGAIDNNGKLYMSGSVLVNNTAQNYGGAIISRKDTNIEYCQILDNSAPEGDGLYDSGDYLLISNNWWGENNPNFDELLNFNIDEDFKWIEMNFTNSTPLMQKKVSNLTISLNGKDKNNNSFKLENPDKLPILKSSIQVVSEDSKIKYNLNIVNGSASTSTDMKLAKTVNAILDNEIVSLDVLENNESDDDSEDSDDSNDSNDESDNPNNSNDNSDNVTDDSDDSNKSNNPNNHQSNGNKNNDNNKNYYNKNGLRYSKMKNSLLNSIDSNLDNDYLNLKENNENNDDSNSNNKDMNYSDKKTDLNNESSNKEIDENETKLFDINYSLLIIPIALILLVLFAFRRKNKDD

SEQ ID NO: 5121 - protein, 477 aa, Methanobrevibacter ruminantium
MIIHELSRFLIDLKYDDIPKESIEKAKLCFLDYLSVYFRGLESENSKIAIKTIYKLFGDNFNSLNKAFINGIASHSLDLDDGHRLAQLHPGSIVFSSLLALISDKSLDLDISTEKFIESIVAGYEVAIALGILVNPNHRNQGFHSTGTIGTIAAGAVASKILNLNLEQTEHCLGLCTTQSAGLLEADHAGTMGKSFHVGNACYGGIISAFLAKNGFTGGESIIDGKEGFLKAMSLKTYEDYLDADNNDLDYLRISKFLEDNLGKFHINEVYLKKFPFCRHIHSSIDSTLYLKESIVNSDDFDSLDSIGLDSIDSIEVKTYKIASEHDNFNPKNPQDLKQSLPYAVAISLVLNDLSLDSIDELKDDGLFDEKSNKEYVLKIKEIISKINIIYDKDLDDLAPQMRPSQVTIKFKDNSRDSIKHTVYYPLGEVENPLSEEDILEKFKLLNPKFNIDKLQIIKHMEEYSIDELFRELDLID

SEQ ID NO: 5122 - protein, 291 aa, Methanobrevibacter ruminantium
MDETKNSLKELGINELHDDYVSQKRFEDGGQYRFEVPGIQGPSALESLLNACDDFDLTIHRATQTKGIMFLLDEEIEDMVDLADDANIQLFLAVGPRAPYDTSATVQTEEGKRIGYRLRGYKNLVYAIEDVKRAVGLGVRGILLYDEGLLFALSKMRENGELPSDLKFKLSAHAGCSNPASAKLFESIGLNSLNPVRDLQIPMLASLRDAIDIPIDVHTENPKSTGGFIRHYEVPEMIKVASPIYLKTGGSVAKHHSWDTTDQEARQRAKQVALIRDLIERFYPEAQMSKL

SEQ ID NO: 5123 - protein, 294 aa, Methanobrevibacter ruminantium
MDLIKKVEDAVVKAGSGYSEDRLTAYENALRLEEEKGNENAVWALEQMIENFKVAKENKLPLCDDTGIPHIIIEIGYNREIPKNFFNDINAGIANGLDKLPGRPMAVKGNDIERIEQSKGLYAESNMMKPASFLIEEKDDSTYGRKIGIDDDKIRINVLLEGGGPEIRAKTYRVFHKRDSNIVFNEALSWLKESLSMLGCTPSIPAIGIGRSHFEANSLMLRAMVHGNLNDQSDIEKYIADELNKTNIGPLGLGGVTTVLGSFVNIGYQRASGVRIVAVRPACFVEPRVSSFEF

SEQ ID NO: 5124 - protein, 282 aa, Methanobrevibacter ruminantium
MSDDQKPYKNGFKFPEQSIRTKITEVSPNRLSTRGFNQEDLIENLSYSENVFLILRGRLPDEKEAKIFNHILVSFCDHGVTPPSTQSARLIASSGASINNAVAGGLLSFGKNHAGAIEKAMALFQESISGLNLEETDPDDENKRIALLAIEIVNRYEGESKRVPGFGHRYHDKDPRAAKLIDLAIQESAIGPHTKLALAIESILNEKKGICLNVDGANAGLLSDLGFDSDLGLGIFMIGRLPGLIAHAFEEMQEEEKFRRFCDLENIVYEGFKNKRIDDGEE

SEQ ID NO: 5125 - protein, 169 aa, Methanobrevibacter ruminantium
MEFFDVIEKRYSMRGFEDKEVEQEKLDKILKAAQIAPTGVNFQPFKVIVIDTKKYKEELNAIYPPEWFTQAPIALCVVASKERAWTRKFDGKNIADIDATIVMTHMILAAEDLGLNTCFIAAFKPDEAKKFLALDDEWEPVLFTPLGYGNAEPRDTPRKAIEELVIYKD

SEQ ID NO: 5126 - protein, 123 aa, Methanobrevibacter ruminantium
MKPKIVRARDKEVMNQLAKLFEESKYTVKSQDKNYVLLKKNNYGNPLIHLPFILIGLFFNAFAILVNVAYFAYSVFKKSNVILITTEKNDEDGNPLEFDDVGEIEVFYDQETWDKAIELSRLE

SEQ ID NO: 5127 - protein, 112 aa, Methanobrevibacter ruminantium
MRKIILLAFSALLIILGLWNYMSVPKPGLDIIASSLVLVAVGWTLAMSVFEPNWIKAAIFIDGLVFVLVSITFLVSPINYVFLLFGIILVAIAVLAYLRKLPDNILRYFYRS

SEQ ID NO: 5128 - protein, 104 aa, Methanobrevibacter ruminantium
MAGISEAITQIKKAESDADSLVEQSTVDAKAMIDEAHVKANEMVEAAKNEANEEAQSTVFDAEENAKKEATSISSQADSDVEAIKNKARNNIDEAASIIVKNIL

SEQ ID NO: 5129 - protein, 668 aa, Methanobrevibacter ruminantium
MFRTARMRKLNVITLDKYAGPTVSALHDEGIVQINDISERIQQDPKLAELLKPSKVTPYTGKLSSLLMKTSALSDLLGDALSEGQSLKDTLMSFISPDLPVPKEVEDVDTESFIAYAESTLSQVEAETKGIEDKLAALDSEESKLESNKSLASKLKNLDMDLALLSDSKYTSTIVGRITAESAQKFKSEYSKITEDLFYELVPDDEKEYNILVVVVANEFKDDIYTLLRKNEFEKFETEDLQGRPDSLISSCESRLQAIESERSQAKADLKVVAEKWDDEVLALKEQLENEKEKNEVFATFAETDKTVVLEAWVPEKNLEQAQSIIETATDGHVIMETEEVPDNAEDVPVLQENCTYAKPYELLVEMYSPLKYNEIDPTLFVAITYPFFFGFCLTDAGYGILVALIGFILYRGMGKVNRTMHDGGLIIIASGIWSIILGLFTNGFLGDMWTRILGLGPALPTVIDSINAFKFPATILVIAIVIGIIYTNIGFILGAIDNLRYGEKKEAIGSQIVWFVFELGIILLILGFLFPTFGMIGMALGAVLIIAALGMLIWANGAYGLMDVFGFMGDVLSYARLLALCLATGGIAMTVNILTNMVNDMIPFVGIVLAIIIFIGGHIANFLFQVLGAGVNALRLNYVEFFSQFYMGGKNSYQAFKAKRQFTKVKK

SEQ ID NO: 5130 - protein, 161 aa, Methanobrevibacter ruminantium
MVEIALGTALAAIGAGVAIGFAGLGSGLGQGMAAAGSVGAVAEDNDMFARGIIFSALPETQAIYGFLIAILLLVFSGLLGGGEGLSTTAGIVAIGVGASIGFAGLGSGMGQGMAAASSVGAIVEDNDMFARGIIFSALPETQAIYGFLIAILLMVFGGILG

SEQ ID NO: 5131 - protein, 226 aa, Methanobrevibacter ruminantium
MSSGADKIVSNIMSEAQGKADANIGEAQAQVDAILADGEKRAEATKLKISEDAAKQAEMRYQQIISEAKMNARRAELGAKEEVIEEAFNKATEDLTNMANTNDTEYVDALIEMIKEAAVEIGGGDLIVLLKKEDIPKIEGKLEHIVGLIKSLIKREKPSDLNVIAKEVSRETDVETTLEIGEPIDTIGGAILRTRNGEIQVNNTIESRMLRFKKSLRSEVAKTLFD

SEQ ID NO: 5132 - protein, 384 aa, Methanobrevibacter ruminantium
MADEIATIISSLGLSNEAFLAIVLLAFVVIGAIIVIVATRPILDVYPYLHPNARVRARKGRLFDEKQISELVEANNVDEITNYLRGSPDYADYLDNYTLEKALDIQLGETYDMVSRMAPKEIQSSFKVMAKKSDINNIKSLLTAKQAGLNEEATADLLIPTGSLYEDIERLTDADGVTGVVAGLDGTEYAPVLEEALPEYEKTGMVLPLESALDKYYLSKLLASSETPSDENKQILYSYVGNQVDVANIKLILRAKADGLDYEAISPYMIDSGYQLREWKLKDLMEAEDVTGVISGLEGTKYSDVLVEVLPEYNETGSVALFEKALDKFLVDSAKSYSMKKPLGIGPIIGFLSQKEVEVKNLKVIARAKREADFPISKIREMLV

SEQ ID NO: 5133 - protein, 105 aa, Methanobrevibacter ruminantium
MSDVAIIGDIDTVTGFKLGGVKRGIIVNNDEEAKDALDELLNDEISIIIITQKIADNIREHINRRLGSDVLPMVIEIPDKSGSSEGGADQMAALIKRVIGVEMVK

SEQ ID NO: 5134 - protein, 584 aa, Methanobrevibacter ruminantium
MINEGNIIKIAGPVIVADGMRGTQMYEVVRVGEAKLIGEIIELEGDTATIQVYEETAGVKPGEKVESTGGPLSVELGPGVMGSIFDGIQRPLEVIKGISGDYIARGIDVDSIDKEKKWTFEPIAKVGDKVVGGDILGQVQETSAVVQKIMVPPMIEGTIKSIASQAEYTVLETIAEIETEDGIEEIQMLQKWPVRKGRPYKEKLDPDIPLITGQRAQDTFFCLAKGGAAAIPGPFGSGKTVTQQQLAKWADADIVVYIGCGERGNEMTEVLTEFPFLTDPKTGNPIMDRTVLIANTSNMPVAAREACVYTGITIAEYFRDQGYDVALMADSTSRWAEAMREISGRLEEMPGEEGYPAYLASRLAQFYERAGRVITLGQDPKESSVTVVGAVSPPGGDLSEPVTQNTLRICKVFWALDASLADKRHFPSINWLQSYSLYVESITNWWQENASEEWRANRDQAMVLLQKESELEEIVQLVGPDALPDSEQVVLETTRMLREDFLQQNAYDDVDTYCSPIKQAGMLETILKFHEAASAAVTRGADVKEIAALTVKEDIARMKYIPEDEFEARVKEIQEKVVTQCAEV

SEQ ID NO: 5135 - protein, 461 aa, Methanobrevibacter ruminantium
MNADIKTREYTTVSEVSGPLMVVEGVEGVAYNEIVEIEAPTGEHRRGQVLEVKDDVAVVQVFEGTTDLNTLNTKVRFTGETAKIGVSKDMMGRIFDGTGKPIDGGPEIIPEQELDINGNPMNPASREFPAEFIQTGISTIDGMNTLVRGQKLPIFSGSGLPHNDLAAQIARQAKVVGSDDDFAVIFAAMGITHEEANFFMRDFERTGALEKVTVFMNLADDPAIERILTPKMALTTAEYMAFELGMHVLVILTDLSNYCEALREISAARDEVPGRRGYPGYMYTDLAGIYERAGRIAGKEGSITQMPILVMPQDDITHPIPDLTGYITEGQIVLSRDIHRKGIYPPVDVLPSLSRLMSGGIGGDKTRDDHSGVSDQLYSAYAEGRNLRDLVAVVGEDALTERDQSFLAFAQAFEDEFITQAKDEDRSIVETLDLGWKLLTILPKTELKRVKDEFIEKYYPE

SEQ ID NO: 5136 - protein, 230 aa, Methanobrevibacter ruminantium
MAEEILEGINPTRMELLALKDREKLAVKGHSLLKQKRDALIKEFFDILDRVKGARENAETNLSEAYEALTEAQIIMGDLAVQKAALSVKESVKVDISSRSIMGVSVPIADMEMESRTLVERGYGFSDTSIQLDEAAKKFETALKYIIELGEIEKTIYLLADEIESTKRRVNSLEHIMIPRFQATIKSINMKLEEMERENFVRMKMIRSTIEKNEAEALAKAQLKAAKAEE

SEQ ID NO: 5137 - protein, 952 aa, Methanobrevibacter ruminantium
MISLSFVSASYALDSNHLGENDRSCLNSCSSLKYSLGDNKNNDLDNSADLNSLNPNSNNCLNSNKNNCNCYCKNQTDLNDDLNDSDNCPDSFAKKTNINHDKQLNDGEIDFSERNNQIFLISPENFSVFFDENNRLKEDYGGCTLVFEGDFAELGIIDISYPYTRITAKENSFKNTAFKLSASDIELSNLNISLDKEFKDNEYAGILVLSDYISIYNITLNYTVPANTNGFCIYSKGEGFRRITDLSLINNTITFTGNNLNEAWDYGIFLDKTDNALVYGNSLGSYLPLCEDNWYNNEYGAVSKMSSAGFVAQSCNDLKLSSNEINTYVTDSTQSSFAMDSCILYDCSDLTVERNTLYLEDIDSQDGKNNTLHGFDLYLCDDAIIAFNNIDLFTMGGNDGRKITSPLQVNGPSDNIRIAYNNITSSNFGSNCGIYSHNFYGDTHLEIISNFIDVAGFANSGEWSLLSGIEVQDSDDVIWNNTIIVTNLGDFKYNNKVYGISYSQNRNNYNSTFNVQYNNITTNGYYAVYLGKDDYPVVNSTVKNNVLNTYITGGNPAVSIANDNKNNPIVNNTDNEFKNIFKNSSFPKWLKNFLRQDTKVDKDFSWITDAINPQSNGTGFSNDTGNGTGIIDNDGSDTVGNNSEGSDSIVNGSTSANGTGNGTSGNATEPQNPIDDNQGDNSGGSSSSDNSTGSQTDNEDSNQNNTDPTDSKPTNNTDVPVNPTNTSDKPVNSTEPVPANDTEPVPANDTEPVPANDTGPVPDNKTDNPVNNTEPVQEDANKTDSDNTEPINTTKDNSTEIINKTESDDDTNQTVLKDDDLDPKESHENSQDDNKNPSDDEEKSTPGDSGNELTDPESNSESPQNQEENSENSNDDSSEPSSSTVGDSHSDSASSPGLSDASSSKNAYELDKPVEDLVTKSVDYISLAGICIVTLLLILFGYKRQKDIEGED

SEQ ID NO: 5138 - protein, 212 aa, Methanobrevibacter ruminantium
MVDVGGGILTYILDTLSQSLQIPVIIFLLIFAVGAIILLGGLIREYSHRKTISDAEMRNIIDAINKANDKSEILSIVDSSDIPNSQKTVLREITDSDWDNESRVGLAKKLISSREKRLEKRLSYTDIITRIGPTLGLMGTLIPMGPGLAALGTGDVVTLSNAIIVAFDTTVVGIGSGALAYVISKIRRRWYSEYINNIDVLTDVVLNKLNKL

SEQ ID NO: 5139 - protein, 113 aa, Methanobrevibacter ruminantium
MVKISRKNSFDESSEEDPMSGVANLVDAMLVIAVGLLVFLVISWNMQSIIFNEDLSPQQKQEAIDAMNQVIEVDQGQQLNETPDISNSSGEGYTEMGKVYQDPKTGKLIMIEN

SEQ ID NO: 5140 - protein, 440 aa, Methanobrevibacter ruminantium
MGKLSFSVAQRFGKKGTALPGKVALKFNPNLLEELSKKCDKIVFITGTNGKTTSNNLSTHVLKGGFNDVLSNLNGSNMIQGVLTPFITDYKDSYDVGIFEVDEGSVPVVSQFMKPDYFIITNFFRDQLDRYGEVETTIKMVHDSITPETVLIINSDEPSLLRFDDLPNKKVYYGINKTKFAQDDIDVAESIFCPKCGNRLSYEYIYYGNVGKYHCDKCGIENHPADYFIESADLINGSYNFTVLNDNKREEYTLNLMGLYNLYNSLGVISLAKEIGLDYNLIKERINNFEYRLGRMETFHFKNKDLVLVLSKNPVGLSEVFNTITYDESQKSVMFILNDYAPDGKDVSWIWDANFDPVNHIPNMDAFYCVGTRAEDLALRLKYAGVDESLLKIYPAKDQFDINEAVDTISKESTKAYVIGTFTAMPEARKILVKKEQEGF

SEQ ID NO: 5141 - protein, 258 aa, Methanobrevibacter ruminantium
MDNLELTVMNMYSDILNTYGDIGNFRCINQRIRWRDISLNIQECTIDKDDDFEWEDIDIILIGGGSDNNQSIVSNHLLEQRKDLVEFIENGGVLLAICGSYQMFGNKYLDVDGKDIPCLEVFDIETTSRPDRLIGDIVISNAIPDSNNVLNKDFDFKLKDMVGFENHGGRTYHNHDPLGHVKVGFGNNGEDKGEGMVYKNFLASYLHGPFLPKNPHIADYMIFNALNRKYSITEIKDLNDTIEIRAHERMLKRLLNDK

SEQ ID NO: 5142 - protein, 428 aa, Methanobrevibacter ruminantium
MENLLIMGINTRPMVNSALKLDYRTYSVSYFKTYDFVSPYNERHVLDQESVDSCGFFERNYSPQKLLDLSREYLFDLSKEHNSKKQDNENNEDIDEIDKIVLITGIHADDFKGEFSRFKTKIRGNINTKDLDDKFRFYQKTKNKFDVPLTFKLSDVDELRDILKQYNNNQFILKPLKGNGGLGIFLIDYDSLNELNNSNNPLENISFDDYILQEYIEGTSISSSVLGTNDDCVNLFNSRLVTENDLGNDNFAYSGNIVPLDVNSFNCFNESFKGLGIDSKQLNKEMKEISEDLIRQFRLIGSNGVDFILDRENNLKVIEINPRLQGTYELCEEIMDLNLLDAHIKACEGELVEVPKLNGRYGIKKIIYSSKQVKIGNLSLSNVYDVPYEGVKIEANQPIVTLIDSNKDLKTAIGNINTAEELVYKNIY

SEQ ID NO: 5143 - protein, 326 aa, Methanobrevibacter ruminantium
MNIFSTEETYYGTRKDSPVLLPSYNEYGDKLHIKDVFDFEEMLENYIIEMEIRNYSENTVKTYSSIIRSMIDYMSSEEGVYDGRKFLACFKKYIRDLKKDQDVSQNYIYLNTVVCKKFLEFNDIYFLEDVQNPKRTKSLPKSLTEKEVKSLIDAVQITDEDSELKKKAKMRDKVILEFLYSTGLRISELVKLQKKDIDFDERTIRVRGKGEKDRIVLFDENTRDLIDNYIETQNQKSEYLFINKNGRKLTPRYVQMMIKEYAEKAGIKKKVTPHVLRHSFATHLLKNGVDIRVIQQLLGHSSLSTTQIYTNVDMDTIKSVYDHARE

SEQ ID NO: 5144 - protein, 445 aa, Methanobrevibacter ruminantium
MGKGVELTTTKYLIHAQINANGIVEKPDVVGAVFGQTEGLLSNDLDLRELQRTGRIGRIQVIIHSNGGRAKGEIVIPSSLDRIETAILAASLETINRVGPCEASIEVLRVEDVRAVKRQQVINRAKEIYMGMMETVSPESMKMIEEIRESMRVHEISEFGEERLPAGPNVHTSDAIIVVEGRNDVLNLLKYGIKNTVAVEGVNIPTSVAELTKKRTVTAFVDGDRGGELILKELLQVGEVDYITRAPRGKEVEDLEKEEVLVALRDKAPTEQVINNLDFNLDTQAKTPKNKVNRTDRRAKNFNKSDKFHGNKRNDRKDKFNDRKDKNGKNDRRGKDRNSRGRRDRGDRIPESRMKLLKNMLRDLEGTGNSEILDDSLNLLKETKVETLYEDLKEDIPDADTIIFDGVISQRLVDIAHSKGVKTLVAFKSSRVIKRPDKLKLITLN

SEQ ID NO: 5145 - protein, 251 aa, Methanobrevibacter ruminantium
MEGVILAKIKPNDLLKKPSKIEKMELDQIDISKYQFSIDDLEGKDSSNYILLKKILDSSSSCQVSDAYASVSGRSGVLDGLKPMNRNKVYGRVFTAKTNTNDWGTSLMAMDNASQGEVLFIYSYGDKASVWGELASTCAGEKGIAGTILYGYARDMDALIDLDYPVYALDYCPNAGKALGLGKVDIVLEIGEDIIKPGDFVFADENGVVLIPQELFGETMVATFNVKVKESFIIKELKKGRLLSEIIGLER

SEQ ID NO: 5146 - protein, 120 aa, Methanobrevibacter ruminantium
MKFLGNISHLANSGKLIAKSSQTPPAGAFVFTNDKQKIGKVYNIFGPVKNPYISINLYRSVNKRDLESRQGEKLFVSTKREMEKDKKKKRSNKSKKGKYSKGKNKSKPSKKKRSNKKSRR

SEQ ID NO: 5147 - protein, 264 aa, Methanobrevibacter ruminantium
MGPEWRAFDHEQRDKRTRVGAPITYTIHDKGLSTMIDWRNKDIYGRDIPARNRAQWYRLRKWQRKIRISGATERNLAFALSELDRDSSRLGLPRSVREAASVIYRSAVENKLIRGRSIEGVVAASLYAACRQCKVPRTLDEIAEVSRVSKKEVGRTYRFLTRELHIKLPPTSPVDYVPRFASELGLSGEVQSRSIEIIEKAMEKGLTSGRGPTGVAAAALYIASVLLGERKTQRDVADVAGVTEVTIRNRYKELTEQLETGVTL

SEQ ID NO: 5148 - protein, 701 aa, Methanobrevibacter ruminantium
MKLSIIIPTYNEEEYLPKLIESIRSQEFTDYEVIVADADSNDNTREIAEAYGCIVVDGGLPAIGRNRGAAVAKGEILLFLDSDLELTEHYLENVIEEFEEEDLGIAITQMTPLSQKKRDIYLHNLANWFMIAVENIKPHGAGCYGIISRKELHDECGGFDENLTFGEDTDYIERVAEISQFKVLRNAKIGVSTRRLEEEGLYTLLKQYGKSTVNDFRGKRTSAEDLGYEFGHESSSKLESGVQESVPKLENGVQESVPKLESSADISSQIEDNSPSLEDEIDIESDHYPITALDSTDMERIAEKSKNRKQSSFKRRLNEFKDKEFETNELIEYEDESGHIKHEAVGLDSRKKIFYSICGEGMGHAIRSSVILEHLTKHHDVYIFSSERAYKFLSEKFDNVYEIGGFNTVYENNVVRTKKTFFKAMKANPTNLKEGYNVLYKECKKVKPNIIISDFENYSSMLSKLMNIPLISLDNIHMITQCDYDYPPHHKADMLTAKAVTKSYILRPKRHIITSFFFPPLKHPKMTALYPPVLRKEIMDLESESGDHVLVYQTAESSINLMDELKKLDEEFIVYGFNKDGTDENLTYRAFNEDKIYEDMRTAKAIIVNGGFTMISEAIYLKKPIYSTPAHKNFEQILNGFYVEKLGYGESHEDLDVKKIEKFLDNLDTYQNNLNKVEKWDNTAILEDLDLSIEMYAKKNY

SEQ ID NO: 5149 - protein, 352 aa, Methanobrevibacter ruminantium
MNLKINKYIPFGIILIILGGSLYFLSGIDQFIRPFTQPILMGSSKGKDILFFVLFGITIILSSIGDNERIHNYLMNLSIPEKLKDKDFYLKLSLILFLITAISGLAVELYLRASLGLNWNTILVIMNPSLTSTSFLHSHLYKSIFGIILGIFLSHIPAGIHTGSSLSSYAPSVISLLFILIPITYISMVLSNQRRKAASRILLAFTSTLGIIGLIDGGLFATPAIGGIYGILILMYNEEILDGISDFITEKDKRDGIKEKLNEELRAIKSIFNNKNIKKYLKIALPHIALILIIILRFSVAFYGACPDSYELIISNGHDLDLDEYDTLNISENGDRTVVHLSNQYNEMELFK

SEQ ID NO: 5150 - protein, 245 aa, Methanobrevibacter ruminantium
MVPLQFFLFTSVGVDPSLAMMVSLGTSLAIIIPTASSGAYQHQKKNKSIVRPGIRLAVFGIIGGFCGGLLANMVPTRILQMIFACLLIFVALDMLFGSRSDGEKALIDFNLLNGGIVGFSIGIISGLLGVGGGVFLIPSLCILFGFSLIEAIGTSSVFIAFTAIGGLISYIYTGFGVNPMPYCLGYVSLINFVVIVLFSVPMATIGAKLVYKLPEKRLKQIFAIILIYMAIKMLGFDPISILLGL

SEQ ID NO: 5151 - protein, 304 aa, Methanobrevibacter ruminantium
MPSEKVKEFNESLKTKEGRDKFFKQIFCIAIGTVVGVATYAFCLYFNLAIFGWNIGLALSPLTAGYAESILAKKILNESTGAISAFILFIITVVYGFFISNSTLGFNIITAGSAVVIIQAAMPTATNYLLLAVGVGILTYVTGFLKKLHSALYKGYKKIFKREPKRAERYYQKQASQVHAFYDENLDINSLGVLIMTLEYPPKELNIIEQKGIYETRHIFGSKQKEDIKSGLEDSLEEEVINRVKLARDKTLVKLIKEVKADGCNGLMHLHTTYETLGTEKGDHIAQVVMRGTGIVIEKEEEEY

SEQ ID NO: 5152 - protein, 108 aa, Methanobrevibacter ruminantium
MLLSSTSTLESKTILKYHGLVSGESLIGANIYKDLFSGVRDVVEGRTSTYAEELDNARNEAIATMEEKAKEYGANGIIGLKISYNNLGGTMGNTILVTVYGTAVTYED

SEQ ID NO: 5153 - protein, 62 aa, Methanobrevibacter ruminantium
MVEPHKHCPVCGSPIPMKERVCSPDCEKVLEMNQKNIRKSRIMLFAVIVVFILVWAYFMFFK

SEQ ID NO: 5154 - protein, 264 aa, Methanobrevibacter ruminantium
MTGLIDIGLNLMHRSFDKNREEIINNAISNGVSQFVITGTSVKSSKIALNYAKDEKWNGILFSTAGVHPHDAKTCNEKTLDALKEFAKNDCVVAIGECGLDYNRNYSPQDVQREWFENQVKLAQELDMPLFLHEREAHEDMVKILSKYPEMCEKACVHCFTGTKEEAEKYLELGCYIGVTGWICDERRGQSLQEAVTVIPPEKMMIETDAPFLIPRNFPKKPKSNKNKPEYLPHILNTIAEYKECDSAELGEAVSKTTREFFKI

SEQ ID NO: 5155 - protein, 225 aa, Methanobrevibacter ruminantium
MRIVVAIGGSILLKTYDAQRFQEYSDILKDLSNEHEIFIVVGGGKPAREYIGVARDLGAGEAKCDDLGIEVTRVNAKLLLLALGDYAYQKVPHNFNEAQEYSASGKIVVMGGTEPAHSTDAVSAILAEFVQADMLINLTSVDGMYTKDPNKFDDAELISEITATDMMDFIRNQDVKAGTYEFFDFTAIQMIKRSNLETVIANGFEPQNLIKAINGEKIGTRVISD

SEQ ID NO: 5156 - protein, 2575 aa, Methanobrevibacter ruminantium
MSLNKLKIGRVFICLFILVFISCSINCVFAVDDLAFNDTYYSDLDSVNGDYSGFLSEGDFNGGSSVVVDGEIDSSPIANNKKNSSFALTSKKDSSSPSISTSSKNNKNNKNTSSLKENKTAAPSSQRVFYDRDIVSDEDVIGPGHENLDWINLTHVDDSLFSDNSKEDGAKGSKIATTIVASNLVKYYLNASQLNVGLKDSNGNYLSGKTINFTVGSASYIRTTNSSGRCSLTINLMPGVYTFTIRFLGDSSYSPSSKNVNVTVLKMPTSITASNLVKYYHNSSSLIATLKDTHGNPLSNMTVTFKMGSNNYNRTTNTNGKATLALNMIPGNFSVKISFTHPRYITSSKNVTVTVLSMPTSISASNLNMTYGDGSYLNATLKDAHNNPLSNKTIHYKLNNTIYNRTTNNNGQTSLIININPGTYQFNIYFNENYYQNSNKTATVTVNGIPNSIIASNLVAYVNESPTIVATLKDANNNPLSNKNLTFNRTGTLTNILTNANGQATYNLNGCTGNFNIKITFNTTGYAFSSKTVNVNIKFWPSTITANGATTYFTDTVQLSACLKGENNTPLANKNVKITYANKNITRTTNSAGNVYYDFNENVGTYNVNFSFKENYYQNASKTVTVTVNKMPTSITASNLNITYQDGSSLIATLKDSHGNPIANKTVNFKMETNNYNRTTDANGRATLALNMIPATFNVNITFSHPSYQTSSKSVTVTVNPISNSIIASNLVAYVNESPTIVATLKDANNNPLSNKNLTFNRTGTLTNILTNANGQATYNLNGCTGNFNVKITFNTTGYAITSKTVSVNIKFWPSTITANGATTYFTDTVQLSACLKGENNTPLANKNIKITYGNKNITRTTNSAGNVYYDFNENVGTYNVNFSFNQNYYQNASKTVTVTVNKMPTSITASNLNMTYQDGSSLIATLKDAHGNPIANKTVNFKMETNSYNRTTDANGRATLTLNMIPATFNVNITFSHPSYQTSSKSVTVTVNEIATNLAVSNLNMIYMDGSHLAATLTDGNNNPLANKTIIYTLGNVNYNYTTNNSGQTSLMIHLNPGTYQFTVQFSESHYQSAIKTVTVTVNPISNSIIANNLLAYVNESPHILASLKDSNNNPIINKTLVFNRSGNITNIITNANGQASYNLNGCTGNFNVTITFNATGYAFSSKTVNVNIKFYPSIISANGATDYYGNTIHLSASLKGENNTPLANRTVHISYANKNITRTTDSAGNIYYDFREIPGIYNVCFNFNQNYYQNASKTVSVVVLNPPSPNVNVSSGFYNVSYLLINVSSNISGGILYSSLDNGTTWYTGEDNICFNLTEGNWSVCSYYSLNGFNSSIVYNNFIIDGSAPLVWASNGSGFYKRSLDVNLTSLDIVDKNPVIYYTLDGSLPNNLSAIYTGPIHITSNYGLTKLQFYGVDRFGHNSSIVCVNYFHGNYVANLNSGKYFDSVQDAIDDMDTINGDVIEVNKDLSGACDLNKSVYLRSSCLNNFTWSQPNIVIHSNNSVIEGFDFDGSSMHSVILAGVSNCVIMNNRFSVVEYGIWSSLSGYNNVIMNNNFSSYGLSISFIYLSPIYGGENTYLIKDNIFNHSRCGICLESSLNSIISGNVFIGSNYGLKINGNNNSVVYNNLSFNSYAVCCFGDDNTLMYNNIVNNVYGIYGDYSNLTVNFNRFYNNSAFGLYASGGPINACNNWWGHNNLSVSEDYGFDICLQTDNIDYSSYIILKNYKSYFELRNNFIDNVSCVVDLNWNNLKEYVGEFIDGVNVKFVDMKTGPYPHWIAIESGQALYKTSCVNQVNNVIISLDDEIQTLNYSSFSSSVRFYINTTGFISNNSGNLDNFVANENGSYFTFDVILDHDVDWVSYVWRNIGDFKSELDLIVDGDIVSTSVVESSFYRNNLNNISSNVFDAILLYNDWYYSRLNWAKAVVYVYLSLEYNTTDLNDVQYIYSNVNWGCLSPERKNQLLNDHNITFNDALWNLIQNSYNLSDEDVIFIKNHHKSFNDSVCVSAHYYGNDNEIINLNNINNNTLAYSGGMVIGSWKAPIMYVDGSYQHFIGNNSDNSTDIFTYYHNYGNGSIDWAYSTNYGNLTNGTYDGLMTFTFANDKVNGSVLNHYLSEKNRTDVNGSLVYSNGFMKAAYGSFLEGLLVIYMDDLVADLVSSRYNASWERVSPMVMSVRDDHGRLVMSGESDFYFGRKLLCDDENIIKSFYFACSSVFSSIEHYVHQTLFPDRIGYGVTVDLGRLLADGECLSIVDEGRFIYICPNESDEIYYLCFDKLTGILMDASILGNDAYCYSNQQTEWAFTLGEELIDNCDLIWDYLNGLDVDICALNVSTQDMLKVCYGFNILSDLFTCALLSEVNILIESIGLEESFNAIVPLVGVLVSSLENIGSYVLDEYLSNPKFLSGVVGGLLFEAGMIATCTGVGAPVGLALMGAGTICTAYSSGLIDYNDNDGIYFNTTLENQANFGFSMSCNLISGGIGGLASSSAFKATGSEVIQIASKNAVIDSKGFYTTTISTKYVAYEGSSNTVSRYVINRMVNSQNPSKKIFILKGCRNILDSLMQDCIWEERNNLLIK

SEQ ID NO: 5157 - protein, 188 aa, Methanobrevibacter ruminantium
MGVLASVAGGIFFEAGMIATCTGVGLPVGLALMGVGTICTAYGSGLFGMTDTGNFYSNLTDENLADFGFSMSLNLIGGGYSAAAAKSTLRTVGGKSVQISISKAAFASDQRGAYTTFHTISSKTYIQKVENGAFSNCGEYLIEQEFGTTVIENIRKSLRVLSIDYALNFCYDFLKENYIKSLDGGLYV

SEQ ID NO: 5158 - protein, 55 aa, Methanobrevibacter ruminantium
MNAAYGSFLEGLLVIYMDDLVADAAGERYNVNWTRVSPMVMSVHDNIKGHILPGK

SEQ ID NO: 5159 - protein, 452 aa, Methanobrevibacter ruminantium
MTKLIKREVKREYNEESPLKLKIANAISTFTNPPIICIPLFLLISFVLASNGNPFSSSFSFDWMLFAKCEIISLVFASVLPMAIIIYWAKKLNTDKDISNREDRFIPLIVGVLSYLIGFVISFFFELPNFLTILLLCYAVNTFIVMLITSLWKISIHTTGLSGPVAALIMLLGPIGALFGLLYPVLIWSRVTLKKHTMAQAIAGGIFGFVFTVGESYLYMRLFKMSVPGLVPLAECFWIIFALVACPIVLGICGLLEKRGIESVIRAKLFHLLAFIGFAAFYFYGPSSAVLILILSAIVSVLVTIFAGDTFSWYKGISRGLERENLSIVLSLACGLIWIYVAMNYFNIESAIIATIIVAFVGAIAEPVAIKYARYKFPMKSLLGNDGNKSIESSVVALIVTMIILLLFTQNVFVSIAVGLLVCLIETFVPKELENLVIPVACAIILGFLLHY

SEQ ID NO: 5160 - protein, 1262 aa, Methanobrevibacter ruminantium
MLNKKIIIILTFILILSISSASASADSTDETILSDDSAGLINLDNSNNNLYLDDNQFNLANSNSDNSNNFNLDDSNSDNSNFYLDEDLDNKINENIKNTKTILKENNSSIASFSNLSHILSKASAGDTIILENDYKYDSAYDSQYQGGIEVNSITIDGNNHYIDGNGEARIFYLASDNIVLKNIKFINGFNSQGGAIYAKGTNVNITDCIFENNLAPDNGGAIYVEGNASIKSVKFINNSAGYGGAAYINDSSILEDLIFTGNVANIEGGAVYIGGSSNITNCIFDGNLADKGAAIFIPAKESPMTPSEDVPFDESDLNSTDMDLDSTDMDDNSTDYNFTDMDDNSTDYNFTDMDDNSTDMDDYPDESDEDFPDGGDYVFPDWWEGDEFEYDGIECINVFITNSTFINSNDFYRGAIFSEHDNNISIDGCLFENMSSQYAPAIYCNVMVNILINNTGFKNLHANGTGGAMAFLDNVYAIVDNCSFKNISSSKNGGAIFYDSNSWGHSSPVSLIVLNSSFLNCSSDYGGAIVVLGGGFKSKDSSFINNSARYGAGAVHVYTDYDILVYDTVFYNNRLNEDNTSFGGALFIDSAEKAIINNTRFVNNSNDAIYAYESRIKINNSYFENNDEYLRSIYTEGLILGDNKYNDDTLVDLDYDPTYIIIGTGEGLKLDLINNTIDVTTIPSSFLAADWGWMSPFKNQDFSGGCWCFSTCAAIESALLKSTQKTYSLSMQNMQKLSTEYSKYGNNHIVEAGSTIVALHYALSWMGVFPEEYDTFDMIGKLSRQISTNETIHIQDAAFTYPRSISYDIDQIKQTIMKYGTVTSDFYAVNEAPNFNENTSAFYCNETDGRDATHAVAVVGWDDNYPASNFLVTPPGDGAWIIKNSYGEENYDHGYVYVSYYDTVFNIDGGVAYLFENTENYTKNYQTDIGGDIFLVNDSDSYSYKNSYQSIGDDYISAVGTCFNDADEDYTVEIYVNNVLKTSQSGKSPFRGFHTIKLENQIQVKIGDNFTVVMKTHSVPIVNTSRMHFKANVSFIDNGTGWKDASDDNATVLLKVYTMETLRENLTDRIPTRIDCKNMTTTAVAAEDGRIGKYFVVFLKDENGTALSNKPIKIGFNGRVYDRTTDENGSAKLQINLAYKGTYTFAIGFLGDNDYLGAFEVAKITVKVQTPKLATSNKSYKASAKTKSLTATFKTANGKVVANKKISFTVNGKTYSAKTNSKGIATVKVSLNKKGTYSFTVKFAGDNTFAAVSKKGKLTLS

SEQ ID NO: 5161 - protein, 414 aa, Methanobrevibacter ruminantium
MSEVSSKELYEFKKTLKELAEKKGKGTELVSMYVPPEKQLSDIIKQMRDELGQSANIKSKSTRKNVQSAIEVIMQRIRMITNENKDLPNGFVLFVGMIPKGGPGTEKMETVVIEPPEPVQTYWYICDSTFFLEPLEDMIASKEVYGIAVIDRNEATIATLKGKRIKITAHLTSGVPGKHKAGGQSQRRFDRVIEQLAHEFLKRIGQHMDDDFLPIKDELKGIVLGGPGYTKEDFYNGDYMHYELKDKVITTVDTSYTGEFGIRETIDKASGALEELGVIKEKKLVQRFFKELRDDNGLYSYGEKEVRTNLQIGAVDILLLSEDLKSKRLTLDCQACGFHAEVTQKEGQKVEDLTCPQCNDKMKITKEEDLIEDLSNIAEDLGTEVEIISTETDEGMQLYRAFGGIAAITRYKVN

SEQ ID NO: 5162 - protein, 217 aa, Methanobrevibacter ruminantium
MSDKEVYGIVLSQKLTKDNVNMGVVMGTEKFTLKRIELNEDVRLKPQDKILITKDSEELKKTDQKLSYDDLSNEEQIEAEKAIHSIVIANENKYVGFFNKQSKDGTQLHLLEGISRKNSMKIIEEKELNGDFESFEDIDNRISFIDDSEDLIAKRVLYELSELNKVKKGRPTYLFASVKRSSKKEVLELDEFEDDDSFFIEKLKREGLVEQEGKRIR

SEQ ID NO: 5163 - protein, 141 aa, Methanobrevibacter ruminantium
MTDLNTCSNEKLSFKYNDKWELEAIPLENNPDCIATLSYEDGSLLNVIAFPSELESLDIFKEVVEASLRDDGAEIVSSEIANVNKRPSIQIHSKVTTPEISFQMFSVIFLEEGFLYIFELRAVSEIVHEFMEIVKSFEILE

SEQ ID NO: 5164 - protein, 267 aa, Methanobrevibacter ruminantium
MIIKAGKINKARGNIVLTIGKEDVNKHNLEDGDFIILTSDEYEDLKASSEIEVSTMEVIPDDEAVIKLEYDLKEAKSKEKILFSKVEELEKLNLELTTELSKIEKENYINKTVLTDSESGSLLEEIKNVNDKNEELNSEIKKLNKDLKESDEERIELLQDMNVLKTKMSFDAGEISRLRERESKYREVLEIILKSNKNILDEAVNKTVTATIHEINKELSQTGLIRRIRGLTIVREPEISKESISSNAYKQLEGVIPDEYFLDSPDE

SEQ ID NO: 5165 - protein, 167 aa, Methanobrevibacter ruminantium
MGYFRGEIMEEITFNEEGIKFKYLSNWREQAKESVGPNCIKALVKVVEGKPSTITVYKNDAGDAKAVAQLEEPFNESFKSQGWNIVKSAILNLNGNPVFNIVSDAQEGDTILENNTSAIINNGKMYVFELMHFKDFPYAYNDYLSIMDSLEFVNEEEIEETEEESEE

SEQ ID NO: 5166 - protein, 140 aa, Methanobrevibacter ruminantium
MSNLFQNDQLSFKYPKNWKLVSDDEIEGCLAILDSDSKHSRVMIFKYPEEGLSLEYLKNAIEDIPREESLKVISSNLTILANKETHELIAEDTSHEPPLRTHSLTTIHNRDAYGFNFMGFGLDNPDEEGFLFMYRTLKFE

SEQ ID NO: 5167 - protein, 203 aa, Methanobrevibacter ruminantium
MTLKEEKDKVRKSIYDNLFNNGFSNRPNGDYGKIPDFKGSDIAAELLSKTEEWKSSITIFSSPDAAQTPVRYLALKDNKNLIMASPNLTHGYLFLEGQNIKEIEEASTKEGAFKHCSKKDISNINVDLVVEGSVGVDRMGHRIGKGKGFADMEIEDLKKRNIINNTTPIATTIHPLQLVNHIPTESHDQRINMIVTTREIIRV

SEQ ID NO: 5168 - protein, 181 aa, Methanobrevibacter ruminantium
MADLKGTKTEANLAAAFAGESQAHTKYQYFASKAKKEGYVQIHDIFMETSKNEKEHAKIWFKLLHDGEVPDTIANLNAAADGENEEWTAMYKEFAETATEEGFPEIAGLFTMVGNIEKEHEERYRALLANVEGEAVFKKEAEIEWKCINCGHIVKAPEAPFICPVCKHPQAYFEERATNFK

SEQ ID NO: 5169 - protein, 52 aa, Methanobrevibacter ruminantium
MSKKEDNCQIDDCSSGTCAPVSPFSKEGILFLIFIIVLFIVLFFLLWTNGLI

SEQ ID NO: 5170 - protein, 142 aa, Methanobrevibacter ruminantium
MSDMWGLTVRGICEYNDKILLLKLRSISAHDPCKWEIPGGKVKKCEYFDSALKREYKEETGMDISIDSLYHVIQKNYTACKTGEKIKSIQLIMKVSTNSDEVLISDEHDMYGWFTKEEINDMIKNNELTPPAKAAFCKTLLV

SEQ ID NO: 5171 - protein, 168 aa, Methanobrevibacter ruminantium
MSMLSNYRLKELLKKESEMTDEEYELFLNEFRKSELFIPIQVDLDSLDLKDVQLNEINHINQEINFRLKSYESKDKKRTIPLFTDEHEIERLKMNTTVGSLFMRDLCESIMPIRDSFDQIIINPKSEKSFKISVDEFLDLFDEDREFEDLMKEIENDEEFIEMMKKEL

SEQ ID NO: 5172 - protein, 134 aa, Methanobrevibacter ruminantium
MTLSDNKKLKKLLKSKSRVKIENNPNLFYKEFLKSTLFVPVIAINEDENLNDGDTLDLQIGFFDEENGDRNIYIFTDSNEMERADYKITSIAVNMKELSVILSQFDMDFDYIVINPYGPDSYKIDYDEFKSRTE

SEQ ID NO: 5173 - protein, 159 aa, Methanobrevibacter ruminantium
MDFKREKYIEVLIYIIAKTANKKNVGKTVLANMLYFIDFDYYELYGESLTGETYFKTINGLKPKHFDDTLIDLIQRDIIYLKREADYDNKLKKYYIARIPDNKLSKKEYFVITDALDRFSNLSASKFNYILSKDIPFKSAKMDGQINYECVFHRLEKTN

SEQ ID NO: 5174 - protein, 240 aa, Methanobrevibacter ruminantium
MICPSCGSENKEGSKFCKNCGERLTDSSRPTSTNASASSQSKSNKNLLIICATIIICVAVVAGAILFMSGQSTDYEVASGEATNDHSSSALNSYDSSNSNDESQDDSASASEDSSDSADEYNKNHKWGKSFQEASEYFPEASETVVTHVFYEADIDGNGFLTDNEFKDFKSLVSFTRKYAADVTNNDYVDTPDLWEGDGSVRTRYCADHGRIAVGSDDRCPYCAKKGQDSRTRSGSTRYV

SEQ ID NO: 5175 - protein, 282 aa, Methanobrevibacter ruminantium
MNEIIDNYNVNEKIEIDNFELEDIISLGVNNLTIADEEEFFKLLKEAQLFILVQLNKEEVFDVDNQKVVEVIKPIPPLGFNFMTLTVNENERSIVAFTRKEIIKEIGLKADHIVMNMRDLAKILMGLGDTFSSIIINPQTEHSIMISINTFLSLFMEKPKNPFIGSLEQTLDKLKNDYVELDNHYMFFIRSDYEFMENESKDGVFVAKMPLRASTDPNFQANLPILHKLMMMEGQKVLYTGNPNEEQTDFDVLIAPGTEFEKYYDEDGDTSVWRCVKQPFYE

SEQ ID NO: 5176 - protein, 142 aa, Methanobrevibacter ruminantium
MQDEPNKKINRAKDDENLLFARGEVIRLMKDHLDKDKMITERVKVEMNRFLSNVLVAVCEELNKYPYTTIDYEMLKESTYPYTRIKQINQERERILVHLNAIKADCDALGMDIEKTLKLNESDGEDSDFVPHTSRVKEDDGE

SEQ ID NO: 5177 - protein, 481 aa, Methanobrevibacter ruminantium
MDNEFKINYLLNILKTTPKVVSDRIIKDQTRLNFRKDYYDLKESIDNFLEHDTDDRFYILPGLRGVGKTTIVFQLYDYLTNERNINSNHILYLDLDRLKDQGPFNLLEYLDIFIKDINEEAYLNNWPLFIFIDESQYSSNWDHVGKIIFDDYKNVFIIFTGSDALNLQSSMDSARRSLKKEIYPLNFAEYLYLKYGCEIPRGISDSIFNAILFNDFENLIKDERYIQLNVYNKFKRDINKIWDEYIQYGGFPLSFARKNHASIIQLGLDMKNRIVEKDLDIVLSVNSQTRLNTYSLINILALQKPGTLSYNKLAKNLEISKKTVGNLLNALECTQMIFHIEPHGAITKRNRRPWKYYFLSSQMKAAIYQNSGQATKTKGEYMGILTENLVGSLLFMMKNKRKQDFGIFYEEEKERADFLINTIDGRIIPIEAGYGKKGKRQVINSMEDHGSEYGIVVSNKTQSIKIEENVIFLPLKTFSML

SEQ ID NO: 5178 - protein, 230 aa, Methanobrevibacter ruminantium
MTEIDWFKFEDRDYDFPFYKKNPHISKMGWLVLFFVFIIGSILSMSDKLSYSILCCIVFIVPVLYFLDWDYKAIFRKPSLKDIALAVALFIGYLIYAIIMGAILESVGIVSSGIIDPGSIDWTVLIKSVFSLMGEEFIKFLPFIFFLRVLYKYTDNRKLSVVISVALVMAMFASLHAYNWVMFIYALFIQGFGSIFEFFAYIKTKNIIVSYITHYCTDAFIFAMLLLGLG

SEQ ID NO: 5179 - protein, 530 aa, Methanobrevibacter ruminantium
MDKETKERLGEIRAAMKKYGFDKILGESAKNRIRGKDEEEESLLLDSEVPVKFRLMLQELGTTFIKLGQLLSTRPDMVGEDIANELANLQDDNPAISYEQVKAIVERELEGDIDELFAEFSHEHLATASIGQVHEATLNTGEHVAVKIQKEGITDKIDLDIRIMKYIANRADRLSGELKKVNLPGVMEEFDRSIHKEIDYYNEFMNMQRIEMNFVDNPNVHIPATYPKYCTTKVLTMEFIAGAKLNDVYASEGDEFDKKLLAKTVIDSYLQQLLIDGFFHGDPHPGNIMILEDNVLCYLDLGMMGTFDEDFKRNLAEAILLIMDQDIDGVINQLMYMDILDYDIDTKPLKRDLNDLFGRYFGVDLNRFDGILGDLLKLMQEYGVVLPNELVTMARGVSMVEAIAHNLDPEIDIFESLKPIAKRIARERLDPKRYLKSKKSNIILYEHMFRALPQLLTRTVHKIENEELQFRFEVDITDKVSIVALVSALIVGSSVVSFGPRAFDMPVISIIGYIIAIILSIVGIRKFVLK

SEQ ID NO: 5180 - protein, 165 aa, Methanobrevibacter ruminantium
MDIRKVIGIILIILGLIFAIYPVYSAQAVSWIAGVALIAFGIGLILDGFSIWSMMAGVSAAKILLGIIAAIIGFMFLYKVDALSFIIAYQFYIIGFILIFVGLLGIFIAIDGISRATAILTLILGIICIICAFFSLSQPLYTAVIVGICMIMEGITFLASGIIDE

SEQ ID NO: 5181 - protein, 264 aa, Methanobrevibacter ruminantium
MGLAKEARDLERENKYDDAFELAEEARKLEKNGKYDEAIELILNYLDQNPQYKTIDYYHFANPIEEILFNVYIEDIDSVKTLNLEECLELIYFTLARAYGKKGDKEKEEKYLKIANKINPVSAIILLRLCKYCQSINENEKIKELAPDIMKYSYNSKILIESYLTLAFSYLDDKQEKELYNHLMQFYLTVETGTDFWDSIKEDIKYLEEHEIQVGFNPEMFSILKYLIALHTKQGREDTAKYFKDILYLMEEFTKSLNELRYDS

SEQ ID NO: 5182 - protein, 337 aa, Methanobrevibacter ruminantium
MDCIKNGIMGQIVGDALGLPVQFQPREERDIDPVTDMIGDGAFELPAGSWSDDSSLILATMDGLIKSLNGDNVDSTSLNDIIDWEIIMRNFSDWLNLGEYTPYGFSFDIGGATRDGIYNYDDGWEPLECGGIGERDNGNGSLMRILPIAFFIYYLSKKYSFIEEDKMTAVHNLSSLTHRHKRSQMCCGIYVNIALEFIDNFENGKCLDLEELISSGINKSKEYYFNDDSFEEELHHFDRVFSLNIQNLPRDEIKSGGYCISSLEASIWCLLNNENYKDTLLTAVNLGYDTDTTACVVGGLAGIFYGYEDIPADWITQLAKLDYIENMIGKFSQSLID

SEQ ID NO: 5183 - protein, 135 aa, Methanobrevibacter ruminantium
MYDLTKIQKTFNERVFSRLDDEILERNGIDKDEELIREELFRQREIITVPFGHIEYFLAIEDEKVLLYVEKASRMGSHNICIIDDDSYECIDVYDGYPPELKERYLDHLKRIKKTRNRFEENLKKLSEEKSIKEK

SEQ ID NO: 5184 - protein, 321 aa, Methanobrevibacter ruminantium
MQFGNYAVEISSENENHLINYLKFNNFKYEKDLENCSEKEEYVIVINIIERIYYKIKNYLAGPILSEKDFLDKINYNKYSIHKKAYSNDGNLIYEGYTIYEQGYGEIAYGLGTSYFPNGNKCHEGVFERKGLLEGKEFYSNGQLKFEGTYGRCRGYGPHYPSFGNYYSKDGQLLFSGKFKVTFGGVGYPMIKEPKYKLLEKGRPRYILKKDEDITKLIEKNTNIENKKYPMTFEEFEEKVLELFFEYHSDEFIEILKKRLEDYKKIEPNFMKALYKHSCWVYDSPHIYGDTCKLQFEKERLRHYPVYRLRVIVGLEDGFRG

SEQ ID NO: 5185 - protein, 188 aa, Methanobrevibacter ruminantium
MISINIKEMRKEKIYEGRVKMGHGGRGTIRLHNSNIGDQLYVIFPSYGKKEDKDGNLEIDEILRKTVELGKDGKNNIDFNREYRGRKCIIIKRESLIKLEFAKWKIIYDGIVKKSFNGQGLIRVKDMFLGERAFVVFGESLNDSNENIMVSVNEIRNKGIHPDNDHTSRVLLSKDYVNCKCLVVLQEA

SEQ ID NO: 5186 - protein, 496 aa, Methanobrevibacter ruminantium
MSKIHLSKSKYCKCVQCEKILWLGRYKPEVAAVEDKETIFENGRKVGELAKGLFGEYEDIEFDITLTQMIEKTKKLLEEKPNVITEASFSYENNFCSVDILKNDEDGVELYEVKSSTSIKEIYLDDVAFQYYVLSSLGLNVKKAALVYVNNEYIRGEDLDISQYFIIEDITEIAMAKQDEVRANIEHINNFMEAHDRDNEPNMEIGMHCCNPYSCDFWAYCTKELPKPNVFDISGMYKSQKFESYAEGKVSFEDLRSANINPRYLEQIDFELNDRGPKVEKQAIKDFLNSLKYPLYFIDYESCNYPIPELEGTKPYQQIPFQYSLHIIKEEGAPLEHKEFLGDINDKNIIRTFAEHMINDLQEDGSVIVYNKSFESARNREIGEMYPDLKGQMNRINDNMVDLMVPFRQRNYYTKEMEGSYSIKYVLPALYPDDPELDYGNLPSVHNGGEASDAFLNLKGKSPEEQEQTREDLLKYCWLDTYAMVKIWEKFKEVAK

SEQ ID NO: 5187 - protein, 115 aa, Methanobrevibacter ruminantium
MKLRNLHLDYKDENGDLRYELRNGAHSMKDAEGFSPEEFYSSLDNVIRVLSPNNSFRPIEAYPSNNGPKALFGFLFYFLKGMGCKKGLQKEFDYLEQFIDYEIDLFMIVNFLREL

SEQ ID NO: 5188 - protein, 251 aa, Methanobrevibacter ruminantium
MPLDIIEDIWKYTTNNKTFLLIILVLFYLFCMFMQIFDEMRISYALYLSMIPYIFIAGYGMAITKDVIDNGKRLPKILIKDVIVLGIKSTVVFIVYLSVQGIFFSLVSYLCNFPIIDVEDLLLDFFETAPLLFHHNLVNTLIFIVVDFAVFYFTMFFMEMGLAKLADTGRFLDAFNLIKIKKIIDIIGWRLYAKHYTVIIFLLWVFSLLIDVETPFFVLDYIFKVFLGLLLFITQYWGIGAVYRIYKIKTN

SEQ ID NO: 5189 - protein, 97 aa, Methanobrevibacter ruminantium
MISSEEKEKIKSDIVEKVNSVLEKYNESFRMDKVTVLNRAETVKFMGSYRVYERRNYCSVSREINSFLNKYGDVEIKSKKIRDSGMKFTTVSFNFEL

SEQ ID NO: 5190 - protein, 273 aa, Methanobrevibacter ruminantium
MAENEIKLFNDKQIRTKWDEEIGDYYFSVIDVIAVLTESSNPSRYWSELKKKICEEQGQPFENIERLKLPAKDGKMRLTDVANTKQLLRIIQSVPSPKAEPFKQWLAQVGSERLDEIVDPELGMERLKSTYRKKGYSEKWISQRMRSIEIRDDLTAEWDRVGVEEGLEYAILTNEISKASFGLTTRQHKNYKGLKKESLRDNMTNAELVINMLGELATTEISKTENPGGFEESKHVAKRGGNIAGNARKELEANTGRKVLSKANAKDKNLLEN

SEQ ID NO: 5191 - protein, 97 aa, Methanobrevibacter ruminantium
MISIEEKEKIKSEIVEKVNSVLEKYNESFRMDKVTVLNRAETVKFMGSYRVYERRNYGSVSREINSFLNKYGDVEIKSKKIRDSGMKFTTVSFNFEL

SEQ ID NO: 5192 - protein, 261 aa, Methanobrevibacter ruminantium
MDNRNILIIIGIIVLIAAAGIILVMLTSENYERMEIVPNGTSIDVPLNKTTYDGEFQSARVWHWDKGILVTYNSHEDKNILRVSELGIYTLNKIIETGEKENIDGFTSYVINADEILEIELFDAIKLHYTGKFYCIPLANGTTGDVIIICSNDRDEAVHMAKSIQYKNVFPVNSDFNNTIETVENLSEYLESTVNDYANSTDFDNAVSTVENLTGNLESSAKDYVNDANLSDVKTTVEEKTGINIDDAKSDLEQYIGKLTS

SEQ ID NO: 5193 - protein, 76 aa, Methanobrevibacter ruminantium
MAELMDKIFVVIGYILAILFPIVGIIVGALLYFLKKEDAFYQTHGKYIIIVGIAMIAINILLIAFGIITIPPVGQV

SEQ ID NO: 5194 - protein, 286 aa, Methanobrevibacter ruminantium
MNESQDIEETTKVDNSRLEELLQLFKDDPSPQNVQELGEEIKSSQLYLPVVYSQSMIEDILSGDVGEVREFKEPAGFDINFLTNNRGEKAIPLFTSDRIMEEAGLRSSVIVMHVEDLVDSLQGTENTYQLVTINPMTETGIDMPILTFLNMFKKREMSEEEKRFLESMNRMLEVLENHSIALEEKTAFFNRGPQDFMKEVAVDGVFVPNIPFSVSTIKEFEEDVSPYLNIILMDEGKRIVYFGEPTEENPFNVLLAPGCEIEMVEEVDEFTTVWKCGNQPFYDGMK

SEQ ID NO: 5195 - protein, 47 aa, Methanobrevibacter ruminantium
MAKATNKYRGDYITRLNETKYVEFNIGNAPKAMIFSRCDISKGGRET

SEQ ID NO: 5196 - protein, 106 aa, Methanobrevibacter ruminantium
MSFPTQIRNEQEFRLALLHFLGDINVGLVYTKKFFKEFMGLDNSVRQILVNQIKNALKNPGCGKFMSHNYKGEKAVRVDKRYRLHFKYDKKENLFELVSFYKKDYQ

SEQ ID NO: 5197 - protein, 443 aa, Methanobrevibacter ruminantium
MSNECLRCGYANEDNEKFCINCGAKLMEADSSIPDDIISCYFCGYKNHEDNKFCIKCGTRIHHELPYENELTEIYTRYGDVVDFNKVSYNIYYKYNLPQDCFLLNSELNNYEKYHEEYDMECPFCHQNSFSVIDSDISIGSVKITEFHEDEYHCSSCGLEIKLCKKDDKKIPGRRYLIANMDNKEHWIWKKYGKTPLYKYELDEIFNGGLSDDDKARLLSIHADYNRKAIKIVNRFSIYVSVRFAAEILSEEENSLKPIDTTFFLDDDEEAYFMFTDIDYSKPMVRYSTFGQSQGTYDAVTYGQSFDNAFSYLNGRSFYADTMGYFSTSTYSSTVSYEKVKVVDRGILLLTNKRLIFSGSIHSLDIDIDKILNLVHDRQSLMIHVKGRSNIVKFSNLDSNTFYLNLDGRQLSLNFTGYLLRTLIVKFMSPKKKRNLLKSKGSL

SEQ ID NO: 5198 - protein, 105 aa, Methanobrevibacter ruminantium
MNISEKIKEMQGDLGKYHALEKKEGECGLENLIMLILNDGGQFGPGKIIGESSEFLDFMFYKRQGPIFSLSIKKEHLSGFSIFHKAIDDEKQAAANIGIPKALYQ

SEQ ID NO: 5199 - protein, 107 aa, Methanobrevibacter ruminantium
MNFSEKIEEIQGKVKSYNSEIKGMKNIPSEKMIRVMMAEGEILEPCMIIGESDEYIDLMVVDLDKGPVFTVSIKKERIVGFGTFHKPLDELAYPEEELNAVPAALYL

SEQ ID NO: 5200 - protein, 102 aa, Methanobrevibacter ruminantium
MQIIEKVEKELEKLGLTVDTVANDHIIEACVTKVSLEDNLSKVGIDFDQIEKKLYPYSTFVIQMIQHLDEGGSTEDMIRAFLIEALNYSLELGDAFGISLEE

SEQ ID NO: 5201 - protein, 82 aa, Methanobrevibacter ruminantium
MNKQNVFALILLTIILLSVVAVSGCIGKSSDNSASDSSGDSDDSSNSIFHSGSDSDDDDNDDNNDKDDKNDNDKDDKDDDDD

SEQ ID NO: 5202 - protein, 212 aa, Methanobrevibacter ruminantium
MIGDDDFFMQNADYHYGASDSEKMYGRGYDGSSDYVPRYSSGGSYGSSSGAESSEDGSLGKYCLIGILIVLGIVVFANIGIPAITNSLSSSVTVDDLNITRYIYSNQYNSKITTDYGYQITYKERSYGQHATNVIFYSKNGKVLYNDSQYMGTCYLGEVPYIIYFDGKADYAIFEVYKTQFDSGECIYRERVDVDNKNVIKEFINYDTLYDD

SEQ ID NO: 5203 - protein, 261 aa, Methanobrevibacter ruminantium
MKYCKICRKEFPRDLMFCPECNSFLEPVSHSKTLDEGIVEHGINRIIFFDTETSGLNPNYCKIIELGMLVIEDGKIIEEYDKLINIGERIDSTITRITGITNDMLIDEGVSEGDVAQDLKEKLISGTLMIAYNCQFDLSFAYGLLKRHYPHEAEAIIEDVKWLDPMTVFKDRKAYPHKFSDAVEHYDIRNVNFHRAIGDAKGLYEVCLSLKDERDDLGEYINVFGYNPRYGINGLKFPFIEYKKHYYNDSMVSPNNILPKI

SEQ ID NO: 5204 - protein, 315 aa, Methanobrevibacter ruminantium
MKLENFKYETNDNNLINYYEIDNDNPILLIIHAQSTNSSSYSDVVKDLSKRFHLILVDCYGHGKSSHNRDKYNIVSQGDDLIDFIKSKTDEKISVLGHSSGGLIACYISSRSDLCDNLILEDPPLFSSSGEKRFDYYNYHDLSTVCHNFINQDEEKDFVYYYFMNQYMWNFFPESSREKIRNKSGASALKYREKHPDKPLKVRFWPKNVLEAFNGMEEYDPYFGENFYNDSFNCDIDYAELLSNIKCKTLFLKANTKIGEDGIIQGALTDDDLNQVMNLIENIEVEYFDCGHGIHNEKKKEFVKAVIGTTKIFTI

SEQ ID NO: 5205 - protein, 1093 aa, Methanobrevibacter ruminantium
MMRKTIFGVIFIVFILFSISTVSANDAQVDMLNDASDVELNQDLNAQPISSNCYDNNQNLKAQPISDCSDELQKSDDDLKLSEGGSTSFKQLCEDLNKSDGEFNLTHSYKHDESDEENTAVFYMENLVINGNNNIIDSSKSNFNFKFSNEANITINDLTFTNFNKSLFVISDSQLTFNNVNFTNCSSNLSLIAIMFPSNLTINNCNFYSNSFANYLDGPFNKLEIYNSNFDGTNCLDSAIKENRGQLVIENSSFENFTGVHGSIINYKGDYFSIKNSKFINSNSNFTGGAIIVKYFPIAYEEGDSFVYRHSNDMLIENCTFYNLSSSSNGGAIHLDLDSGSEGIVETLIVKSSNFTDCHSKFGGAISILGGYLNISYSNFQNNSASFEGGAIYSSWTNAKIEGSNFTANEGSQNAGALYFDKGKLTINDCKFIDNKALKERERTANAIYAHDVAAYFSNSTFDNGGVSVYADFASDSKIENVDKNDDIFLMDNHDYIVSVESKGIKLNLTGNEINVDSLPSHFDARDWGWTTSAKIQGDNTDCWAFASISSLETSFAKASGVLYNLSQNYLQKLQLKYFYSGDKRNSLTGFSYSGPGYALSWYGVLPVDNGYDDRGMIADTDLEDERIHVQDVLFIDTGRDDAVELIKWAILKYGAVTVQRGINGPYGELPTEGDDIAIMSHGTHFISLIGWDDNYFELEEGDDDPLHKFAWITKDSLSGFSTADYTKFDAIDNYAIVPQRAAVAYIFENDIDYHVNYQTDLTGLVGFDANYNYYSNEFVSKYDEFIGAVGTYFNESGIDYSFDVYLNSEKMLSQSGVSEFAGFRTIKLDEYIHIKAGDVFKVVFKSNSIPFQAYSRQHYIEGMSLASADGESWSDLAPLNKTVCLKAYTVKEDKEVSPSRASTKIDCSNMTTTAVASADGRIGEYFVVTLKDQNGTVIANKPIKIGFNGRVYDRVTDENGSAKLQINLAYKGTYTFAIGFLGDENYLGAFEVAKITVNKQSPKLASPNKSYKLTAKTKTLNASLKSGNGNPVSGKKITFTVNGKTYTATSNSKGVATVKVSLNKKGTYSFTVKYAGDDTFAAVTTKAKLTIK

SEQ ID NO: 5206 - protein, 381 aa, Methanobrevibacter ruminantium
MTKLGMGMMRLPLLDENDFKSIDYDEVNKMVDLYMESGFNHFDTAFVYHEGIGEESLRKSVVERYPRDSFTVSTKLPLFVITEESQLEGLFKQQLDNCGLDYFDYYLLHNVSGFTENAWKNVDLYSFIQKKKEDGFIKHIGLSTHGNSEFLDGILSKHPELEFVLLQISYLDWEDEAIESRKCLEVAKKHNVKVMIMEPFKGGFLADVPQEAEKIMKDYNPDKSVISWAMRFVANLDGVCLVFTGASNSKQLEENIEEFKNADPLNDDEIEILKEVSQIINKNITVDCTKCRYCVDNCSSNIDIAKLFDIYNKHKLLDTDEWTPHGNAYLNYSKLPDVGIASDCTECEICIEECPQKINIPEVLKDVAKTFETGIYGFGNE

SEQ ID NO: 5207 - protein, 66 aa, Methanobrevibacter ruminantium
MSEIPVAPVVRILKEAGAERITDDAKKAFADAVEASAEELAKKVIKAAAHAGRKTVTVDDIKFVCE

SEQ ID NO: 5208 - protein, 735 aa, Methanobrevibacter ruminantium
MGFLDNVKKIFDSGENKEVKPRNGTGKIDKVESVESKSNYVNFNEKDEQQQNSEDLINDEILDESTSNETRNFTYLNNLIHSGVKEIILDSDIVYGNEDEESRHGIKLNLDNLVIDGNGYTIDALRASEIFICDARNIVIKNITLKNGFSHQAGAINNQGELTIIKSSINNNEGKLAGGILNLGELTLDESVIAKNKAEHTGGILNFFGKLSITKSTLKENIGIGNKAISNNGGELTINKSRIINNQIDTKTNFVNKARTVFVNKAIKARRDAVISNGGYLRISDSEILSNESKYIILNIEFSRIYNTIFKANESQYIIYNDNYEDNGLSSLGIFNCKFIENNAKASIVYNDGNLCSIDNALFENNASHKNSNIITNKSNLTLNNLKIKDNGKNILNDDYIFIRNLSPQIESKIIGEGLAENIKDIKPQEEKFDFGYLDKKIHDNKTGEIILEEDIRFENYEMDYYEGGIELDMDNLVIDGKGHTIEGAKKSRIFLITGKNIKLKNIIFKNGFLYKDYDNLMNNQGGALKTNSNCSLTVENCKFLNNFSQDGGGAIHSKGNVDIIKSIFTSNTVKMFGGGGAINNDGNLSIRESTFTNNSAERYGGAICNKGEISLFDSTLTNNIAKVHIFKTSYGKGGAIYNKGKLTISNSSLSKNTAQISGGAIYNWKHNERYEPIITKQRGSEAMCYEGELIITESTLYNNTAEESDGAIYNEGKMNITDCDINNDSNNKNT

SEQ ID NO: 5209 - protein, 468 aa, Methanobrevibacter ruminantium
MTTLKLTRLNEPNIEKLYEMKSALRNILEEGDFKNLNTILDFQDKDGSFKLFSTYRIPSDARVDFCHEPTYICSSILMKAYLTGDSELRQKIETPLIHGLERCCCRNLTGHGYDSLQGQIDALNIFMKGGLREFIDLHPDLNSKFTEMILNIMVEFDAREEQGIFKGTWGEDYKEDILKINEYFSTRKVFVYGTLMNGESNHHFLENSICLGKAAIEGYDMYNVGGWYPAIIPGNSRIIGELYEVPENDMASIDMLEGEGSLYIRKCEITTGNELAYIYEYAQDTEGLEKIDSWKDYVWYVSYGSNMLEERFLYYIEGGCFEGSASYRYPCEDPTRPLEKRAIDIPYDMYFGNYSGSWHGGGVSFLDTEKEGHALGTAYLITREQFEHVAAEENGGRPPNGNGYWYENIINLGEMDGFEMLTVTNKDLREYNRPSDEYLETLERGIRENWPDMSEEDIDDYLNSCIRE

SEQ ID NO: 5210 - protein, 352 aa, Methanobrevibacter ruminantium
MKHRLNLDNKDPNYILLKEIFKIMDSRESKRILVSYGFKNLNRTIFAFKIIFISMFFEIDIPFILNELKSNRRLCKFLNISEVLTADQVYKIFSEINSEKLIKSLNRILNSRNMVKRRGKKTFIVDATPVDLDINFHRNKKTKEHLEKINLKWSYSSSKGYYIGFKATVVMDYDSMNPVCILIHSGAPNDAGLFEEILENLQKRRIIRKGDTLIFDKGYYRYKNYQIGISKYKIIPFIFPKEKFSRTRLDDILTYPLAVFNKTKRIMKEKRLYNSLKMELMKKIDSWEKFKPIRGKIEDFFKLLKQGLNMREIHKYTLKSVEKTVYLNVFLGALIISQGFYSKTTIQQLSEN

SEQ ID NO: 5211 - protein, 808 aa, Methanobrevibacter ruminantium
MNNETNAFTGNNPELYNRLKSSINNAESIDIIVSFLMESGVKLIINDLKEAISKGVEIRILTGNYLNITQPQALYLLRKELGYNLDLRFYNVANKSFHPKAYIFHNESDSEIYIGSSNLSKGALTDSIEWNYHFKRSKNLEDFDSFYQNFEDLFYNQSTIVDDEALRDYSKKWTKPRFPVKEAESIEEYTQTPSETLFEPRGPQIEALYALERSREEGFDKALVVAATGIGKTYLAAFDSIKYKKVLFIAHREEIIKQAAKSFKNVFPTKTIGFFYNQHKQTDKDMIFSLVQTLGKSSYLNDSYFKRDEFDYIVVDEFHHAVANNYKKILDYFKPKFLLGLTATPERLDNRDVFALCDYNNVYEIRLKEAINKGWLVPFRYYGIYDDTIDYSTVNMRNGRYDEKDLEEKLMINRRANLVYHHFLKYTSKSAIGFCASRNHAEYMASYFNEHGIAAASVYSGEQGEHSQNRQKAIDDLRDGKLRIIFTVDIFNEGLDLPSIDEVLFLRPTQSPTIFLQQLGRGLRKDKGKKYLTVLDFIGNYKKANMAPFLLSGKDYDSRTLLREAVLDFEYPEDCFIDFDFQLVDLFKYQAKSELKAKDRVVIEFNSVKTELDHRPSRVELFLHMDDAIIGAMKRTPKINLFKDYMSFLNDNKELMDEEEEFLNSPAHEFLKAIENTNMTKSYKMPILRAFYNNGSIKMAISDDDVYLAMKEFYDYGSNGVDMLKDKSSRDYKSWSKKDYVNLAKRNPIKFLKKTHGDFFIDKEGFALALADNLEQFINLDSFKRHFEDIIEYRTLSYYKDRFEKKQV

SEQ ID NO: 5212 - protein, 192 aa, Methanobrevibacter ruminantium
MSENYYDSNADDFFNGTVNVDMSPQYEDFLNEIPKNGHILDAGCGSGRDTLAFKSLGYKVTSFDGSIEMCRLASNHTGQEVLHLQFQEIDFKETFDGIWASASLLHIPTSEIDDVLKRLKKSLKKGGAFYASFKYGSFEGERNGRYFYDLTDITAKELFTKNGFNIKKIWFTQDARKEREDEKWVNILAIKD

SEQ ID NO: 5213 - protein, 209 aa, Methanobrevibacter ruminantium
MICPNCNKFYNDNFAFCPHCGAEKPEPLTCPKCGFKSNEFKFCPKCGAELKKSAIKKPTKTCSNCGHENAINRKYCERCGTDFPREENRRFETKIEQPKRILLDYVNKFQIEENIKKEIINDINNEKITTKTEITIRVRQAQKEKKEQDKIRKEKEEKERMLENEYYRNSETNTQYHTYDDKPDVFYGGNEYREIEENTLGEYNYYREY

SEQ ID NO: 5214 - protein, 179 aa, Methanobrevibacter ruminantium
MTEYTICPACKRKNSIKEKYCLDCGQKLIEEKENEIIRDDKLEIPKDKIILLDLNYTLISNSWKIRHEELPQKILKRQYEDELVEKIKDNYVILITASPYKTSFDSLKHIEENTDLKISESYWNFGKRPPELKEYWLKKAVLPSHGDDSSKYLALESNKDTREMYARFGIEARPKSDFI

SEQ ID NO: 5215 - protein, 278 aa, Methanobrevibacter ruminantium
MEYYLQQLTNNHLEYLFELKFVTSEFELPGLADDIDCKKLEECGKKSESLRIDGLGFDNKTNSFVIIEYKNQYDKCVIDQAKCYYKNLLDKKEAYIEKYYEKFGKDKEVEFDFDKTRAIIIGPEFSEQQKNRKDPDFDFELYTVSLCKYNNKIYRALYKKVDSNFKRELYFSSEDLKITRCSLLENKSDKVKKLYKDFENILFERFDDDFILDIRYIVDGVSITAEKSSICLLRVNKKSIKIHFYTDELEDETLNHENICDVIDNINTIYNQKRRNKK

SEQ ID NO: 5216 - protein, 186 aa, Methanobrevibacter ruminantium
MENPVDITAIDGIKRISKSYDIDTSEYYDDGLYISWISLIKSKNDTVCPDCGSKLMPLTLCPSEEMMELDEMGFDLENHNYYCRNCDYELYIDVLNIDCENHPIECAYLYYKLDEITKYIRHNEYSDELKSKMDYFDDEEFNAFISKLKEVDYIYEDEEGYVKLVDDVENHWFRHYIKYKRLCREL

SEQ ID NO: 5217 - protein, 39 aa, Methanobrevibacter ruminantium
MSIDKLLLEIYELIESEDYEKSLELCNQILEFDENNKDA

SEQ ID NO: 5218 - protein, 499 aa, Methanobrevibacter ruminantium
MRMTPSSHSSLKKAFFKKNTYGGITMNKIKLTRQDEPDFDELYRMIGELKDFLKEDMGSRNWMKNLETILDFQDTDGSFKLFTSYEIPSDARVDFCHMPTYICTAILMKSYLIGDSKLSKKIDRPLRRGLKACCMRNLMGHGYEALEGQIEALNIFMKAGLREFIDLYPDMSRKFSKMISNICGSNFEMLESLRNALLGPWGEDYKEDILKINKYFNTRRVFVYGTLMNGESNHHFLENSNCLGASTVEGYQMYNVGWYPAIVPGDGMIIGELYEVPQEDMARIDMLEGEGSLYIRKCEMTSSKSLAYIYEFLEDTEGLDRISSWKDYIWYVSYGSNMLYDRFICYIEGGSYEGSSSYRMPCEDTSAPVEVRAVEIPHDMYFGNYSGSWHGGGVSFLDTEKDGHALGTAYLITREQFEHVAAEENGGRYPDGTGNWYEDIISLGDMDGFEMLTVTNKKPREQNEPSEEYLETLKRGIRENWPDMSEEDIGRYLNSCIRE

SEQ ID NO: 5219 - protein, 280 aa, Methanobrevibacter ruminantium
MVNYGDDSLENPDDITLPFFAYGIFKPGEIAYSNIKKYIGKKNEKTINYAMKQRDGVPILLPEENNGKTHGYIFKFNDNERAYDTINHNLSNKLYEWGTIEQGKINVLFGKDPDIGSDDIGPDFDRENYKGKDDPFFKEALAIKQYVESNDFTSKDDFYDLQRYYILLWSAIERCCKLKYNKESDGKNREEFSKEKEFIDALDKCDETNYREIYKTDDLTPRKFDTDEPKWCINYYYTLRCNIVHRGKSNVNRDMGLLLQATKDLLNIFEHILDETFKEE

SEQ ID NO: 5220 - protein, 137 aa, Methanobrevibacter ruminantium
MKKIILGTCILFLLISVAYAGTVDIFTAPSPLQPLGNSGFGDGQGHNIQIFEFTENLYKTWFENDTDYVVEKYEGNNGLYLYADDENDCGILEIVEKDGKKYIVNSWTPKGPSEAQTVVENLHDFNELNHLTPITTL

SEQ ID NO: 5221 - protein, 317 aa, Methanobrevibacter ruminantium
MNIDYDGHNSTNPNNNSIVENNNNNQLSLQVPQKYEDYDIIEELQCFNCNQHTFIQLNKKSLLSNKVVYYCTNCGMSFEKQGNGFKLVDISDKSNRMWELYNLKTLTWPEWERIANGGLSDKDQAEKDKQLAIEKQKELELQRKKDLEIVVQELAKGEVNLKPVSSPVILKKNETAYLSLPNITLSEPRAVRVSKSGGYGTSYRFAKGFSVHSGVGESRSVSHDEIMAIDTGTFVITNKRVIFVGNKKSVNIDLKKILSMTVYKDGISIQRENKQKIEYFTKTNRHSMDFTIDGRTHSLPLEGYFIKAIILGQIANL

SEQ ID NO: 5222 - protein, 282 aa, Methanobrevibacter ruminantium
MRKERIKSYLGIIFDLLVILDLILIFISLPIQGLHLIDYAGFVRAFDLTICFLLLIEFFYGLYKSDAKAKYFKEHFLDLIASIPFDLIVFALFGSSSIILNLARFLRLVRVVRVFRAVNIVKKYGLEKVIRRTHADKIFIVIAVIVVIFTILLTLSGHENISDSFYFVVITLTTVGYGNEGFNEPLAKFVTLFLIIVGVLVFSTITGVTSSFFIDKMLEEGISVDENLHFINQKLNFHEREMEKTRKELAEIKKELEKSNENSEELKQEISELKELIKENNK

SEQ ID NO: 5223 - protein, 347 aa, Methanobrevibacter ruminantium
MFCHNCGSEISDDANFCVNCGAKLIRLDEEKAQPSKSSSRGLSNKKTDEQKETSSGRGLFNKKTDEQKETSSGRGLFNKKTKEQKEAIKEIKSYTKGNYKRFRQIIPRYGILAMEVSHTKVFNGIIKTIRKEIENENLTADQIEGRVFQLLTEEYGEPMSQEEADELFNQQNLQTKLENERKLEQKFGVPFQNRVWFKCTVEEMRHSTFTNTNDRDIVDGYVFVEDTFLEIVKESVFLKSKMGTRKIFYDNIASIDHDAKGRLNLSSSLEIYLKSSDRVQLKHVNKGMVDLVTGKYNEYMENKINDNAENVTNGTNSNVDELMKYADLYERGLLTQEEFEQKKKELL

SEQ ID NO: 5224 - protein, 225 aa, Methanobrevibacter ruminantium
MKINLKRVILGIILILICISSASIISAYSIDSMEIQGGCISTGSGLEDKTYATIYVGEEYTGADVLIQIYYSRDGSQLNPGNKVPKTVDSLGCIEVPSANAFKYYPDLAEINLYDSDGYLIDSRDVSLSIHSGEQTFGDFYGSSSSSSSYSSSSSSGSSSSSGDGSTTTYHSGTSNSYVGNSNTGKFHAPGCDSVDKMKPSNKVYFSSRDEAISRGYSPCGRCSP

SEQ ID NO: 5225 - protein, 243 aa, Methanobrevibacter ruminantium
MRLKIILKSKKNRLKIPFNYNHIVSAIIYNKIADIKYAEELHSSNSYKFFTFSQLNIHKFKRIHSGFLSQNGKIDFLISSPDDYLIKSLVEGFLNDLTINFIGEDLLIEKVELLPVPDFEEEINVKTLSPIISRTKKEVDGELKIWDLAPGDHFFKNLENTLIYKYLEFNGLESNDKNIKIFSEMRNVKRKRIIIEKGDKQTYHRAYMMDLILKGDKELLRFAYDAGLGEKSGLGFGMVKVIN

SEQ ID NO: 5226 - protein, 719 aa, Methanobrevibacter ruminantium
MISDLVDFGKWLVENNEDGIGYMVKEDDYLLKITYNNEIDDFVIDGIFENDNEIVLGFYEKSIFNDILPTPRGSSDQNITIANNTNLMGFSPFLLNLDSDFLGRKIKPENYDNESDYYKVGSERFLKKKAGGKFKLEKTLDKFTRSLDDNKNNKQFNNDIITKLFDNPNELFLKNIPSQYEDIFIQEFFNNLSKEEYIKIINKFYKFLDMNKNDILDRVIKFKLEENVSSRFFIVGVFGDYRDLINDLCFLYCKLIKTRNKHIENYDGGICSIPNCNNHSITYPSIQFYAADKKFYFNYSNNIENSSLRLCDLCNRYMLFAFEKLKANFKGNILVIPKTYDGDYSEFLEIIQEDNDFEVINELLEENSKKFTYDFLIYTPSNALLKIEKYIDNYQAFLTKFDDINLYNYGNLNYLYNEVLVNDESSLDEDRIIIKISNLFDFQIIFKELFYEVDDGRLKYPKMNYFYQIYNKELTGENGIFNGFSSKTVNIFSKYKDNIFSFIYEANFDALNKNMINTIVLNSLTIFQKNSIKKSIRFEIVKRLNYWFMFKKEFLGDTMLLNENVLKLRQIFGHPNITTGENNNEKIEVVFDDVEKKQVLDLIKEDNAIKYYLIGQLIAYIDDFKYSSGKKREVFTNFITNAHRNNIKKLFATEILQKNVFYINQMNKKGKFLFTMLESDYGSLFNEEDLSYEDYILLLFTGYYTTKFLKKNYVYNGDE

SEQ ID NO: 5227 - protein, 319 aa, Methanobrevibacter ruminantium
MTEGTPVRNYYQGIYLTETIMGNPNGDFIDNSPRNVDGAVFTTDKCIKYNVRKYIHDTLENFGEKENIVFFFPRLIDSTNEEDMKFKTRDQVFEHFKNFEEILKVSPDVRMFGGTFSVDNNAKQIYGPIQLSYGLDINGAQIIRHQIGAPFATSEGSQKTVGSESVVDDAIIAYDITINPNNYKDLLLEDDLELFKKALWEGTNLRKTTSKKTDSKLLILIKFKNDSENDKVDAINMGELKQLISIKGGKSKKMDENTICLDCENLVKKIKKYEKYIECIDIYCDSDDVELNSLEIDGENLKDTNIKVNIYEPLSLLSD

SEQ ID NO: 5228 - protein, 287 aa, Methanobrevibacter ruminantium
MKIIEVDIWSSFGCFSKHFSNTGGVLTHLIPPKTSIIGIIGAILGYDVNDYEDNDDGTKTYKIESLNNIKVSIYPLFEFKTKRVIFNLVSGTNLDLDIKNINQDVLISPRYKLFISFPSELDEVEELFLNRVKNNKTIYNLYMGRNEFPLNLEFVREINAEKHIFSNDNSDELKSIKVYGSLNRSSIKSLNLSYEDNDSKVDSDALSLISSLLISNSADGVRHLKSFHEFTIKDYPIKRENFTDFSYSPVSFYSSKKFGECFFSNLQLKDGEIELVNIGDDKWLSLI

SEQ ID NO: 5229 - protein, 941 aa, Methanobrevibacter ruminantium
MVISHLNFNENESVIEINSDYFKVYAHKNELFNEHISKTLNIFKTIKSENILINFYDWFKDQGYIHLTFEEFNFLIEECVRFHDVGKLSFNFQLKRLNKNNPAKKKEQINVLKKFGLDSILNQFEGNHSLSGALSFLSKYYDVLPKNELFFLILAYVIIGHHTNLKDIVSQDDFFYKEFEENQALSTTLKFFALFFGLNQSTINQKFFQEINDIGFDFLENTINHYDSSFSFFYSYIYSLLISADSLATSEYKNSTDQIDYSKFNHRISDKLFAHMYKSFYNVKHNRNLLNETFNLNDICPEDINVLRKAMLLESSETLNNALMDDDKKIFFLNMPTGGGKTNTSMKLALDMVKNTDANRIIYAMPFINIIEQNFDVICKSFGLNEEEGNIRQIYSASETIFNKSDEETLEIILSDDFFNYPVICTTFVSLFNPIIKNNKKYKYRLNALSNSVIILDEIQSLPLRNWVSLYFIINELSEKYNIYFLIMSATLPSFDKLKLENIRDDDNFLNYNNVSLINNPEKYFNHDLFSRTNINGGIKKLGINDDCSIDYFLEIIRENFSQDYNKGLIVLNTIKSSRLIYDKLKDFSQEYNFDIDLLNSSILPNRRKNIIHKINQEDLSNYILISTQSIEAGVDVSFDFVIRDFSILDSIEQVRGRCNRSRELNDKFHDSNIKGNVYLINLEDDNSNLYKYIYKDVELKTRIKETINLFNEGFELNDDLNYQYSNILTYYDNVSLDINDVHDSMDQSFLRNDRRNIVFWNKMKYSKIQKKKGIHIILNDLKQYSIFIPLDIKIYDDSLNLDKTIEDMDLNELREIYDEFGKHFIFSLNEILFMKENSDFLIEGDYVIGEEVLNHFQTMVARVKDDYNQKLLVEKVFSSILSNFIMNISFNNSDLEEQIKELDKESYFYILEKNMIGDSEEHFYSEEYGFNFKPTITNIL

SEQ ID NO: 5230 - protein, 168 aa, Methanobrevibacter ruminantium
MSDYMKSINGTQINYYFICKTKLWLFSHNIQMEQESDNVSLGKQLHETSYKKEKEFLIDNLINVDFIKNKDPIEIHEVKKTQSMEISHEYQLLYYMYYLKKEKDISNTVGYLNYQNIRKQIEIELTEEKEEELETVLNDIKSIVDSDVPSPKKSRICRKCAYFEFCFA

SEQ ID NO: 5231 - protein, 322 aa, Methanobrevibacter ruminantium
MSKKNYYLLSEGILKRKENTIYFVNEKGSKPLPINKIYSMYAYGQITISSQVISLFAKEGIPIHFFNYYGYYNGSFYPRESLLSGDLLIKQAEHNIDFSKRLKLAKLFVEGAAKNILKVLAYYKIENNIKNTLTELNESSKITEVMNVEGRIRAEYYQYFDDILPDEFKMEGRSRQPPTNMINSLISFGNSMMYASVITELYNTQLNPTISYLHEPAERRFSLALDLSEIFKPIIVDRVIFYLVNKKMITEKDFNQDLNCCLLNDKGRATFVKEYNKRLETTIKHKDLGRKVSYQRLIRLEAYKLKKHVFGMKEYDPFVIWW

SEQ ID NO: 5232 - protein, 88 aa, Methanobrevibacter ruminantium
MYVIIVYDIKVERVNKVKSFLRQHLFWIQNSVFEGELTNSEYKAVTDGLLNIIEEDEDSVIIYQLMMEESLTRNVLGVEKASVDDVIL

SEQ ID NO: 5233 - protein, 233 aa, Methanobrevibacter ruminantium
MDEWKVGDPSDWGDHVGVPDIPYMGYINDDGYEEDYSTFPEENGGSKPKSLGSPEEDHGKILLVKAKVYLKWGNLDGAMSCINQAIDIFKNSRRIGYYENSLHVKGMIYEKMEQYARALFFYHKAFKVGECVSNAFDDRNKLIDGDKIDILKEQFKDYRTAYPFGSSLKRDDFIIYWDLAWRINEDSSDTEKLELALEVIGFVKRMAPSIEFVGREKELYENLEKEILEKINK

SEQ ID NO: 5234 - protein, 59 aa, Methanobrevibacter ruminantium
MGECPYCGKDVDFTEVCPHCGADLSEFDDRCPFCGVLISRAALICPRCGSDVYEFWYGD

SEQ ID NO: 5235 - protein, 159 aa, Methanobrevibacter ruminantium
MDRKDIIIIILVLIIISLLALGLHNHQVTDQGTDLYRTVKVSPSFSLDVPLSSNLTRENVSENMYIVNDYQNDIQIISFNMKNASKMDLIEDGYQYLKREESYKFGAEEIIKISNHTVWHNKDDGSYIAFFSPNNTEDNIMLVTHDNITMARILSSARY

SEQ ID NO: 5236 - protein, 401 aa, Methanobrevibacter ruminantium
MTSEIMILTPTAVVLAADSAVTISDIKTYDGANKLFYLSNKPPMGALIYNLADFVDIPIETIIKEFRRKIDGKEDLSLIEIKDEFEKYLHQIISKSRSTLSFQEQLDYFIEFIQEELSYVDFDEFKIGLKDELSDFDIGLLGDFKDEVQSQIDLYEDKFSLALPDDCNGLDEEDFISDLKKLFICNMFLMPFIGIAISGFEKDEMFPSFIHFKINYLYDEEFLLRDVEFGSIGDEEVILKALAQDDVINTFLNSIDSKTERALEDFFIEFKNFLFNYIEYCIKSNEDISEENENFLLENISDMEFSDEKVRNIFIGFIECLKAKQKKPILDSISVLPKGELSNLADSLIGITSLRRKIEDEVETVGGPIDVAIITKGDGFVWIKCHDSFDKDLNPQFFDSN

SEQ ID NO: 5237 - protein, 58 aa, Methanobrevibacter ruminantium
MHYLEKYKLKSFRRKPKVFRRKYNPFPEGFVENFVRKSFGEILDSKMDNSNQLSKEDK

SEQ ID NO: 5238 - protein, 110 aa, Methanobrevibacter ruminantium
MNLYKDIFYLAGFICHQKPERSFHISHCQLPFCARCCGIIISVIASFILAQFVAFPMNALAFLLFVPMIVDGLVQKYTDYESTNFRRFITGFLFGFAYVYVFYMFGLNAL

SEQ ID NO: 5239 - protein, 226 aa, Methanobrevibacter ruminantium
MEYEIQGGTFPIVVCTLQEGETMKNETGAMAFMTSGMKMDTNTGGGLLKGLGRALSGDTIFLNYFTAQRDGEQVGFSACSPGRIMPIRLDGTNTIIGQKNAFLAAEDSVDIDIHFRKSLGAGLFGGEGFVLQKFSGTGVAFLEIDGEIIKKELAPGEKLLIDPGHLAAMEESVGFDIERVKGAKNILFGEGLFFSRLTGPGTVWLQTMPISSLARALVPYLPTTTE

SEQ ID NO: 5240 - protein, 83 aa, Methanobrevibacter ruminantium
MRRIDELTIEIDQTSLELEQTKKELSILFKELRSFKKKIENGIEIDRKEYEDCVFNNKLLQMKRRRLITHLKFLNKEFYEILY

SEQ ID NO: 5241 - protein, 286 aa, Methanobrevibacter ruminantium
MKILKTWIEKLDIILSILIVLDISFLTASFLLDLNTTYINFMLLFDTTLCWILIVSFIFKLLNSDDRKAYMRENYLDFLASIPMDLVLLPFSSLHISLINIVILVRFLRLLLLFKESYKYVKKFFKATSFDKVVALFIVIVVGSTFALEYFDPAIPNLYYSLWFVFQTITTVGFGDVIPESPVGQLIALGLLMVGVLMFSIFTASFAYLFNEKVFREENEDFHEKINTVRENLAENKERVEEIRQSTLSTSEEIAEVKEKLNKSEENIKNLEERIDYLIDMIEKKE

SEQ ID NO: 5242 - protein, 192 aa, Methanobrevibacter ruminantium
MDFNFHRIANEIAKIPDEKIKDLSWEDRVKELLSFRQYYNQYHESYGKDYLDFLEKANKEGDLEKKEDLIYFFKKETLTKDINLDGLNYLFVNIFLKYGFEYLDYNDTINNLKDKYDLNFKHDWISLLSKEDLSLFESINLLNYIQRSDYWDYEHMPLSYAIFDGTIDNILKGMENNLDEDNLELLDVLLKK

SEQ ID NO: 5243 - protein, 470 aa, Methanobrevibacter ruminantium
MAVYKCSVCGYEYDEEKEGKPFSELERCPVCKQPASVFEKISDNSTESDSNSNEISSNNETASELSYPTETSRTDSSIAHMSDIHKMAVEGTSIIDAMSTRLPMPSWDDILIMANQLNPFPLEEHADVSTTTVIGKNALKPMVLESPIYISHMSFGALSYETKVALAKGSAMAKTAMCSGEGGILPDEMANSYKYIFEYVPNHYSLTKENLMNSDAIEIKIGQGTKPGMGGHLPAEKITLEIAELRGKPMGEDVISPSLYGEIKSKEDLKDLVSHLRKESEGRPIGVKIAAGRIEEDLEFISYAEPDFITIDGRGGATGASPRLIRDATSVPTIYALARARKYLDENNLDIDLVITGGLRVSSDFAKALSLGADAIAIATGALIAAGCQQYRICGSGNCPVGIATQDEALRKRLDMDKASKRVFNYLNVSNEELKTFARITGHDDVHDLSVDNLATFNSEISDYTDIRHV

SEQ ID NO: 5244 - protein, 1297 aa, Methanobrevibacter ruminantium
MGFKRLKRLFSSDNDNEMEKNEEKNKSGEETFYEESDEKAFYTEYDDSGFILDNNSDDSFNNGSDDDLSLNDGLKEDLNGSDDNLSLNNGFEEDSFGSDDDLTLNNQPSSNRNFNYLNNLIHSHQNEINLDSDIVFDSQMDNTYLEGINLDMDNLTIDGNGRTIDAQKKSRIFNVLGENIRFTNITFKNAYSNEDGGAISIGNYSSVYFENCHFISNDAGENDGGAISIGENSICTIKDSVFKQNKADSGGAIVNEGTLKIMSSNFEYNSSQVFGGAIYTHHSKVEIAYSVFKNNISSSGGGIYVLFDCDMIIEESLFIDNASMSEGGAMANEYGGKIRIHESLFRNNHSLIGGALCNKGSPVDDGKNLVSVSDSKFEYNSSIENNDTIYSTGVLKLEGNTFNENDRILASNNPEIINSKYVEATEDIIDLAKSIDYSIAGESNLFELLDSDIRNFNYLENLIRSSGGEIILDSDIILGDDEDYTDGIRLSNENLRIDGNGYSIDAKSRSRIFSISQCNITFENLRFKNAYSEGNGGAIYSVNSFLTFKSCSFENNSSDNGGGISTENSTNEFKTLSTENNRNEFKTLLFEDCSFENNSSRSGGAISTENNDLILKTCLFDRNESNLGAAIICQNGKVRLDNCGFKENIASDGAAIYYSSLPIGTYINDDSVNFLEINDSVFEANRLTGTNLTVSIIDCDCSISFNSLSFKDNKFDYGDLINQKYLENKNSIIKSSKFIGNGGGITASNLKVISCEFIDNRSNAFSSQEYFYDGSSEIEDCTFKNNHCAISSHESSLKIKDARFYGNDSAIMNRGKAYINDSRFRDNSMAIENSANSYMFASNLNLLDNASGESHDMINQGHLSVIDSDFINCNKTLNLICQEDNEDAVLDIEGCSFKTDSKRPISINGGSSSILYSRFELDQSKIAIFNDSKLNIDALSFKDYEGNDLEGKLIYNNDYLKSKTRDILDKIDSSESAITKYAYETLPADWKGFDYLINLIKESNGEVKLDCDILINDIEEDYYGGGIELFEDGLTIDGQGHTIDADNLSRIFYVVGNDIVLKNIKFINGFEPLDQLFNRGAGAIYIVHGASLKIVNCEFYQNSSKSFAGVIANKGDLTVIDSIFRNNFSNRAGAFLESRGESHFIGCRFEGNNAKSAGGAIAVSQKGKTIVEKSSFKENELSLKGSSSGGAISNSGELDVIDSEFIKNKSAASGGAINSSSHAILSVRKSVFIENASFLGGAINADRYGDLIVMDSCFKANAAAYSSGAIYDSTDESGVHGCEFLTESDKVKYALED

SEQ ID NO: 5245 - protein, 508 aa, Methanobrevibacter ruminantium
MEEEYLTVTKLNYHIKRLVNSDSSLKNVYVRGELSNFKRYPSGHLYFTLKDQNSEIGGIMFKGPASRLKFEPKNGMKVLINGYVDVYPKQGNYKIYAQKLTEDGIGDLYIAYEQLKRKLSALGWFDDEHKQEIPKFPKRVGVVTASTGAAIRDIVITIKRRWPLCEIILFPSLVQGNMAPKNIIKQIILADNEFDLDTLIIGRGGGSIEDLWAFNDETLAKVIFFSKTPIISAVGHEIDWTISDYVADLRAATPTAAAELAVPDINEIESNIKNLDDRLNKVIDKQFNENKDSFEKLVNRNLFKNPDLLYNKKIMYLDSAKSRLAVCSKNMIYDNKIRVSNVKSSLIFKNPKMLFESKSNKYNQLKYNLNSSGKILIGKKESKLDKYRNSFVFKSPNRLFESKANRYFKVRTNLEYSSINLLRDKKDNLNEIKKSNPIKNPQSILEPNEIRLDKYIDKLDVLNPLNTLKRGYTVSRVDGKVVSKAKDVKKDDILEVEFDDGNVSTKVL

SEQ ID NO: 5246 - protein, 83 aa, Methanobrevibacter ruminantium
MENIEYVESNIENLSFEESLAELERIVNRLETGEVPLDDAIDEFNKAMKLVKICDEKLNSAEEAIAKIVNENKEVVDFEVEEE

SEQ ID NO: 5247 - protein, 244 aa, Methanobrevibacter ruminantium
MVKFEIKSHDGPGRYGKLDGMESPVILKESDLNMAPDESSAYDIEREIAEWSVNETLKLAREYEDKDIAVIHGSKYIDLRVKCLKELEEMGYSGFIIANADDLLLHPRDLVDLIVELRRNMKSSSILIFPHAEAQFIPLLAYMGIDAFFDDIGEYYSYLNVLMSPTKNYDLKVYELYDLTREELEEYNKNTIDFVLREVREHMKNGSLRNLVEERSATSPQYASALRILDKEYADYLLEYSQLY

SEQ ID NO: 5248 - protein, 148 aa, Methanobrevibacter ruminantium
MVDKDLVVPRYLNQLMDIVKSYEMYIRSNIKDLDITMGEVPILLAIYDDEGLNQIDLVKKFHVTEANISKTTKHLLQKGFIIKEIDSDNNTKKLLYVTEFGEEICKELIEFYEVWKNEIISDVPNENLSIFSQVLDTFTNNSQKYFEK

SEQ ID NO: 5249 - protein, 358 aa, Methanobrevibacter ruminantium
MSVLDRLKSLIDGAKEDIDSSLTKEAESIKEAADSMQTSSEEEIENISDSETNSDEETSKVEDAEEEVIIPIHAEEAEDAPEEEAEEVPEEAEEAPEEVEEAPVEEAEEETDEEVSVEEITEEAPEEEAIEEVPEEEVSLETEEIIEEPSEEDSTEDEEPSEEEASEENEESDNMTLLKENDIYSMDDIDKEFTQKFIDAGIETVDHCFQCGTCGGGCPSGRRTPYRVRQIVRKCLLGLREEVVSDPALWMCTTCYTCQERCPRSVKIVDIIKMARNEAAKAGYMADAHKATGSFVIKFGHGVPINDKTKELRKAIGLDELPPTVHSYPDALEEVQKICAACEFDKLIGFNMETGELE

SEQ ID NO: 5250 - protein, 294 aa, Methanobrevibacter ruminantium
MEIAYFLGCIMNNRYPGIEKATRILFDKLDIELKDMEGASCCPAPGVFGSFDQTTWATIAARNLAIAEEMGADIMTECNGCFGSLRECDHLLKENPAKKDEINAILAETTDKQYKGETKVRHFAEILYNDVGLDKLSEMFTKDLGINVAVHYGCHFLKPTAEVGIEESAENPTILDELVEITGAKSVDYKNKMMCCGAGGGLRARDIDVTLSYTKEKLDAMAEAGVDAIVEVCPFCHLQFDVGQTEVNAKYGTDFAFPVMHLAQLYGLAMGLSAEELTFDAQLIDAAPVLEKLA

SEQ ID NO: 5251 - protein, 89 aa, Methanobrevibacter ruminantium
MFIAILGGIFRFKDLPEEYGSYVQFKAAIEGRDEIKDNDEIAILDITGTGSHHVLFLDRYNNINEIKKELREADAKVNVTTLKILEGHL

SEQ ID NO: 5252 - protein, 175 aa, Methanobrevibacter ruminantium
MSDLPIDQSWLVIANLSNDLHKRGIQIPKQINSDLGLVKSQIGFYKKDPTHPDMINEMARAEMSLNQIQGILLSFAENIGEDYYNEWLDKLNRANLGEKIYETPSTQSKFLINAPPGFSYAKMTLKKPLAEDRVQEIAEYYGLILEFDSDVTIALYGDKPDIQAALKEMAPFFSE

SEQ ID NO: 5253 - protein, 238 aa, Methanobrevibacter ruminantium
MKILAISDIHGKRSENLINYLKKEDISLVLIAGDITDFKLEGYDDPLDFVKPFIDELVEEADVDVFAIPGNCDPAGICNAIKESGPDEKPAFCLHNQLIAYENVVIMGYGGSNPTPFNTPGEIDDDKIYLHVYELLAEYDYIGNDSIPRVTILLTHAPPYDTKADTIESGAHVGSQGVKKPIHEFQPNINICGHVHEACSIDKVGNTTIANPGILEENHAVLIEVNEDASYNVEIVEL

SEQ ID NO: 5254 - protein, 383 aa, Methanobrevibacter ruminantium
MSYQENNASDKSLQDKDMKAKQRQDRIVKTSIIGIVVNLILVAFKATIGILVNSIAITLDAVNNLTDALSSIITIIGAKLAGRAPDKEHPYGYGRIEYFASVIIAAIVLWAGITALMESWPKIFNPDVTSYTTVSLVIVAVAVAVKFILGRYVKNVGEEINSQALVASGSDAFFDAILSFSTLIAALVSIFFHISLEGILGVIISIVIIKASIDMLKETVDSMIGERVDSKLSRDIKEAICEFPQVYGAYGLSLHNYGPDSMEGSVHIEVDDSLTALEIHNLTRLISMKIFNEFSIILTVGIYARNDDFKDIRNDLYEITSKYDEVIEIHGFLAYPEEKLITFDIIVDFDADREEVKDKILDEIKSLHPDFTYCMIDDYDLSD

SEQ ID NO: 5255 - protein, 304 aa, Methanobrevibacter ruminantium
MIIVRGSVNRKEYTSRFSKGILSRSLIRSELSPDKAYEFASRIEEDLKNKGVTEITTDEIADIVVKLLDEEEEKSVSERYLNWRKVREAKDPLIILIGGASGVGTSSMAFEISNRLGIKTMISTDMIREVMRKIVSEDLSPVIHESSFLAYRSMKVAPPPEFDFVLAGFKDQVATVSVGVEAVIERALKEGISIIIEGVHIVPGFIRKELMEKDNIVMFTLTLSDEEMHKNRFYSRCGDIWNNRPLEKYMGNFEAIRKTNAYLEDQARKEGTPIIDNIDVITTVDFIIETLTETYGGMKHVRKD

SEQ ID NO: 5256 - protein, 122 aa, Methanobrevibacter ruminantium
MSKDVLTVELDEATVFAFEKLMKHKISAMPVVDEDGKMVGIVTATDLGHNLILDKYQYGTKVKDVMVTDVAYVSSDCTIKEAISVMFEKAPGDSIINQLPVLDNGELVGIISDGDIIKILKE

SEQ ID NO: 5257 - protein, 675 aa, Methanobrevibacter ruminantium
MLLMRKKILFLTLMILICFTLNSVCAQSLDNINYANDGFDSDEMINCDLHKDSSQKSLKSNALSNKKTTNTVKLTDMKKAESNDVKQTGAAKASNTKSTSKSTTKTNATKSNTTKSTATKTTANSSSTKKATQNTTTINTQTLAKSSSSYMAYVEKNAKLQEPITISKKKYKSPEYLYLVSKAVSNISKTKVEIKDKLITNYSNTDCKSVNGTINKTEYVQVAKKTVSFIEKNHRAPNWIASSKGNIPRNQLILVFSKCLDQYNKSGKLPSSIKLNDLDLNKMKQKIDSSKKVNSTSTKKTNTSSTKTNSTSAKKTNTTSTKKTNPTATSTNNNKSLVESTLDSIKSILNNIENKLNPTNKVLSTTGTKKNTVTVNSSKVNVQISSSSTVNVKISAKDNTNSGKNTNSGSAKKTNTTSTKKTNTTSTKKIDTNSTKKTNTTSTKNNTSSAKKTNTTSTKNNTSSAKKTNTTSTKNNTSSAKKVNTSSSKTNTSAKNNTSTTAKSSSNSKYLSTSVLNDKYLGESLKKYLAVGKNCQVTNKAIKTLANTLTSKLKSDYKKGEKIFNWVRDNIGYEKYRNTKKGALKTLQTRGGNCVDHAHLIVALSRAAGLPARYVNANNCKFSSGYVSGHVWAQVLVGNTWVVADATSNRNKFGVVKNWNVNSYKLVGKYSSISF

SEQ ID NO: 5258 - protein, 557 aa, Methanobrevibacter ruminantium
MFYEKNLIKKNPLRVDIRFGLVYPNVYKTAMSSLGYQILYNYVNLRENTYCERIIYPSYRSLETNSPLGDFNIVSFSLQYEQDYFNILEILRDANIPLRRADRTLEDPLIIAGGPCATANPLPLSDFIDIFVVGEAEAVLNDLIDNYNENKDKFTNKNEFLSTFLDIKGLYISEFNNKTDIALLDEMSDAYHITCPIITETDDKDLIPVFSNSILLNVSRACTRGCRFCMSSYLYRPLRETDLQQLFDIAEEARQNTGLNKISLIGAAVSDYSKVNELTEGLKDMGFQVSTPSMRIESITRETLVSLRESGLKTLTIAPESIYHLRKRINKDISDDDVFRVIKDAVDLGFNLKLYFLIGLPYEDEDDIKELACLMKQIDSMKYLIDSNLNESIKKEEVLTKHKSKSSGKKSKSKQRKKARVSIKFSVNPVIPKPHTPLQWEGYDMKRIKSKIKYLKKNLKGLDIKFDSGKMGLIQYVLSCGDRDIGDLLEESLNRKISIKEWKENAPSYEIGDNLPWDCINVSVSKEFLESEYEKMKSGEQTPWCEDGYCYGCGACN

SEQ ID NO: 5259 - protein, 371 aa, Methanobrevibacter ruminantium
MLNPAKRVEAIELSQIRKMFEVTNENAINLGIGEPDFNVPENIREAMKKSIDDGFTKYTSNKGIIELRESIVEKLSKDNNIKTDSENIIVTTGASEALYCCAQALFEKGDNVLVPNPGFLSYYSVVNLAEANIVEVTTPMENEFKMKVEDVQEKLDKNTKALIINSPSNPTGAVMDKEDVKGIADLATDHDFYIISDEIYEKIIFGRKNYSPAEYCDNVITLNGFSKSYAMTGLRIGYMAANEEITENLLKVHQYCVANATSIAQMGALEALTGPQDSVEMMANEFSRRRDLIVSSLNDMGYPTVNCEGAFYVFPKVERPMDFVKKAAEAGVISVPGAPFGSLGENHVRMSYANSYENIEKAMDILRDLEY

SEQ ID NO: 5260 - protein, 304 aa, Methanobrevibacter ruminantium
MNREERDRIGTRASAVAIIGNILLTVLNISVGLMSGSYALISEGAHTISDIATSVIAYVGFKIGSRPADKEHPLGHGRAEAISGLIIVVFLSIVAIEVIQGAFHKLFFGGALEVPDPIAVVMAFVGILVNLFMSSYIIRLGKKARSPAIVADGKHQRVDIFASLAIFIGIMVSQYGYPMLDPIIGIFIGALIARTAVIVAIDNLNNIMGKLPSDELIKEIRDVANSVTDVCSAHDIKVNYFGSYATVALHVELPPDMSLREAHKITHRVQDKILENVDMVQAVHVHPCPEGVQYDHSQLLDEDS

SEQ ID NO: 5261 - protein, 782 aa, Methanobrevibacter ruminantium
MLFVMIAGVSASDIMDASDNPNNDDSINLVSQESGNDQISNEAISVSNSLSANDDSYSPESEKISSKIKTSNNLSASNSTKTTTKAAAAKTTKTGTSLQPSSTSIYSGQYLVITLKDKNSKALSGQKVLINISKFKNTYTKTTDSKGQVKLAVNPVGSFKLVVSYAGNGNYSSSKYSGTLKVSKSDTSLTVASTSVTMTTPLVVTLKNKKTNEALSGKKIKFVMDRVSYSRTTDAKGQAKLKVNMKYVFNVTVKFDGTGNLKSSKVTKTIKPTKIPVSFVYSANSVKYGHSITVSLKNNLNNKTLSGKKIVVKTSDSKKSTTKTTSSKGTISVPINSVGDVTVSLSYAGDSSYKAASSSKKIKGLKDSSKITSSTGTIPVGDSYTVTLKDSSGKALSNKKIVFTFDGKSYTKTTNSKGQASLAISKGPGTYSVNVSYGGDSYHSGSKLSKNVKTSNSMISIANVIKAATTLRAHVDYTNRFNKSYVVTINGLKYSPDEFAYMMSQAIVKINNGQKSGYVTFKNLTGDYDSKGSSINGNLMKKNYISLANTLISSVNKNNKIPANISTNLGKIEANLYIFGLAKALQFYGEEKYLPKYLILKNSFIKGSSSTTVTQKAKILNCKEAFNATEFEKYLKTGGKSALNSAIVAKAKSLTKGLTSDKAKANAIFKYVRDKVSYSYYSDSKKGAAKTYKTKSGNCCDKANLIVAMCRSVGVYARYSHAQGCTFSSGLVAGHVWAQTYDRATQTWYTADATSSRNSLGKINNWNTKKYSQAKNYVLIPF

SEQ ID NO: 5262 - protein, 150 aa, Methanobrevibacter ruminantium
MAKYKRVAVGGTFDKFHYGHRKLISTAFEIGESVEIGVTSNLFASNKGDVDSCNTRMANLNAFLSKSHDNFHISRLDDAYGPTIYDENFDAIVVSEETEPNAIKINEIRESKGMKPLDIVVVSFVLADDGIPISSTRIRQGKINQKGELI

SEQ ID NO: 5263 - protein, 324 aa, Methanobrevibacter ruminantium
MIFIQRDGAESRKLSYDNKVCLACGICADTCPTDSLAIADVLAIARGQAEGNNIVLDQDTCVLCGLCSFACPFGALEFDIGGQDASELPNYPKWTHESSISQDDCEFCGRCYTACPQDAILFKRELPDRNALLKGEISINEDDCIYCQVCAEICPAGAISLTASDGKILDTIEVDEDKCVYCGVCKRACPQEAIKTVCSTCMYSDEIEKIAITGDIFITEDCINCGWCKEICPVDAAEVTKPFDGEISVTEEDCVACGSCIDICSCNAVSLQDNVAVFNQDYCVLCGACARLCPQERIAINRTDMKLTNISSASWKANLEKLLN

SEQ ID NO: 5264 - protein, 67 aa, Methanobrevibacter ruminantium
MKETLIKEFKDLKEETGQASVELILLIGSILVITIICGTYVFNVNSKINGQFNQTMTKARLFLLNKV

SEQ ID NO: 5265 - protein, 78 aa, Methanobrevibacter ruminantium
MNRLPRETVFEQIKRNFVQLKDETSGQGAAEYILLFGGVIVIALAGLLIYRSYFSNNTSGLNATQDINSIRDNMSNVL

SEQ ID NO: 5266 - protein, 697 aa, Methanobrevibacter ruminantium
MSDSLDLFTGVLLTAIGLVLIYGSIIYRLIDLVLILGVLVTLFGLYKLLPAFFMRLLSSRKSSSRNKLSKANVSQDSLLKAGIEEINNFLDGEDNKENSKSVLRAPRESSLDAPNQMTFEEYMSKSKTDYATNYSPKEVKPIFKDRDVDESKQVLRTKPVKEEKSKFKLPSFKRNSSKKPKSRNFAFRKDKDTERSPDKLYFTPNYENPMMVSPKPKKKSENKLRLSDSPKRSKEISEALASVGTTETVYDNNASDDSYSYMPKEMDDELIVPIDEIDLDGPQEAPIYTLSQSENTLYNNVIYDDVDSDFYITPIHAESNEDNSPDEEGDYGEGGDLYLEVEPEDTSYGNDLYIETEPEDNYYGNDLYIETEPEDNYYDDEDIYIESYEEEQSYEDDDGYITVEASDDDLPIPRPKEISTPQSLPRPTSIASTNPISKKEVGSNLSRPHKKVSTLPRPSVSSNLQRPHKKAESTDAVSVKDESKAAEASIAKPKPIAKPKPVAKPKPKEAPKSDELISKEELDQIIQDPKDNTIQIDPNNPESLPIPKLLNSYVVCEKGILTSQEAFEEVASHSSQEILLEAPTIKDMGERFLSSIADIKTRIIVQEFDLADISYVLLLSSLIKKGVEIKTLPMVNSFNLIGDDSHALIISNSMDEDDFEYGAVYTDKPSIDNIKELFESSWSIANDLDIGNLNESE

SEQ ID NO: 5267 - protein, 237 aa, Methanobrevibacter ruminantium
MEIRWLGHSAFEIISDEGVKILIDPFISNNPTCPIPVEDFEANIICITHGHSDHFGDAMEIANNTNATLVANHEISLFLGEQGFDCVGMNTGGTVSILGINITMLDARHSSSIDFTEEVRPGGDPGSFLITLEDGTKIFHAGDTGLFGDLETVVGNIFKPDIAMVPIGDRFTMNPFQAALASMWISPKAVIPMHYNTFPAIEQDPAVFSNFVYQLNPNIDVVIMNPLETYAPDFDKE

SEQ ID NO: 5268 - protein, 228 aa, Methanobrevibacter ruminantium
MRELNMDEIKNAEKIESFDQVSAKLNKTEKEEIVIDEMDIVFLLDKSGSMFGIIDDTLGGFNSFIKREKEKEVKTRVTLVLFDHKYKVLYTRKPIEEVEELTEEDYYADGCTALLDAIGTTINRIEKEVCDEVLFVITTDGLENYSKEYSREDVKKLIRSHNWNFIFIGADIDSYEEAASLGIPSTRSANYEKSRRGVGSLYRSVSYAKRLRSSGESLDKVNWKRGLD

SEQ ID NO: 5269 - protein, 220 aa, Methanobrevibacter ruminantium
MTTVAETVYKCPLCGFAHTTDCMTSTSAFGAPDLDGRPSPMARLTIYLFIKECPNCGFTSYGFPEHTSVSREFIQSDNYLNCDNIDFKTERAKLFYRVYLISKEEGMMNRALTDLVHCAWVCDDDDDEENSIKLRLLINDLFNELYDFKSDEEDYAHLIKLDFMRRGHLFDELIEEVRHKTFSKSFYNKVKDFQMEKAKNRDAGKYTFDDIEGYEEYKYG

SEQ ID NO: 5270 - protein, 669 aa, Methanobrevibacter ruminantium
MKSMTNVDINIICQELNELLAGARVDKSFQPTKDTVVMRFHKAGTGRMDLVIQAGKRIHISQYPLANPQSPPSFPMLLRKRVKGANVVSIQQHNFDRVVEIKMKKDITYTLIVELFAKGNIILLNEENEILLPLKRKQWSDRDISSKKEYVFPIEHGINPMTITEDEFKEIIKSSDDEIVRILAKNGLGSLYAEEIMLNCEINKKTLSSELTKEDILEIYGALKKVFEGLEKKEFTPMIVNNRKEIEELKKQNPDKQYKVKEDVVAIRLHQYENFEEESFDSFNEACDEFYSSKVKHEITDIQEAVWNKKVGKFSKRLEKQEETLRGFEKTIEDSQKKGELLFTNYVQVENILNVIKDAREKDYGWKEIGKTLKDAKKSGMAEAQIFESMDPLGNITLNIDGISIALDSKKSIPDNAEVYYEKAKKAKRKIKGAKIAIENTKAQLKDMEEKKEKAMANIMVPQKRVKKNLKWYEKLRWFVSSDGTLVVCGRDAGSNEAVVKKYLEQNDVYLHADIHGAPSVVAKISSDKLNNNLLKELGIFAASFSSAWSRNYGTQDVYWVEPEQVSKTPVSGEFVPKGAFIIRGKRNYIRGAKLEIAIGIVDYDGEKRIMAGPVDALKAYTEKYVTIKPGYTKKEKIAKEILSRINEDNIIELDDVVRVLPSGKCDFV

SEQ ID NO: 5271 - protein, 90 aa, Methanobrevibacter ruminantium
MDTTVKTVSIHLVAAVVAAIISTAFTLGWFGFKNNVFAFVIGVVILYFIGQYCKKAFGEEISGFSTWLWDGILPFGFFWFILWTILTNYL

SEQ ID NO: 5272 - protein, 2879 aa, Methanobrevibacter ruminantium
MNRNSKIILISLFTLLLLAIPAGFAADIESNSHNNLDDSNTVNFEINANSKDTNLESNLNTGNLEMNSNNTNLDMNSNKARLAMNSNASDLETLGLTRGEFENGSNNPSLEYSSNSLSDNSNNKYISPSSDKNTYGSNKVGDGNVNIYYFDASASDDTGNGSLERPYKTLKNNRIVENSINYLANGVYNLDATINKNNISFIGADSSRTIISYASTAFITNNILNFENITLKGLNIQNRGNLTARNTIFIGGKGYWDRSYNNIFGGAIYTPQNENYTTIIINCSFINNTADYGGAIYACGGNVTVENSSFINNTAERFGGAIASENTLTNNIRNVEFIHDVSLNDAGGGLFISFTQLNGTDLHFYNCSADFGGGITALYSNVSLNRFIGKDNKARYDGGAIYQFYCSLLIENSLFANNSANNGGGLYVDNSNSLKVTKSNFTQNNATEKGGAIYSLWNTLAEGNSISNTRFNNSFSNNNAKNYSNFYEGKDVNMRIGSGNVTLYHRNETEIDEIPSYYSLIDLNQVTSIKNQQSGGNCWAYASIAALESAIIKAGGEALDLSEESMKNLIVLFSDYGYPWLTNNGGNGDFANAYLTSWLGPVFEDDNPGDDRSYLSPVLNSRIHVQNIQYLGRNNYTDNDRIKEAIMKYGAVATSYYMDNSYYNYRTSAYYCPSATSSNHAVAIVGWNDSYSKSNFKTTPQGDGAWIVKNSWDTNWGDNGYFYVSYYDILIFPLGSMDWGHAYVLNDTIKLDKNYQYDISGLTDYFYNASSTAWYKTKHTADEDEYLAAVSTYFLTTTDYTIFIKVNGEELYNQSGNSEYGYRTIYLNDFIPLKAGDVFETIFKINVSGETGIPVSEGSAFNKVLYDRNQSFVSYDGINWLDIYDIYWTYNSDVYGSHYYVSAALCLKSFSFINEIGTNLTLEFNYSLDNEGDRISPVNIIAHVINEYGFNLDNGQVKFIINGTETIADLINGYANISWNFTDIENEVYALFEKTGYLSSSANETATLSEKYVTLDLNTLLSEDKLTITVDSSRKINETLILEINGEKHPFNLSEGHVVYDLYDIEDIDYLIRAYLNDTGFYNCEEKSTIFRLNTEITEIIASNFTTDDYSNAIYEISLVDSQGIGIANKEILFNISGNLTNNNNNNNNFNNIIFNLTTDNDGKARIPINLPGGNFTINVQSKGNYLYSSAEVALKLKVKDKVRLDIDLNLNFNDLEVIIELNRSLNETVNFSFAGESSIIRLENGRASVNFTGLSNNNYTAIAYLENDIDYLSNIAQKTIEINIRNLIIQADTINTTNRYYGNYTILLTDEEVNEVANKTLNVKIGEESFNKTSDNDGKVIIPLDLGIGEYEVIISFNGDKDFFKANATRTITVLEKLFANITVSTLVDEATIDIIIDKKINETLNISIDQSEYPVLFENGTGQLILDGLEEGNHIVTIDLLKYLLFESKEFEIDKSINLSSDDFNCYEHTNSTYTVLLTNNGKALANKTIRFVLNDTTTIRNTDMEGKASIDIDLSPGVYELNITYYDDERSVINTVYVLSNITNSTDPKFNVTLDMDTVLSPDKLTINVNCSKKINETLILEINGDQHFINLTDGFVSFDLYELEKIEYVITAKLNNTDLYRFEDKSVNFELNQEATDIIASNFTTGDYSNERYEITLVDSEGIGISNKEISFNISNSLMSNENYIIFNQTTDNSGKASIPINLARGNYTIKVQFKEDYLYLASESTVDLKVKENVKIDIEFKQMINDLEVIIELNKTLNETVNFSFAGESSIIRLDNGKFSINYTGLANNNYTVIAYIENDTNYHSNIAQKTIEINIRELIIQADTINTINRYYDNYRILLTDEEGNGIAGKTLDIRIAEGNYIETSDNDGKIVIPLDLGIGEYEVNILFNGDNEFFKANVTKTITVLEKLFADISISTLVDEATIDIIIDKKINETLNVNIDQTSYHVIFENGTGQLTVDGLDEGNHIVTIDVLRYLLFENKEFTIDRSINLTSDDFNCYEHTNSTYTVSLSNNGKVLANKTIKFILNNQIILRNTDSEGKTSIDIDLSPGVYDLNIIYYDDERSRTNTIYVLSNITHSTDPKFNVTLDMDTVLSPDKLTINVNCSKKINETLILDINGKEQILNLNDGFVSFDLYELEKIQYVITAKLNNTDLYRFEEKTILFELNQESTDIIASNFTTDDYSNAIYEIRLVDSYGLAIANKEILFNISNSLMSNENYIIFNQITDNSGKASIPIYLPGGDYTIKVQFNEDDLYLSSESNAHLKVKDKVRIGIEFNQNMNDLEVMIELNKPLNETVNLIFAGESSNVKLENGKASLKFTGLANNNYTAVAHLENDRDYISNIGEKTIEINLRNLIIIADSIKTKNHYWDDYTILLTDEEGKNVANKALNIKIDANSFIKTSNNDGKVIIPLDLGLGMHEINIAFDGDNEFFKSNITKTINVIEEISVNVNISTLVDNALIDLKFSKDLNEKIDVLIDQNLYPVSLEKGAGQIRVNGLEEGKHILTVDLPEYLLLESEEFEIDKTITLISDDFRCYEHSNSTYTVVLENNGKALANKTIKFDLNKIVTIRTTDNNGKAYLNINLSPGTYKLNIAYYDNGRNKIHNIYVLANTSGDNKTNETNSSSNTNPINNQTNNTNPTNNTKPINNETNNTNPTNNTNTTNNTNTTNNQTNNTDPVIVRKGTNILCQNMITTAFDSKVDGRIGKYFVVTLVDADYKPMADKTIYIGFNGKKYIRTTDSSGQAKLQINLAYEGSYTFAIAFLGDDDYKGSFVVANIKVNKQIPQLKSSDRTYRSIAKTKTLTASIKTAQGNAITGKKVIFTINGKKYTAIINSIGIASVKVSLSKKGTYRFTVQSEASSTYASTKVTHKLVIK

SEQ ID NO: 5273 - protein, 605 aa, Methanobrevibacter ruminantium
MSSMSSVAGLSKYIRTLPKAKSTFLMIIVLSFIIGAVLFLVKPMSLGSGLENFFYGGAFGFVVYGLPAIITGATDQKWVSTLKGINLKMKHSMFLALVSMTMAGVISIIGTIIGNILHFDLFINSILFGIVIAFAFNILVIWSVTRIRLIKSVLVAIIQPLLMIGVLIITSFLNNLESVFELGIFTTFFKVIIASAVFLLAIYSFISIVESPMKKNLGFGALEILSFFISHMNEGSKSIEELFDNAGEAIDTLVGVCSFRKPDGDIKALFISPCVHPGPLGDIGGSNMPTILANRFDSFAMVAHGPSTHDFNPVSSDEIVKIESSVRTALENMEYSSKASRFVRYSHKKANIGTQFFNNGCVMLSTFAPSGSDDIEFAVGLATMIESQKELEIDNPILVDCHNSFNAEKGGVLPGNPELFQLLDTIKLIEKKDLEHEIKVGCYSTDLGGFGKHEGIGDSGLKTMVIEVDGQRTAYVLFDSNNMELGYRETIFNAVEDLEIDEIEVMTTDTHSVNTLSAGYNPVGTVEKEKIIEYVRESIIEAIDDLETVEAGTRTERIENLKTFGPNNSTELISTISSIVSVSKIAAPLIFIMAIIFVFIWIYLF

SEQ ID NO: 5274 - protein, 176 aa, Methanobrevibacter ruminantium
MIELKTPITDDDIDKLKAGDVITISGQILTARDQAHKRILEQGAPLDIKGAVLFHAGPIIKEESDDAQTKYEMVAVGPTTSMRMNPYEADVLDMGAKIIIGKGGMDDTVREALKRNNAVYVVATGGCAALYVDKVKEIKGVDWLDLGMPEAIWDLDVESFGPLIVAMDSDGNSLYD

SEQ ID NO: 5275 - protein, 1325 aa, Methanobrevibacter ruminantium
MRLRYFAIISLILLIFLVPVSFASETNLDSIELNDLADSSTEIDDSTDLNQDYSSNQDLSLNQNSDSNLSNEQELYSNKLSENSLDSNSQSSNDLSNSLYLSSNGVRLADLNSSFAQFNTSLNDSNTIYVNSSYIGSDEFGTQSNPYKTVLAGINAATTDLNNVYIANGVYNINTTITVLKSINIIGESLNVILNASNENNILSVKGSSVEVSIFNLTFRNGYANKGGAIYVDKSSLNIIGSLFDSNIAYVTSDNGYGGAIYNNAGFLKLYNTTFKNNKVVAAYNIVSEGFGGAIYNELGEMTVLNSKFYNNSIDIRNISKSSYGAGGAIFNRAGFVTIFNSSISNNSIYTNYSLGGAISIWASRNVYIINSTINDNIISGSYGFASVISNKGTLLQIENSTISNNNINASSVENSTIYNINGNFNLINSKMENNKIKTIKTNLLMCLEDQLIVNSSFNLANELKGLNMTSLPSHYDLREEGLVTAVKNQGSSGACWAFAFYSAMESYLLKVENISYDFSENNMKNCMGDGSENSTDWDDGGAYVVALAYLLRWSGAINETDDPFNARSKVSPTNLTRVKYLTDALYIPLRLGALDNDQIKTAILKYGAIFVPVYSNIIKANSKSGYSDIQYICNHAVAIVGWDDNYSASNFKDTPPGDGAFIIKNSWGTSGGEQGYYYISYYDASFAASIETSAAVAVTNVVNTTGEYRNNYYYDTFGNTFETIGYNSDTIWFANQFTAISDNPLNAFGLYTYGDSTYTVNITVNNKSVYTSSGKIVGAGFHTIKLSRYVPLTKGDTFRIIVKLTTPSTLFPLAVETNYSGFTPRAKSDYNQSFISPDGKTWYDLRNSSNNRAVKFYEDMYFYTLKNASVCLKAYTAFADELELNLSSNSPIYYTGDTIKLNLTVTNRGDLASNSSIAVPLDKSYSIVSYKISENNGNKSYDIHYNGSSFNMASGIWSIPYLENEESVSLILSLKMNSNNDVNIKVSANSSSCSVKDNVYANISLKYKIPSKFANIPSINTTARSYGLLNFTLLDINNKPLANKNVNLLLLKLDDEEDEDLSLNDTNLYYSDSSISNASVISNLTLKTNGNGIVQYKLNLTLGEYLFKLAFDEDKNYQASDYNYSLNITKRKSTKILCKDMVTYSVVAEVDGRSGEYFNVTLTDCDGYAMADKFIQIGFNGRIYNRTTDSEGKARLQINLKNPNAYTFAICFLSDDDYYASFEVAKITVNKKKMSLNVPNKAYKASEKSKILTATLIENNKKTVANKLLTFTVDGKTYSAKTNSAGVASVKVSLSSKKIYSFTVKFAGDDCYGSATKSAKVIIK

SEQ ID NO: 5276 - protein, 2065 aa, Methanobrevibacter ruminantium
MKLKYLMFIGLLLIGLLIIPISFAGDADSYSAYSGDSISLEDDNSYLESNTVLKDSKNSLQSIDDDCLIGNRTLDDTSYSDSTNSEDLTNPDSTNPDSTNSEDLTNLESSANTDSSSEIKTITKSLNDQNTNIKSLNYDEYADYINLNNQLINYDFAISDSNTIFVNASYTGSTENGSQASPYKSIYSAYNYAFGLSSDTRTNVYIAKGVYTVTRRMTINKNLNLIGEDSLNTIIDCNGNGAFFISPRRSYTTVYSPLLNIFNLTFTNGRYSSGGAIYINESTVNFVNVIFKNNRAEASYYGSVEGGALYNNKGFVRIYNCLFENNTANDTSDACGGAIYNDMGEMTIMGSQFINNTAKGENAAGGAIYDFSGILVIFNSTISKSSLLSNYSMGGGLASWSSHNIFIINSTFDSNEGHGKYVFGSAIANKAIMMYIENSTFSNNLANGTSDKNGTFFHLNGVLDFDNVNFTNNRAINPKEDILICLEDQFIISEAFSQEDIAEILSEMELSQLPSSYDLRDYNLVTSVKDQKNSGSCWAFSTLAALESYLLKYENTSYDLSENNMKNLIGAYGLNGTDWYDGGNHYMSLAYLLRWSGPVNESQDPFNDTSHNSRTFTNIVKQVEDVLYVPLRLNYLDIDQIKAAILKYGALYTTLCSDDSFDNNPDYYCDVISISNHAITIVGWNDSYSADNFAVRPPGDGAFIIKNSWGPSEGYDGYWYVSYYDKTLAGYGYDAIAAMAFTSVANASTYKNNYQYDTLGNTFESIGYGCSTAWIANQFTALNNNPLAAFGLYTYGSSSYLVNITVNGISRLVQEGNVKGAGYHTIKLDDVVELLSGDIFKIIVKLSTPDSNYPVAIESKRSDYSSRANSNPGESFISFDGQNWQDLYEVGDILKFYMYMNNKTFTEPNICLKAYTIGPSDVHLHARANATTYTQGDTVEIKITVSNEGATVNDLNISMKWNSSFFLKSFTKLNGEFDSTKKIWHFDTFSEGQSSTLTLVFTMRGNNDVASLSYDYNYSGFNPGDANTTQVLNLYYGSLTKFVEVPNVSTSVKSGDVVDIQLTDLQSIGISDKQIVISLLESDNEYLFENVTLITNGSGQAGFVLDLLEGNYVFLASFAGDDSYMSSNVTFNVSVSKSNTSISLDNLDPSNITVFSKSGDVINFTLSDGINNLSDKNIVISLIESDNDYLFENLTLITNGSGQAGFVLDLLEGNYVFLASFAEDGYYKASNLTFYLNVLRRASSMEFDSSSLIYNGSNWISLSQSNDLIEFILSNQTGPLADKTIILTVEDLNSVDLAENPLIYNLTTGPNGIASFNLNLTKSNYEIIASYLGDECYSPCEFGFNLSVLKRNAPHIVADDIAINSSNPYQAHLLDDDFNPIANQSLLFAFAKKDSQDLFNYSAITNERGIAIIDLSDIESGDYNLLIAFESNDLYDDSILEIDVSVVNDSLNGDNGTNDTGNGTNGTDNSSKINTLFKIDMSDLTVSANVDKTIEFALLDESLNPLADKTLNLTIVDLDEDTELITDSDGIASCVLNLDEGVYEFVLSFSGDENYSPSRLIFNLSVSKADNGTSPGGDNGTSPGGDNATNGTDPSGGNGTAPINDNGTNGTDPSGGNGTSPGDNGTESSKINTLFKIDLSNLNIFANLEKVIEFELLDESLNPLSNKTVGLTISNLDGVSLITDSNGIASCPINLDEGVYEFALKFLGDDDYSESAMIFNLSVSKRIAQLLSGETLINLSSEKREYDVYLVDDKLSPLANETILFALSSMDGQVLFNYVVKTNDEGKASLSGLAKLNESNYIVKTEFASNDFFEGAELIKTITLIKDAPNGDDANDTNGTGNQTDNGTDTGNKTDNGTDTNGTNGSDVPVSRKATKIIYEDMVTQSVVPDVDGRIGDYFYVTLVDGNNNPLANKEVKIGFNGRIYNRTTNATGGVKLQINLKMPFTYTFAICFLGDDDYNASFEVAKITVNKKKMSLTAPSKTYKSTAKTKALTATLKDNNNKAVANKKITFTVNGKTYSATTNSKGVASVNVSLSSKKTYSFTAKFAGDACYGAVTKSGKITIK

SEQ ID NO: 5277 - protein, 105 aa, Methanobrevibacter ruminantium
MADIGEAAEKKLKSRIRKLKKCNKDEEEKVKFFNQLGLSFTISLPTKNPEKQEDFIMLYTTPEGHIVHAEYSYSEGEEFASMDIPEKDLKVIIESFSDYELKLLD

SEQ ID NO: 5278 - protein, 380 aa, Methanobrevibacter ruminantium
MIVNNSLDELKKRESALKIIRSIVENEGRSSLYDVTGLSGGFISSEEELDLLETYVGPAIFEDELQVVAKEHLGGEKALAVNRTSSGILASILSLVKEGEHVSHFLAQYPAHPSIPRSCNIVGADYDEYIDLNEFKIEDNTSLVVVTGSTMDHQVIDEDTFKEVIDMAHDKDIPVLVDDASGARLRTAVFNQKRACDLGADLVVTSTDKLMPGPRGGLMAGKEELIDKVKVKANQFGLEAQPPLILAMVNGIKNYSEDNLINAISRKDKFYDMVSKDYEMFEKTPTGVMVTEDALKKQVDALDIETELSEKDLSFLWAMILLKDEGIITIPAVGMPGASATVRFDLSTQDVIDMNLGILHDKVDDSFNKFFRQLSRCGKV

SEQ ID NO: 5279 - protein, 303 aa, Methanobrevibacter ruminantium
MKREMIKLLVSYDIISKEEAEKIDSINDEAIEESIKELGFGKTEHITKERISEFLETEELGEEILCFRKVFSTNSISKFLANHGAKEGTVLISEIQTNARGRSGKKWEAPDGGVWMSMILRPDVPPAKIGLITLATGVAIARAIRSFDVDAKIKWPNDILIHGNKISGVLTEVIATFNQIEYVIVGVGIDSNLKLEDFSEDIREGTTTLEEEIPVKVDENELIGIFLNEFEKIYDIYLNGDVEEILSEWRALSDTIGKYVSITQTGGKTTQGYVVGINKEGSLIIEKQDGNLEKIISGELRTL

SEQ ID NO: 5280 - protein, 497 aa, Methanobrevibacter ruminantium
MFEKVLIANRGEIAIRIMRACRELDMKSVAVYSDADKTSLYTNYADESVPLGNPSPSQSYLNIEKIINAALDTGADAIHPGYGFLAENPELGRQCEKNGIKLIGPKGEHIEKMGDKITSKQLMKEAGVPVIEGTPEGIDDVEEAKEIAEAIGYPVIIKASAGGGGIGMRAVYSEEELVRALEATQSVALKNFGDATVFIEKYLEKPRHIEFQILADEYGNTIHVGDRECSIQRRHQKLLEEAPSPIMTEELRERMGESAVKAAEYIGYNSAGTVEFLYDNGDYYFLEMNTRIQVEHPITEIVTNTDLIKQQIKIACGEELEYSQSDITVTGHAIECRINAENPLADFAPNPGKITGYRSPGGPGVRLDSGVYMNYTIPTFYDSMISKLVTSGRTRNDAINRMKRALSEYIILGVKTTIPFHKAIMRNESFLAGDLNTHFVDEHKKGIEEEMEKVILEDLERVNRMKSTFMPGKKIAAISATVGTYFNAAQAQQMKKK

SEQ ID NO: 5281 - protein, 39 aa, Methanobrevibacter ruminantium
MISIKIVINPSFDMVKSTLKEMIKFSLELMKIFIMVLFA

SEQ ID NO: 5282 - protein, 276 aa, Methanobrevibacter ruminantium
MIFNYSSVIMKIRKKKQLEMILQNVPSHPNPKVELEQYSTPSSIASDLIWNAYTLGDISDLSVLDLGCGTGIFAIGSWLMGAGYSLGLDIDPESIALGEKTIIDLIGLNQPSDVDVFNINFIVGDINQYNSISELLNDKSIQSDEKYDKLIEYYNSNSLGDDSNLNNSNDGLMNGSFDEKDFKFATLFQNPPFGSQERGTRHADRKFMEFAMASAEVIYSFHMKSTEEFVIDYYNDLGGDISHKFVYNFPLPKIYDFHKTESRDVKVVVLRVENFK

SEQ ID NO: 5283 - protein, 271 aa, Methanobrevibacter ruminantium
MQNSKVSVFIPNSFLAETKDLKLKTSKVGLIGRALAVFEVDEVVIYKDLSIPDSEQTDDGDFIAEVLNYMDTPQYLRKKAIPIKAELRHVGILPPLRVPHHPTGKPELGDYRQGFTVKRNKKGTFVDIGMDKLAFCKEQLTVNKIFSFKITKFAKEVIVTPDEPDDIYWGFKTLSTNKSLKNSLKLVNPDLVVETTRYAETIDSIFNELKTKVESSNHIAIVFGGPYSSISENVESSKWETVKINTIPNQGTETVRTEEAVISTLAIFNIL

SEQ ID NO: 5284 - protein, 336 aa, Methanobrevibacter ruminantium
MVRHHQPRKGSVAFSPRKRVAKETPRIKAWPSNEEPKLLGLAGYKAGMTHAMVVDNDKNSPSHGMEVFTPVTVLEVPPLVILGIRSYEKTAHGLKAITEVIADNLDEELSRKITLPKDYDQSEAIAKIQDALEKTEEVRVLVHTNPKMASVPKKKPEIFECALGGSSAEEKLNYALGILGQEIRASDIFSEGQYVDAIATTKGKGVQGVVKRWNIRIQYGKAMRSGKGRHVGSIGPWSPERTMWTVAQAGQMGYHKRTEFNKKVIKIGDVSEVDAVNPAGGFIRYGLVKNDYVLVKGSVPGPTKRLVILRQAIRPKKADDAAPQVNYISTASKQGV

SEQ ID NO: 5285 - protein, 254 aa, Methanobrevibacter ruminantium
MKVNVYSIQGEVKEEIELPAIFNEEYRPDLIKRAVLSAQSARIQPWGNDPMAGKRTSAESWGSGRGAAMVPRIKTGARAAFVPQAIGGRKAHPVRAAKNHHEKINNKERRFAIRSAVAATVNEELVAGRGHRIENLEQVPVIVEDDLETVKKTSETREIFKALGVYDDVIKAKDSKKIRAGRGKTRGRKYKSGKGPLVVVSEDKGIGLGARNHAGVDVVAVDNLNAELLAPGTHAGRLTIYTKSAVEKLGGLFQ

SEQ ID NO: 5286 - protein, 86 aa, Methanobrevibacter ruminantium
MDPYTIIVKPHVTEKTMNLIDQNNELTFVVRRTATKSQIKRAFEFLYDEKVVRVNTHITSKGLKLAYVKLAEEGEAEDVAVKMGVF

SEQ ID NO: 5287 - protein, 241 aa, Methanobrevibacter ruminantium
MGKRLIHQRRGRGTPAHRVASHRFKDKIQYRAYDDLEKEGSLKGKVVKIIHDPARTAPIALVKFENGEKRHILAPESIQIDDEIECGISAPISFGNTLPLAEIPEGTPIYNIENRPGDGGRFVRSSGTYASLITHDASQAVVELPSGELKSFNPRCRASIGVVAGGGRKEKPFLKAGVRWHAYKAKGKKFMTVRGVAMNAVDHPHGGGNRQHPGRPTTISRHAPPGRKVGSIAAKRTGKRR

SEQ ID NO: 5288 - protein, 136 aa, Methanobrevibacter ruminantium
MARKIFKYRGYTIEELKEMSLDEFIELLPARQRRSLKRGFLPRQQSVLDKMRKMQKMDKKGGKPLVVRTHCRDMIVIPEMVGTTFGIYNGRDFVEVTFTPEMLGCFFGEFAPTRARVQHGDPGMGATRSSMFVPLK

SEQ ID NO: 5289 - protein, 155 aa, Methanobrevibacter ruminantium
MAKNKYAYNNPDADESKTARAMAKSIKVSPKHCVEICSAIRGMDVAKAKAYLNDVIDMKKAVPFKRHNRDVGHRKGMKGWAAGRYPVKASKAILTVIENAEANAEYKGMDVENLKIEHISSHRGMVIRGARPRAFGRVTPFNTPTTHIQVVLVEA

SEQ ID NO: 5290 - protein, 251 aa, Methanobrevibacter ruminantium
MIEKDFVTEGLRRTRIDEYLEKELERAGYGGMEIQVTPLGTMVIVYAERPGMVIGRGGKTVRAITQSLKTKFDLDNPQVEVKEVAVPELNARIMASKIANMLQRGMHFRRVAYSTIRKIMGAGAQGVEVTISGKIRGSRSAVAKFTEGYIKKCGEPATRFVTEGFATAPLKPGVLGIVVRIMPPEATLPDKVDIIAPVEVEEPVVEAAEEDVEEIEEEVTEEIEEVEEDLEELEEELEDLEELEAAEEDVE

SEQ ID NO: 5291 - protein, 68 aa, Methanobrevibacter ruminantium
MAILRSKEIWEMEIEDIEEKLVELKAELAKNVSKSAAAGVNENPGKIRELKRTIARVLTIMNQKQKEN

SEQ ID NO: 5292 - protein, 114 aa, Methanobrevibacter ruminantium
MSKICDVCGLPEELCVCEEIAREVQSVKVFTVRRRFGKLMTIVEGIDEHDIDIKELTKTLKAKCACGGTAKKGQIELQGDHKARVKEVLSEMGFSSDTIEIRDSDKKYNKRRRH

SEQ ID NO: 5293 - protein, 111 aa, Methanobrevibacter ruminantium
MISSNNIFYHELIGLELKVVDSSNPSLIGLCGTVIDETKKTLLIEVEEKVLSDDLGSNQQNHFNLIYKEKLIQKDVSVFQFKVPDGTIVEIDGKILLNRPEDRIKKRYKKI

SEQ ID NO: 5294 - protein, 106 aa, Methanobrevibacter ruminantium
MVGLNVKEPETKCDDPNCPFHGNLSVRGQVLEGVVTTNKAERTITVERSFYKFIRKYERYEKRKSRINVHKPDCIDVEVGDAVKIAECRPLSKTKHFVLVEVKGDD

SEQ ID NO: 5295 - protein, 132 aa, Methanobrevibacter ruminantium
MKPTTSSVTKALPIGARLQCVDNTGAREIEIISVKGFKGVRRRLDVAGVGDMVVASVKKGTADMRREVVNAVVVRQKKEYRRADGLRVKFEDNAAVIITPEGVLKGSEIRGPVAKEAADKWPSVGSAASILI

SEQ ID NO: 5296 - protein, 113 aa, Methanobrevibacter ruminantium
MSIQPRKQRKALYTAPLHIRRKIMSANLSKELRADIGKRSLPIKVGDKVQVVRGDFKGHEGKVESIDAKRYKVTVEGVTLNKPDGNAVFLPIHPSNLMIIEADLKDERRIKEE

SEQ ID NO: 5297 - protein, 244 aa, Methanobrevibacter ruminantium
MAKMGSRKHLKRYNAPKTWPIHPKEDTWTVKPAPGTHAINDSLPLLVIIRDILGIADNSREAKRLINTGNVLIDGRAKKDYKFPVGFMDILSIPKTGENYRILLDTKGRLTLHPISAEDAEFKLAKIVNKSTIKGGKTQLNLHDGRNVIVEEDNYSAYDVVCLNIPEQEIKENFEFGEDVVVLVTGGKHTGELGKIQEVIVDQSSKANTVIIEKANKDTFLTLKDYAFVIGKDEPAIDLLEVNQ

SEQ ID NO: 5298 - protein, 173 aa, Methanobrevibacter ruminantium
MNPMNEVVIAKATINIGVGEAGEKLSRAMTLIENMTGQTPVKTYSKVTNPEWGIRKRQPIACKVTLRGEKAEDAIKMVLDGINNRLRPSQFDAQGNVSFGIREHIDIPGMRYDPDIGIFGMNLSITFEKPGYRIKRRKIQKKSIPKRHRITPEETMKFMEENFNVTIAEEEEY

SEQ ID NO: 5299 - protein, 50 aa, Methanobrevibacter ruminantium
MIVLPRKYGKASKKCSRCGDHSAIVSRYGLNLCRQCFREIAPKIGFKKYN

SEQ ID NO: 5300 - protein, 130 aa, Methanobrevibacter ruminantium
MTLMDPLADALTNIRNNERQVNDHCTISPASKLIGRVLSTMQKENYIGEFEFIDDNKAGKFEVELEGNINQCGVIKPRHAVKKDEFEKFEKRYLPAKNFGILIVTTPEGIMTHREAKERGIGGRLLAYMY

SEQ ID NO: 5301 - protein, 177 aa, Methanobrevibacter ruminantium
MVLAAAIREEIEIPEGVEVIIDDEISMKGPNGEISRKFTYPNVTIKKEDDILVLETAFPKKKDKSMIGTTRAHLNNMIKGVTEGFTYHMKIVYAHFPMTVKVEGDKVTIDNFIGERHPRSSKIVGGANVQVKGDEVIITGVNKEDVGQTMANLEQATKIRGKDPRVFQDGIYLTSRE

SEQ ID NO: 5302 - protein, 114 aa, Methanobrevibacter ruminantium
MVILMSKDFKRQEYARYKKLGTKWRRPRGKTSKMRRYEAGKPAMPSIGYRTPRATRGLHPSGYKDVLVYNMKDLEALDAETEAARISASIGKRKKALMLEKASELGIKVLNRQL

SEQ ID NO: 5303 - protein, 148 aa, Methanobrevibacter ruminantium
MNLTTQRRLAASILKVGVNRVWIDPEEVEEVSRAITRDGVKQLIDQGIIKARPKTGISSYRSKKLKEQKKKGKRKGRGSVKGAKNARTPKKQVWMKTIRALRSDLKEMRDTGEIDPTTYRKLYKMAKGGAFRSKSYMKTYARDHDLIK

SEQ ID NO: 5304 - protein, 193 aa, Methanobrevibacter ruminantium
MASGSNYKVAFRRRREGKTDFAARAKLVDVDKARLVVRISNANCIVQVINVGLTGDETVVSAHSKELNKLGWKGGNKNTSAVYLTAYLCGKKALAAGVEYAIADIGLKSPIKGAKVFAAVKGAADAGLDVPYGESIIPSEDRINGEHIAAYAESLDEDELNKKFSQYLARGLQPTDLPQHFEEIKNKIDEAEV

SEQ ID NO: 5305 - protein, 213 aa, Methanobrevibacter ruminantium
MSFNMDDWEPKTNLGKEVKAGNITDIDEIFEKGLPIMELEIIDALLPDLEEEVMDVNLVQRMHKSGRKVNFRVIVAVGNRNGYVGLGQGKAREVGPAIRKAVDNAKYNVIKVRRGCGDWGCVCGRQHTVPFKVTGKASSVKVTLRPAPAGVGLAIGDVGKTILSLAGYKDVWSQASGQTQTTVNFANAVFNALKESCKMKASEQDLKNMGVIQ

SEQ ID NO: 5306 - protein, 152 aa, Methanobrevibacter ruminantium
MYLVIRVRGTTGVIQGIASTLEMLRLNRINHAVLVEENPSYKGMLQKAKDYITWGEIDAETLTEIIEKRGRLVGGARISEEYLAENTDYSSFEELANALLNGELKAQDINMKPVFRLHPPRKGYEGIRHSIKEGGSLGYRGEDINSLAKRMA

SEQ ID NO: 5307 - protein, 147 aa, Methanobrevibacter ruminantium
MIRKGKKINKMRGSRSNGGGSVKRRRGAGNKGGKGKAGAGKHHWSTTVIENRYYFGKHGFKRPQKTIHRSYPVNLNFLNDKAEEFLEKGIATKDEDDVIVIDVTDLGYNKVLATGSLDIPLVVKSPAFSEAAIEKIEEAGGEAVELF

SEQ ID NO: 5308 - protein, 456 aa, Methanobrevibacter ruminantium
MFLENFKPIFQLLPEVKTPIHRQDFREKLKWTAIVLVLYYFLTLIPLYGLSPAAVDQFAQLRAVMAGSFGSILTLGIGPIVTASIVLQLLVGAKILDLDLTLHEHKAMFQSTQKLLAIIFTIFEAGVLVFTGSLVAIDPSFYPIMLLQLVIGAIMILYLDEVVSKWGFGSGVGLFIAAGVAETIIVGTFNFLPASAASTTASGILPAFIQSIIGGAPNFQILIPLIATIVVFLIAVYGESMRIEIPISHGRVKGHGRIRGAVGKYPLKFIYASNMPVILTSALLVNVSLIASLFQKLGFPIFGEVSGGRAISGLALWLTTPNSISVLFTNPLRVLFYAIVFLGCCVLFSWLWVEISGSLSAKEVAKQLYNSGIQIPGFRSSKRQLYTIMKKYIPALTILGGLFVGILAFIADLTGALGGGTGVLLTVGIVYKLYEEIAQEQLMEMHPMLRKFLGND

SEQ ID NO: 5309 - protein, 185 aa, Methanobrevibacter ruminantium
MKLVVLTGIPGSGSTTVLKKALEEVDYLHLNYGDIMTEIAVEKGLVETRDELRKLPADTQKEIQKAAGIRIKEKSESENVIVDTHCTISTPSGFLPGLPKWVLEGLNPDHFVLIEAYPDEIRVRRTNDDTRQRDAESAEAIQLHQEMNRAASMAYATLTGATVKIVYNHDNELDDTVAGLVEFLK

SEQ ID NO: 5310 - protein, 202 aa, Methanobrevibacter ruminantium
MAYQGSFLLGISWLQPVFDAMNAVLNPLVQLDPTPNNPVLTVFVISALISLLTVTAQKLLVDQDKMNEMQANSKALQKELREAQKSGDAKQIAKVQAKQTDMMQDQSEVMKMSFRPMIVTMVPILLIFDWMWQSAIRSLIVVFPPAVYYCTLTPIFHSLGQMLYGGNITTIPFGVGWLWWYFICTFGMSQIIRKFMGFKNGF

SEQ ID NO: 5311 - protein, 88 aa, Methanobrevibacter ruminantium
MPANRFRSRSYKRTNTKTPGGVNVLRYKKKKPSKHVCAECGAVLHGVPRGRPFEVNKLAKSKKRPNRPFGGNLCPECTRKHFKQEARK

SEQ ID NO: 5312 - protein, 172 aa, Methanobrevibacter ruminantium
MIITIGGVAGSGTTTAAKVLSEKLGVPYISAGAIFREMAEEHGMTPVEFGKFAENNTDIDKEIDNRQAKLAEEADDLIIEGRLSAYFIDADLKVCFTAPLDVRAKRVCERENKSVETARLEIIAREESEAIRYRDIHNIDIKNMDIYDLIINTNSFDPESISEIIITTLKVI

SEQ ID NO: 5313 - protein, 55 aa, Methanobrevibacter ruminantium
MAAIEVGRKCIKTAGREAGKECEIVAIIDENFVEVKGDEVKNRRCNINHLEPIME

SEQ ID NO: 5314 - protein, 837 aa, Methanobrevibacter ruminantium
MILVFKMGIFDKVKSAFESSKNFKYLDDLIHSGLNEIVLDDDISLSKNEKNKYSNGIEIEIDNLVIDGNGHAIDAQGNGSIFLCTGKNIVVKNIHFKNGIHSNGGAIENRGELTIMDSTFDGNNASLGGAVFNDGPKLMIAKSTITGNIAKEGGGAIYNNDGEVYISESMINENVSSFHQYSGGAIYNKGELTIEKSTLIRNHASFGGAIGNIGQLNIIDSTISNNESSGDGGAIFNDNASLSISNSMIEANVSDGLEGGGAIYNKEGELNITGSVLKQNELVGQIGKGGAIYNNGGNLNIAGSSLCNHSINFFGGAIYNDGGKINIAESKFNENSSNRNGGAIYNEGEVNIRKSSIKKNKSDGGVIENINGDFKIFNCEFFSNESQGNIIFNQDSLEINYTDFKDNRSKSMLLNDGVKSKMSLVKGEINGNDVKDTLILNEGNSLTISETVFENNLIPNGDAIVNSSNLILTNPKINDDNQEIRNQGNLLLKRSSLDIKGKINGEGKIETDDHSNEDKFDFGYLDSLIHGSPDKEIVLDKDIKLENYEVDFYEGGIELDFDDLIINGNGKTIDARGKSRIFTISGKNITLKHITFKNGHSYKNYDNPLNNNGGAIRINANANLTITDCKFLDNLSEDYGGVIYYNGSGDLVLTASTMKGNTAENDGGAIFSSGEVKINKSKFINNSGNNGGAIAIVNSNDKASVTESIFNENAADSKGGAIWFHNSNIALADCTFNDNYATCGAAIYQEISKGSISNSTFKRNLSSYAYWHDGKLVTNKNHAIFIDTGSGLNDFNQDRDNIINCDFIDNNNNLYAQKHDLIKSRLDEHLALWKRNL

SEQ ID NO: 5315 - protein, 277 aa, Methanobrevibacter ruminantium
MLEVRNIKYSYNKDYQALKGVSLKVEEGQMVALLGKNGAGKSTLFLHLNGIYEPDEGQVFIKGEELKYDKKSLLKFRQKVGIVFQNPDDQIFAPTVEEDVAFGPLNLKLPMEEVQKRVTEALARVGMSGYEKTAPHHLSGGQKKRVAIAGILAMKPEIMVLDEPTAGLDPQGVTALSNLLKELNDEGITVIISTHEVNLVPTYAEKVFVLVDGELVAEGTPKEIFAQPEILEQANLEVPIVTELFQELEKEGYDMNDDYPLTIDEAKEKFLELLNKN

SEQ ID NO: 5316 - protein, 230 aa, Methanobrevibacter ruminantium
MKFDMDYIAHHNELSEANPYYKLFITIILLIVTLALDNLYFDIFMFILFSIIILGVAKINIRSYIKFLTIPMAFLIITCLFLIFFFGSGKVIYQTGFFGIVVTDDSWHYGLYTFFRVLGCFPILGFLALTTPIAKIFHCLETLKVPKIVIEIGLLMYNTIFIFLNEIDVMQKAQKTRLGYNSYWNSLQCLGSLVSNIFLRSLEKSETLQNSLDSRGYDGELPVYIPPKEE

SEQ ID NO: 5317 - protein, 95 aa, Methanobrevibacter ruminantium
MERTTLIILAVICAIIFIAPLVMYSGLGEDDGYFGGADDAAGEAIEESGFKPWFSSIWEPPSGEIESLLFALQAAIGAIIIGYFFGYWRGQGKEE

SEQ ID NO: 5318 - protein, 221 aa, Methanobrevibacter ruminantium
MHIMEGYLPLTWCIIWFVVSFIVVAYGIYQIKQIVDETPDSKALLAVSGAFMFILSSLKLPSVTGSCSHPCGNGLGAALFGPAVTAVLATIVLLFQAILLAHGGLTTLGANIFSMGIIGPFVAWLVYKACIKANISSTIAIFFAAFLGDLLTYVATSFQLAFAFPAPSFGSALTKFLVIFAVTQVPLAIGEGILTVIIWDRLKAYKPKLLDKLGVLAPNEA

SEQ ID NO: 5319 - protein, 228 aa, Methanobrevibacter ruminantium
MEKGKLYGVSIGPGDPELITVKAMNIISKSKYIATPHTGTGESLALSIVSQAIDLSNKEIMLLEFPMTKDKDILTKSHNEAAEAIIKVLDSGEDVAMLNLGDVTIYSTFDYTKDKLVERGYDVQVIPGVTSFCASASELKIGLTTMNEPLHIIPASGIDIKEALKMPGSKVFMKIGRSMPKLIEAIEELGLQDNVYAVENCGLENEKVYKGLKEFDEKMGYFTIVVVK

SEQ ID NO: 5320 - protein, 379 aa, Methanobrevibacter ruminantium
MQDKRLVNQQLLRCGYTTGTCAAAASKAATTMLFEKERVDSVSITTPNQTSLNIDVLNPQLTDKKACCCIQKDSGDDPDITNGILVSAEVSLTESKGINIDGGKGVGRVTKPGLDQPVGNAAINSVPRKMIEDSLNELARHYDYDGGFNVIISVPEGEEIGKKTFNPELGIVGGISILGTTGIVEPMSAKALADSIKVEISVIAAESNESILIFLGNFGKKFTEEELKLSTSPGIMCSNFIDVALDSSVEYGFKNILLIGHIGKFVKLGIGLFNTHSHNGDGRIEALLSCALEAGADLETLKAINACVTTNAVLDILYEKELLDKTMEILNDRIQHRIDKRVPPEANIGFICFANSGEYEGILFESDNAKELMTIWKTD

SEQ ID NO: 5321 - protein, 251 aa, Methanobrevibacter ruminantium
MIHFVGAGSGAVDLITVRGANLLKEADVIIYAGSLVNPDLLNYAKDSCEIYDSAKMTLDEVLDVMFEAEKENKMTVRLHTGDSSIYGAIREQMDRLDEVEIDYDVCPGVSSFCGAAASLKAEYTLPDVSQSVIITRMAGRTPVPEKESIASFAEHGATMVIFLSTGLLKDLSKELVKGRYTEDTPAAIVYKATWPDEKIMHCTVGTLYETAKENNVTKTALIIVGDVLDSEYSLSRLYADDFSTEFRQAKK

SEQ ID NO: 5322 - protein, 340 aa, Methanobrevibacter ruminantium
MKISIIGFTDNGMEIAYKLSNSLSEDNNISFTRCGKGELSIWTEEHFSDSDALIFIGAIGIALRAIAPYIKTKTKDPAVVVVDELGQFSIPILSGHIGGANELALQIADILNAIPVITTATDINNLFAIDTWAKSQGLKILNPECIKLVSSKLLKGETIHIKSDYPIQGNLPKKVQINDLEDSNSDYDVIISHNDYSYMENKDILLLIPSIITIGIGCRKDISFDNIERSVLNILDKENYHILSLNAIASIDKKANEKGILEFARKYNLPFNTYSAEELNSLEGDFTKSEFVKSVVEVDNVCERSAVIESNGNLIRRKDTCDGAGVTVALAMINPILSWD

SEQ ID NO: 5323 - protein, 243 aa, Methanobrevibacter ruminantium
MKCVSVVGIGPGNELYLSIAAKETLEDSDLIVGYKKYVELVEEYLPEKEYLYTGMTKEVDRCKMALEKASEGNCVSVVCSGDAGVYGMAGLVYELSVDYPDVEIDIVPGISAVLSGSAVLGAPIGHDFAVISLSDLLTPWELIEKRLALAGEGDFCICLYNPSSHKRKDYLKKACEILLKHKKEDTVCGYVRNIGREGEEYHILSLKELKDTEVDMFTTVFIGNANTKVIDNKMVTPRGYKGV

SEQ ID NO: 5324 - protein, 252 aa, Methanobrevibacter ruminantium
MHKIVLFGGTTEGRLLTEFLSQNKVPSIVCVATEYGEKVLDYEPPVIVQPKRLKPGPMRKLFQEEQTEFVFDATHPYATEISKHIKEACDEMGIEYIRVLRESIEIEGTTKVSSMDDLIDYLNQTEGLIFSSMGAKEAEALTALENFPERVYLRMLPSPEGIGHCLDLGYPMKNLCGMQGPFSKEFNMAQFKEIGADILVTKESGNVGGFLEKTDAAKECGMEVVVLSRLLNEEGISVEEAKDAIMSKCLRR

SEQ ID NO: 5325 - protein, 395 aa, Methanobrevibacter ruminantium
MKEINIIGMGMSEKTLTHEALELIHHADILIGAKRLINEFSKLNKPSFNAYLSDDILKIIEETDAEKIAILVSGDVGFYSAAEKLTDVLKDYNPNLITGISSVSYFFAKCSLPWKDANLISCHGIDTNIVSSVRRNRYTFALTGKNIPELQNELVKYGFGDLKVWVGENLGSEDEFINDCRIDDLCSREYGSLTVLIIDNPDFDSKSRTGIPDEEFIRGKVPMTKSEVRAVCASKLSIGPDDIAYDIGCGTGSVTIEMALSAYNGKVYAFDKKEEAISLLNENCIKFHIDNVEAICGLAPDCLKGLPTPDVAFIGGSSGNMDEIVNYLYQLNPNMRFVITAISIENAMAALDSLKDIGIEAEIVQVAVSKGKKIADLHMLIAQNPIFIISGDANE

SEQ ID NO: 5326 - protein, 453 aa, Methanobrevibacter ruminantium
MNRFLISGTSSNCGKTTITMALLAAFKNRGLDIASFKSGPDYIDPMFHRKVFNVKTHNLDPYFCTEEMLCEQFIRNKGNDLSIIEGAMGFYDGIGVEGRASAWEVAKSIKAPAVLILDAKGMSNSAAAIIKGFKEFKEDSMVEGVIFNNISPMLYPLLRDIVESIGIKAYGFLPRREEYSIGSRNLGLITADEIQDIKDKINGLSQLAEEYIDLDGLYELAKSAPELKTNDFIGEVLTDSQNEESADSSNKPRIAVSRDKAFCFMYEENIEILEDLGCEVVYFSPLEDKKLPDNISGLYLCGGYPELYKEELSNNKDLCSSLKEIISNGIPTIAECGGFMYLHDSIENVPMVGFIKGNCIKTDKLQRFGYIEIKALKDNLLCSENDSIRVHEFHYYDSENCGEDFMAKKASNGLEYLCCHGSDSLYAGFPHIYLPANPDFARSFVRNARNWKH

SEQ ID NO: 5327 - protein, 212 aa, Methanobrevibacter ruminantium
MKIELEQVEPAEIENRSMEIIESELPHEIDPKLAPIIKRAVHTAADFDYVDNLCFSEDVVDKALEAIKNGACIVTDTQMAKAGINKAELKKHGGDVFCFMSDDDVRDMAKKNHSTRARASMDKASQLDRPLIFAIGNAPTALIRLYELIQEGKLKPELIIGVPVGFVNVVQSKELIMQCDVPYIVARGRKGGSNVAAAISNALLYILRDQMK

SEQ ID NO: 5328 - protein, 262 aa, Methanobrevibacter ruminantium
MVDKIILVVSFGTSYNNNRALTIGAIEKDIDEAFPDYEMRRAFTSQMVINKLKRRDDLDIDNVQDALERAVNDGVKTVIVQPTHVMDGTEYHFKIKDTVDKYIDKFDNITIADPLLITDEDFEDLISSITKDDESSDETAIVYMGHGSPAESNMVYTKLQSMLGEKGFDHYYIGTVEAKPDYDDVLAMVKEGDYKKIILKPLMVVAGDHAQNDMAGDEDDSWKSMFQDEGYDVDCLIEGLAQSKDIRDVYIKHVQKAIDDLS

SEQ ID NO: 5329 - protein, 130 aa, Methanobrevibacter ruminantium
MERESYYFLLLLIGLVICAGVFYFQFNYATPTYLIFNATEVNEGGSFTGVLNDAYGFPVVNKTITYHKPGYEMGTLVDVQTDDTGEFVIENAQYLPDAGEDNYYGAFTFAGDGKYQGCSFDGNITVIPKK

SEQ ID NO: 5330 - protein, 222 aa, Methanobrevibacter ruminantium
MSNQDEENYMDDELLLNARKPKGELGEKLIENMNINHESLAQWSLNHLEIDKDDFILDIGCGGGVNVERFLKMTDNKVFGLDYSELSVEKSIELNRESIDDGRCEIIQGSVSDMPFEEGIFNIATAFETVYFWPDFVNDLKEVHRILKKDGIFFIANEALPNEYDKRQQRIIELLEMHIYSKEELEDSLEKAGFSDVKCFIKEAKDSFTGDDAYWICVIAKK

SEQ ID NO: 5331 - protein, 320 aa, Methanobrevibacter ruminantium
MDDYLIKSKSETNPEYGCNPYERPIEEHIAKGIINLDKPSGPTSHEVDSWVKRILGCNKTGHGGTLDPKVTGVLPIGIDNATRVSQLLLPAGKEYVCLMHLHREIPEDQVKGIFNEFTGKIYQTPPVKSAVKRELRVRNIYYSTIYEIEGQDVLFRIGCEAGTYVRTYCHDIGEALGCGAHMAELRRTRVGPFDERNNDLVNLHDLTDAYHFYLEDGDEEHIRKAIQPMEVASSHLPQIFIKDSAVEAICHGAKLGAGGICKLSKDIQKGNLVAIKSLKGELVAAGTSLLSSQEIMNADSGLVVDTNKVFMDTGIYPKGW

SEQ ID NO: 5332 - protein, 60 aa, Methanobrevibacter ruminantium
MDDKEKVIEAFKNSEEPLNAKKVSELSGVEKKEVDKIMKELKKDETIVSPKRCYWTLAEK

SEQ ID NO: 5333 - protein, 183 aa, Methanobrevibacter ruminantium
MVKNNNERFELDLSKNETPEFSNEEILSKMRRGFNNQYVCFEYPFLWQNMPIDEEDEFTDIMLFNKANNAIVKISTQPCLIDNIDDLKEEIEKDLKSNGCTIQQSAMEKMETQDIWDVFYTTKEGLEVEQFSILKDNNLYNLELYTKNNRDQATVKSFVDVIQTFTILKPTYKVDGDSYEKIE

SEQ ID NO: 5334 - protein, 112 aa, Methanobrevibacter ruminantium
MSVFDYICHRRPERSFFYKGRQFPVCARCTGFYISGIASIILFKYFPLPNTLTTLAIGILLLIPCAIDGTSQLFEMRESNNVLRLITGLLGGVGLIMIYEVVLNFVFLNFIY

SEQ ID NO: 5335 - protein, 47 aa, Methanobrevibacter ruminantium
MDGMDPEDYLIYNYYFEEEENNGLSKNESCCGVLMVLMILTILLTVA

SEQ ID NO: 5336 - protein, 167 aa, Methanobrevibacter ruminantium
MARREENTFDFLGLFTEEIGGKKNKSNGAIKFQKDKLFIEKRSRLNGKLKDSYEISYDELDSESIDRPAINRVEIKLKDKTISLKTLDHEMLDNFEDKLLDIVEGPKLAVEDSPVANAPYNAAEIKSDSKIGEIDIPDQIRKYHELYKEGIISEEEFENKKKELLDL

SEQ ID NO: 5337 - protein, 288 aa, Methanobrevibacter ruminantium
MEIKSIPQVIKEIQELVDKEDYESAYNIAKDNVDLNKEYTEGEYVFKNLLEELLFQVLIQKEIKKKIPMILDYSSLYSNYGEVLIQLDKIDDAKKSFELSRNYNPINIKANFGLGDLYKMENKLNEFYKLAIESFKIAYYPKDLAKSFRNLSYYFLKIAKEENADENLKIAIHLKKISKDYDDESELAKTELDEINGIISNFDKETVEALESTDLKECRNELKSKGLPYEAGIEIITICKNLGFQLDEAKKVVPALYYFNIAYDLTKDPDIKLVIDDLNEKVERRLDE

SEQ ID NO: 5338 - protein, 149 aa, Methanobrevibacter ruminantium
MEDDFKHLVRISRKDVDGNKTIEQALTQIKGVGLSLSRSICLTLGLNTTDKIGYISEDDVTKIEDLLENPQNYSIPDWMLNRRKDYATGDDLHLIESDLDMTLRDDLNRMKKTRSYKGRRHEVGLPVRGQRTKSTFRHSSTVGVSRSRR

SEQ ID NO: 5339 - protein, 178 aa, Methanobrevibacter ruminantium
MGHPRKARKKYDTPPHPWNAERIKTENKLMSKYGLKNKKEIWKADTLVRKYSREARYLLGFSQDQVQVETEELLGHLKRTGILDEAAHLENILDLTVEDILRRRLQTIVFQKGLARTAKEARMFVVHGHIALNGKKINSPSYVVKRGEEEAVGFYHSSPVAKQIEEYNKAASQAGENQ

SEQ ID NO: 5340 - protein, 130 aa, Methanobrevibacter ruminantium
MAKDEKWGIANIYSSFNNTILTVTDITGAETICQWSGGRVVRADRQQSSPFAAMEAANRAAEDAKEKGFVGLHIRVRAPGGNGPRSPGPGAQATIRALARAGIKIGKIEDITPIPHDGTGRPGGKRGRRV

SEQ ID NO: 5341 - protein, 282 aa, Methanobrevibacter ruminantium
MEIDVKKQDENSMVFIVRDAEVPFINAIRRIAMMRVPKLAIEDVFIVKNDSAMFDEVLAHRLGLTPLVSDLESIEGLVMREDCDCNHDENGNYVDKGEYCPRCSVSFSLNETGPKVVYSRDLKSCGDSRIKPVYDTIPLLKLKEDQDVELEAVAKLGIGKEHAKWVPTTVCAYKQYPEITFNEGEDVVYQVADACPRNVLDANRDDGVIEVIDIENCSLCKTCVRTAKAAGSKFINVGYRENDFIFKIETDGSMPPKEVLLKACDVLDAKTDEFITFSEGGS

SEQ ID NO: 5342 - protein, 121 aa, Methanobrevibacter ruminantium
MAREIKKTNPNLIALIYNLRKQSYEEGVAIWKDVAIKLEKPARNQAEVSLSHINKNTVEGETVVVPGKVLSDGKLDHKVTIAALGFTKNAEAKIEKFGCEALSIAELAEANPKGSNVKIML

SEQ ID NO: 5343 - protein, 142 aa, Methanobrevibacter ruminantium
MMIINGEGHILGRLASVVSKQLLEGEEIVVLNAEKIMLTGNKDWAYAKYKQRVDRASISNPRDLGPKYPRRPEDIFRRTVRGMLPMKKAKGRNAFKGFKAFVGVPEEYADAELLTMPEAEYNDIKKGMELGEISKLLGAKFD

SEQ ID NO: 5344 - protein, 132 aa, Methanobrevibacter ruminantium
MKVVHASGKRKTAIARGTIREGTGKVRINKVPLELYSPELARLKLTEPLELAGEVADNVDISIRVNGGGVMGQAEAARMVIAKGLVQWTQDMDLKEVYTQYDRTMLVGDPRRSEPKKYGGPGARARKQKSYR

SEQ ID NO: 5345 - protein, 56 aa, Methanobrevibacter ruminantium
MIPIRCISCGKPVSAYFDEYNSRLADGEKSKDILDDMGITRYCCRRMLISHVETWE

SEQ ID NO: 5346 - protein, 72 aa, Methanobrevibacter ruminantium
MAAKKSTAKKLTRFEKARVLGARAIQLSMGAKPMEHKEIEKFIKNSKSLDPIDIATLELELGILPLDVRPKE

SEQ ID NO: 5347 - protein, 415 aa, Methanobrevibacter ruminantium
MDSVIEDVRVRKILDSRGNPTVEVDIITWNGFGRAAAPSGASTGSREVVSFPEGGVDQVISEVEDLISSELIGMAAEDIEDIDEVLREIDGTDNMSAIGGNTSVAVSMAAAKAAAMSFGMPLYSFLGGNFVSEMPYPLGNMMNGGAHAGPNAPDIQEFLVVPIGAKDVEEAVFANVAVHKKLKELLSKKDPDFTGGKGDEGGWIPNITNTQALEIQAQACEETRDELGILIRPGLDMASSEFWDSEKEKYVYSQDNIERDVGEQVEYVKDLIETYNLFYVEDPFDENDFEGFRELTSKVGNKCRICGDDLFVTNSRLLKKGIDEKAANAIIIKPNQIGSLTETYATVKLAKENNVMPVVSHRSGETCDETIAHLAVAFGAPMIKTGAIGGERIAKLNELIRIEAELSNPKMARLF

SEQ ID NO: 5348 - protein, 63 aa, Methanobrevibacter ruminantium
MSTVIIDASKCENADCGECVDMCPMEIFSLDGDKIVTDHEDECTLCEVCVDMCPNDCITIKDE

SEQ ID NO: 5349 - protein, 198 aa, Methanobrevibacter ruminantium
MSDLLIPLDNYLAAGLHIGTQQKTHDMEKYIFRVRSDGLYVLDVRKTDERLRAVAKFLAKYDPDDILVVATRQYGQAPVKKFGEITGCKTIPGRFIPGTLTNPGYAKFIEPKVIVVTDPRSDSQAILESKQNGIPVVGLCDTENLLANVDICVPSNNKGRKAIALIYWLLARQILRERGILGEDEDLDLEPSDFELKF

SEQ ID NO: 5350 - protein, 298 aa, Methanobrevibacter ruminantium
MDNIKDKKINDKIQKQLANESVNELLSITGIKSNVIQPLTVEYVDVADTRIADYVGLEENDSIRLLEFHTGAPNENLDFKMFDYSSMIYKKYRKPVNAVAICTERINEPEGKLEWGDRNKYYYDIVTYKDIDGELELNIIRNKNKFNQKLSSLEIFTLKMILYTSFDKKPHEIMLDACKLTNEANLNQYLLDEIKKFQELTCRKIIDEQYHRGIADVIAMKNTLFYEDLKKSEERGIRIGEKRGISIGEDKKEFHMRIHIIKNLLGKISNSDLAKSLDISEEELEEFIKENNLTPSKD

SEQ ID NO: 5351 - protein, 81 aa, Methanobrevibacter ruminantium
MINWAAEMKTMKNTLFYEDFKKSEERSILIGEDKKEFHLRIHIIKNLLGKISNSDLAKSLNFSEEELEEFIKENNLTHSSI

SEQ ID NO: 5352 - protein, 282 aa, Methanobrevibacter ruminantium
MIREAVVAGTFYENNVKYLRESIEDCFTHRLGPGEIPKLSRVNKEKEVNAIMVPHAGYVYSGPTAAHAYSKLVQDGYPETFVIIAPNHTGFGEHVSIFNEGSWIVPNGVADVDDELANAIINQSNYAKADFLAHRNEHSIEVQIPLLKYFDSNFKIVPICMMDQSPQASIDLANSIFEAANDLNRKITLIDSTDLSHFKSQEKTIEHDNLVFNEVINGNTEGLYQVVKKEQITMCGYGPTMVSMEYCKKLNQKNFELLQHSTSGDITLDYASVVGYGSGVWF

SEQ ID NO: 5353 - protein, 327 aa, Methanobrevibacter ruminantium
MRKMSVASAPGKTILFGEHSVVYDEPAIAGAVNKRASVKIQESLNNYSTLKSYDLGFEVILNTRRGTYKLVKGKPGIIRYILNAMGKFHDHSNIDMTLGLNLPIGSGLGSSAAVTVATIAALHDYHGVPITKEKLAEEAHGVEQDVQGIASPLDTLVSTNGGLVYLSREKRIVRFDKPLDAPFVIGFTNKYGNTGKMVKHVRHLKDNYPELINPVISTMGKIANEARIAILKNDIDRIADLMNLNQGLLDGLGVNTYELSRMIYTARENGALASKITGSGGGGSIISLCKNSTVDNVANAINKEDSTIKVKFSGEGVLVNRRSPPFN

SEQ ID NO: 5354 - protein, 271 aa, Methanobrevibacter ruminantium
MIILKIGGSILTEKDSAEPKVDYANLNRIAEEIRQSLYSDEMSNDLIDGLVIVHGAGSFGHPPAKKYRIGEPFDMEDYLSKKIGFSEVQNEVKKLNSIICQSLIEHGIPAVAIPPSAFITSHNKRIYDCNLELIKTYIGEGFVPVLFGDVVLDDEVKIAVISGDQILQYIAKFLKSDRIVLGTDVDGVYTKNPKTHDDAVHIDKVSSIEDIKFLESTTNVDVTGGMVGKVKELLDLAEYGISSEIIDANEKGAISKALQGMEVRGTKISKE

SEQ ID NO: 5355 - protein, 350 aa, Methanobrevibacter ruminantium
MISDRKLEHLLICKNYDVSYNDKTTGFEDIELIHRALPEINNDDIDLSTEVFGKKLDSPLFITAITGGHKAAKDINKELAIIAESRNIGLGLGSQRAAIVNPELRDTYDVVRENAPDALILGNIGAPQSDLAIDAVEILDSDILAIHLNPLQESIQPEGDVDARGYVDSIKEICKTVDVPVMAKETGTGIRAEDAIELEKAGVSFIDVEGAGGTSWAAVETYRAEDRYLGELFWDWGIPTAVSTVEVVNSVEIPVVSSGGISFRTRCKLRAIALGADAVGMALPALKGAYEGQEALNQMVNRFNESLRIAMFLLGASNLEELKRSDLIIKGETKQWLEARGFDTKHYARR

SEQ ID NO: 5356 - protein, 449 aa, Methanobrevibacter ruminantium
MTVEVIAIGGYEEVGKNMTAVKVGEDVIIFDMGIHLDRISIHEDTDIDRMHSLDLIERGVIPDDTLMKDVDGKVKGIVFSHGHLDHIGAVAKLAHRYDAPIIGTPYTTALIEKQIKGERKFKVNNPIRPLNPGSKIKLSKDITLEFVQSTHSIPQAVFPVLHTSEGIIVYALDFKFDNHQKVSPPPDYNRLRELGRKGVLALIVETTNAINYTETRTYSEKVARIILEDLMKRAFKGQKEGMIVTTFSSHIERIQTIADIAKDSNREILFLGRSMERFCGIAQNLGILKLPQNAYVYGSPKAVNKALMKAEDDRDQYLLVTTGHQGEPDALLPRIASARTPFNVKKGDNVIFSAPIIPNPTNAANRHILESKLKANGARIYANAHVSGHAGREDHRDFLRMLRPKHIIPAHGELEMLVAYGELAEEEGYRIGNNVHILRNAQAQVFNGD

SEQ ID NO: 5357 - protein, 331 aa, Methanobrevibacter ruminantium
MSDVTDVLKEYSADVIKTIEENLAPVQPQNLQDACIYLTKAGGKMLRPALTLISCEAVGGNKEDALKTAAAIELIHTFSLIHDDIMDDDDMRRGMPSVHKVWDEPLAILAGDTLFSKAFEMIISSKEENAHPEHVANALATVADACVKICEGQASDMSFEGDFDVKEAEYSEMIYKKTGALIAAATKAGAIMGGADEKEVTALYEYGRMIGIAFQIQDDYLDVISDEKDLGKPVGSDIAKGKMTLMVVKALAESDGEDHERLLEILKDNDCSQDMVNEAIDLFNKYGSIDYAYNLALENVNGAKEAIAFLPDSDAKSMLIALADFVIARSS

SEQ ID NO: 5358 - protein, 290 aa, Methanobrevibacter ruminantium
MGFKDKVLSSSNQFNYYKDNYEKLLNENKQLKQKQNQLIEENEQLIKEFELNKQIIINKENLSTESNYCPYCGRISNFEPYGVVKREKAMCPYCKSLERHRLIYLFFERNYSSIFKNKDIKLLHFAPERIFYNYFTQFDHVDYYPVDIDPETYAKRGLKLKMKVNMEEVPYGDEEFDFIYNSHVLEHVPNDFKAMGELYRVLKQDGVCITVVPLSGNEETLEKEEYNTPELREKHYGNKDHLRFYGLDVKQRLESVGFKVKVSKLEDLNLTEKEIELFNVKESLIFVCTK

SEQ ID NO: 5359 - protein, 219 aa, Methanobrevibacter ruminantium
MDLPSGDNYENTTVNEAIRQINDTNRDLTVLFYNSEDNSTVARVEFEFTINDFKATATEQTVANRTVWYNEENGTYMAFLGNSVTHDNIIIITNDVEILEHLISSVKFIFLNEDGTVNSTSDMVNNQSINVTGGTASNGTDASASTATSNVSSSNSQSTGNDGYYWSGQDQDYIKEYTDSNGIQHIDRRNGPNEAYDPNTQRHYTDGVEDTAAYNQDFN

SEQ ID NO: 5360 - protein, 190 aa, Methanobrevibacter ruminantium
MIEKVRFDQIADIFTGVRVKRYQKGKGTTVERPILKKTYSENSSKLDLEYEEVSEEIHERFYSQENDIVILLAGSKVSKIEEAGIIIPMYYAVVRVKEGYDVDFIYHLLKSDIFPRELHKIEEGTTLKIIKTTHLKSIYLPVPDLETQINYGKLFNLMDKRIKLNMELAELEKQIEKSIINEMLLEEKTF

SEQ ID NO: 5361 - protein, 634 aa, Methanobrevibacter ruminantium
MSSRLGRQLWDKYEELRTNSMVGFLTDEDFQKYFLGFITYKYLSENLELYLDKELEKDDLKFEEAYNFENYGKVLAKKAIYNLGYFITPNHLFRNVIASYNQGADISRELKWAFAEINSSCKKTESQEDFENLFESVNLQATPLGKKQEDRNRVIYNILNALDSVDFGLDEFNSSLSLINHYSEPARELGVNLDALEKELLSDPNKNIFLDDSPLNESSSIPLNEAPFEEYASMELFLDDIAPVEEFDSMELSNKENIVTGLENPNHPNSLVNEGWNDRSYDSYRIQKQYSIGDAFEYLLDKFSLNASKSADFYTPNDVSVLVSKLVATNKRAIDSVYDPCCGSSSMLLELNKHVSLNLICGQEVNAYYYNISRQNMILHNIHFKDFDIKQGDSLDSPHHIGYDKFDVVVSQIPFNVSWTAKKSFLNDQRFKEYNALAPRVKAEYAFIQHMLYHLDDDGIMVVIAPHGVLFRSASEESIRKIIVSKMNYLDAVIGLPSNMFYSTNSPACVLIFKKNRRYDDDVLFIDASKNFNKIKLRNNLRKEDINKIVGTYVSRAEVDKYSRRVSLREIDENNCNLNIPRYVDTYEEEEINIQEIYKRREEASRELKEVTYEIDELCKELGIENPLINNIFE

SEQ ID NO: 5362 - protein, 306 aa, Methanobrevibacter ruminantium
MSKTYIFGHKSPDTDSITSSLVMCDLENKLGNADVVSCRLGNLNKETEFVLDYFDIEAPQLIESIEDDAEVILVDHNSPSESVDNIENAKILKLVDHHKIAFETSYPLFIRTEPVGCTETILFKLYKENGLTPDKTIASLMLSAIISDTLLLKSPTTTEDDKQAVKELAEIAQIDYEEYGLEMLKAGTDLSSFSIEEILSLDAKQIDFKDVRSIVNQVNTADIDDVMTMKDDLEAGMNKIIEDENLDLFMLLITDIVNSNSQVIALGKDVCLVEKAYGVKLEDNTVLLEGVVSRKKQVVPIMTENA

SEQ ID NO: 5363 - protein, 117 aa, Methanobrevibacter ruminantium
MSKFCPKCGCENLDEASFCLECGASLPSIEEVKERSSHGAGTSHQSTFSSNLNEENGFNQETSSFSQSNSNSNEASNSSKFKNVINEANPANNDNQDYAICCLVIFVLLLIAFLCNF

SEQ ID NO: 5364 - protein, 131 aa, Methanobrevibacter ruminantium
MEINDFGHDLDESAQFLVQKLLILHPWDEEWDLSVTANLVPFYKEKIDIQISKQGKCDEEFFDKLIRFSSILDTNQVRLLFMEQLVGMPLILDGKYLNNDERIDLLIESLNGRLKRVDNGLYLFFNHEEEF

SEQ ID NO: 5365 - protein, 389 aa, Methanobrevibacter ruminantium
MIYRKLGKTDLEVSNIGFGCMRLPHKEHFYQIDEAEASKMFDYAIDHGINYFDLAYSFHSKNKNLGGNAEPFVGKYLAERGNREDMVIQTKLPGWLVNKREDMDKFLDLQLERLQTDYIDVYMLHSLKIDFWNKLYGMDVLEFLDSILEDGRVKYVGFSFHDDLDVFFSIMDSYDKWDVILTQVNYLDEDYKSGLGGLEFVGMAGLGNVIMEPLRGGSLITNIPDEVQALWDTADKKRTPVEWALEYLWDKPLVTSVFSGMSNMEQVKENIAIAENCQPDCMSEHDRQILKDVAQVYKSREEIPCTGCRYCMPCHNRVDIPHCFKQYNIAKSLNYIDKTAAPYFWLVNKDERADSCTFCGECNIQCPQGIDIPAEMEKVFDFFHEESQY

SEQ ID NO: 5366 - protein, 275 aa, Methanobrevibacter ruminantium
MNHDELINLDAIDWEEVWQKSLKKSFKKEKNWDDIAKDFGQWLENDDYPDVLLEEMRIDEEDTILDIGCAEGTISRKLAKKAKSLTGIDKSKLMLEELNKKAEKERIDNITTIQMDINELNYEEIGDYDIILASRCLNGIYNIKNTLTTLNEIANKYVYITVFGSKSHKYKKEKCEIAGKPFKAGTDYMVLVLLLKSLGIEANVVQLECKNLKEYRDFDEAINRSVWRFGELEEDREIALRQYFKETLVKNERGNWVNPKDKTDLVLIWWKKEEE

SEQ ID NO: 5367 - protein, 274 aa, Methanobrevibacter ruminantium
MTKKIIIEDENEIDWDQLWTAKMDKKGDRGKDWSKAAEKYSERASKDNYTEQLISKMIISKEDTVLDVGCGEGSVTIPLSKEVKSITAIDATDKMLEILDEKIKSEGIENIKTIKEDINDVNLEKYGKFDIVLASRVVNGIKSPKKVFSNFNEMANKYVFITLFGPNNWKLEKDFHEYLSKEYNGAPSYTILLNLLAEMGIYANIINLDVGPVRTYKTIEEAIDNGKWNLAKFSEEEQEKLPKFLNEVLIRDNETGLLSNSEDKPDWVLLWWKK

SEQ ID NO: 5368 - protein, 271 aa, Methanobrevibacter ruminantium
MSFQIDDPEDIDWAYFWAKKLESKKDRAKDWNKAAPNFGKSAKKDDYHTKIIERINVSKEDTILDLGCGDGSITIPLAKKAKSVTGVDSAYKMLEILNENAKKEGIENIRTLEEDLSNIRVNDVGNHDIVVASRSLNGIINIRETISNINEIADKYVYITLFGPNNWKIEKEFFESIDKEYVEFPSHRYFFNILVDMGIYPNVENLNIGHKREYENIEEALESGKWRLELLDDEEKAQLYKYLEDILEEDDNGKLSNPNDKADWVLYWWKK

SEQ ID NO: 5369 - protein, 164 aa, Methanobrevibacter ruminantium
MDGRLDIDSFEKAINGLNKNLYDVGALFQANMPLLASEASQAAKENCVNKMADRVDERLDSFRENYGYYNDFYEKLKENVKNDTIENPEEYDVFLEHASNTFPKYIDELGQTIDSLSGIPIRTEKFDSTMRELGSIIENFRFDFKRTLTVADVYKVQKEMKSQE

SEQ ID NO: 5370 - protein, 87 aa, Methanobrevibacter ruminantium
MKAVSYIKRSNNRYVLVMNMNGKFKMPSEIASEMDLRINQISAVLSDLKKEDIVTCINEEEKVGRLYKLTDKGLEAYKVIKTNEEIQ

SEQ ID NO: 5371 - protein, 556 aa, Methanobrevibacter ruminantium
MDELEEIVFKHALLNAAKHKGSANPGAVMGSIMSNEPELRPRAKEIGPISGKIVAQVNAMSPEEQKTKMEELGVEVEEKKKKKEEGLPKLPGSNKNVVMRFAPNPSGPLHIGHARAAVPNGEYVKKCGGKFILRIEDTDPKRIYEPAYQLIQDDLKWLGIEPDEVYYQSDRFEIYYQYAEELIKRGAAYMCTCDGGEFKKLKDNCQPCPCRDNSVEENMELWKRFPEMEAGEAVLRIKTDINHKNPAIRDWVAMRIVEEEHPRLGTKYRVYPMMNFSVSVDDHLLGMTHVLRGKDHLANSEKQKYLYNHMGWEIPEFIHYGRLKMEDIALSTSKAMAGIEEGTYSGWDDPRLGTLRAIARRGIQPETITQLMVEIGIKMSDSAISWKKIYGLNRNLIEEKVNRYFFVPGPVKIDIADVPEDILGWEVIRPLHPDFEERGNRTLIFDKELYIPKADCKDGIIRLMDAVNVEISGEDVKFHSESFEDAREVKARIIQWVPLDAIKAKIVMDDASIVEGLCEKDCGDLKVGDIVQLERFGFARLDEIKDDELIFYFAHK

SEQ ID NO: 5372 - protein, 148 aa, Methanobrevibacter ruminantium
MDKKLAVIFIGIQGSGKTSFYKRYFPDFAHVNLDTFKKRSKERKFFNMCIEEGKSFVVDNTNPTKFDRQRYIPTARENGYEIWGYFFNSPLEESMERNNQREGLARIPRVGVLSTYKKLEVPEYDEGFDKLFYVKIKDGQFVVGELEE

SEQ ID NO: 5373 - protein, 762 aa, Methanobrevibacter ruminantium
MKEVTAILLVIIALIGIISIIIVKLYYREKEKDHDKERLEEFLNSSDYNSSIESHEKISSRQKAEGSKKPQKVQRRRRVRKVPKESQNRNENLSEAQIYANTLQNASNNDLFVDYDGDNRGAQRTRKVRRVAKAETAETTQANGTAALLRQRAEAAKAREQAPRTKVRKVRKVKSQEDTVQKVQRTPDRVKEQMNKEEKVKPIQEPITKEHKETINSVRQGESEVKPRQVPMTKEQKEFISSETAKKLIVEDDDGAVKVVKSIKPAEDIEEIKESALIEKAETTEEAKVKVTEETPKVEEKAETAEEEAPKVEEEVQTEEAPKVEAEPVQETTEEVKTEEAPKVEAEPVQETTEEVKAEETKVAEKPAEEVAEKVEAPKAGKPAEEVAEKVEAPKAEEIKEEVTKPAEEPKAEEVKAETTGEIKSDAPKVEAEPTEEPTEEIEVAEPTEEPTEEPTEEIEVAEPTEEPTEEIEVEAVDDYIEALETEGVYQDDLHILLGEEKIEDEGPENEFVTINSDRQSSSGGNDIFRDAINSIRKFRGANTQQHKVEEIKEEVVPDDYIHNFGNGIEEIGDTITITPIREDEIDDLAYNQPNEDVDEIYKEVNEEEYNKTIDSELDEAYEDVTDETSEEEANTYTVEDYKQIEKEEEEKKAREENTQKILDLKGIESKKPRSSKKESVSTEQPEDPAQKQLVFTEQRSNVEEVYINGKLIELKLGQTVMFNHNNETYSSQILKLKPGFVGVKYRGKKVWIKATDVKRVL

SEQ ID NO: 5374 - protein, 410 aa, Methanobrevibacter ruminantium
MVKINENYLLLQNSYLFVEVNRRAEKYMEENPDKDVIKMGIGDVTKPLTPTVIKAFKDAVDEMADGETFMGYGPEQGYDFLAEAIIKNDFNRWGVDLDLDEVFISDGAKCDTGNIQEIFDLDNVIAVTDPVYPVYVDTNVMAGRSGLIKDDGMYANIVYLPCTEENDFVPALPEEDVDLIYLCFPNNPTGTTLTKDQLAKFVEYAKENDALILFDAAYEVFITEDDVPHTIYEIEGAKEVAIEFRSFSKTAGFTGTRCAYTVVPKEIKIKTSTGDEQSVNALWNRRQTTKFNGVSYPVQKAAEAVYSEEGQKEIMENIEYYLENARIIRESLSDIGLNVYGGVNSPYIWVKTPNDMESWDFFDLLLEDANIVGTPGSGFGPSGEGYLRLTAFNTLENTKEAMNRISKLSF

SEQ ID NO: 5375 - protein, 226 aa, Methanobrevibacter ruminantium
MEADFSLVNENDDLQDLFSKYGALALEKQENLSKLVGDSEPELDIENGIVKFGDKEFPIQLLGFLDPDEDTWSWAWDNEEIGFPEELIEEAKEVKEFGEDQNIVQFKQSMFAASFEEAHILSMTVSSIFGDDAYCGVNYGNFVFFVTIKSDEIPSSEGPEEFSNIFNEFHRRFEVNHLKALESYAMLKGYEYKYRDDFALVKIGDNRVVVGLTERKNVQSIKFILA

SEQ ID NO: 5376 - protein, 208 aa, Methanobrevibacter ruminantium
MDSELIEEISFEIQLLLKMGFYNDEEILEIIDDEFIEEDIPKEKLLEIFSNVKENFDCPKSDSEDFLNLKEAFLNLSKNHNILTIHNAGYDIEEGIQDSFELFTHLRNNKYEVEGFCFYSFEDIEIAIEENSLLIAFGDFEFDEDKGLKIAKTVKDELVSKGFNINWDESIDERIEIVDFNWQKAYEDRDYSMDGALSDYIELNNLED

SEQ ID NO: 5377 - protein, 222 aa, Methanobrevibacter ruminantium
MNARSFEIIEEAISNGVWTWLELDCYSNSLYLEFERLQLLSKSIVNPFKPVQESTYNDYRGELAIRFGTNIYLAILYDDEDSFDFLDLEEDILNSFLNSDAKLSDNDSYFYRQFKKEIRGFKFQDEDYSSNLTKKYKKEIVLAQLPNKKDSYDFLLSFELDNFAIIVKGDIISCFNDFESLSDGDIKRASNDWILYYLDYWIKKGTEEEYDEDFLCENISFD

SEQ ID NO: 5378 - protein, 180 aa, Methanobrevibacter ruminantium
MNQLRPGYNFLATHELFFDEIPHQRAIHLANYEFFWNILDELGPFGTEESYLAFCELCDWLIDNPNTPIIECFRWILSSWDIELEDFDDKVIENENILKIIYDLDFYEDLMMLDFTIISTGFGQLILQGKIDADVKNIIQLSLLRQMNSHVLDEYLGSNMQYKYERYLYLQKLLDILEEA

SEQ ID NO: 5379 - protein, 339 aa, Methanobrevibacter ruminantium
MTCSILVGGAWGDEGKGKCITYLCDTDKPDIVARAGVGPNAGHSVEFNGEKYGLRLVPSGFVQTEAQLLIGAGVLVDPEVLFHEFDYLSKYNVRERTLVDPRCSIIEPEHKERDQASEHLAKKIGSTGSGCGPANSDRVLRTAKMAKEIPELADYLTDVSLAVNDALNDGQDVFIEGSQGFALSLYYGTYPFVTSKDTTASSFAADVGVGPTKVDEVINVFKSYISRVGEGPFPTEMSQEEAESKGLEEYGVVTGRRRRIGYFDMELAKESCRINGATQIALTCVDKLYDCARVRDYAELSQETKDFISEIEQETGVPVTIISTGPDLQDTIDLRKELL

SEQ ID NO: 5380 - protein, 394 aa, Methanobrevibacter ruminantium
MRCVGTVVRGIRTPIIKENDDLATIVVDSLMAAKESEGFEFRDKDIVAITEAVVAISEGNYVTVDDVAEDVAKKFPSKEIGVTNPILSRNRFSIILKGIARGMDKITLLSSFPADEVGNGILDERALDESEFNLGSVITEEDYEKNFSSWIHPFTGINMVDFYRELIESEDCEVEFVFSNDVKTILDYTNDVLTCDIHTRKKTTKMLKEKGANVYGLHEILVEPIGDSGCNPEYGLLGSNKATEERLKLFPKTGDKLVNEVQKRLIELTGKQIEVMVYGDGAFKDPVGKIWELADPVVSPAHTAGLVGYPNEIKLKYVSDNQFADLHGDELKEAIKEEIRQKAENLTGQMITEGTTPRVLTDLIGSLCDLTSGSGDKGTPVIFIQGYFDNLAND

SEQ ID NO: 5381 - protein, 127 aa, Methanobrevibacter ruminantium
MKDIINPNVEIPDEQVAMAFFRSVRWVNGVYCPKCKSYNVNNRGNQGRTRRYVCKDCGSNFNDFSGTIFHKSKIPLNVMLYILFNLDEKTTTQLSEELGYSRQCISRISKLFRDKLLSNPEFFDIEE

SEQ ID NO: 5382 - protein, 315 aa, Methanobrevibacter ruminantium
MDKKTLAIIAIIVIALVAVGAYFATSGGSSDNVVRIGHLPSDHDTALFVAKEKKLFEDQGLTVELTQFNNGGDLMTAMASGDIDIGYAGITPVMSSISQGVPVKVVSGAQIEGSAIVANKNSGITTVADLKGKTVATPGEATIQNMLLTSALTQAGVSTDSVEFTTMKAAQMTDALKAGQVDAMIIWEPYSSIAVKNGDGVLIENSSEIIPGHPCCCVVAREDFIKDHRDSLDKVLKAHEEATKFTNENPAEAAKMLPEDIVPDQELQAKVIADTVFISGLDAEYKQKVMDFMALEVQLGLLKQPLTEEQIFADL

SEQ ID NO: 5383 - protein, 247 aa, Methanobrevibacter ruminantium
MEIKKKFLPFILPAILLIIWYLITDGLHLIPYYILPSPLNVFNAAWTLITNGKLFMHTSSTLIKVFSGIILASVVAIPLGIILGWYETLDRLSSLIISILRPIPPISWIPFSILWFGIGLSSAVFVIFIGCVFSVLVYTIDGVKRTDNVLIEAAQTLGANNWDILLKIVLPSTLPYIVSGLKVGVSIALMCTVSAEMIASSRGLGYMILTASQLFQPGTVVVGMIVIGIIGILFDYGFRKAQERIFW

SEQ ID NO: 5384 - protein, 253 aa, Methanobrevibacter ruminantium
MFILAIDIKNVSKSFVTKDKDFMALKNINLHVDDGELICLLGPSGCGKTTLLRMVGGLEKPDEGEIYDRGELVTGPSKDRGFIFQQYSLFPWLNVLDNVMFGLNLNKDTSKEENLAAAERYLERVGLAEFKYSYPHELSGGMKQRVAIIRSLLNHTPVLLMDEPFSAVDMLNRHSLQEQLIGVWKRFNTTILFVTHDVDEAVYLADKIVIMDKNPGRIQDVVEVPLERPRQRESREFLDFQDEIEKLLGVWEP

SEQ ID NO: 5385 - protein, 266 aa, Methanobrevibacter ruminantium
MIGLSIAGFDPSGGAGISTDMKTMAAHGVHPCSVITALTAQNPKKVFSVQAIETSYIRQQIDSIFDEYPIKYSKTGLLYSKEIIQLVSKKVEELNLRIVVDPVMVASSGGQLAKKEMANSLKKYLLKNALLVTPNVKEAEELSGISIKSIEDAKEAAYKIGECCNVMITGGHLDGNNVIYNKQKDELSILKQNLIKTDNLHGTGCSLSAAICANLIILNEKDKDSKDENNLEIAIERSTKFIYEAVKKGRYGTLNPNFNSNLDFLK

SEQ ID NO: 5386 - protein, 234 aa, Methanobrevibacter ruminantium
MDKIYAIIPVNQFANAKTRLSPFLTPEERRDLLKAMLKDITDTLKPIVDKVVIISRDEEVLAYAEELELTTIVEEEYKKSKAVNSSDDNPLNKALKQAMKWSRKKTRKVIILPSDIPLIGKTNVKLLIDQAKNFDFIIVPSKGGGTNTLIIKPLAIDMKFEGFSFNKHIEEAKRKKLVPIVHDSFYMALDVNTTEDLGEIMLHGNGTETKKYLESLGIKVESSHDHERLKVTRD

SEQ ID NO: 5387 - protein, 468 aa, Methanobrevibacter ruminantium
MENFSEWFHEILEKAEITDSRYPIKGMSVWLPYGFQIRRACLNIYRDLLDSEHDEVLFPLLIPEEELAKEGIHVKGFEDEVYWVTHGGQKELNEKLAIRPTSETAMYPMFSLWVRSHIDLPIKQYQVVNTFRYETKHTRPLIRVREITTFAEAHTVHSSPEEAAEQVETGIEIYKELFDEMGIAYLISKRPVWDKFPGAEYTMAFDTIMPDGKTLQIGTVHNLGQTFAKTFEITFENKEGNHEYAYQTCYGISDRVIAAAIAAHGDEKGLILPPRIAPKQITIIPIIFKDGGEEVMAKCLEIKKSLESKGIRVQMDTRDIRPGKKFFDWELKGTPLRFELGPRDLKNNVAILGRRDTGEKIEISLEDDLPSKVEDLLMEIEENLKAKSWKAQEDKLITLESLDNVGEIVDEEKVVKFYWCGEEECGKEIEEETEVDILGINEENIKTDKICPHCGKPAKHVALMAKTY

SEQ ID NO: 5388 - protein, 347 aa, Methanobrevibacter ruminantium
MDSKKIQMPREVHIGPNVLDEVGEICKDLRLFDEALVVSGFHTFDVAGQQTVDALESSDFGVDVVKVKDASVESVEKVREKIANASVVLGVGGGKIIDVAKLASTYEHSYFISVPTTASHDGIASPMASIKNDKGSISKNANSPMAVVADTGIINTSPFRLIASGCADIVSNYTAIKDWRLAYRLRNEKFSESAAALSEMTAKLIINSSDSIKEGLEESARIVVKSLFSSGMAISIAGSSRPASGSEHLFSHALDRIAKKPALHGEQCGVGTIMMMHLHGGDWRAIQSILKTIGAPTNASELGLDDDEIIDALTIAHTLRPERYTILGDNGLTRDAAIKLARKTEVI

SEQ ID NO: 5389 - protein, 146 aa, Methanobrevibacter ruminantium
MITLIGKKLAKEGESFIFYEPAEECSTCRFKASCIDSLEEGHKYTITEVRDVEQKCPIHEDEKVQVVVVEKGETTILTDSKGVFEGSSFEFNRQGCSNKDCDFRDMCFPEEIGKGEKCVYIKDLGKFNDCPRGNSLIKCVVKIYDK

SEQ ID NO: 5390 - protein, 222 aa, Methanobrevibacter ruminantium
MSQMKKDCGYAAAELVKDGQVLGLGTGSTTLYFIEKVGMRVRDEGIEVMGIPTSFQSSLLARKWNIPITSLDEHEIDLAVDGADEIDPDFNLIKGGGAAHTIEKIVDYSAKELVIIADDSKLVNVLGAFPLPIEIIPVSLNPVTKALEDMGGEVNIRMGQAKDGPVITDNGNFILDVSFGEIDNPISMEKELNTLPGVVENGLFTEMVDKVIIGSKDGVKYL

SEQ ID NO: 5391 - protein, 444 aa, Methanobrevibacter ruminantium
MKVVIVGGGAGGISTASNLRKLDEEVEIVVLTRDNQVSYSPCAIPYVLSDRIHSFDDIVMRTVDDYKAKNIDVMLETEVTGVDSAKKQITYSKNGVVQTMNYDKLVLATGGSPFVPPMKGVDLDGVFKIRTLDDGKQVKEWAENCKSALVTGAGLIGIEIAYAFKKMGLKVTLCEMLPQIVPRSLDPDMAKILTDYLIEEGIDVVLGQPITELKGEDGKVKKAVFEDGTEADADMVILATGVRAELNLAKMAGCDCGRWAILVNDRMATTVPDVYAVGDCVESYSAILRSNTVSQLGTTAVRQAKTLAQTLAGKRSRFNPVLNSMVSKVGKLEFGAVGLTRSFAQQNSIKAVVGKVEALTRARYYPNAKPMNVKVICDADGTIIGCQIIAEERVAERIDTMTLAITQELTCFELSNMEFAYAPPVSMVTDPLVIAVEEVSKKFN

SEQ ID NO: 5392 - protein, 691 aa, Methanobrevibacter ruminantium
MTKIFISCALPYANGPCHLGHLRSTYIPADIYARYNRMAGNDVLMVCATDEHGTPIAVKADAEGKKPIEVAKRYHDMIARDIESCDISLDNFARTSDELHYKISQDFFLYLYEKGLIYEEAIQQLYCENCEKFLPDRYVEGICPVCGAEARGDHCESCGRALEPTELLEPHCLTCGNTPVIRDSTQYFFKLSHFQNQLEEYITTNEYLPPNVRNYAQNWLKEGLEDWIMTRDMKWGIPVPLEGAKGKVIYVWGEAFIGYISSAAAWSRRTGIPWEDYWDGHVVHFIGKDIIYHHSLFWPAMLMGHDCKLPDDIFAGEFLSLEGRKMSTSKNWVVWVSDFVKDFESDLLRFYLTISAPLNKDTDFSWDDFGRRVNDELADIIGNFLHRTFTFTHKFFDGKVPEYANPSEEDLEFEAEIKELPAKVGELISSMKFREGLVEILKTAKSANKYFNDQEPWKAVKENPQKASNCLYLSNQFCKSLAILLKPYIPNKADAICDIINISKENVWDDASIFLENGHEINKAKPLFKKIEDKVIEAQKEKLYANLEDSEETKDDKDNKKDKKDKSNKNKSNKDKKDKSKSNDGEKMDLISIDEFAKVEIRIGKIVEIEKIEKSNKLLKTQIDIGDKTIQVIAGLGKRYAPEDLLGKKVPVVTNLKPAKLMGELSEGMIMATESAAILTPDDCEIGELLM

SEQ ID NO: 5393 - protein, 525 aa, Methanobrevibacter ruminantium
MDESLMITESEKFLNQIEREKLDLTNLKSDFSDLESYLEVYELLKSNFDKLQDMKESMDERGYTAPFRSLNRYGSRVSEDVDYEELGELNRHNTIFRNNASAKKNSFDRVKYAIAAHRIALGNLEEYAKIRCKDCQKSYKVSTFLENSKTCKCGSTDFELKVNHSGIHRLEIIPYLPLSGNYMVLLSSLSGWGRDSFRRILNILQQKRKGVVKTVTPIIRIKENGRTITKRVNLDSEFADCYEEELRRIYGKGVRIERLEFHSTKPTIVNDKYTRTNLALAYVKHAEDIVSRHEEEIFEENIKDLNNLKTYDELIYSVNLEKPEYMDEDDLDSWREQKIQDNLLELGLMDKYGHLDKQLKKDLKERERIKSKIFADIAPTLILWDISKYYLCTSYDRRKRYGSPFPFIRNDLDRQQRKVFANPHANVVGLLREKEKKHMIAIDEMDLLLYKKFKLEKRIKNTNFKLNYAALGPAIVFANSDYNIKEVSRAYKVGEKSVKREIMNIKSFRKPNSKKSREFLGKIKG

SEQ ID NO: 5394 - protein, 235 aa, Methanobrevibacter ruminantium
MSYDFDDFDEDFDDDEFDESEDYDDFDEDFEDDFEDDFEDDFDDFDFDDDFDNLDSKSKEDIDIFDEKPLETDSGYERTAVEVHVSSPLSSRKLVELMDTYPSLKRITCPKSIYDRMSSKYIKILKEDLNITVEIKYNWGKKKYTKKEVDSVIELFNEGKRSGEIASQLDMPISNVNYIKSKYSDRINVKHYKKKYDDECRLRIKSMKEDGLKPKEISQNLGIPVRSVYYILNKK

SEQ ID NO: 5395 - protein, 4929 aa, Methanobrevibacter ruminantium
MNNKTLFIIGLFICLLFTIPMVSAADADSNLIDNSVIGTNINSQAITTSDASIDHSSNANAINTNINSDDIVSNNNNNNSIIDINDSDIESQKDGSSKNIIKSTNKNTNDSNNETEDNILVTDINLGKNNKNSNDKNILSANALTADGTGTTFGDLQYIIDQDTTGTITLDKNYKFESGTDDAYLDGITINKAITINGGNHTIDGDHLARIFNINTGSASDIVVLNSIHFINGMADGSGDNANGGAIYIGSPTTLNYITAINCTATGNGGAIYAHADGTNIAANYLYLYNNTAVNGGALYVYGNDYTVTVVDARYNSASGNGGAMYAYGNSFHLNKVNFINNTAYGEDSEGGAIFFAHNSDDSIVNNSYFANNSANRDGGAIVWDQGAHFGELYNSKFYNNTANHSSGAVRWSGENGTIDNCSFIDNKAYGTNLEPGDFDQGGDQILGGNGGAITWLGSVGIIRNSNFTDNYAEANGGGMFLIAFDINDPNSICNDTHIINCNFISNDAGLNGGALDWDGKAYNGSVSGSKFYNNTAARSGGAIFWKGNGGIITQSDFKYNSANGTHLVQPEGFLTPGGNGGAVIITGSDVNITYSNFTNNSARARGGAVYLQLNNNTMVLNSSFENNSAGTNGGALDFYTGAENGKVINSTFLNNTANRSGGGIYWNGEKGVINGSIFYDNKALNQGTYVNGSQITDGGDGGAIIWTGSHGTLENSTFKNNNATNRGGAIFLEKHNLEDPNDYCKNITVLNCTFEKNSAGTNGGAIDWFEGAENGRIINSTFTENYARRSGGAVFWNGVNGTISNSTFTLNEVGLEGADTGTGETIPTGDDDGGAIKWTGANGLIENSIFRENKALEGRGGAIYLENNENGTVNNCTFELNSAFTNGGAIDWHEGAKNGQLINSTLTNNTAGRSGGAVYWNGHNGTINGTNFTDNKALGTHHTEGQTEGGDGGAIIWTGSYGTIELSNFHNNSARWRGGAIFLQKNVHEGEEHCYNTTVKNSYFEENFAGSNGGAIDWSAGAMYGKLINSTFINNTAERSAGAVYWNGLYGEILNSTFENNTAIGNFTHDVRPEVDETYTVIGGNGGAVVITGSHAKIDGSNFTFNTATRLGGAIFFHDNTNGTINNSIFTNNTAGLNGGALDFYEGARDGQVLNSTFINNTAKDGKGGAINWIGTNGTVDGCDFINNTANGSDDESGAGGAINVDGINTYIANSTFTNNSCWDDGGAICWNGDLGKIYNITCFNNSAIGKDHKSSGGTISIYGSNLTMDKVNITLGTVSSVNDDKVSKGGGIFVTGNYVNITNAEFTNCSALAPIDDSSAGALYIIGNNTNVVNATFKNNTAYEDGGAVYILGENCTLNNTLFLNNVAHNDGGAIQWDGNNGRIYNLTADGNYADSASGSSKGGTLTIEGNNTVIQKINISNSYVDSDHDLGAGKSTQGGAIFLTGNDCNITDAVFDNCSVKYVADESSGGAMYIIGNNTNVVNANFTNNSAVEDGGAIYIDGDYCTLNNTVFINNTAHNDGGAVDWEGNYGHVYNLTAIDNHADSAHGSSKGGTILLEGGHCTFDQLNISNSYVSGETYTGTKPVQGGGIAISGNDCNISNSVFDNCSVRYEGTNSSGGALYIWGNDTHIANCNFTNNSVPSDGGAIYVGGSDVTVVDSNFIDNNASQSGGAIFLTDNKNSQINGSTFKNNSAKVNGGAIDFYAGAEDGLVSACEFVNNTAGASGGSIYWEGTRGVIEYSSFDGSRALGNQTSDANNGRGGSIIWLGDHGTIRGCDFNDSQSAKEGATLYVVGDLIKVQQSNFTNSQTNTSGGIYIQGSEGTISNCHMENTTAKESGGALYVKGNYIYLLDSDINNATSVNNGSAIYITGNTTHIENSNVTNCSSSSGNGTIMIAGYKTVMDGVNVDNNKAVSAGAVLISGSQTKISNSNFTHNNASKDAGGIMINGTDNTITTSNISDNYAKENGGGIYYTGDRNTVSYSNIDHNSANNGANVYMAIKAKDCKLIGSNITNAKARNFGGGVEWCENSENGLIQDCYFYNCTSTAHGGAIHWYPGKYGVIDNCTFVECHVAGTKNGGAIYAGANTNVKPVGTVLSNSTFINCTTGTRGAVNWNSQGGLIYNNTFINCGVANTSVTTSWGGAQALQIEKGNNTQIIACEFYNCSGIGGGGALRVQGDGHSGYNITIANCTFDNCNNTGLAGGVYLSDMARNITFENNTFTNNSAPNVGAFFMDPKTVIVSFVNNTFINNSATGSSGYAGAAQLTGNLEVINSTFIENSAVSKAGAINAVEDYDGNNNLAIIGSTFQYNKAKEGSAINAINLDMTDTVLLENQAAFDKWTNQRNSRANGHVSINGTFVGKDNYLNGIKANGATFDNVTYCGVNGGGLYEDTVTNTDDVTSAKSTNEVHQLIVLEIYDYNNNLVDTKTTFTDENGKFNFEFDMENPQDYSYKVIHPEDNYYTGAEYSIGKAISNITIKSQNITHPEDENITFKVTGGSGTPTGNITVFINDTEGNVIFNDTIILNSTGEAKLFFPRLNASEYYIEAKYNGDNNYLPDNDTSIFHVNMAESFIKIGIENYTYNETRNITITVPYIESGRISVIVTNENFTQLYTVYVNEGTEEVQIQLPILDAGVYDIEAIFHGNNNYYPSQNTTNFTVFKAASIINITADNVSGGVRETVDIHIDPEVATQNINLTVYDAQGNIVDQYYDLGLHDSRITQILTLLPKGKYNVTVTYPGDKNHNASSNSTIFYVTNDLFPIEINATNMTYGDDQIINITVPANADPDKLYININCSDWPGNKTVTELGLTIDENGLIQIDTTNTNLFANKIDAGNYTINVYYPGDDDFLSNSSSVDFEVAKAIPEMNVTPTNITYGNLEDILVEIAQNGNVTLYVTSENDPTLNITKIEVEIIEGKVYWNVNDTYLPAGEYMVEAIFNGNRNYESVNKTEKFNVTKAIPNIVIDVDDIHVGDSEYINVTVEGVEHGTTPQGNIKIIVRTIDQIVELNATGQYNLTLDDEVQGNGISVTVIYYGDDNYNYTEKSVYYDVTKKETSINVTGATPISYGTIENLLAEVNETGVTGTITIYVNSTVDGFINQTHVATITVDDAGKATWDIDQIILPVGSYDVTAVYSGDDKFEGSVSTVKVIVVEKATDYDISVEANNTVYGTDQVIIVTVPDNANGTVTITIEGTEISLTSQVENGKAVFTIPNDLVDFLEVHDNYNVTATYNGDDKYAAGVKASDLFNVTKAESHIKVVAEDIDYTQIENITVILPDFNATGKIVITIVNKSDTTQIVRTLEVDPFTNTTGVIYPFEGLLVGNYTVKVEYSGDHNYNNSENTTDFEVRKVDPTLTENSPDIIYGADENITVTITGATGGVDPTGTIQVIVDGVTIDTITIGDKDLEFIVTKPGVDPQHNITVIYSGDSNYNPVTITGEFAVTQNNTIEMEEVSPNIVYGNNEIITITLPNDATGTVYLVVNGTYYTPIGIDENHQAVFTIVAPIVGEYNFTAYYSGDENYTANNISGAFNVTKADVSLSESHTATITYGANDTITVTITGVEGPEGVLAPTGTIKVLVDGEEIGNVTIGDDLVFNSIRPFVDPQHNITIIYSGDNNYNSKVIDNTVLDTLVFEVIKNNTLEISEDSPDIFYTENETITVTIAGDATGTITVTVGGEQVGEVVTITEITEDDKVFTFNITKPEGGVYDDLTVVYSGDSNYDSATINGEFTVSPIDPNITEDSPDIVYTNNEVITITVPEGATGNLTVTVKNSKGDTVETKKLVIGTDDLVVTIEKPAVDNYTFTVDYTGCTNYTEKTITGEFKVTKASNEITVVSTNITYGQTETITVTVPEGATGNVTITVGTYTDMLEIPEGSTEVVFTIPKTAADELLSVSDNYIVFANYSGDSNYESVVANAPFHVDPANTTLTIEVADITYGEDEIINVTVNGVTGGDIPTGFVTIKLNGTDIELTKPVDSEGKVQFNVSGLVVGEYTVNATFVSSSINYNDSNNTAKFNVTKADVKEANMNITAINITYGDDETITVILNETNITGNVTITINGTEIETKELVDGKVVFTVPDLEVNGYNVVANYSGDHNYNAIPIGANFNTDFKVDKANVTVVVTPVDIIYKETEEINVTVTGVFINDNVNDNLTGKVTIYIDGVENQTKDISAVDEYGILHFSVEGLAVGTHNVTAVYHDDRNYNDNNATEDFEVINALPEDMKVIPQNITYHIQTETITVDLGEVLNGTVQLYINDTLVATFEVIDQRTVSYTNNSLAVGNYTAKAVFTANGDFVNASANFTVSKAPVTVDVVAEDSVYGETQTITVNVDNTVPDKYNLTGNVSITINGVDYGNKTVDANGQAVFEITGLEANDNYQVIATYYNDPNYLDNTGQDTFKVSKADVKDVNKNITAINITYGEDETITVTLNEDNITGKITITINGTEIETKELEDGKVVFTVKDLEVNGYNVVANYSGDTNYNAFTIADNLNTDFTVGKANSTVEVEAIPSIVYGNNETITVSVPIRNHTGTITLTINGSDYVFVKHLTAEDGDTIVLTNVSGLAVGNYNVTVKYSDDRNYNDSEASALFEVTKATPSQITVEAQNITYTEDEIILVTVADENATGSVTITIDLGDSTYTNTTNLDENGQAKFNVTGLVVNHYTVVANYSGDANYTGQTASAPFRVDKAASNVTIDVANITYGEIEYANITIPNYNASGRVIIKVDDKAYDILPINNNTPVKLELDGLAVGTHTIDVEYFDDDNYNKSVAHVEFNVTKAIIPVDPANASSLIVLPTNITYLNNETIVVSVGANNATGKVTITIKDKDGNPVDIDPSVVTSKNITEEGSQSVTFTVPGLAVGNYTVEVDYTDDANYENAQTSAKFIVDPANSTVTVEAVNITYLDNETITVTVPITNASGTVVIKINGTQKDERTVS

SEQ ID NO: 5396 - protein, 2719 aa, Methanobrevibacter ruminantium
MEGLAVGEYNVTVEYSNDPNYNNSNASTLFHVDKANIPDVPNTEGLVVIPTNITYLEDESITVTLDVPNATGKVTININGTDIETKEIGGGTVTFTVSGLAVGEYNVTAKYTDDPNYNDVNASALFNVSPAASNVTVVPTNITYLENETITISVNVTNATGTLVVKINGTEVNTTTFTGEDKPTIVVTVPDLAVGEYNVTVEYIDDPNYNNSDASALFHVDKANIPDVNPDTGIVVVPTNITYNDDETITVTVNVSNATGKVTIKINDTDIVLSKNITEDGSQTVTFNVPGLVVGDYNVTAEYTDDANYNDVNASALFKVEPAASNVTVVPVNITYGENETITVSVDINNATGNVTIKINGTAVELTKNITEEGSQTVTFNVPGLAVGEYNVTAVYHDDVNYNESNASALFNVKKSAPVNLTVTATNVTYGENVTVTVTVPDDATGNVTITIGDYTDKKEITPGSNTVEFTVPNLEVNNYVVYANYSGDSNYESGIVNAPFHVDKANSTVIVEATNITYGEDETITVTVPNNNATGWVTVSVNGSEIGSKKIGTDGKATFTVKDLEAGEYEVTVTYDGDRNYNGNNNLTRFTVDKANITEDNITVVPTNITYLDNETIAVTIGVNNATGIVTIKINGTNIELSKNITEDGSQTVTFNVPGLVVGDYNVTAEYTADHNYNDVNASALFKVEPASSNVTVEAVNITYLDNETITVTVPITNASGTVVIKINGTQKDERTVSGDNPTYNITVGGLAVGEYNVTVEYSNDPNYNSSNASTLFHVDKANIPDVNPDTGIVVVPTNITYNDDETITVTVDVPNATGNVTIRINGTDVELTKNITEDGSQSVTFNVPGLVVGDYNVTVEYTDDANYNDVNASALFKVEPAASNVTVVPTNITYLDNETITISVNVTNATGTVVVKINGTEVNTTTFTGEDKPTIVVTVPDLAVGEYNVTVEYTDDPNYNNSDASALFHVDKANIPDVNPDTGIVVVPTNITYNEDETITVTVDVPNATGNVTIKINGTDVELTKNITEDGSQSVTFNVPGLVVGDYNVTVEYTDDANYNDVNASALFKVEPAASNVAVVPTNITYLDNETITVTVDVPNATGMVTIKINGTGVELTKNITEDGSQTVTFNVPGLTAGEYNVTAVYHDDVNYNESNASALFNVKKSAPVNLTVTATNVTYGDNVTVTATVPNDATGNVTITIGDYTEKKEITPGSNTVEFTVPDLEVNNYVVYANYSSDSNYESGIVNAPFHVDKAPSHVEVDGIDINYTDLETITVTVSDNNATGFVTITINGTDIELTKEVSAGQAVFDVKDLVVGEYNVTAVYHSDRNYLNSTASDTFKVDKSDVKNMTISPVNITYGENETITVRITDNNITGNITISVNGTEYGPVELDNGVAVFNVPGLIVGDYEVTASYSGDSNYNPASSTETFTVDKEKPNVHVVSENIDYGKNETITVIVDGFNVTGNVTIKINGTEIATKEINDKGRAVFVVPGLQAGEYEVVAIYNGDDNHESSEGSDTFTVATVTPNMDVETEDIDYGDNETITVTLPKDAKGSVNITITDENGTVVYEGEAQLEDGKATVDVPGITPGPYNVTVKYPGDRNYNPTNKTVRFNVDKVVPDVDVDTVNIDYGDNETVTVTVNPVDGGVTPTGSVNVTVRDSDGKVVYEGNVDLVAGKATLDVPDLGAGDYTVDVRYGGDSNYDDSTGGSSFNVAKVSPDMDVQTEDIDYGDNETVTVTLPKDATGTVNVTIKDNDGNVFYEGEAELKEGKVTVDVPGLPAGDYTVDVAYGGDDNYNPVNSSDSFSIDKVSPEVDVGTENIDYGDNETVTVTVNPVEGGSAPTGTVNLTVKDSDGKVVYECQADLVEGKATVDVPGLPAGDYTVEVAYGGDENYTATNSNGNFAVGKVNPDMEVDGEDIDYGDNETVTVTLPKDATGTVNVTVKDSDGNVVYEGEAKLDDGKATVDVPGLPAGDYTVEVAYGGDDNYNPVNSSDSFSIDKVAPEVDADTEDIDYGEDEPITVTIDPVEGGSTPTGTVNVTVKDKDGNVVYEDQVDLVDGKVTLDIPDLDAGDYTVDVAYSGDENYTARNSSGSFTVNKAKPELNVDSEDIDYGDDETITVSLPEDATGTVNITITDKDGKTKVFNDVPIENGKATISVPDLDAGDYNVTVDYPGDDNYLGSKATSSFKVVRSNSNITLETENITYGDEEPITVDVNPVEGGVTPTGTVNITITDKDGNTKVFNDVPLENGKATVDVPDLAAGNYIVDVKYSGDGNYDPDSTEGAFEVAKAVPHIEIHVYDIYYGDVEVLTVTCDAPGTVDITVNGVTVTVPLDDGYDKRVFSSIVRAYSGKATLDLVNLAVGTYPAKAVYNGNENYTSVSDNDTFHVYKENTTTKISVDDIKLGEDAVIDIEVTHEDGSEKINTNITVTVDGKDYTVELIDGKGTLTIPDLDLGKHTVKAVYPGSHNYTNSSNATSFKVTKVTPSFDISTENIQVGDDETVTVTLPDDATGTVTLTIDGKEYTATVENGKATFVIPGIKAGEHKVNVAYSGDDKYAPAKRSDSFTVSKVKPDMGMDAPEIKVGQDGVITVTVPEDATGTISITVDGKTYTASIKDGKAVFHISGLGPGTHIVKAYYSGDGKYLAGSVDGTIVVEPKNGTSPQDKGKAHGGIDLESKKTGNPILVLFMVLFSLILIPIKRRRDDDEEEENEDQINRID

SEQ ID NO: 5397 - protein, 341 aa, Methanobrevibacter ruminantium
MSSLISIPTLPLIVIALICGILSFISTRLVMPWLIGKLEQAEIIGKDIHKSSRPIVAEMGGIGIIFGFIIGIFAGIILFPVLTFQLVVVLLVVLLVGIIGMVDDLIVLSSKEKLFLLFLAGIPLWWVAPPNVGLLYMIMIPIAVSITSNLTNMLAGLNGIESGLGVISMTSLTISCIILGKYDVAIISMTMLGTLLAFLYYNKYPAKVFPGDTGTLIIGATIAAIAFIGRVKLIAFIVLLPNIIDAALKFYSAGVMERQQHNPTQLNEDGKLVRPEQGFKSLIRLVLRKPVDEKTAVMMIWGIGIIFGILGIIVALLMPGVTHDQTFAQFIHLKDYFYYLG

SEQ ID NO: 5398 - protein, 46 aa, Methanobrevibacter ruminantium
MARPISPTPTLYGEDARRFLKKMNEPPTEKEKKFWKEVESQRFVPF

SEQ ID NO: 5399 - protein, 74 aa, Methanobrevibacter ruminantium
MDSQYIKDNYYFETLNESHNLNNFYCEDEELNEFLKEDALKQQKQKLNLTKLIICDDEIIGFVSLLRWNKNKRY

SEQ ID NO: 5400 - protein, 168 aa, Methanobrevibacter ruminantium
MIKTDNKGQITVELLLLLSFTFISIIALTNIISDANEVNIAMAAARNGAFEGASSNGLAIYPKDTFDNYSKDKRKEGLFNMKNIKIIKIAQTFKGKDNFNKTRIQLKVYASSKIIKTKEEKESAGDRINYNMRRAITNSFKTENISNRLFNPAFSDSYSFTTANVEWV

SEQ ID NO: 5401 - protein, 154 aa, Methanobrevibacter ruminantium
MDSKGLINIELLFCTIIIVMILIVNFPILEHSIDSANDMDENSQGRFLLNSISTSIDQVNSNNEGFSKKIKLPQSVDGNYYTILVSSNEIILEFNNKKGKAKIQPINLVDSKNRTLSKAQLYNGGSYIIKKTLTNNNESHIYNQSSIIIMQVEG

SEQ ID NO: 5402 - protein, 447 aa, Methanobrevibacter ruminantium
MVIVSYLNPLSSEGQNIVRGLSSLDDIFAPNDDLIDIVIHSPRQTISNQEYVPETLADLAINRIKWYIDKKNNKDFNPSNYAYFFNEEIAEYDTIAFHILAQAVASQFRAGSREIKLFVESYGLLVEDRLIRLLETEKRELVEEILGDFLVQDGIEWAFLKDLVASKRISLTDLVLDNGKIVLDREEFVYTFGDEFTDRSPERIYDILIGDGLKEMIVSKLLIQKSEEYVAHIQDMLRTIEPHPAIVRLGEMLGETITELMTKYSSFYAAGGAYGNMEIGKLVREAFPPCIANTVEGVSSGGRNDAIVLLLTSFVSYARLYPGIFGADASVKVSDIDSNLNITMNEILPLIYEAADNCTPPLFEDQPQEKINITSKLGFGMHETPELEHEGETKWYTPMSCEKIKMHLPQLCKENKDCAKINNPLSYYSRMRWILSKKGGESKSEEE

SEQ ID NO: 5403 - protein, 827 aa, Methanobrevibacter ruminantium
MLNRKALIFSLIVLFMLSISAVSASDNTFNEGTGLNEDIADLNDFSDLNSNFNNGLSSNAVHGLDDDSNNNLSSENMISSSDDEKQDDLEGSDSDSIKDNLNSNSIKDQNNSNSSTADKSNTKIQTKISAKDINTYYKEKSSLVLYLKDNKNQALSNKTIKLSLNGKTYAQLTDKLGKASFSLYGLKPNSYDAKIEFYGDDDYKKSVRTVKVNVKKVDISINTKDFSTYLNSNIFFSVKVLNKLTKSPVEGIRIQFNVYSSQKNYKNYYALSDKDGIATLKKNLKLGSYDVYTYVKDDGQKDYINYRNTKNKVSIKISAPGEMGCSSIYIHVNENESAVAFRRDSTYAADLYIVAQKWHGRNAVKQYKLTGTYFFHAIVTSDGWLVGTGGADNPTINKKIESLAGQMVSSNNIQNSKLNTIRKYERSLGIGHFAIVDPKGNYAIVWKSGYVKGKLKNGQYIDVPNSRGMFRKGSYKSFSKDTATAALRIAATDRFGVNRRDITVFHYKRSTKNYQTSAQVKAYAANDKGNLAGRRTGGKSDNIHYKKTYISRSKLPGTPNKKLLGTHSFGKIDTLIKTQTKVSAPALTANQNQTKYFKVTVRNKKTNKTLRGVKISLKVYTGSKFKSYAVTTNKSGVANFNTKALSAGTHNVTISQANHKYIVSGSSKIVIKTVKKNNTVNSTNSSVVNGSGVNGSSSSNASVNNASEPINNSTTDNSSENNGSAGNSSSSDSSVGNGTASDGYVGNGSSSDSSVGNGTASDGSMGNSSTSDGSAGNGSNFASVLDVSAAINSDSNVGNDSQSNSKTETKLSSMKTDILTSFIKLIN

SEQ ID NO: 5404 - protein, 97 aa, Methanobrevibacter ruminantium
MNMSFEEYAVMAINHHIEERNKYLKKEIKAKEEEIQAIDEKIQAKEEEIQAIDEKIQTKEEEIQAKEEKINKIRKLFKDFCENEDEEAMNTIKSILL

SEQ ID NO: 5405 - protein, 368 aa, Methanobrevibacter ruminantium
MVNLKKLNQISTENNNTVSYYETEEGKVYKVLVDENGELKKIACEEFPFEPAKQFKKEKINKVHDRIFKFIAENNIQAFLNVFGLKHIIFKQFLNVEILDQTLNQSYCDLVIEAEDGKIYIIEFQSSGPAKKDKIRFGDYQTTLHRKKKGQKVIVIMITINDDPDNDEPYGYDKEYRYRINKRSTTCFNTEKVIKELEFKAENDCFDDEAYVKLQLLYYMESNGDERKKLLKKGVEIKNKIKNLSTDRKVGLTLIYMALAVHNFEEEELERFKEELKMNMSIEEYAVMGINHHIEERNKHLKKELEEKDKEHKKELEEKDEEIQAKDKEHKKEIQAKDEEINKIRKLFKDFSESGDKKAMNTLKTILL

SEQ ID NO: 5406 - protein, 163 aa, Methanobrevibacter ruminantium
MLSEEELRRLIESLTIREIIEPALDNWTRYESTGKTVIDLKSGRVYGISLKSNELLELDHDNNHIELYKIESHEDLFDEEDLLSEDEYNRFQEFKDRKELEDEDFDDYDPELLSEFCMMESIDEKERIISILIEDYQEYHFNNYQDFEHSIILNYYDEDDYTY

SEQ ID NO: 5407 - protein, 330 aa, Methanobrevibacter ruminantium
MYGPSSLAERRIYYREEWSDKDLPDFIAQGITKREFGFDHLGNGPNDRYKVFKGTDTLRRFLRYKTPFAAYISVAFYQNPRKRGGWEKAEYIFDIDAKDLPIRSCNCDGVCEICLGEALERVNIMLDTLKGDLGLKNIHLIYSGRGFHIRILDPDMMEADSDLRAEVLKYVAGAEVPRAQYPNIVPGAKPLNFEHFSIPIAYPAVFTNKVKYNIFHLRGDETIDGINNRLLKDIIKNREFLIDDKWGLFKERIGPRRYKDMVNAMARVNLATIDAKVTIDLKRILRLPSSLHSKVSMKCVEVKNPETFDPFKHAVPKFVYERKDEEIAQN

SEQ ID NO: 5408 - protein, 132 aa, Methanobrevibacter ruminantium
MDNKAIIGIVIALIVIVLACFAYVTFNGNAPISLNVTENITNNTDTSVDTTDNATLVSQDPNNDSEVKDIAKNVSESISEQNKAVADSGDTLHKQTFTVSENETGQNEGMEPGTYVMYYTENDGPIKVQKID

SEQ ID NO: 5409 - protein, 100 aa, Methanobrevibacter ruminantium
MSKRVLVSFALIFICLFSISAAWALDMDSSDLNKNIGTNLENNFNTDSNNNLDSNLNSNFNSNLNSNIDNSTQELDLSTKNFKALSSNSSIGGGQIALLI

SEQ ID NO: 5410 - protein, 1490 aa, Methanobrevibacter ruminantium
MDGSYSNLTNLNFYTNATSENSNYLTPIYINEASDLVIENNPIYIDYSDGCNYNLAGIYAFGASNNNIIGNNRISIYSRSLSNTSKHYIYGIDFSSYSSNAYSKDNAKGNDISSNTIDIISDYYANAITLSCAVDTTLESNSLHLKSDSFVYGMVAEYFDFGNGLNPSNNFNFTKNTIEASSNMVYAIQFFNVFDVNIKENTIKTNSNGSYGISAYESYNHDIGYNNLFVNGNDVSMIGTNFDAIGTGHSGIYYMRDSHDLSIHDNNVLSNYSLGGDYAIRFDASSSENINVFKNNLSSNNGKYLGNDAVNGNVTVSENNHYYGDNDLGTNDLRIFDIYVDLNGNDNKGDGSIGKPFKSISKALSYLKNLTNIYGSSASSSSTTKVKGIIHLGEGKYNGYGTNLRIYITGLDVEIFGSGYNKTIIDGVSSHWFFDISEDSSVSIKNLSLANGVYRYNDGGLIHNKGNLYLENCIFDNAKMSPSSAIIYNDGILNLKNNLMNMTANGYHIYNNGFIDGLYLNFIGDSLSEDERLLNTDSLSFILTAYVHDDNGNPITGGYIRFFIEGKEILVNSSLIEGLAKLYTFSSLNGIIKISGYYSNAYTNLFVNIGKVNSSIISDTIKVYVNYSANESKSDGSFEKPFKSINDALDALNTCIEPVTITVLDDETTEQIDDSRLNRNNVITIESINKTNISTNWTFKSDANIRLKGLIFDGYGLVKDNTYLTIDNCLFNNTPASAIVSTNGSLTLLNSNFTNNNVKDNHTFYTGFSTPVITTSLWDIQYDYDKGGAVDNSFSNLTILNCNFAFNEAYNGGAIFNNQSDLHISNSSFTSNLAFSGFYENPRAIDFSNAMDKDQDRNVASKGGAIFQYLGEEVVVTDTGFLNNTAGGYGGAFYSSGIYPYRNDSSSIIEGIPFIVYETEDGLMDNFGNYADNLLSPQDIYFINCNFDSNVAPIRGGAVYCINNSQTQYISCNFGNNLVYTYNMSQLFGGLNKNSHRKWIFEDELDQVYSIFFTAVNNGGAIHDENLKIIDSTFTANTLQSGGSILLPSVIRYSADVYTLPKNTAGAIITNSGKGGESVYVADSSLLTSEDSKYIGINGWTGTSTGGSIRRIIHENGQETGTGGNGSGTGGSGNGSGTGKGAYGNSLSWSDILSALGGDARGIAINGEGSSFSDFISGLINGKSSSNSSSDSQDNGSGSSNSSSQNPVNGTIPSNSSSDSQDNGSGSSNSSSQNPVNGTIPSNSSSDSQDNVSSSSNSSSTKPMDDSNKTNSTSDVPANDTVNATDGSSDSSISENPVNGTASNDNNSSDVNGGASDMDDDNISNLTNSSSEIPVDTNINDTNNSSSENSNSTTDLDDSEDKSDVDKDDKSESDDVGLSDNPLNGDVSESSDSPDSPDSPDSSESSDSPSSPDSSSSDYQSSSSAASPGDSSNSPSSSSSSSAYKIYEEEIDDNILEKNVDLENLLIIIVLFLGLIILGYYKKSKEDEDN

SEQ ID NO: 5411 - protein, 2201 aa, Methanobrevibacter ruminantium
MSYFNKGHIWNILLICLLIGTLAMMGSASASSANLDDFSNLACDSNSYNDLSVGFESDANSYNDLSVGFESDANSYNDLSVGFESDANSYNDFSTYFESDSNSYDISDSLVNSNSDRLVNSNGLIEFNISAPNDIQLNDKAPIKNSLKEYDERVFYVSLDGNDFNNGLSQENSFKSLNKALENLHDANKTTIYVFEGTFLSENSYDLFFEGVGNSQMISIIGSGVNKTILDGEGLHRLFNVDNSINLTLRDLTFVNGFDFSSGGAIYNKGNLTLVNTCFYNNNVYSEDAYQHVSLLSGGAIENEGFLTIENSSFIKNSVGSVFNQYAYGGAICNHGNLTINNSIFNNNSLETYIDLNENSYFRKWNALQTGGAIASFSDGALISNTEFSNHSISILNKYPFVQKTFMTFSAGGAVYIEGNNHNFINCSFLSNDADNGGAVYFKGNNTCFDYCDFDNNSAFMGGAIMTIDYNLNEAWMPTLKNLTSNKYSNLNISNSNFSNNHFICTDFGIGYRISPGGAAGYFKIDNITIDNSSFTNNGVLENCTIFVSSRCGGAVFLYGQDSKVNNSSFVHNNVEVGGAIMNYGFDTNVSNSKFINNSACYSDGGAIFHSIGDLLIDNCDFDYNRAVKNGGSIQASYDYTNNYLFEQKSLYNNSRFKNSAAEYGGAIFDMGNAVLYNDLEFINNSASYGGAIYNQGFSNTFRNSTFVNNSAFSEDYSNGGAIYNYGSNALYESSIFINNSADMEGGAISNFGESCVVQNNTFNLNKAFKGGSVYLSGQGGRFQDNNVFSSFAIYGGGLYNSNINLICLSNSFNNCSANVSGGAIYNLVSTLELYSNSMNDCKAKLSGLGSGNYVFTCANISYLVISFANNGSFNIVDNKGVLLVANISDNMGNPITGGNFTFILFNQTNQDIDLIGSSGSSSSNSSNPSNLESSIIGVCDVVEGQAFLRYDTYLELGSRYTISGTYSYAAEPVLTQVANLNSVLSTRMYFSSNITDDMVNFGEGFNYEIILLDSNDNYIPNAEILLYVDAVYSKSVFTNEFGYLKGSVNNLTSSGKHFYSFIYSGDIFHNRASYDLNFTVFYNNSYYYDDVSISFRDLIYSFVYTSPNSEIPFEFLISHNDGVPLGNVSTPRYFVAYENGIPLASFSCTDYLGVCKGQEVLYSIIELNGKLAKIFRTSPEGIFQMLIKHSERGLYEYRIAFLGDLVKHYDSSTHNGISNEDTFYNPCNISFLMLVDDEQSTIPTSLNYNGPNKITEVDFAYYNFSLSENSKNPLANKEIRVYDDGNYLGSSYTNSKGFAEFNFPQMLDKGKHIISFVYVADGDYKSAYSIFELNVLENPSKDNVSFFNKSSLNITGANNNFTAQIKDSHNNNLSEMVIRLSILFNGSDNKPYIKNYTAVSDKNGVFSIPLELGAGSYLIKCSFAGNKHYWKSSKTFNLTLNKVPTLLFGQSSVEVLKNDTYLTVILSTNDLKSLSDSKIKYLVFDSNITGLNLSYNDSSELIRDISNYAYTFYAFTNESGISKLKINLPVGSYYLVSLFEGDKWYDESSLITNLTIYGSSSRLIANENVIVKKSGYYTVKLVDGNGNPIQGQTIEITVCNKTYTRFSDSNGEARLAINLNYGNYSIQSKFNGTLNYSSSIVASRLYVVDEDYKYPSILTVNSSDIYRAFGYYDVVLSDVNGNPLPEKSIIVEVNGTGFNIKTDNNGLAHLDYNFTVGRYNIVSHFVGDGDYQYSNVGSILNVVNENAANTLLNSSIYWVLKGKGNNYTVTLTDKIQNPIEGQIIVFSINGREYSRTTDKYGNANLAINLNPGSYDIYAFYRGTDVYYSSETYSKLVVLALENENEGSNSSSAIGSSNSSSNNDSDVDSTNTSNSGNSETNLTNGSSSGDSGIDNINGSSSGDSGIDNINGSNASTNISNSTGAGNDSSSSGLDNINGSSSNISNSTGSDNNSSSSGIGGNLTNATVNDGTSISGNSSVTNGSSNLSNNDTINKSDKPVIIPKRTVTKIICHNMTTTAVSKADGRVGKYFEVSLIDANGKPLANKRILIGFNGRKYNRTTNATGGARLQINLAYEGKYTFAIAFLGDDYYSGSFEVALITVNKHSPKLDASSRAYKYSDKTKSLTAKLLSANGNPISGKNIIFTVNGKNYAAKTDSKGLARVNVSLNKKGTYTVKIKFMGDSSYKSASKKISLRIISPSER

SEQ ID NO: 5412 - protein, 2917 aa, Methanobrevibacter ruminantium
MKNKAMFLISALLIAVILSLSAVSAADDAIAADIDDIDDSIEVSSVDLSADTEDISYTDVSFNTSKDKNTLSSNIVEEGDGSWYVDSKVETTGDGSQSSPYKTIKEAFDASGGNGTIYLASGVYNTTNDRSFSLALDSGNNLSIIGAGSDETLIDLLSLSNNFINVRNGNNFYLSNVKLIRSGTTAISGANITIEDSVFANSYYYGGAPILSLGGGDNTIRNCVFVNNSAGSWYGSGVAILNGNANVLFDNCLFKNNTNTNGGSVFYTTSSNIKLTLNNCNVTECPVAFYASYFGNVVFNNSYFYNNDVTRLNNRYCAVFYSTDPGNLTIDYCKFENNTGVDSASIISAYSSNRPLNLTVTNSEFIDNKMGKNSYGYYTVFNNIYMGSWGGNLYLKNNTGSFGNLSFVSISSANINSEINLIVLDNTTYDINAIEINVIGTLTDDMGNPINMSGFDLYFNDTLVGSQLTFDSGVNNYTFKEALSGSYLVKYVYNSTANFTNFNQKTSVMNISPLENIDVYVATDGSDETGDGTEANPYATVEKALDVASTALNANVYIKAGTYKYYRYRAIDTANGILNIIGYDGDVTIDMNNETAFCNVSNRSNVFISNVDFVNGYSQYLVDNYGIINSFGNLILSECKFSDNNGYYYIISGQSTIDSCTFENNKFQQQNSARILFNPAYVNNVTFYNITAIGFSANSLNQKYDLTIENCKFYDNARILISNGNVTIRSSEFANLSNQRALETQGVVVLSIDDCTFKDSDQSVIYLYDYASTTIANISNSKFINITHENPVYVGNGQEIYLENNEVSDLAAPYVYIRSGYVASPITILVLNNETIEQESYGATLKAKVLDDSENAISLNSFVFDFNDEQINGKLVYDEMVAKSMGIYDGTYLVSASSTNLLNPILKTGVLIITPLMNKELYVSTGGSDETGDGTEVNPYATLKKAMDEAVAFNNTIHVAEGVYAIDTALEIDTNTAIVNIVGSGENTVFDMNNEINFINTISANSIIELKDLTLANAKSPANAKGGFITNLGNLTVNNVNFINSTANNGAAIRSSGNLSVTDSYFENTVASSNGGAIWSNGGNNYVLNSIFNKTSASNYGGALYSRNYLYIKDNTFIDTSASAAKNIYVQSKVEGGVVLTVMDNSTWTISTSSVTFNATLTDENNDPIYASNIPVSFYLDGIKVASSSINGEKVTANANLKMNGEHIASASLGTAEDITVKTATVSFVNDAVAHDVYVSANGDDETGNGTQENPYAHISKALTVVESLNGVIHIMTNLTNVPVNSIDGFYNLTIMGENNEIFIKNSTSGFVMLNSGSLNLLNLRFTEANYPTYFIFTRAGSSLSLENCSYENVYYPKDGYYPVFIDSSSDFLSLKNCKVINNVFNLSDLSSGVIRSKSNTTFEDCVFANNSYTNRNGALGGNFLLFSNNQKVFLKNCIFDNNTARLLNFQSTSVVDNCSFTENNGTLITASYPINITNNNFTSNDLVSSLIGVSGNAEITNNIVKENTASAFVFASGSAIVNIHDNTLNLGDMPYVNLTGNTKITGSTFTLTVNDNDTYEIEGLNLAFNASLVDADGNIIYGPLVYFTLNGSDIISANLVPIAIANTKFGGEGEFIASARTDAMYDSSEWTIKTSVFNIKQIAEKIIYVDILGSDETGDGSEENPYASLERAVQDAGGLNNIIYIQPGEYDNMTLGSQYVLIDDQTLSIIGLSNEVDKVIIKNLDNTFADIAYEYGKYSNDQFTLANIEFVDSSLSTDLIRTNYVNAVLVENVVFDNITVSNLIRGDSTNLVLINSTINAISSSCVLNTENITVLDSVISNAYGYRIFTIGARHAADLTIYNSALINNSYIGALIYEQWTSTKTLENNWWGYNTTEDDLMAFTNVEITNWIVAEVTPSSDSINIGDNVQFDILLKLNDGSELTDVLPTRIVTAIAENTEFDEDEVEIIDNQATITGTVTGTGDITITIDEQDFVFPVNGYVAYLTVDNLAVNVGDPINVCVLLQDEFGPLAGELVTIWVNEVEYNDTTNDDGMAIFEIDGLEKGNYIVTASFAGDELYDGTSAVGLIMVSDAILSIDIPAVDYGSPITIYATVEDSEGNPLSGLVIATLDGVDCNIYVDAGEGSITIPNELFAGEYLVTAKLLGENNAMDTALLVVNPIEAELIVSIDNITYNNPVEVELSSEYALDGIVILTIDGVDYAIEIEDGEAIALLPILLDSKDYEVTAKFIGENFDVEDATTSFTVEAIETALTLELENSTITYGDFAIVKVSLVDELGNPMDGIVTLTVGDQTGSLAVVNGEGTVSVPYLAAGNYTVTAKFEGSANFIYDEDSASLEVTADDNVQFDMDVIGNSLVISLVDGNDNPMDATVTVTIDGESQDVTVENGIGFVYDLEAGDHTVSLDYDGDADHASASMEDEVTILPDPVVPVSANATIELAVVGDYVEVTLKDLDGNPIAGADLEADLNNFLLSTVTTDDDGKALVDLYGEPNFNFTVTVVYTDDLGSSVSASLNNIYVENETTVIIYENVTVPVTANGSMSVEASEDAITATLTDSDGKPLANATVTAVIDGVETNFTTDESGKLTVPIDENSTVELSYTDDNGASVTYTTKVVTNEVPVPVPVPVPVTVNGTIALATEDGKSIVATLTDSDGKAIADAELTISVNGQESTVKTDANGKATVDVEGNTTVVATYKDANNLTATGYMNLVVIVNETIINETIIVIPNRTETVIDYQNMTTTVVASADGRIGEYFTVVLRDDKGNALADKPIKIGFNGRVYDRVTDENGSAKLQINLGYKGTYTFAIGFLGDDNYTGAFEVAKITVNLQTPKLSTSSKTYKASAKTKALTATLKTVNGNGISNKKISFTVNGKTYSGTTNDKGVATVKVSLSTKGTYSFTAKFAGDDQFAKVTANGKLTIK

SEQ ID NO: 5413 - protein, 280 aa, Methanobrevibacter ruminantium
MSKGYPNFYDRMMKNIASYDLKSFFLFFGLDCIPYFSIANEVVDGGLNLSLLDLPVCTSKGIVNFEFQFDRDEADDRRFIRYGVQLYEKYGFPVMSVVIDFKAQEDEPFPIEISKGCVFTIYVKSLNERNPDIVLNNINDKLAINEKPLGKDLTGLKLLPFLDLDRKIELLDKATEVLFSLDKNLVGLREIKHLMRVIMFYSHQWNYEENLDRLGRWSIMVDDLSQDAVVHFGKVNRKKGREERSYEVARYMIDDGFSAEDVSKYSRLDLSIVNQLMLMK

SEQ ID NO: 5414 - protein, 1124 aa, Methanobrevibacter ruminantium
MSRKSKEKYEWDYSTYSKVDPKVRSYFPFAKARPQQLETISEIHEAIEKGYKYIVLEAGTGTGKSAIAATLAMCYGDAYILTMTKQLQRQYTKDFEDYDFALVKGRSNFDCLKYMEEAIEESCDMGRCVLEGHKCSYKVNQFNLYKKDPGECCPYFHQRAIALNSDIVITNYSYLFAELNFNNDFKAKRLLICDEAHNLESKIMDLISLEFTRRQLKDEVGINLSKETLKDLDEKGYTSWLQFIKRVCERYGDKSKETKKALGKRKSLTLHRRSENLKRRLEDFKRFSNYIAIDPDNWIMDYDPHSQKLSFKPIRIDKYASEVLLKHADVCIFMSGTILNHHQFAKWLGIEEDEIYPIRRKSPFDIRRNPIRTYSGFDMTYRNLGSSAKRSVPVIREILERHNGEKGIIHTVSYQCKEFLKKELNNPRLLDHETKDREKVLEKFKKSDEPLVLISPSMNEGVDLPGDLCRFQIIYKIPYPNISDKQTNIRRKKEKIWYDYQTAINLVQTYGRGMRSEDDYCTTYFIDSRIKSYLKRDSIRNNLIPDFFKEAVDVEAAEIEKNPIRKASDASAIAKYEGSEFSDGSDNDKNLKIDDSTSKSQKDSKNTFKKSDVRTKYALMKKGKDLARTNKKEAIAFYKSLLMHKCFKNDYYPYRKLVVLYDKTKDYKNELGLIKFFFNRGIHCPRLYYFWFLNKLLKLSERGLITKEEIKELEKEYMSKGFKNKSVQSSSMIIADRIEHYYGDTYVLSEHKFNNKLKSKEIIEEGKYFERTGNYQKAIDLYSEAIFDRHFNNYSFYQRICFSLEELEDYERELEYINSYFDNDSIKKSETSEKWFNKRLDKVNGLLELKNNEKNISSEVKSSDEDSILNPSNIDLMEYDDSLSLEDNIQRKMELKEHAMELRRNKNYSELISFLNALTKNSYFENDYYPFRHLCSIYEQIKHYSSMKDSIKDMLYADVYLTDYQLVWLKSKREIVDAQIGLDDVLFNQWIDHYKSHGARNKSKANSPVPLADRLIKKDENYNVSTSEEFDFTQKKYELTEKGRSLERKGRYEEAAEFYMDIIKEKKYHHYDFYKRLCFSLDEIPDYERELKAIKLYYTCPPIFTDDTSDRWFEKRLEKVNSKI

SEQ ID NO: 5415 - protein, 165 aa, Methanobrevibacter ruminantium
MGKITNRKEALSKRDQIEKLQGESFEGDDNIDWFGRIEEIVIDDDYCIYQIGKYSKLSNYYYDDFEEYSKEYGQENPLNLCFEEIISYLSKIVLGDFGDNVKAECIGKGGIVEVNGLNFHPVSRIDIADLNGESFVYLYDDNDLIARIPFFDITSYKITAPEESV

SEQ ID NO: 5416 - protein, 54 aa, Methanobrevibacter ruminantium
MGVNCIRVVIDNAEESITKVAKAHGNGALVLVPKRWIGRKVQITLLEEEDKLMF

SEQ ID NO: 5417 - protein, 200 aa, Methanobrevibacter ruminantium
MNSCAVDVKENSIESAMGINTSESDSFQLNTISSVDIGDKFKSSGATNYLESIKAWKNIEKIIDCLVPSDLEEVFSISSNNNFKINWDEKALYDVLYTNESSIFVPLGCMEQVGNGYYIMNHKDMVYSNPDDFIHENGVYGLIIRFDNNMIQSEYAYCEYNSGLSLDGENCDFVKMDFISGEDTVENYIFDSLNGFNLFN

SEQ ID NO: 5418 - protein, 138 aa, Methanobrevibacter ruminantium
MYYYKLESFDYDEHWTAFYVSNKKYSDDEFKKIVKDAYIETCKHISENQKPVSKFNYMIDSVIFDILQESDKDKSQPCHYFNRILKDRHDLINLDDCLDSKLEFVEQNGGNDNLREFYDKRSEYILVGISDDDNKGYI

SEQ ID NO: 5419 - protein, 418 aa, Methanobrevibacter ruminantium
MNKYIKKWTESSLILKIIGGLIIGSVLGILVPQYKLIGLPGELFVTALKAIAPILVFILVASALSRASEGIGSRFKTVIVLYLFSTFLSAMVAVTGSYLFPVGMHLTDASDVAAPGGLGEVISSMLLKIFANPLQSLSQGDYLGILFWAIVIGLCLKKIASDSTLDVFSDLADATSLAVRGIIQFAPIGIMGLVFSAVSESGLSIFIQYGQLVLLLVGCIATVAFVTDPIIAAFALRRNPYPLVLTCLKESGITAFFTRSSAANIPVNMRLCERLGLDKDFYSISIPLGSTINMEGAAVTITVMTLAVCHTLGISVDLPTTIVLCIISTLAACGSSGVAGGSLLLIPMACSLFGIPSDISMQAIAVGFIIGVVQDSCETALNSSGDALFSATAEYHDRVKRGEDMNFLGEFAKDKAKQ

SEQ ID NO: 5420 - protein, 490 aa, Methanobrevibacter ruminantium
MNYEFILNDLRPSQEEIDAVNKTTEKVISFLNKTCKEENIPAQAFAVGSVAKNTWLSGKSDIDIFIRFPLKTDEAVLKEKGLYLGYKTNDALKGKASEHYASHPYLTCLIDGIEVDIVPCYWIEDGSQLKSAVDRTILHTRYIQKHLKKSQEDEVLLLKKFMDAVGTYGSEFKTGGFAGYLCELLILKYSTFEETLRQAQDWKFHTKIDLENYGTSDNKLFKNDPLVFIDPTDKNRNVAAALRIERMLDFIIASRNYINLIDSLEDADENIIKEKVLKYFSPLLKERFQDKSVKEISDDILDEFKDRETQTLVISFPIPEMNADALHPQLLKTVESISHKLESEDFSVYSYDYWTDEKNLVIFIIELNVFKQSKYYVHEGPKVWNKLAFNNFSAKWSQESLYHKGEFIVFDRERQFVTAKELVKHLLEKDNIHEIKVGKNLRKAISSTHTLCEIDEFLENIDQFICDEADQREFLNTLDDLLRPGQYLKR

SEQ ID NO: 5421 - protein, 154 aa, Methanobrevibacter ruminantium
MNTEKEFNTTVYNYDRLGDLLFIFQKNHKTYLNNLLAEYDLNLIQVLCILKIDSEENLNQKDLSDSLYLTKGAITKAIKKLESNGIVIREKSPIDKRHNVLALSKKGEDLIPIINDINQDWEKRMGLDELSPEFLKTFKALAFKSAELNNEKLV

SEQ ID NO: 5422 - protein, 137 aa, Methanobrevibacter ruminantium
MKFNKSLIAIFVILIVAFSSISVIAAEDAEDDNPYHNGAVMNEQEPGSGEDDDNPYHNGAVMNPQEPESEDDDNPYHHGALMNPQEPGSTDDSQAAGSSQADSSNKVALSKYPTGNPLVVLLMSLSIIGLGTLRVRK

SEQ ID NO: 5423 - protein, 312 aa, Methanobrevibacter ruminantium
MSIKKVVVAGGGVLGSQIAYQSAFCGFDVTVWLRSEGSIERAKPKFERLLNIYLSTLEAMKTDKSAYCRGLSKTADLSDEEIDSLKEQAQKAFDSLTLTTSYEEAADDADLVIEAIAEDPNQKIAFYEELRKYLPEKTILVTNSSTLLPSMFAEHTGRPEKYLAFHFANNIWAQNTAEVMPHPGTKQEYFDAIVEFAEDINMVPIKVLKEQPGYVLNSLLVPFLSAGQALWANEVADPETIDLTWRLATGAPNGPFQILDVVGLVTAYNIVIMDPRSNDPETTQGKIAAKLKEKIDAGETGINAGKGFYEYG

SEQ ID NO: 5424 - protein, 227 aa, Methanobrevibacter ruminantium
MIVSVIGGTGPQGLGIALRLAIEGVEVIVGSRKEEKALDVVAEAKEKYADYDLNIKGLANEDAAKEGDILILTVPLAAQKPTVEGIKEFCTDKIVLDATVPLETAIGGKPFRFIDLMEGSAAERTASILDGTGAKVICAFCNISNSHLSNIPEDIDCDCLIAGDDKEAKEIAAELINKIPGVRTIDTGILEKSRIIEKITPLLIGLNIKYKSHYGGLRITGIPKLDE

SEQ ID NO: 5425 - protein, 498 aa, Methanobrevibacter ruminantium; identical to SEQ ID NO: 4553

SEQ ID NO: 5426 - protein, 300 aa, Methanobrevibacter ruminantium
MNIIKNLPLAITGLILAILSLGKIFADFSAIFFIIGSILIFMVLLKLVFHFNDFFNELNNLIPLSTFGTFSMALMLWSTYLKPLFLPLSQDIAFVIWILGIIIHLSIILFFTNNYVLNNFNIEDVYATWWIVYIGITMAAITAPAHGLSKYGFIFFGIGFILMIPTLVLVSYRYINFKQIDDQNKPFICIYAAILSILIVGYVNAMTINGTFLSIIYIGAVIFYIFAIIQAFKFIIIERLKFMPSFSAFTFPFVISAIATGEAYKFFGLDILNYLFYIQAFIALILVIFVLYNYLKFLMN

SEQ ID NO: 5427 - protein, 169 aa, Methanobrevibacter ruminantium
MNAIFKRKSIRKFLDKPIEDEKIERLLRAGMQAPSAINSQPWEFIVVRDKDSIKTIENMSLYSKPAKTSTCCIITLFNKKYTDKFDDYCWVEQDMGACTENILLQAVEEGLGAVWLGTYPNEERVNYLKEHFDIPDNVYPYSVIVLGYPTEDYHGESRFDESRIHYETY

SEQ ID NO: 5428 - protein, 173 aa, Methanobrevibacter ruminantium
MDLLDVMLKRRSVRRYTDEEIPEEKLNKILQAGMLAPTSRNRKPCSFLLINDKDSLVELANSKEHGAELLKGAKQAIAVIANPNVSDTWIEDSSIALAFMHLMAAEQDVGSCWVQMHLRKSKDGQWSEELAREILGLDDYFRIVGILALGMADGQPKPHSLDEIDLNDVHILH

SEQ ID NO: 5429 - protein, 191 aa, Methanobrevibacter ruminantium
MKANEKETIRSFLAIELDESLVPPILDVQGDFKKTDTKIKYVPAENMHFTLKFFGNIDEDIVEDISGAVEKIIKNYSSFELKIENCGCFPNQKVIKVLWLGIDKDSKITDLQKELDKEFKKLGFKKERNYISHLTIGRVKSPKNKNEIRDVIEKNKNIKIGSMTVNRVCLKKSTLTPQGPIYENIRVFDLE

SEQ ID NO: 5430 - protein, 266 aa, Methanobrevibacter ruminantium
MTTNIGKRIRLERIFNRKTGRTVIAPMDHGVSSGPIKGIINMDKTIEEISQGGANAVLMHKGIVEQGHRGYGKDIGLIVHLSASTSLSPDPNNKVTVTTVEKAIQLGADAVSVHVNIGSENEPEMLMELGEISETCSYWGIPLLAMMYPRGQKVENEHDVEMVKHAARVGSELGVDIVKTNYTGDPDSFREVVEGALVPVVIAGGPKIDTDRELLEMVRDSLEVGGAGVAFGRNLFQAQEPGKITKAISEVVHNDMDVEEALKILK

SEQ ID NO: 5431 - protein, 368 aa, Methanobrevibacter ruminantium
MSPKTSWDDKKELITTALESGIDHVLDLEDSENIRKVGNFNIISTEEDADVYLVGIDGEGDGTLELKDNLNESSDLAKAKEAKNSGKTVCAYIIITDKLHEQLAVVLGKVVDYIILVGTDWTVIPLENIIADLQKEDVKLLAAVSNADDAQVAMETLEVGTDGVIFEARDFAQIKDIAGLIDELSTESYELKDLTITNVEPVGSGDRVCIDTTTMMRPGEGMLIGSYSKAMFFIHSESLESEYVASRPFRVNAGPVQAYVMVPGNKTRYLSELVTGDEVLIVDKDGKTKTSIVGRSKIEKRPLLLLEAEYDGMKIKSLVQNAETIRLVDENGEPISVSNLEKGMKVKGFIDDSARHFGMAIDEQIIEQ

SEQ ID NO: 5432 - protein, 421 aa, Methanobrevibacter ruminantium
MNPKELFAESKTIIPGGVNSPVRAFEPYPFFVKEAKGSHIIDTEGNDYVDHCLAYGPILLGHSDDDVMADVYNQMKMGTAYGAPTENEVKLAKEVIDRVPCAEMVRFVNSGTEATMAAIRLARGFTGRNKIVKFEGSYHGAHDYVLVKSGSGAACLPDSAGIPEDTTKNTLSVPFNDVEALTKLIDEEGENIACIIVEPVMGNIGCVEPNVKYLKFLREITEENDILLIFDEVITGFRVSRGGAQEYYGVKPDLVTFAKVLGGGFPIGAYAGKKEIMSLIAPAGPVYQAGTFSGNPISIQAGLSTLNKLDYEFYGNLARKGDYLRTNISDIVEDLNLDLQVVGLASMFQIYFNPEPVVNYEIAKKSDAKRFLVYFRELLKNGVFIPPSQFECNFISGAHTEEDLDKTAQGIENALKVAWQL

SEQ ID NO: 5433 - protein, 237 aa, Methanobrevibacter ruminantium
MNRRSKLIIAILIVIIIGIAVILFGSMFGGEKLSSGDKDILVCAIDESEPRPGMGAVDMAFLVHMNDGGITNYTPIYPHGMVHPSIAEPEEYQAMGAGEKLLLHDCFYWEDKQQCMQYAKEILEYNTNYSCDAVIAVNSQAIDNIISAAGTLKYNGEEVNASGIDFIREEQNTMGMTRGDSVMVIVNALMQAAKDPDKRDKMINAAVSEYTAGNIAMYPEGSFMELLASKGLQAMFG

SEQ ID NO: 5434 - protein, 212 aa, Methanobrevibacter ruminantium
MNQKDYWNSIADKKEFTTPFHPEILENYLNKDDFIVDIGCGYGRTLRELKDNGYRNLRGYDISEKMIERGKNENPDLDLRIKDPDTIDLDDDSVDGIILFAVLTAIIDDEEQKALIDEIYRVLKPGGILYLNDFLLNDDERNLKRYDEYKDELGVYGAFKLPEGATLRHFDESYIFKLFDSFEKREYERQIYPTMNGHTSNGFYYIGEKNIG

SEQ ID NO: 5435 - protein, 412 aa, Methanobrevibacter ruminantium
MLMNEQTKLSKDHYMIFGLSWAGWVFDFYDLVLFTFLISQLQSSLHINAEMLALCLGLSLFATGLGGIIFGALGDKYGRKKVLEWTILVYSIGTLLCAFSWSFYSLVLFRFITGLGVGGEWATGQIYISETFPDNLRAKFGAFMQSGAPVGVILASIVGGMISPIIGWRMTFLVSIIPAITIILIRRYLKESDVWIKNKDDFVNKNIFQEFKQLVSKEYRKIFLISLVLCIFGMSAYWFTYSWLPTYLAEERGLAMVTTSLGIILIQCGDFTGYTTFGFVAERIGRRPAFTIYSFIMGISIAMITICWNQIDKVPDLIMVFMFLTGFGTGFFGGFGSLFSELFPTKIRNTGVGTVFNLARGVQFITPMIITFVGAYYDLSYGIAIAAIFAFLVGIWIWVFPETKGTAINDLD

SEQ ID NO: 5436 - protein, 180 aa, Methanobrevibacter ruminantium
MKIIALLASPRKGGNCDVLMDEMIRGAEENGHEVVKYFLEKCDIAPCKACMFCAENPDCVREDDGNEIINALVDADGVIFATPIYYGQMSAQGKLIIDRFYAIGQNPDKSLGGKAALIFTENQPEGTYKDYIELTKFSPFTFMGYDVIGHVDAGSAGPAGIVAEEQKDKLEEAYELGKLF

SEQ ID NO: 5437 - protein, 262 aa, Methanobrevibacter ruminantium
MINIVAGLGENENIILASRQLESIDDLNIQLVDNEDDLFDAFKDSNVGAVVRGSLKASKVIKLIKQYKSDCEVNRATYVNTSNDPNFNDSYEFLLSPVGIDEGKNIDEKITLAIQSANFIQSLGKTPKIAVLAEGRKDDYGRSERIDKSLKESEELTRLLEERFNSLDNFDNSSEDVSKNYQIKNYYILLEQAINDKFNILLAGDGIFGNIMFRALVLLDKWPSYGAVTLGIDEIFIDTSRDQTVEGYKRSLELAYNLAKLK

SEQ ID NO: 5438 - protein, 254 aa, Methanobrevibacter ruminantium
MPPQFLYKIYEKRLMNELDPDRMPRHVAIIMDGNRRYSRMKGDMEVIKGHELGADTLEKVLDWSIDLGIEIVTAYAFSTENFNRPEHEVEGLMRLFVENFKKIVDHEKIHKHKVRVKVVGRIELLPDDVREAIKEAEDSTKQYNERLFNLAIGYDGRLEIVDAIKKIYKKVEDGEISIDDIDENLVSENLYTAGLEDPSLIIRTSGEERLSGFLLWQSSYSELYFCDSLWPELRKVDYLRAIRDYQERDRRFGV

SEQ ID NO: 5439 - protein, 253 aa, Methanobrevibacter ruminantium
MIDTHCHIDFEEFDEDREELIKRAQDKLNAVINSGYSVESNNKVLELSKEYKDFIYPTFGFHPVSSQNSPEEEISAAHNQIVTHLDDILAVGEVGMDFYYCTDKALRARQQEIFMGFVEIANEYNVPLLIHGRDCERKIFNLLNDYDDIPKVIFHCYGGSLKVAKRILDKDDYYMSCSTMVCYSKHHQELFKNIPLERILTETDSPYLAMTKEERNEPANVVYAVEKLAELHETDVSEVDEQTEKNARYVFDI

SEQ ID NO: 5440 - protein, 226 aa, Methanobrevibacter ruminantium
MKPYVILNAAMTLDGKIATKTGSSEISGKEDLERVHEIRKKVDGIMVGIGTVLADDPRLTVHKINARKEDNPIRIVVDNKARTPLNFRILNDDAETIIAVSSICDERNENCDEEAVKRAKELEKRVNVFYSTGETVDLVEFMEYLYDYGIKSIMLEGGSTLNFSMIRDGLIDEVKICIAPMIVGGKDSKTFFDGDGFDYMKDAVQLELINSFPLGKDFIMEYKVLK

SEQ ID NO: 5441 - protein, 48 aa, Methanobrevibacter ruminantium
MGNMAEARRKMHERDERIKKENKSDVKKIRNFFFGCCDNKEKKKVKEH

SEQ ID NO: 5442 - protein, 214 aa, Methanobrevibacter ruminantium
MHSLFSDGELLPSELARRALVLGHEAIAITDHVDYSNINTIPEISAAIDDINSNWDITVVLGAEITHAPTESIPALAEKARELGAKIVVVHGETLNEPVVEGTNFAAVNCKEIDILGHPGLITKEEAELAKKNDVALEISARKGHCLGNGHVANIAREVGNDLVIDTDTHSPDDIITFERSIEIGLGAGMTKEEILKATIDNPRKILKRNGIEI

SEQ ID NO: 5443 - protein, 352 aa, Methanobrevibacter ruminantium
MISVFVPSHITGFFSIHDNPDPLLKGSLGAGVLLDKGVITEIDFKENFDLGGVNDNDLNLDSLNSDELLIIINGKRDEYNEVIILKTIHLMKKALDKEDISLSGVVINQIIQVPIGCGFGTSAASALGVAISINELFDLGLSLEECGQFAHLAEVELGTGLGDVIAELSKGIVLRTTPGAPGYGEAKSIVPHEKTGFGVFESLNADFYIITKSLGEISTASIISDPKHKKLITQVGEKTAEEFNKKDDGIVIGSKFKNKFNVAVDSEFNEEETIKKFMKSSLFFARKTGLISDELLELVHNLHGKVIGSSMAMLGNTLFAIATEEQKLKLEAEYYGEFDFYKLETEGIRIIK

SEQ ID NO: 5444 - protein, 177 aa, Methanobrevibacter ruminantium
MIRLSYDMQVYRKDLREVLKRTDNVVELGCHVGKTSELILYKLTTGSLIGIDNSPEAVQPLERLSFHHENFTHIIGDVRRHEVLKEVTELIGQCDVLSIDLGGGYHPDTVFKVYYIWASTLKPRDVLIRNQGLIDFVNSAITTEDMISEHGWLESCGDQGIPPQIKEFSLWTDKLDD

SEQ ID NO: 5445 - protein, 238 aa, Methanobrevibacter ruminantium
MKRSKKLIIAILVVILLGLLLAIAGYFVGGPDLSQENKTILVLAADKYEQPNGGCDMAYLVRLENGSLANYTPVYPGGMYHPSQSAPGNLQGNMLLHDCLWNGVEDGMQYAKEIVAFHTGVEADAVVVLYDEGVDNVLDSIRPIEIDGEPTNLSATDIIRENDNYAGYKGNEGVTGTMSRADAVMVLVKAVSKQAKDPAKKSAMLHAALDEYTKGNIVMTPKGSFTRLLATKGLESFA

SEQ ID NO: 5446 - protein, 442 aa, Methanobrevibacter ruminantium
MKEYKIAIIGGGPAGMIAAIRAAEILGPNAVCILEKNESLGKKLLLTGGGRCNITNNTPIHDQLNYYNKNKNFLKHSLYTLPQDKLLAIFEEKDLEFHQEDNKRVFPDSEDAHDILDILEEYLEELGVDVYNNTPINAQDIEHELNERMEPVFEIENEKISLNASKIIVSTGGITYPNTGSDGDGYKIASHMNHTITDIKPGLVSFNIDDFLLKTLSGLTLENVEVSFKDKKKKISVKGDILISHFGLTGPAIIDLSNRLLEKSDLTVLDDKLNLKSRDEIEELELFTNRITIDFTPDLTEEDIKNQITKDSPKNGKMAIKNYMKKYLPNNFIDYFLMKIDINPKKTMANITKKDKNKLAENLKRHVFEIESLEMDLAKVTIGGVKSKEIDAKTLESKYVEGLYFAGEVLEVAGPTGGYNLQIAFSTGYLAGQEAANSLKNE

SEQ ID NO: 5447 - protein, 440 aa, Methanobrevibacter ruminantium
MDYLLRDLRRTHYSKDVNPDISGEEVIIMGWVHEIRDLGGIIFVIIRDRDGLVQITAPSKKVDAEILEELRALRKESVVAIKGTVQEAGKAPNGVEIIPIKTTILNPAKQPLPMDPTEKVKAEIDTRLNSRFLDLRKANVSSIFKIKANMFKAVRQYFDEQGMIEINTPKLVASATEGGTELFPITYFEKEAFLGQSPQLYKQMMMGAGFDKVFEIGQIFRAEEHDTLRHLNEAVSIDCEISFADDVDVMNVLDGMITRVLQSTKENCAKELETLEYDLSAIPEGPFPEVKYDDAVDIINSKGIDMEWGEDLSREAEKALGDTQEGFYFLTDWPSAIKPFYAMPYEDRPEISHAFDLMYKNLEISSGSIRVHQYDLLVKQMIERDLNPDGFGSYLKAFEYGMAPHAGWGVGADRLAMVLTGVENIRETVLFPRDRHRLTP

SEQ ID NO: 5448 - protein, 426 aa, Methanobrevibacter ruminantium
MEILRYERETADELIKRSQADINEILNIVQDILSDVKENKDEAVKRYTAKFDRCELDDLQVSDEEIKNAYDNLDTDLIDALKRASQNIEKFHKAQIPEEWSMEVAKGITAGQIIRPINSVGCYIPGGRAAYPSSILMEVIPAKIAGVERIICCTPPGADGRILDAILVAADLAGADEIYKCGGAQAIAAMAFGTESIQKVEKIVGPGNVFVTGAKKLVYGDVDIEFPAGPSEVLILADKTAIPEYLAHDFLSQAEHDPEASCFLVTDDEKIAEESNDLIERFTKEAVRKEIIQESLEKHGHIILCKDMEEAIEFTNTYAPEHLIISTEDDNAILDKIKNAGSIFLGKYSPVAAGDYGSGTNHVLPTSGGAKMYSGLSTESFIKKPTVQTITKEGIEELSKTVIPIAEYEGFYAHANSVKVRLDKNE

SEQ ID NO: 5449 - protein, 101 aa, Methanobrevibacter ruminantium
MYKDEMIQLHQFLVYVLKYLDTDNNAHEYIEEYLALNISPHHIHRTKAEHKQAIFVLSNTISEVILHKEEGSIPPNVSNALRDLVRRSKKELKAAEAAQSK

SEQ ID NO: 5450 - protein, 462 aa, Methanobrevibacter ruminantium
MSTRKVVCLVDGEHYLPVTRSAVNSINSIDHIEVVALVFIGGTEKLKLGDEEEYSELLDTPVYFGKDKNQIPYKLIEDVIKKHNANIVMDLSDEPVLDYDKRFKIASVVLSCGVIYKGADFEFEPLTQYEIMKKPSLKILGTGKRIGKTAVSGYAARLIDKNNYNPCIVAMGRGGPEEPEVVHGNEIEINPEYLLEQSNKGIHAASDHWEDALMSRVLTIGSRRCGGGMAGDVFVTNMDKAAKKANKQDAKFVIFEGSGAAIPPIKTDKSIVLVGANQPIGNILGYFGPYRIMLGDLVILTMCEEPMASKEKIKEIEDFIHKIKPDVDVISTVFRPKPLSDINGKKVLFVTTAPEAVRDVLSSYLEETYSCEIVGLSSHLSNRPLLQEDIEKYKDDVDCIVTELKAAAVDIVTKEAIESGIELVYCDNIPVPISDDYPDLSESILKVVDGAIEEFSFNMLLD

SEQ ID NO: 5451 - protein, 353 aa, Methanobrevibacter ruminantium
MMSQDSNKNDINSYDFPSRVEKALKLIHTDSFKALDYFNEILDDFFKFTPDEIKENNLSSLIINSLNGKGSILNAFDKIDEAEECFDMVLNDFDSQDFTSLINKALILRKKGHLEESLDYYDEIAKYYPDKKELILAMKSEVYGELKIKLSDTDLDDYSIEAKDLIGRGLASHENKIVLEALDYYQKAIKADSSCKYLVLSLMDDVKREFFKLFLYEDIDIEKDEISKKKGAVLHYLFIQNNLFYAYMLNEEILEENKNDLFALNAMGMIFFYLDDCDLSIRYFDRCNTIDEKYLYPYLNKAIALARAKRFDEAKESFGKIKGLPNLIRDPNEEELDIFKRTIISNSIYSLGF

SEQ ID NO: 5452 - protein, 146 aa, Methanobrevibacter ruminantium
MSHVEKSLELFEAKFNCAQSVFCSFSKEFGLDEKQALKIAACFGSGMRKGEVCGACSGALMVLGLKYGQSELGDRDSKLKSDKKCTDFLEEFERANGSYICNELLGCDIRTEKGVNYAKENNLFIEFCPKFVESATLIVEKILKEE

SEQ ID NO: 5453 - protein, 359 aa, Methanobrevibacter ruminantium
MGDSLKVIIDAANVAHYQKGENSKAKLKNITLAVKALEQGHHDFLIIADASLRHNIDDKDTFVRLVEDGIIDEVPIGNVADHYILDLAYDENAKILSNDKFRDFMSEFPDINSMRIPFSIKDNELILGKTKKPKKVKNLLQNICDEILNELERKRWVVYKGKETTKFTPLNVAKQAILILDQSERDDMSSKIEGIFSKLPMFDKVMEMVDDVETSVPYVIFVLVHPKDYKAAVKDAGNISVTVADRLRLVHKPLIAVRNDLFIKPGYFGLNIVLTDEVEDIPPFNIEIQTNTYDEVFIKKNSRNIASTIAGRLGSWKFPFVSVKPNMILEKPGEFEIYLEKNSKKKKKDKSKDKDKKKK

SEQ ID NO: 5454 - protein, 400 aa, Methanobrevibacter ruminantium
MANNSVLRRIVSLITKHNILSIGTKYFPTTELETEYVDMFNYTQTMLMEIDKANITTESIFTNLVRDVGRENIPENHSFYELLPAQNKIDEYALVSKIIMGSDRYMYVELSEPSYIIDYFTDIILRENGEIIERSETEIVSRLMSKNDAIRIAIKLVGIGLDNNIRVRAAAGMTGAAAIERSIKFNKEVGDVPGVAFTKLGGEYALVLDTPFKLGQSEHAEYQHYLFIDIVDSTNFISKHGKNKLVELMTSVKEFMENCEGHIEGYREGGDDLIARFPSKGVAIRAGLDCAWFILNNGAKVKIGIGRSRREAGERANIAEGIKGFGALTLIVFDLANGLYAYYVPSDFSRTLCELFTTKKGKLVTAFLLVFILCYLLAVLGFGLYGILVFIIVVAYYTLK

SEQ ID NO: 5455 - protein, 101 aa, Methanobrevibacter ruminantium
MANEGGGHLKTILMIIILIAFICGLALGVSVIMGGDDNSQTESEGVHYVNVTKNITEYNESGNLIETEDGTHIEFSSYSDNVTEGENVTAYNSSTDAGNLF

SEQ ID NO: 5456 - protein, 397 aa, Methanobrevibacter ruminantium
MCLVNGVRAAGSRQGKYGLAVIESKDSNASAVFTSNKVVAAPVIHTKEMIKGGKISLVVANSGNANCFTGEDGIVDCDKTIDFASGITGISRSEIATASTGVIGRKMPMDIILPLVEESISKLEHSNEASTDAAKSLMTTDTYHKQFAVETSIDGKKVTIGGVTKGVGMIAPNMGTMLCFLATDASISAEYINKALKTAVNKSFNMIVVDGDESTNDTAILMANGKSGVEVVNDGEINPDFQEALDFICISLAKMMARDGEGATKFIECKVNGAKDENDAILASKSVISSSLVKSAIFGGDPNWGRIVAAVGYSGCEMDQNMITVIISDDNGKEAILVDKGKILAFEGTPNLDLAEKIMQEKNINILVDLYQGDASATAWGCDLTYDYVKINAEYTT

SEQ ID NO: 5457 - protein, 213 aa, Methanobrevibacter ruminantium
MNDYLNNSDTNDALVKLPAKQIGKNEIGTVSIEGPYGNTSSPVKVAYILGQHPREFSAHDAIYYALQNNSNELNYSYYVYRINVTNETADFEQSRMNGQLLAQEFVVNDSINKSYDLVIDIHSSNGGYIQDPYIFAPVSSDLLAYDAANNITKALPYVTYYEPASYTSPQYSTIPLEEGGIASIIFEMRGNPDNSLEHQADDFVKAVDKLVLN

SEQ ID NO: 5458 - protein, 394 aa, Methanobrevibacter ruminantium
MIINGKRSLAHVEKVAWIKPIEGADNIGLIGVLGWTCIAKIGEFKEGDHCVYIEIDSKVPEKEWSEFLRAKKFKIKTMRLGKFKVISQGLALPLDKFDVEIPKKVGTDVTELLEITYSNPKDIKRKSDGPNKYEEMARRRKALFRKPWAKWLMKREWGKRLMFFIFGNEKDGSKSFPKKFEYVHKTDQERCENMPDVLKDKTPFIRTQKCEGSSGTFILELTNSRLGKREYEFYVCSRNLRVFEDENTDFWDVAVKYDIENKLKDYLEKHKDCSYVAWQGEVCGPSIQNNPHKLSENHLFCFHMIDSEKGMFDIREAKELWDEYEIESVPIDEEEYILPDDFEEFKLTADGFYDPEVCEGQKKCRREGFVYYKTTDPNFSFKNVSRKYLLKIGE

SEQ ID NO: 5459 - protein, 203 aa, Methanobrevibacter ruminantium
MGNKTGLLPANGHRIQGRSSESFLDAREIIMELGLEGNEVFMDAGCGDGHAAIEAVDILDDDATIYAVDIYEPSIEDLQKFAVEKGYDNLIPICADIPDYIDIDDDTVDMILLINVWHGFKATRRMDEAIEELKRILKPGGKIAIMDYKKQEAKHGPPITVRSSPEDLEEVFKEHGMCLFSLNPDTGEDIPQGKSHYLIIFQK

SEQ ID NO: 5460 - protein, 129 aa, Methanobrevibacter ruminantium
MDNKIKAGIALAIIVLVAVIGFSFINESNNVVNQLSPLTESFDYSMEPMTTWDDSKKEYSFNQNISSANGKDYKDITIDILMYNDGKSLDKHTSTINSTKDGSFNLKFTQRLEGEPDEFYYNVTKATEI

SEQ ID NO: 5461 - protein, 342 aa, Methanobrevibacter ruminantium
MFKVSKSILIVCLVSLFLLVSQASAADSNGLSIRDINSVDENYNLDASYLDSLQDSNGMHSDSSLNSNGLDDKSNYDKTSISQNQTSSNLKDNDLDNNDGESEIIEEEAKDTEGVVMAGDSYSCGPASLATALNRLGLNLSLSEVSQHTNTSKDGTNMQSLIDAAGYYNFSAVGVEIQSKDLAENSIVHLDIDGAEHWTVVSKVTEESVFLADSTRGNINMSIDEFNSLFSGKAILLSELNKTNVSNVISNKNIKVLDQSQCLNVKGKGWVRVLVGYKTEWRYGLINTYSWVLRPKVINGHVSYSAWEYVKVKHLSWGKYKVKVPIYKYKYIKNQYEVKGKK

SEQ ID NO: 5462 - protein, 292 aa, Methanobrevibacter ruminantium
MESINLLVEALPYIKKFYNKKVMIKYGGHAMVDADAMASTARDTVLLKYVGMQPIVVHGGGPEITRSMEKLGKEPKFIKGLRVTDEETIDIVKMVLVGSINTDIVSQICHHDGKGAGLSGKDNKLIQASKTMHEIKDDDTGEIEQIDLGLVGKVDKINPEILEMYTENDYIPVIVPIGIAENSKTLNLNADTVAGAIASEVDAEKLIILTDVPGVLRDPNDPSTLIQKIHIDEVPQLIEEGIISGGMIPKIETCVEALNNGVKSAHILDGRIKHTLLIEIFTKDGIGTMIYK

SEQ ID NO: 5463 - protein, 244 aa, Methanobrevibacter ruminantium
MRKVFESIIEALKYPFRDWKNIIVIGFLLLIASLGRKLPFPEDPQQTVVFIGALLILFLQTGYGSKIVYSGLKGENIPPKLRPIPKLIWEGFKKIIIIIIYVHIMVIFISVGKTQLSANNIPIAIILFVLGGGTYLLMVGGLLNRYFHHGKFIKAFYLKEIIAIIKKIGFWDMISIVICAMISQTLTISTFINLVKGMFTSIELVLCIIAFFLAPIALMSTKRLISLNLRRILSSDEDLEKFAF

SEQ ID NO: 5464 - protein, 247 aa, Methanobrevibacter ruminantium
MGKLDGKVAIITGATSGMGRESAKLFAKEGAKVVVCGRNEERAAAVVDDIKAAGGEAIYVIVDMANLDEVPKIYEATMDEYGTIDILFNNAGVLSMSPLMDLTLEEWNKVFNVNVTSALVLTQLCVPVMKEKGKGTIVNTCSVASFGAHHGFAAYVDSKHAMMGLTRSMAWELGPEIRCNGIAPGLIHTAMVDSIGGPGALQNMIDQCPVKRCGEGQDIAELALFLASDECTFLDGQIIKCDGGFEI

SEQ ID NO: 5465 - protein, 494 aa, Methanobrevibacter ruminantium
MLNITTFLDANACRLEKEVFYYPNRELRYNSKELLTIVSGIGQSLKDKNIEKGDRVLIYLNNSPEYLFSLLAIWRIGAIAIPTNRILTSAELDYMISDSDAKLIITDDEARETIKDLKINSYIIEDCESFKDSEVLPAEETEWDDLCQLQYTSGTTGKPKGSMLTHGNWFTAIHNACDVLTYKEDDTFLCIYPMAHVGILWAIAALRAGALCITMDFFEINEYLRLCEEEKVSVLSGMPPVIHTLTNLEEEKRENLSTVREIISGGGPLHRKIWKKFMGQYNIPIINAYGLSESIVIGTGTVIRPEDYATADRYESVGHPVCFSELKIVDEDDPNKTLDKYEHGEIALRGPAIAKGYWGMEKETKESFLEDGWFLTGDIGYIDEDNRLFITDRKKDMIVMSGWKIYPTEVEETLIKYPKVDEIAIFSINDIHRGELPVAAVVWKEDEDPEGLLEYSREYLARYKVPRKIFTMDELPRVNGWKLLRRELREMFSQ

SEQ ID NO: 5466 - protein, 332 aa, Methanobrevibacter ruminantium
MIKIARIDGDGIGKEVTEAGVAVLESLDLNIDFVEAEAGRECFDKNGTTIPEETIRIARNAKATLFGAITSTPGEKSPIITLRQELDTYANLRPIKSFKGVDCLFDDLDFLIVRENTEGLYSGKERLEEDKAIAHRVITRKASERISRLAFQEAIKLNKESVTCVHKSNVLKKTDGVFKDSFYNVAKDYPQIKTIDYYVDATAMYLLTKPQEFDVIVTSNLFGDILSDASAGLVGGLGLAPSGNIGDKHGLFEPVHGSAPDIAGNNISNPIAMILSVSMMLEYLNEDYLASKVKTACENVLEKGKVLTPDLGGNAKTMDVANEVIKEIEKLD

SEQ ID NO: 5467 - protein, 155 aa, Methanobrevibacter ruminantium
MEKSIDELILDLKDEDDFVREEAIGSLELKGEEAVCPLIEALGQRNKDIKIGAAQVLAAIGDKRAIPALVATLGDRNKLVRREASTALTTMGDEAIEPVIAELDNPKWRVRGAACWVLGALDAKEALPKLEELLNDESSFVQYGAKDAINRINNG

SEQ ID NO: 5468 - protein, 120 aa, Methanobrevibacter ruminantium
MGLYEHDLNDLLKSLEDKGLVHYEGSYVQLRDFEGVINTVDSKEDVLTAELNQKEKKSFEIIKSLADENNLVSRYEIEGNLLYGDLKLTDFRMYHIILSLENKGLIEAVYKHNGDYYKIL

SEQ ID NO: 5469 - protein, 263 aa, Methanobrevibacter ruminantium
MDKAKVNNIILNYNLEGEGRTIVFIHGLSDSLNYWRPLQESLKGDYQTLSFDLRAHGESGDDRKEITIDLYQKDLYYLLNYLNIEKAVLIGLSLGGNVALDFAINHPKMVDGLIIMSSFSEFSDHLNEIFDSFEEAIEQGFEEFFDVILPYTLPEDVLKKHEVELEYVKKEGAKTANIEGIKAGIKAGYSFSITDKLNTIDAPTIVIAGADDELTDLELQRKIYDNIDNSEMIILEDTKHNVLIGKNISRILDIINEFMLKIE

SEQ ID NO: 5470 - protein, 164 aa, Methanobrevibacter ruminantium
MRISMSLPKKLLAEFDEVLKDRGYQSRSKGIRDALSDYILRYPWMNEMEGNRVGVITVIYDHHFTGVMENLADIQHDCMEEINASMHIHMTHKYCMEVIVVNGNVTHIRELAERMMRLKGVEHVKLTSTANGESLDREPGLEHSHSHSHSHLIFFLKNFFFLFS

SEQ ID NO: 5471 - protein, 311 aa, Methanobrevibacter ruminantium
MILITLSFLRDYERLAVFKEAIDEFAISNLDKDLDCSNSNGDINSDDDKKLDCSLAYDLGCGSGVLSYLASDYFDKIISIEQNRSIFKCANKNLKSFDNIEAINQNVLDFDFENYPKADLIICEMLDTALIDEEEVPILNHSKKYLKENGKIIPQGIINSAEPVFMNIDYLQYEDDEYQPIYEILGKSVIYSEFEFLDDIDEDFSCIIEFEIDDKYSDKKTDASFEVDDRCSDKTDYFNKSNDKIKVNGIKLTSFTKLNENIICGPTPMLNPAMLVPFEEIEVNNGDKIRIRLSYVMGGGVETIKTEVLDV

SEQ ID NO: 5472 - protein, 174 aa, Methanobrevibacter ruminantium
MLNLDEISENIDLFLEDCSSLIVLGIGNDIRGDDGLGPYIINQLTDLKENLSLKEPQSLENVHLLNGGSVPENFTGLIKRIDPSHIIIIDATLMNEEPGFIKIVNKEDISNVSISTHSMSLSYLVKYLEIEIDFKLIFIGIQPKDMDLTFELTDTIKNSSDTLVDLLFSKFLKI

SEQ ID NO: 5473 - protein, 379 aa, Methanobrevibacter ruminantium
MKVLFIGSRLYDDLAYHVDELGIESIITESNEEAPHLDLASKYYIVPRGMDKPMEVAIEEKVDAIIPLIGIDPPLKDLAIMKEKIEKENNIPVISSNFNAVDIASDKIKTKEFFKSIGLNVPEAKVLNKDDFSNEGEFLEKLGFQFPIVLKQGEGQGGKDICITSQFEDVLQYFESFNQALVENFIEGAEVSIEVIGWNGEYLPLVPVYKGDTSLEGIHPIKRLRYGPCDFEAIDNEEFRQLAKKIAVNLGSEGTIDMDLIYSREENKVYAIEINTRPSGTRYLSYATTGLSPLGLLVDIAAGNFDVKDLENKIKHYYSLEIPIGDYEGPAPNEPVKEYVNGNFIVHGPKGYQRITIRGNTREETYEIAKELTGNDYRS

SEQ ID NO: 5474 - protein, 357 aa, Methanobrevibacter ruminantium
MDLNYIIVLFVLTFLATVAFTYFVRHTLRDADVSDSPIVSEHRHKAGTPTMGGIAFLFAILFIVSIYYRNTNILIASFIMLTGGVMGLLDDLLGLKIKEYQKVVKNVSDSVVPIGLLDLGPGEEARVTTDKAKKQVYGYVDEGKLEIVAEIPIKYEPSEKTKIIVQLLPGLFLALTGVVTTLGGFTLGILAYPICIIAILGSINSINLIDGMDGLAAGIVAIASFSCCIYAYICGNMDMIPAFAILTGICLGFLVFNRYPASIFMGDTGSFVLGTGYAVAVILGDIPYFGVLALAVPIVSVIISLMHRAHIINLPVEPLHHTLNYKGISEVKIVLSYWLLTVLVCAIGILAKLYIFA

SEQ ID NO: 5475 - protein, 539 aa, Methanobrevibacter ruminantium
MSKTYFLNELADSISSQKTFSIAQLADAIGGKIYGADDYKSPNGFTGIFETLNEAVEGDIVIRHWINGKGVEIANDKNVACIITLTPKEDALEMASKLAFPVIVVDRIEFANAFALKWTIDNLSPNTQRVVISGTNGKSTSSHLIYHILNHCGYNVFTNTDAKSEFNTLIDPMVAKLISEQVISKQDFDVRKLDSVADLKNLDSEGKPINKGAFDYIVVEVSEVQGWGSDLMKDHAQIMSSAINPDVGVVTNVAMDHIGLVNNIEEVFHETSGLVKAINKGGVVLNYDDENVLAMKDLANDGVDIFFTSMEKDSILNNDYDNDKKVYFDRKSNAIVYDNKNILRYDELPFTGEHFIRNILSAISACISLEIPIEDICEGVKTYNPLSRRFTRLYDEPIVIDDFAHNPDGIKNTVRAAYDLAEQFDKGDLYIACAIRGSRGETLNGLNSEALALVIKELRHRNDDDIEKDENVKKREIYLILSSSCDLVDHLNYVEDFERGYISFSNLDKEHIKYIHFNKLYGALGYIMKKCIWKMMLYC

SEQ ID NO: 5476 - protein, 617 aa, Methanobrevibacter ruminantium
MGEFVFSFLEDQFRDIYLDCARMDKNLIEGDGVESILIAGRIAEKITKAIFVFEGIKDNEDNQYLRIEKLSNANILPNNIKNDLSQIRILRNNVYHNTLNSDGSGGFASYNAPKYVQSGGLRDYKTGFNEIKEYSKISKQNSNSNSNSSSNSSPNNEFGSELTAAREAHKLVFNVCVWFYVNYSGDKDFIRPKYKLSRRTQDADFLIRLKSAINDGNDFIKLRQNNPNNEIIQILNEIYVKKAPQEPKEEQVYGINNKDIKIRQPDVPYSKCLGISYDDELFMWHAEHGGKDLGLFESSKEAYEAREIYINSIPMPRKVNGAYSKARGISFSRIQKLWSASVKGQIISYHGSEAEAIMARKKYLKSHNLVDIKVKDGYKTITLEEKAKLEEKIRQKKESSKSDIKTIPSNSNTKDEMEKENIQKIMDGVKKLKDDLNESSASTYIKSSSLSSQSSSSDSVSSYSGSKSSSLGSTSSSSKSGSLNSKSTSNENSSFYDIHNIGSGDKTKKKVKIVNGSKVQASQTTKKVKVSAGNRVSKKHKSSSKNSTVSNNANSSKKSKSVAINKKKSSKYEGVFYEDGLFMWSAEVDGKHLGLFSSEKEAYEKREEYIKNKSNNN

SEQ ID NO: 5477 - protein, 197 aa, Methanobrevibacter ruminantium
MSKFKYCPMCAEPRADNSKYCSKCNFEFLTGKYVKVQEEEIKITEKVSQEEFVESNQLIQDTSLKINVLISRYLNYSLSNKFNENLPLSIIREYISSCLNSKVPSDFDDNYLQSLDALLNDEGYKNSINLFLQWIDENRSHLPGLVLNQYMIPHQNNVNRIEEILDLELEKNEDNDLFFDLLNKFLISEKEFIERLI

SEQ ID NO: 5478 - protein, 62 aa, Methanobrevibacter ruminantium
MPVVRISGNPNISVETKREMVKKVSEIVAESYNLPIETITVLIEAFEREDIGAGGKLLIDRD

SEQ ID NO: 5479 - protein, 278 aa, Methanobrevibacter ruminantium
MIEISDKFYDKTFKLFRYKNFENLCSNCGIFIEFDGFNDKELVDDGGITYIMDISINDKRGYSVIIEFQSSVVDEADIERFMKYATLTYIQYKKPVEIYVLSTVEEKNRVIRRRWNFFNEFTICVKSLKSIDGDKVLNSLKKKSRFDEDFTGDDIVDLLTIIFMKSVKTTVELLKEICLLVNEINALDEKELYDIKTFLLMYVKKFVEDKQEARILEELIGMRNDLFGRTWASVRNRAFLEGEARVVRCMFNEGIKIEEISKIVGLEESQILKMIGSS

SEQ ID NO: 5480 - protein, 376 aa, Methanobrevibacter ruminantium
MWYDMKRRRFYLILFIILLILAAIAIIGTFSSFSDVSGYDLGSDDLSIAVTGDVMFGRKMPGVLDSGASPFRNVENVTKSADILLVNFENPATYSTNPVKGDVPLKADPKYVHLLAEANEIVIASQDNNHALDYGDEGLNDSIKNLKDAGIYVIGAGNNLSEASKPVVIEKGDRKVTVLNYMDADNFAEYASIMPPATANSSGFCAYDSELARKQVAEARENESSIVIAYMHYGNEYSRSPNEYQINMSHELIDSGADIVIGSHAHVTQGVEMYHGKPIFYNLGNFIFDQSNPATHRSYFLNLDLHGDNCTVTLYPTVIVGYLPQFMDADSAKALLAELYPQCDQLKVNDDGTAQLTFKLGNITDNSTQSNDVRLY

SEQ ID NO: 5481 - protein, 152 aa, Methanobrevibacter ruminantium
MLGEIELKKLFPDFEDLVQPSGIDLELDEIFIQKSEGSLIDNEKNLPDIEAMEGPIYTLKPHTAYLASIRRKVKIPKGYTMLYLPRSTLLRSFISVQTAVGDPGFYGTLMFMIYNHGDFEYKIKSGDRIAQAVVFPVEGSGEYNGSYQEEEI

SEQ ID NO: 5482 - protein, 381 aa, Methanobrevibacter ruminantium
MVEISIVIPVYNVEKYLRECLDSAVNQTFKDIEIICINDGSTDSSLDILKEYQESDDRIIIFNQENQGPGAARNLGINKSKGKYVYFLDSDDYLELNALEKLYNICEEKSLDFVLFKLLNFNDKTGKTFQTKYYNMAFLNDRIGDNVFSYKDLYDCVFNLAVSPPAKLYKRELITDIDYPEGIIFEDNVFFLKTLLKAKRIYFLDEFLYNRRRRDDSLTSSGSDDYYDIIPSMNYLFDICRDLDDFELLKEGLYYKKFKELYIRFSKVNDVHKEEFFNLIREDCLKHKEEIDEDIANDKLRKRSKFIYESVLSSDDYKEFHYRIRLYDKNKEINDLKKENKSLKNENKKLKSSNKKLKKENKHFKSTKAYKVWKKYSKIKD

SEQ ID NO: 5483 - protein, 328 aa, Methanobrevibacter ruminantium
MVEITLGLPKGSLNNVNRGNTYQLFVDAGYEVRGYEPGNESYEINILNDSEIKAFLTRPQSTPVELNRGMVDISIVGEDWVKEESVLSDNDIVKIGDLNYGETRLIVAIPKESPYDSLSEFFRANADRERPILVFTEYPNLTRKHIMENEAYQEIYGDAVPFVQVRGLRDGDNKKVQVINSDGATEVYIAKGADLIVDNTQTGSSLRKAGLKELETILHSSAGLYAGVSCTEEKMVKAKMIYEQLLGAVTARKYFDVKFNIANEDIEKVSNYLIENKFCSHEPTVNHGSSFSQINVLIPKNIFPEMLDGIKELGASSIIRSDVKQYVI

SEQ ID NO: 5484 - protein, 407 aa, Methanobrevibacter ruminantium
MKITVAGVGYVGLSLAVLLAQKHDVTAITTTESKAEMLNQFISPIQDDEIERFFKEVREGERTLNLHTTTDKAAAYGDADLVIIATPTNYDDVGNFFDTSAVEDAIEWTLKVNPDVLMVIKSTIPVGYTESVREKYGIRNIIFSPEFLRESKALYDNLHPSRIVVGCDDDQMEEGQMFADLLLEGAREEEKRANSLEQDIPILLTHLTESEAIKLFANTYLAVRVSYFNELDTYAQTKGLDTQMIIDGVCMDPRIGGHYNNPSFGYGGYCLPKDTKQLLANYKDVPQTMIEAVVHSNSVRKEFIANQIISRNPKTVGVYRLTMKSNSDNFRASAIQDVMKSIKAEGIPIIIYEPTLDDGSEFSRSEVVNDIERFKRESDIILANRLDCDVLGDVAEKVYTRDLFRRD

SEQ ID NO: 5485 - protein, 308 aa, Methanobrevibacter ruminantium
MLTSVQKEILQTLINLYQNSDGKSIKGEDIAEVMNRNPGTIRNQMQSLRSLSLVKGVPGPRGGYKPTIEAYHNLNISVSDSNAKVPVYKENKKMDDVSVAKIEFTSVPHPGECEAVIKVLGSIKDLHLGDVIRVGPTPVNNLGLIGEIVGRDDMDNILLLDISTIRSIPKNTVFDIASLDLIYLKPGDSIKDAAYLLSHNQIDGAPVITEGVAIGMVSLIDIVNALAEGKENEDVRDIMSKRLFFINKDTLIANAVYKMYKFGISRLIVVDDEHAPIGVVTRTDLIETITNFKNFPLLYNMEMDEEME

SEQ ID NO: 5486 - protein, 311 aa, Methanobrevibacter ruminantium
MKVNQISIKKDMKVSELMEEFKGSGVLGAGRVARASNLLVNMINDPDMDIFMSMAGPLVPGGLRYIVGDLIRNKRIKVLITSGANITHDLLESFGGRHYRDLGFNDEELNDAGIGRISDVYTQSEDFEVFESEIIKIFETISKKIDNDKDNGIISIQRLLKEVGSLIEDENSILRLAYENDVSIFAPGLIDSMFGLQLWMFTQDHKLVVDAVGDMHYLSDLVFESDKIGAIMLGGGLPKHYTLASNLLKGGIDSGLQITMDRPETGSLSGAPLEEAKSWSKAKHGSNLVTVVGDATALFPLIYAAALDKID

SEQ ID NO: 5487 - protein, 179 aa, Methanobrevibacter ruminantium
MFNPIIALSYISSGFFMKISDDEYDEKNNKILAIIFGIVCGAFTALASSMSTDAACIFIAILIGNILAQKVDGIHHVVTMLSFLIVLVFLGLPAFSRPSILVVMICVAGALIDEKGNDNEILYEKSKFLMYFFDYRFALKVVILALALFGLVDIWTFVYFLCFEIAYEIARVLFEKFIL

SEQ ID NO: 5488 - protein, 215 aa, Methanobrevibacter ruminantium
MKVKNNIILAMDLMDLASAESVCESINQYIDTIKIGYPLTLAEGLKTIGLFKENFGYKVICDYKVADIPATNEKIANLTFDAGADAIICHGFVGPDSVEACKASAEDHGKEVFLLTEMSHPGAIRFLQKDADDIARMGVEMGISNYVAPSTRPDRLSEIRDIVGKDSFIISPGVGTQGGDPKETLKYSNALIIGRSIYNAEDPETATKDIIDSIQ

SEQ ID NO: 5489 - protein, 256 aa, Methanobrevibacter ruminantium
MIFAAILAGGVGNRMGEVDKPKQFLTLGDKPILIQTVEKFYLNSRIDEVIVLCHKYWLNHTKDLIEDYIPNAENIVVVEGGELRNDTIMNAVKYIEDNHELSEDDIIITHDSVRPFVTHRIIMENIEKTQEVGACDTVIPATDTIVVCHDGNIISDIPNRNYMYQGQTPQSFKILKLKECFNKLSDEDKRSLSDAAKIFVLNGEEVAIVKGEVFNIKITYPYDLKVANTIIDDAKLNISDAETGEYKVNLYDFGEE

SEQ ID NO: 5490 - protein, 340 aa, Methanobrevibacter ruminantium
MINIVYRLVAPKLLEEVYTELNLDVGVIVRPKYLSICKADQRYYYGKRVPEIIESKLPMALIHEAVGTVVKDNTGKFNVGDNVVMIPNIPRARDNIISENYIPSSKFRSSGYDGFMEEYVSLTEDRLVKLPDDLNMEVASFIELISVATHSIKRFKQFSHQKKDVLGVWGDGSFGYITSLVLKVMFPESKVYVFGMHREKLHMFTFVDETFLVDEIPDNVSVDHAFECVGKASANNAINQIIDIINPEGTIALLGVSEFNVSIDTRTILEKGIRVFGTNRSAREDFVSVVNLLEENPNMIHYLESLITEIVEVNTLNDIKRAFESDKNLRFGKTVIKWEI

SEQ ID NO: 5491 - protein, 336 aa, Methanobrevibacter ruminantium
MHEYEISIIIPTYNSSKTIERTIHSILTQDFKNYEMVFVDDASNDDTVSCIQETLADKKVNYQLIVNKNNKGPAYCRNRGVFASRGKYIVFVDSDDLIQFNHISSLHNYVKSDNFDSAFTKGIKINNQDELIDFKVDKYDGLIHLARKNKGIVRAKDLINLELLMKIPFSFVLLIYDKEIILNNSLEFNEDYRYGEDTDFALRYLANCGNVRVIDKYTYFYYQEEDSISRQVSLDRFESVKLFESLDSYFKEDDLREKLVHSRIPRFIFGNMNYFFYNGYNSEDVFKKMDVLDLFNKLRQFKVFEKRDWKFYLKVRLFLLNHRLYYKLWLRFKNNL

SEQ ID NO: 5492 - protein, 70 aa, Methanobrevibacter ruminantium
MNDLKKLYVLLAILIVIYVGINFSYNGLDTINTLTHVNLDLGPSMDNANDANHIKIGSSSFTKLSKIFTW

SEQ ID NO: 5493 - protein, 335 aa, Methanobrevibacter ruminantium
MTKILVTGGAGFIGSNFIKYMLDKYPDYEIVNLDALTYCGNLENLEDIEDNPNYSFVKGNIMDEGLVDVVVSSVDYIVNFAAESHVDRSIEDPQIFIKSNIIGTQVLLDAAYKYQIKKFLQVSTDEVYGSLGPEGYFTETTPLQANSPYSASKAGADLMVRAYGETFDLPINITRCSNNYGPYQFPEKLIPLMISNALEDKELPIYGDGKNIRDWLHVYDHCSAIDLVLHKGKIGEVYNIGGHNEKQNIEIVKLILKELNKPESLIKFVKDRLGHDRRYAIDSSKITEELGWKPKYTFETGIVETIHWYLDNQDWMEKVKSGEYQEYYEKMYSKK

SEQ ID NO: 5494 - protein, 187 aa, Methanobrevibacter ruminantium
MGKFKIVKSEIEGVFTVEPTVFEDERGYFMETYNENDFKAEGIDLTFVQDNQSKSSKGVLRGLHFQYTQPQGKLVRVIKGEVFDVGVDLRKDSPTYGKWVGEILSEENKKQLFIPKGFAHGFLVLSDEAEFVYKCTDFYKGDDEGGIQWNDPEIGIKWPLGNLKEEDIILSEKDKLWKPMKETPTDF

SEQ ID NO: 5495 - protein, 290 aa, Methanobrevibacter ruminantium
MKGIVLAGGSGTRLYPITKAVSKQLLPLYDKPMIYYPISVLMLAGIKEILIISTPRDLPMYKELLGDGENLGISFSYEAQENPNGLAEAFIIGEKFIGDDNVALILGDNVFHGHRFSEILKRAMNLEEGAVIFGYYTQNPESFGVVEFDDEWNVLSVEEKPKNPKSNYIIPGLYFYDNDVIEIAKNVKPSFRGEKEITSVNDEYLKRGKLKVELLGRGMAWLDTGTHDGLLEAANFIETIQKRQSVYVACLEEIAFINGYIPKEKLLELAEPLKKTNYGQYLIKLAKMKK

SEQ ID NO: 5496 - protein, 493 aa, Methanobrevibacter ruminantium
MNRFWNDLILPLFYEFKPEVIVEIGCFKGENTKNILEYCYYTNSKLKVIDPNPDSSFDPISLKNKYGDKFEFLKELSLNGLNLIEDYDAVLIDGDHNWYTVYNELKLIEKRFDQNNFPLIIFHDVSWPYARRDLYYNPELIPEEFRHPYKNLAMFPDKNELGDIGLNPTFNNAVFENTPKNGVLTAIEDFLDETNLNLSFFCLNAFYGFGVLFPSQSCDEKTILQIFYDSDVIGLLEKTYLKLRFTQEHIIKNKNIEINNLKDMNNSLNKKNIDLTGINSNLEKELDKLNNTKTEIEKELDKLNNTNIDLKEKLIISTNNQKELEKLLDNLKDDKTYLENELKDLNNTKTEIEKELNKVTNDKTNLKIELNNINNTNIELEKIVDDLCNEKSSLKNKINDLEYANQRTLKTIENLNGDIYSKTYENDSLKEDNLLLTKTNKDFLEDIKNLNNLNYDLEQKILNLEEEKNSILSSKTWKFGAPFRKISNIFNKN

SEQ ID NO: 5497 - protein, 506 aa, Methanobrevibacter ruminantium
MTYKVSIIIPVYNAAEFIIRDTLKSIENQTMDFEDIEVILVNDCSTDNTAKVINEYAKEHENIVPINLKENNGQPGIPRNIGITYASADYLMFLDQDDTFKKNACETLYNKISTENVDMVCGNHNIVSNGRSNICFNFDWAEEDEIKINKIDENPNFLTMGVAAWSKILRREFVLDNNLKFTEGVGEDIFFSIRALLLAEGIILLKNFIVVDYLVRGESLSHQVNAEYLDEFCEFYLNFFNYCEKNIKNDNLYHPLFNGRLNHVLSMLFFADLYFDDLSWVLIKIHELFKKVAEKPFVFEDTSYRIFFDTLIKDEYPFENSINIYSAIKSNRERKFDKGVKYLEQEAKLYIDNGNGFNEKDSIIANYKIYEFNEVEFNLENFKNIKRIRFDPITWNFINCVIHEIKTNNGDLLYEAINSINRRELYGLNKEEQSSNRNSKENIRYKSSDDSSAEGIADIFLTTDSQYLLYGDFNNLKSIKINFEVNLIDNNEVSKIVENLIENYDH

SEQ ID NO: 5498 - protein, 567 aa, Methanobrevibacter ruminantium
MSIKNKFLSLFNSSSNNSDFENLNNYYKKVLEDIENEDISGYDRNLKYYNDLKDCELFSSEYYITNQGLELSEEYALAHYLNEGYKQSRNPSPEFNNDKYLRLYPDVRLASLNPLAHYVLYGEKEGRRLPLSEYEELENEIVSVKNLIYQNRVTDNLVLLRDKVSKGKKVNVVFVLPAMMFVYKDLYNYFDNDDMFNVQIVLVPHRLGNSQKITDVAKDKHYQIFSYLKEKQYNVIDGYDFEKNEGIDLVSTCNPDIIFYVLPYMRIFPKTMKISNLPSNILYAYIPYGEFVEDNLDDLFFNFGWNEIAWKIFCSTEEYLINSTEKSIVGSSNVVLAGSARMDSLINFEESDEDYKWIYSKEENKKRIIWAPHHTLARPGMDDSLSYSTFDENFEFFYNYAKDHPDIEWVIRPHPLLKEVLSNINTNMRVQGIADENFADDYFFKWESLPNARFHEEIDYFDLFATADAMITDCISFKAEYLFANKPGLILNKTGVELDGYQGEITDAWYNCDGSDFEKIEEFIEDVVVGGNDYLKEKREEIFNKNFNVNLGSASKVIFDYIKNELT

SEQ ID NO: 5499 - protein, 1012 aa, Methanobrevibacter ruminantium
MKKNNFNKKITFVANYFWTSIKEGSKSNSYFNYDNYLKKYPDVKESGMNPFKHYLLHGIDEERSTNFDENINSYSLVENSDLFDYEYYCEKNNLKFDSYSKALMHYLEKGYKKGYNPSIKFNAEEYYEVRPDVKRADVNPLVHYLKYGKIEVTSMTENLNLKEYQLVKNSNLFDYNYYMEKNHLDLRNETEAIYHYLEIGYKKGYNPSNKFNGEIYFKKNPDIEESGWNPLVHYLKYGQKEERTDKCDKNLKEYSLVKESGLFDYQFYKDKYDLDLNSYKRGLIHYLEFGYKRGYKPSRNFDGEEYLKRYPEVKKAGFNPLVHYLKYGVNEERIGLRRISFKNFNKNYDVEAILENIDNDVTILLNVEDSNNLKECIENIKSTTKDYKIILIHENLDDEDLEYIKSNNDIELLRRSPHESFINALNNILDNAKNDIIFLKNNIRTFEKWIFKLTVAAYSDDRIGFVSPISNYSTVSLINIEEDEKSSEFISNISKRDYEESPLPNDSCVFIKKDVFKELKFDESSNEENWFATFIDRGLEKGWKSILDDSTYVYYQFNEVEPQQADEYDYSTPYVLENRPSVKFINSDAFNNSFQNIHEYADDNLEENIQEKTRKNILFAMHYGGGVEFTVKDIVNAIKNDYECYVLRAFKNKMKLYKVFNDYFISIKEFNIKYPWTPKMIHSDEYKQIYFYILINYNIDILEIDHLLLHTFDLQELAKKLDIPIILTLHDFYYICPSYFLLDENNKYCGGYCGDQPRNCSTRVTWIDLPANIVEWKNQWQEYMKELFGMCDYILTATDFTKDMFLEHYDSLKSDDITIIEHGRDLIRYDNNYTVPNIYQPIKILIPGVIGPHKGLDFIKELKGFDDDNRLEYHFIGQVDDELKSMGIYHGPYEREDFAKWVFKIKPSFIGIFSVCAETYSHTLTESICSGVPVLASNLGALKTRIESQGGGWLVNIDDAEETYEQILDISSKKEEYKFVTENLKDIRISSSEEMGSKYKEIYDKLTKKEDK

SEQ ID NO: 5500 - protein, 266 aa, Methanobrevibacter ruminantium
MEFIKYKSQFEKMIDNKIIGMPELIDSNISFKGKNNILCCNNIKLENIDIDFNGNNSVIFLGSNLGVNSHLTIFNNSTLFLGKNNTCGSSISISVAENQNLIIGDNCIVESDVKIRTSDNYPIYNYENSRINHSNSVFIGDNVLLGESSFISRGVKIGSGSIISPCSFLPPLFKAFSNSYVLGNPGRILKEDVYFVNDSINDYTIEEIKNSSINENESGLFDFVEKETLSLDKIDNILKKFNSEDSLDFIQKLFLQNKHKNRFFIE

SEQ ID NO: 5501 - protein, 441 aa, Methanobrevibacter ruminantium
MKKPKTKAQKESREKKPNNLKSDCMKKILYVLHSGVTGGTFLTNKDLMKNVEKEFDVYLLSAENKFLKLFSFSNNKLKLIRKYHRNYGINVETEETETNNISWSAKDFHNSWLSNIYFEILVNYNIDIVHIRHLINHSFDLPQVAEKLNIPIVLSLHDFYFLCPFYTLLDENYNYCAGECSHNKKNCYCPMDSLSDINSKEFISEWRVNVLKMFNYINVFVTTSFFVKDLFLSIYSNEDIINNNNFKVIEHGRDFPKLKKQMFEIPSSNKPIKILCPANHLNIMKGSQLIKRIKEEDNKNLIEFHFLGNCHDGIEEYGFSHGTFERDEFHKKVEEIKPSFVGIFSIWPETFCHTITEAWSCGIPVIGTNIGVIQDRILKNKGGWIVDRNNPKKAYEYMAEIFENKEEYLEIANNIKTMDLKDTKMMSIEYIQIYNNLLEIK

SEQ ID NO: 5502 - protein, 668 aa, Methanobrevibacter ruminantium
MTKVSVIIPIYNGEKYLKECLDSVCCQSLKDIQIICVNDGSTDKTLSILNGFASKDKRIKIISTENRGQGSARNTALKEAQGEYISFVDADDWISENALELLYFHAKSKDLDMLFFQMINYMDNSKNYVETELYNHLCFERNAIDEDTIFNFNDIKEFLFKIPVCPVSKLYKKEFLDSNDLYFPEGMFFEDNAFFYNSLFKSNCLGFLKKHLYYRRRHADSVTQTFDKRKFDIVKATNKVLDVFLENDQYLIFKKELINHTFSMLLEWFNKSPLELKDEFYRLIKRDFRGFNNLKEDFKNNLKEEYLLIFDISDKNKYYLDFLSEYKLSSADYDIFDKERYFHLNSQEYLEYKSNKSNNYKISVVIPIYNNETFIHRTLMSIENQSFGLENIEVIMVNDNSKDNTELVINEYSSKYENFKAIHIKEGTGSPGTPRNIGLYESTSDYVIFLDHDDYFEIDALEKLYNAINEEDCDFVYGTYASVDEDLPTKIIYPNELHGYFKNIYGNPRSIAFPPPSIWTKLFKRSFLIENRIIFPTILGEDAIFISKALFSADGIDYLWDDLICYHTLNKKSFTKNVSYDYLVQGFVSEEYLYNIYNDFESQSYELKENSTIPSEKSSENIEKMNLYKIRSEGILDFYLNQFYRSDLNDEDIYRIFPILSDFVSTRI

SEQ ID NO: 5503 - protein, 256 aa, Methanobrevibacter ruminantium
MALIEKNELFLLEEIVKKNFAAKYKDSILGIFWSILKPLLIMILLTIIFSNLFGGSIENYPVYFLSGKIIFDFFNSATSVSMMSLKGNINILKRTAAPKHIFTLAGVVSEFLNFLITLIILIGVMIVTRSPFYILESMIAIIPIMSLIIMITGISLILAVLCVYFSDIQHLWGVITLMLMYASAIFYPMNIIPEPFHGIMILNPIFWVIGQFRILVLWGTIPSRMNMLNLVLLSVIILVFGIIVFKKFEKKITLKF

SEQ ID NO: 5504 - protein, 488 aa, Methanobrevibacter ruminantium
MNQKRDELNSKQNINLDSENEISSSEINLKKRDPQNKSDLIAQQRMKAKRELIERYNMSESEAESTLKSIENKVMQKKNKKITNEKEIEINSNKVRMDDKNCSLENSAGVSENKDKNDEAIKIQSQNSQIEGESEEIIPEHVLERQNPNKIDNSDYEINSVSDTLPVIEEGESKPIQNAEDEIVKKELVDSVSDVVPVVGEKEENNEPIIKKDDSSDVDDVLSSIIPEYHQKSSIEVNNVSLSFNIENDKIDNLKEYIIRTLKRTKEKKIKFHALNNITFKIYKGEKVGIIGYNGAGKSTLLNVITGIYEPDEGNVKTYGKISPLLSLGAGFDYNYSGRENIYLNGAVLGYDKKFLESKFDEIVEFSELQDFIDLPIKNYSSGMLAKLGFSIATIVEPDILIIDEVLGVGDVNFQKKSSNKIKSLMDGGTTVLLVSHSIVQIREICDKAIWIDKGELREFGEVNEVCDHYLKDAQNATKNQVKDIRFN

SEQ ID NO: 5505 - protein, 817 aa, Methanobrevibacter ruminantium
MNYKISIIIPVYNVENYIEKSLNSIISQSIGIENLEVILVDDNSTDNSANIIKKYVSKYDNFKGIYCDIGSGFCGRPRNIGLSYATSEYIMYLDSDDWLEETACEVLYNTIINENADIVCGSQTRLDNEGNRKFYYHLWVTTLTDPNEDYNTRMKTTQEIIDDPNFKLVVTDLDKNPNILGHANVWGKIFKKDLITENELSFPEDIVAQDSVFLLNSFFVAEKIVFINDIIVHYNNLRCDDDDKSASYVKTTKNLFGRIKAYDLMDNISKKFSKEEFFYRYLLVGKLNYWFNSFLMDSNISTYEIKLLFKKYSHLFSNCYKFNTNLRKDIKNIFKEIDEGNYDIAASTVSKLQSKSFSASENKIKVSVIIPIYNNEKFLSKCLDSVINQTLNEIEIICIDDGSSDNSIEILNQYVLKDSRLKIISQENLGAATARNNGLKIAKGEYIAFLDSDDWLELNAFEKLYENITTNNSDLVLFNSIEHKENANLKERIHIKNDSIPDYNYYTFNYNYKKDLVMNGYLDIWSKMYRTSFLKENNIQFSNHQIFNDIQFHIKTMLNAKKISYCPEFLYNYLRINHPSLQNNLSLGNESFILLDIIDEIEDYLIDNEFYNELKSNFIRFKLTELESTLEKLENPYRNEFFKLIKNNFKKMQLTEYQRKELPPENYQFFNDVLTYDSFFEYALKNSEKERQKLSNALADSEKDRQKLSNDLENSGKERQKLSDALVDSEKEREKLSDALESSEKEREKLSDALESSEIERQKLSNALESSEKERQKLSNDLKNSEKEQELIKKEFTSSNSWKVTEPLRKIRRTIKK

SEQ ID NO: 5506 - protein, 532 aa, Methanobrevibacter ruminantium
MDKNEIFTLWIPDNDDNNLSQLAHLSLKSFLLCDYDVILYTYDHIGNVPNGVCIRDANEILDKSKIFRYKGGFKTYSGFANLFRYKRLYEYGGTWLDLDLLLIKRLSDEDIIIGSQTQEDIYSNPNNALFRFPPKDPLIKTILDYSEKRGSDINHAETGTLLLKKLLASEFPEYNQYLKHFNYSNIVNWNDVGDYLESPEIFLKCLNTNEIYGFHLFNTFFKKFVEFPKDSFFTTLKDIILNSSTSEEYAFNLMKYNITTQKQYIGINEWDLSYLNIFKDAFSKNEFKYTILIDSQNLKKMEIYNIIRAIFSSYGLESEKDIQIIICGKSDIGHDKIKFKDNVIFLASDFQDMKYYLNDYIFGEHIFPINKPVIFKEEFFKNNNFTSDVEHHVLNNSNSILNVLNRESYKLCLLANIDVFNLDMDVLKTLNMRIKEVDNSLIYDYSFRDDDVLKLMKLVDQCDSKSFLNVKSELSNLNIKFLSQKTSYHYFSAYKNILNSNSYDEFILKEHNDKLQCLNAFYLNRINPRYDY

SEQ ID NO: 5507 - protein, 332 aa, Methanobrevibacter ruminantium
MLDADEFIISDNGQNPREIIKKINENYYYLIKWITYVPTNNDDYNIKFIPKRITHVRDESLEQYYKVIVPKKVVNDFNVRVEMGNHNLKFDNFNRNELVKKDLNLKIAHFPLRSIEQCISKVSIGWPNIIAINLYNLSWGFHWKMLFDKIKEENDISLDDLEFFAKNYALVSTSDDILIKNQPINLDFCDKIEIRYDFEYNYLRNILENYAYFAEEIVSFKRKLKSVPILDDRFILKLASDYDVIEKSGLFDVNWYCKRYSPPRNIHPIIHYLLTYRENMNDPAGFFSTEYYFKTHVDVANSGMNPFVHYIKYGKKENRKIASSKSENFGVQ

SEQ ID NO: 5508 - protein, 407 aa, Methanobrevibacter ruminantium
MKITVAGVGYVGLSIAILLAQKHDVTAITTTESKAEKLNQFISPIRDDEIERFFKETRDGKRKLNLHTTTDKESAYKNADLVIIAAPTNYDDVNHFFDTSAVEDAIEWTLKVNPDVLMVIKSTIPVGYSESVREKYGVKNIIFSPEFLRESKALYDMLHPSRIIVGCDDDQKEDAQMFVDLLLEGVRLEEKRSDSPKQDIPILIAPFTEVEASKLFQNTYLALRVSYFNELDTFAQTKGLNTNIIIDCVCMDPRIGGHYNNPSFGYGGYCLPKDTKQLLANCKDVPQALIEAIVNSNAVRKEFIADQIISNNPKTVGIYRLIMKSNSDNFRASAIQDVIKMIKAEGIKIIIYEPILDDGSEFLKSEVVNDLDIFKRESDIILANRFDQDILGDVADKVYTRDIFGRD

SEQ ID NO: 5509 - protein, 893 aa, Methanobrevibacter ruminantium
MEIRYKNLLKVFTIFLVLLISCGFASAVSDLDEGNSANIVDNGDLSLSDNMMSESADNCKNLETIEESHTFSEKNTVKDVSYGLSTPIDGNTFEDIQTAIDNAADGDIIELNGTYFGNGSDIKITKDLTISGNLETILDAKNKSGIFYVNSNNVTLQNLKFYNSIVPEYGSAVHFLSNGSVINCTFINNTAGGVYGTIDYFWSTGGVVYLAKGNGSVINCTFINNTANADGGAIYCGVDGGSVINCTFINNTAKELGGAIYIGGGHDGGAHYSNVYDCYVDNCVFINNTAGEGAGIYYGGGGLIFNCTFINNTARFGDSILVNNMYYPNTVSDMKTLTIKECDFKSNKEGWGYVVVNYKAYKNTICGLCEIIDSNFSNEQAEDYINIYNQGNIYLSGNKISSNYATISNDLIAYGNNANITSQTSLVILDNTTKSVEKYSPFDVYAVLVDDQGNYIRDENISLFIGSKNVTGVFDNVNLFKYHLNDLSSLNYRTLVSGNYDGAKDLVVKTGVLQLDVEVDIDLDYEDDNVIIKLKDSEGNPISGESVSLLIDNNTSSVKTDSNGEAKVPVNEISMVKAIFTDGFGVNVSSYLVVKAVEKVKLVPTFANAKISLDVEDNCSAVIVTLKDLSGNPISSAKLDALVNGAGKTLITNASGQAKIDIEGNATVEVTYIDAENANATVSSSLTVIKNVDSVPVIPNRTATNIICKDMNTTAVAKPDGRIGKYFEVTLVDVNGKALANKSVNIGFNGAVYNLTTNETGGAKLQINLGYEGKYTFAIAFLGDDNYTGSFKVALISVSKHSPKLSAPAKTYKANAKTKTITATFKTSNGNAISGKKISFNINGKTYSGTTNSKGVASVKISLNKKGTYSCTAKYAGDGMYKATSTKFNVKIV

SEQ ID NO: 5510 - protein, 757 aa, Methanobrevibacter ruminantium
MKIRYKNLLKVFTIFLVLLISCGFASAVSDLDEGNSANIVDNGDLSLSDNMMSDSANNCKNLETIEESHTFSEKSTVKDVSYGLSTPIDGNTFEDIQIAIDDAQDGDTIQLNGTYLGNGSPIIFSKNLTIGGSGETILDANGLSGIINSSSEKIVLKDLTFVNGSGFTVDLRENNGDNLKYCSIINCSFEKCYGDKNSAVICLNGSGIILDCDFHYTNCTINIMGSEDVSILNSSFNYTGGYAIHSNSSTIVKACDFYFNSFFETYYENTNKVYNGNIVDLCKNSSISDCMFKGTYYETIIDSLVDSNTYQFSTLHVCDEVDVINCTFIRSITEFSGSAIYHFGNGSIINCTFINNSAGGSHGTPSYLYTQDGVVYIGSDDCLVLNCTFINCHSNTFGGALYINARNCYVINSTFIKNSAYEGGAIYLAQGDCYVINPVFSNNKANHSLYNDINDLNAVSYENDTSDDNQTEKIINPSIELDYLDDNLIIIFKDIEGKAISGESVSLIINNKTISVITDSNGEAKVPLNETSMVKAFYVDANGLNVSSSMMIKIVEKTNYIPIKRNSSFIDCKNMTTSAITNSKIRDGEYFVVSLKDANGKPLSNKPIQIGFNGKAYDRTTNENGSARLQINLAYVGTYTFAVCFLGDDYYNGSFVVAKIDVNAQKASLNAPSKTYKASTKTKALTATLKDAKGRLVSGKSISFTINGKSYVAKTNTNGVATVKVSLSKKGTYNFTAKLDNDKTFKTTASSGKLVIK

SEQ ID NO: 5511 - protein, 1285 aa, Methanobrevibacter ruminantium
MAAYNSGAYIQETLDSLINQSLDFKENIQVIIVNDASSDNTESVCQEYIKNYPNNIILINNRINCGPAHTRNVGLHYAEGEIINFLDSDDYISKKTFERVDSFFEDFVHVDMASIPIKFVGSKRGDHPLNYKYKGTGVINLLNNPDAIQLSSASAFFRSDILKASLFNHSRSRYDGSVSVVYNDNSPVSDSIPMIFNENLSVSEDALLINQMLLRNPLLGILSNCTYFYRKKATDNTSLISDSANHRSYFTSRVNNYMIRLINDSLDLYGKVPEFIQYVVMYDLQWIMEIRQVDHLLDLEDLTHLYDKLISILFYIGDKVIFNQRSIPSILKSHILLLKYFGWGYLDDKTFNFKQIDKKYYDEHGNLIPYIEKDQLSFIIQKLELNKIYLDIVDIKNIKSKINLNNNNNGTPDDDKKDDGKNSHDFYLSSQDDEDRQELYLSGMITSFFNSDFDIYAIVSEKDKSSSHILEKEIKVKKISYPQRDNLSLNFNYGYNQCFEVRIPLSEKTSRISFRMGFKSLNEVCNSLGIETLSEDSFDYINHHDLAFSGDLLIDYNHTSRLSQVSNYKISKDYLILDNGNHMIVRKRSLLTTIKYELVTFASILGEREEGWRTGILLRALYFILYPFYRNKRIWIFMDLPYTADDNGLQLFKSVRNMDKLKLEDYNKLLDLDESLLSRERHPYKYELFEGKDIGLVGLIKNVFSSIKNVFSRDSDDDENGKVKFIKGGSLGLDDKYDELEDNGDYSDYLNEHFGFADVNEDYLDNQDIQVEGSSFEDDIEHSSKFRRNVYGKAGFVKSFDAKVDAKYNDSLNSLENRFDKRVSNIKTRTRNADVREKVGLSRDRDDNFSKGFSPIDFIYGFDLSKFLSENSFVYLVNYILYRISKLLLRPRKIKRIDNRKIKKYFTLEQSTSHFNNVRHMENQYIASSNRDKLRKLLAREKQSNEYNALKKIGPVLAYKSLKHRIYALYAEVIVSSHPDNNLIYPFYGNFPHVAGLVKAKTVFLQHGVTKDDVSFWLNRFDKNLDMIVTVSDLERDSFFPRFDGDGEYISSYYGYDKETVQVLGFPRFDYLESLEDKKEIVIMPTWRRQLHNLKKEEFVNTNFFRTFNALINDKVLLDYLDSHGYKLVFKPHPNLNKYIGLFDKDSRVEFDLNDLNFAENSKDGTAKYGSRRYADIFNHSSLIVTDFSSVSFDFAYLKKPIIYYHYDNDYHFDSENGYFNYESMGFGPVIKSHKELVMSIIGSIESGCTMDELYKGRVDKFFKYHDRDNSRRVYKAILEMDKYY

SEQ ID NO: 5512 - protein, 338 aa, Methanobrevibacter ruminantium
MRYIADELKGRKTSDGKPYEFEFIPKDEFSLSNMKKLATSKYIFLTDNFFALAFMRFNKKTKLIQLWHGTGIFKKFGYDLLEDEQKKTMLKFSNKITNLMVSSHNVIDIYARNFAIDKSKVLPLGIPRNDYYSPEHLDEDYVRQLRGEFEQRYPNLRGKKIVLYAPTFREDPKYNAVFNYFDIEKFIDELGDDYILCIKLHPNYNKFADSANRIDLDELTDTYNIVNFTEYKDEQKLFLISNILITDYSSVMVEYTLLNRPIILFAYDLDNYLENERGFYFDYRKEVPGRIVKDTDELVRVIREKDFNLSNLKEFAEFQFDYFDAYSSKRILDYVLEE

SEQ ID NO: 5513 - protein, 94 aa, Methanobrevibacter ruminantium
MAGTTNLVDAMLVLALGFLIFAVIGWNLQSVIFSDMDPQERQATMESINQITNVTQGEQLNSTPDTSNQSGEGYVEQGKVYKDSKTGNLIMVET

SEQ ID NO: 5514 - protein, 243 aa, Methanobrevibacter ruminantium
MELIFSVFAVISLAAILLLGIELGLLSKFFNLSLKKHLILVLAYSIIIFAVIVILSPSYEAVLNSTFYSFYYYIIMGFVCLALGLLTLFYWSKMEWYPPALKCLLYFDFVPISLSLMLISTALMAPSFAFKVQNFSLNLTMVNSGLILVVLMAILMVIFYLFSDFVEDYRVTHYAIIIGSLLLIFALAYFVLGFIIPNMAPVFANPSTELTLMPIESIVVMVVLIALLLGLGALFRKRTNRLE

SEQ ID NO: 5515 - protein, 213 aa, Methanobrevibacter ruminantium
MTIPGGDFLTTGLNLISQSLLIPVVIILLVFVVVVVISLGGLIYEYTSRTKVSVDDVSNLILEISDSGSVDSMKSAIANSPIPKLQKDILLKIASTGNMSPNTREAFARKLIENEEGLTDKSLEITDIITRIGPTLGLMGTLIPLGTGLAALGSGDVNTLSESLIVAFDTTVVGIGSGALAYVISKLRNRWYEEYLSNLDVLSDAVLDFMAKH

SEQ ID NO: 5516 - protein, 293 aa, Methanobrevibacter ruminantium
MNQKLSNYFNMGLSLYLLLDLILITFTLVFKIENNLYYIIIAIDTILCVILIYEFYNRFKTAENKIHFSIRNSTEILAGIPIDLIFLPFAPNLTVFLTIFNLLKFLKIIGLFLEFFETIDVFLKKTHLDEILGLAILVILVSTLGIYLFDPSINSIFDSLWFVLSTITTVGYGDVLPNSYIGKVIGILILIFGVLIFSAITGAMTSYFARKVFATKDFNITENDDNIRLLKEDLSFNKKNLNNANEKIDKINNDVEKLKRELNEMKEELRESRQLNKELKEEIVILNENLKNK

SEQ ID NO: 5517 - protein, 279 aa, Methanobrevibacter ruminantium
MQRSLFDKVKTSLWMLPSFFGLVNGLGFIYLGRKNSNIKWTIEGIVYEIPWLIAILNIFNLSVAITAFSLGSFMVLISIVRSVMVNYEYQRLLDEEYVVRPSVESGSHGLDKQIKNGQFNEKEASPKEEKVKYNPYDLSGIDKNYDGRIKFDKYKAEIKEMEKEFNEKNDNVKELVEKRFSQSGITYDRFMFIIKDSEDLFNSQAANALDMIDLAPEYTETIDAEIRKKMETLRTIIEKNDELRDELIINMTTETGSEMEIKNLFEDMGHLTSSIKHYE

SEQ ID NO: 5518 - protein, 119 aa, Methanobrevibacter ruminantium
MTMKTGSELKFNDDYEYMTFDLDQEFLLGELGQDEIRDKIITAQEILDNHLANPYEAGQEIEIENPFEKPILRKYIKVNEVTEDMIDIIYYQVRNHYEVYKFVTLTDPAHRGRILIPKD

SEQ ID NO: 5519 - protein, 157 aa, Methanobrevibacter ruminantium
MQFDELMEKGDQARKDRNYEEALDWYQKALKEDKRRSEAWNMKASTLGLLGRPDEAIEAFDKSLELDFNNEQTWFLKGMTLFAVDRFNEADSCFDKAVNSDPHNPVYWKYKGMVLSQLGHNHDALECLDNALELNPDDEAILVFRHTVVEAIEKEDN

SEQ ID NO: 5520 - protein, 651 aa, Methanobrevibacter ruminantium
MKEFKLKSPYKPLGDQPQAIESLSNGIKEGFHEQTLLGVTGSGKTYTMANIIQNVQKPTLIISHNKTLAAQLYEEFKVFFPDNAVEYFVSYYDYYQPEAYVPRTDTFIDKEASINEDIDIMRHSATQSLLSRDDVIVVSSVSCIYGIGSPEDYGEFAFSINVGDIYDRGDILRKLIFMQYERNDIAFERGQFRVRGDVIEINPVHGTPPIRIELFGDEIDAISLINPVTGMREESINRYVIFPAKHFVVGADRMDQALKDIEAELQSRLNELNLEGKYLEAQRLEQRTRFDLEMLREMGYCPGIENYSMHLSGRNWGDMPYSLLKYFPDDYLTIIDESHVTVPQIRGMYNGDRARKETLVNYGFRLPSAKENRPLRFDEFEASQNQVLYVSATPGPYELSRSKNVVEQIIRPTGLVDPKITIRPVKGQVEDLLGEVRRKVEHDQRILVTTLTKRMAEDLTDYYAKIGIKVRYLHSEIDTLERVEIIDDLRRGEFDVLVGVNLLREGLDLPEVGLVAILDADKEGFLRSETSLIQTIGRAARNVDGEVLMYVDEMTDSVRNAVDITNKRRKLQMAYNEKYNITPKTTQRTLKEKKLADRAPSRDDLRGMPKDELKLLIKDLEAEMREAANNLEFEKAASLRDQIVALKSIKK

SEQ ID NO: 5521 - protein, 638 aa, Methanobrevibacter ruminantium
MKFKNSHILLVSLISIFLLLSISAASAADSDIAADDSSVDIVEIEDINIKESHYLCDDASTGSEDLSGDENTSASGTDDATGGNDTDATGGDDTGNATSVNGTENVTDSNGTNATNGTNATNNTKYDGPVTNATIIPVSTSADYQYGNFTFKVVDNATGEPLANQKISVSGVYFFTFNNGSSISTTKVFTTNSNGLLVIANKNLNKNLDTLGMVYNFTALDVGKYDLTFSGNDSLKIVVNNTLPITVNKVNAEIKASNFKDEVGTSKKYTFKLVNKNTGTVIKLASLKFQIKLNSSGYTTYNSTTNLSGQVGYNLNLLAGTYPVRIVNNDSNLKASTVSRNVTLTKKVGVLSASNRTILYNSAPTAIIKLTDKKTGKAVAGAVLKVRVYTTSKKYSDLAFYTDNKGQVSFKAALSLGKHKMIISTLDNNYTASSITRYVTLKKTTGKISAPKISATYKSGKLYTITLKNAKNGNAMYGSTLNIRIFVTSKSYYKYTGMTDGNGKVNINTSSLKPGTYKVSVSSGDSGFTAKAATGQIKITKIPLKLSPTAYKEKYNSGKTFKIKVTNKNTNKIISGIKVTVKVYTSAKKYKTYTVKTTNKGIAYLKVTQKPGTYKTVVSLSNAYYSASAVTSKITVTK

SEQ ID NO: 5522 - protein, 230 aa, Methanobrevibacter ruminantium
MYSETKIAIPIFQKKKEDVISVAQDCIIKGADILELRIDGMENPNPKLVREIIEEINFPIIATNRTTREGGFFKGTDKDRIAILRECADVADFVDVELQTNRKLIESITETGVKTIISYHNFKQTPDLDFLIDIVNQEKELGDIAKIAVMPNNLEDTLTVLAILSHFDDTVAISMGELGSYTRVIASKFNAPFTFAVANDTTAPGQIDIDTMRVLLNSDLINTDEFENNE

SEQ ID NO: 5523 - protein, 241 aa, Methanobrevibacter ruminantium
MKVVAIGADISNNDVSVSKSLVENIEKDIPKLIDLGAKRAALTNVTGDDVVISAFCEDDLLETVNRGIADILRANAESLGDLAGVSDDPSKAGEGLSYAEASLNDDGYQDAIIMAFDTYGGEGFVKDVANSAIEAASGMKSVIDVSDRIGSRTDIPGVGYVSENDTDDPVVVVSVKDLEQIAVVAGAMIGAALGCKNTYLVKRHTPCNVLPGSVLVSVTAFMNGNMIDLSIPFENKTRILG

SEQ ID NO: 5524 - protein, 289 aa, Methanobrevibacter ruminantium
MIILDENVKCLVQGITGKQGSFHTEQMLKYNTKIVAGVTPGKGGQEILGVPVFDSIEEAKENTDVNASIIFVPAPFAKDAAFESIDHLDLVIIITRATFPIHDTMEIMAYAKAKGVTVIGPNTPGVISPKVGKLGIMPTHIFSEGTVGVISRSGTLTYEIASQLSRAEIGQSTCVGIGGDPVIGTPYIEVLQMFEDDPETTEIVLIGEIGGSAEEDAAAYIKENITKPVVAYIAGISAPPGKRMGHAGAIIAGNSGTAKSKMEALESAGVKVARKPSEIVEYIKEIRGE

SEQ ID NO: 5525 - protein, 400 aa, Methanobrevibacter ruminantium
MDKEEIINKLMAGEMKLYQIDKFTENATEALDIRREFIERHSNCELNQIANYTLDMEKAFSKNIENPIGTVQVPIGVVGPLKINGEHADDEFFVPLATSEGALLASVNRGCSAITASGGVNARVIGDKMTRAPVIKTDSVVEAVKVKSWFETKFDELKSIAESTTSHGKLVKIDPIIIVGNYVYPRFVYSTGDSMGMNMVTIATEKVLSKLYDDLGVHAIALSGNLCVDKKPAAINLVEGRGKTVVADILIPEEIVKSKLKTTAKAMEEVNIAKNLIGSAAAGSMAFNAHFANMIGAIFLATGQDEAHVVEGSLGITTAEDRDGDLYFAVSMPDLPIATIGGGTRLETASEGLSIIDCLGSGKVNKFAEIVISTVLAGELSLVGALAAGHLAKAHQELGR

SEQ ID NO: 5526 - protein, 134 aa, Methanobrevibacter ruminantium
MSDKEYIDFKKEFKDFAQDLENSKPIFDDEDLSFDDFDNLIGNIGENNLSDDSIDRYGSINDDLDKLDSLFGSDCPEITLETENMLMNLSIKKDYSKIKDFNLRKKEFFKDLKDFIDEFESTEESDELMKFYDD

SEQ ID NO: 5527 - protein, 51 aa, Methanobrevibacter ruminantium
MCSSGGPMADLSMKKLKTKKYKCLDCGNEFKGLGRKVICPSCQSDNVELRE

SEQ ID NO: 5528 - protein, 134 aa, Methanobrevibacter ruminantium
MVGIAKAGEDKMLFIGTPDNDEIVQYLEKDDLIAVSSFNLGKKYEKGIRSLIYLTRDIESPIIVLPKNHPASKRLKMVLSVGENVRLDCGIIPGTHPEQDILCSCDSLSGLNIVKSADGVIIEGNVPDYKIEPF

SEQ ID NO: 5529 - protein, 237 aa, Methanobrevibacter ruminantium
MLLHEQAFQLIGESIVVLVVLIIIILIIALILGIILLRRNKLVFPSLIIFVVNVFYSPLKSLANFLRLDDALVDHIGIEVRNKVNKPKFDQIPPEEKIIVLPHCLRSRDCEASLKESGIKCTFCGKCAIGTIKSKAEPMGYKVFIVPGSSFVKKIIEQNKFKSVVGVACHVDLNQTMMALSDFYPQGVLLSTSGCFETRVDVSKVLSTIGYYEYKEKNKSIDDEKDDSEDIGRIKPS

SEQ ID NO: 5530 - protein, 129 aa, Methanobrevibacter ruminantium
MEENEISPFFTIKKIREGDSIQLDQKYIKVRSNTDKVIAIHYKAPIERTIELEMFFEDYNPIERLNYNIGDTGWVGANFRGLIDGKDKSLPVDYDYKILLLEEYKCLSKVELKHVKRSSKFRPNYTIAK

SEQ ID NO: 5531 - protein, 223 aa, Methanobrevibacter ruminantium
MNSKKIAIVLGIILLSFAIVGSASAFNLFGGPTTDFDNKFMSGTFTGDVSRNNISTNDSLSDWVDSYEDKERNITYNMSCIKGGSFLTDLYELQGMAAPEVRNFNGEDWKVYYSQAVPTTDENKTANESSVINVYICEADVDNVTYMINIIAYDNESIDCDGSLYCGFFKDDIQPLLESITLKDAKKAPQIYDLLNMTKDDFKQLQDYIEQVKTGNIPETAEG

SEQ ID NO: 5532 - protein, 172 aa, Methanobrevibacter ruminantium
MKVTVFHANECDKKKCTAFKMEKQGKCRIVYKIHQIPRGAVVLNPFSEKAVSFEDRGLVEDKGVVGLDCSWNKVSKSASFFSLSKYHRSLPFLIAANPVNFGKPCILSTNEAIAATFYITGFKEEANHIMDGFKWGHSFIELNYDLLEAYSSVKTSAEVVEIQNEFLAAHEK

SEQ ID NO: 5533 - protein, 53 aa, Methanobrevibacter ruminantium
MEDVEMARFEEAENRMFNVKICLKCNARNPAGATTCRKCGYKGLRFKAKEPRG

SEQ ID NO: 5534 - protein, 62 aa, Methanobrevibacter ruminantium
MLFLLFNYVFLYAILIIANLSFSIDLSTNSFSIYNHYLIFFNIPLFLLKKITLLKVFLNILK

SEQ ID NO: 5535 - protein, 249 aa, Methanobrevibacter ruminantium
MENVEQHLKEILKTRKIHLTLIDPDEQSPDEAVNIAKEAIAGGSDGIMVGGSTVDTAALDGTCKALSENIDNPIILFPGNINGASKYADAIFFMSYLNSNNPYWIIGAQALAAPAVNKTGIEKIPMGYVVAEPGGTVGWVGDAKLIPRNKPKIPAIYAMAAENLGMRFFYIEAGSGADQPIPPEMVAYTKRATSDIVLVVGGGIRDGIAAYTAAKAGADIVVTGTVVEETSDVKGKIQEIVAGVRKASE

SEQ ID NO: 5536 - protein, 361 aa, Methanobrevibacter ruminantium
MLNSLYTEAINKKGQLKEPLEELNESKIDLESKWNDTPIIPSKSNHIIAAGDGSYNKKKYLNFNFYAVAAESLIYNPTKEENKLSSIESVELDIMPHQSFLEDRLRNMMSIFEIKTAIKTFREYEIDYYLDDGSILGDLIRPIPLETISFEKKQEIIDSAYLKIKKGYENMDSDISSLNYKEEFKEFFDDEEIDEHDLIRLLENLENLIALKYLLENRKKIIAISKTSSSNELFYANIPDMAILDRFTRKEGFSKAYYRKVSYKVKHDFPIENEFFRNLGFTTVFARLKDYKNIIKIEFPYYIDDDEEIKNILSILKDNSTEGYPYLLKKAHKDVVISNQNMTSLSNVIGFLDKSGREMLD

SEQ ID NO: 5537 - protein, 502 aa, Methanobrevibacter ruminantium
MIGRCIGETSLIELSFISKEMPQVGEYVSIEYDGKVILGMIESMVRGSVSLNDDIYDPDTIEKIREIEGDDFYIKGKVTILGDINDNLRLPRTPAPPGTPIYRASSEILKDIFQMDNSLKLGHLISNEEVEIGVNINSMVSRHLAILAMTGAGKSNTVSVIIDGLLEYNGCMLIFDMHSEYVDAEFTNGEVNVIDPIINPQHMEFNEIKKLANIPSNAPLQERYFRRAFNEARKKVQEGVAKPTDFIEILEDVLVSMHESEQYESADKKKILDVMNKIEDLKVKYDKLLNTNVGDILKQLKPGMANVLDLGQVDENTAEVLVAHVLRRSLRSRKAYVKNKDKSALSYPIFFIVEEAHILAPQNRNPNSKYWITRIAREGRKFGLGLCLVSQSPKSVDAETLSQANNMIILRLVEPKDQRHVQTASENLSEDLVQQLPSLNIGEALVLGLMTKVPTLVKINEFKGRQRGGDLDIIEQWASQKKEKKETLQIELTRFNDLSGGY

SEQ ID NO: 5538 - protein, 463 aa, Methanobrevibacter ruminantium
MRFAHISDSHLGCRQFGLLEREKDFYEVFNRTIDKIIEEDVDFVIHSGDLFDSNRPSTEALLTFQQALLRLNEAKIPVYAIAGNHDSILRKGSLPPQVLFKDIGLNIISPEHPVHQLGAVLICGVPFATSSQKNALVENYNILSKVADTAVKSILVSHQGISKWMPEDSYEIDLDDLPKNFDYYAMGHLHNFYVEDYGKGKLVYPGSMEINRTSELNDNFKEFGKGFCIVDLSEDIPTVERVTIDLARKFYNEIIEYDKLDERLSVIEEELKTLEVKPIVDITVRGGDFESADVYEKINEKIGNDVLSFRPTFKPDNVLIGENQLDGDKTLDPKTLLKQTVDKKFAREEVTKLSVDLLDTLSEKRMGEAKYISDEFYDEYYYHKDENEVSSESEYGGSELNVNEHNDDGTSHLESSAYDSVSDNSSSLDDYLNKNLDSKEEVSDKEKSKENQVKTKEVSLDNF

SEQ ID NO: 5539 - protein, 932 aa, Methanobrevibacter ruminantium
MIFKHLQLKNFKSHADTELDLDLGISLIVGENGAGKSSIFEAISFALFKNYTTNNITDLVRTNKNLDEKIEMSVKLTFLCEGNEYMVERGGILSPSKTKSKPNFKSISNLFKISNGREDIIASGNKEVDRQIEELLNMNSSTFLNAIYIRQGEISALIDDTPANRKKLITKLLRIEELETAYNNIPSIIEEYKTRKAVLESNIRPESELNFELKKAKEDHFNLDDQIKKSKEEFEGLKVELENIKEEKEKLDKEKSDFESLKLKHAHEEENLSALNKGKEELFTKLNEITRNETEMGILKPFCEKLPIYKEFKESFLALNKLKEDEENHKKTLSQIEEYKTVIKDEQENHEKYIALEGEIKVLNNKKIEMSSEIKNLNELESRKDTLTQEVSLNNQKLETFFNSSKSVLSQFDLEEEISPIKTNDDFNKLESIVEDLRTNLRTSIDNTSTEIDNLKKESISLKQEIKSLDEPLADIKKVENKCPVCQSEISEDKKNELINGYEATISGNTKRINEINGFLLKLNEDKSLNESKLKSLDSIKNDIYANKHIVDDLDKSNKTLETLDAKIKELQGKKEELESLDKMIESKNGEFIELEAHNKKYLEASTLLKSFPDETKVKDDLYAIYGKIKTEDEKLKTYISSDSELSLNITLEELDESIEKLSEKDKRYNILLGSVKDKKEYEDKYENKKKEIESKTQEIEEIKKQIESSSYDEEYYNHVNILLERLNNKFTYYSQDIAVKETNLANFETVIKNIEEIIQQNREYKEEYIAVTEYYNLLEDFRKLYSKDGIQRDLKSQSRPLIQKNTKDFFDKFSFKYSDLILDDDYNISIFGPEGEANIDMVSGGEKIAIALALRLGITQAMSKGNIETILLDEPTIHLDSFRRQELINVLRSMSIIPQMIIVTHDTELETAADTLISVEKEEGISKIENS

SEQ ID NO: 5540 - protein, 141 aa, Methanobrevibacter ruminantium
MFEEDEKVNKIFNLIITQGIDSENEYKIFTERLYSKPDFLWTESFARDYAPFGEQFFSKVDIIVLLSGLYNDNKELFDTLIKKSEEFDIPLLLVRPYGMEIVPEELEEKVKSVVGWNANCIIDDIKSIIMGDYDFDDDFDI

SEQ ID NO: 5541 - protein, 357 aa, Methanobrevibacter ruminantium
MTSRRAEHERYLKSILSNSLSSGHPSKEAIERYRKSSPTYYNKLKLGLMNKYKDWDLLDIEGSSVIENIYGETLRIRRREKLDFHLEDKKDEIKNELSSNLKLIPGIGYQTESRLKENNYHTIYDLLQHDKYSHKAQKALNRIERNCFVSDFKLLKESSKYPMDHSQPIDKNRTLKALSSLDPFNLKFMDIETLGLSNVPIILIGIAEIKGKWIESNQYLLRDIEEEPAVIEAYLSHLDEASVHVTYNGASFDIPYIKNRAHYYRMDYNLDQIHYDLIYPARNLWKDVLPNCKLTTIEENLFGIKREDDVPGAFIPDYYQSYLKENNIGPLIPIIEHNRMDIVSLASFLMKIYEESF

SEQ ID NO: 5542 - protein, 102 aa, Methanobrevibacter ruminantium
MELTAEKRKELQEKVTTDINAILEKHELPYRMDGISVMKTSKGTSFLGNIRVHDPYKVKDVRKEVEDYFESYGNVTITSRDVVPCCELPYTYITFHIDYFNE

SEQ ID NO: 5543 - protein, 918 aa, Methanobrevibacter ruminantium
MSTESKDKQMGKIDQFKNDIRFRRKIEYVETIPGKDASYKKVDVLNKRILQYLEDKKIKLYRHQALAIEKTREDKNIIITTPTASGKTLAFNLPVLEELISDNDACALYIYPAKALSYDQLKVLRNFEDEMGLDLNPNPYDGDTPKAKRYKIRQESRIILTNPYQIHHILAWHHQWERFYSNLKYIIIDEAHYYKGIFGSNVAFLIRRLKRIAKFYGSEPKFILSSATLANPLELAEKLTGESFELIDEDSSPSGEKDFVLYNPYKSIKKDSKDQFDMDEYSRSVHMETERIFLYLILKDIQTLCFTSSRKIAELIALWTKRDMEKVKKRNVEKIAAYRAGYLAEDRRQIEDGLKSRDYLGVTSTNALELGINIGSLDAVIISGFPGSMISTWQQGGRSGRTNQKSLVILVAFENQLDQYFMKNPEFFFDKPHENVVIDLNNEKLLKNHIICAANELPLTLEEAKEEFNVTEDFLDNIVRNRDLRKSRGFYIYPYDDSPSFNFSLDQISNEIFTVMNGRTVIEHMEKSNMYREAHEGAVLINQGQTYIVNKVDLDSHFIFVKKKDVEAHTIALKRTNIKITKKIKKHRIGEFTVHFGELEVEEDYFKYKLMQYSKVIGEYIIDLPPLKFNTKGIWFTIPDSVKDKLEEIYKDETEVFAGGLHGTEHAMIGLFPLHVMCDRFDIGGLSTNYHEDTQEATIFIYDGYEGGIGICEKAIDLITELTKSTRNLIKNCECKDGCPSCIYSPKCGNDNKPLHKKATEYILDYMWDEMNKLSPEDLAKLEEERINTENSDYDNLNGHSDVEVEYDKKPNNAEIEIDDEREADNAEIEIEDDEAQEEYEKALEEFNKENYSIAKDILTDIIINYDNQSADAYYLIGKILFIQGDSMGALSFVKKALSIEPAHELANEFYFELKNSY

SEQ ID NO: 5544 - protein, 855 aa, Methanobrevibacter ruminantium
MISYEEFEKLVVEILERDISSNSDQKAAISADKSQSLFIVAGPGSGKTTVMVLKILKFIFVDDVQPKEILATTFTKKAASELLSRILSWGDKLKKKIPVFIMDKVMNGEMADGSVVDKVRKIDFNQINVGTIDSIADELLRVHRDAGTSQPILIEDFVANSVMINECLLKNDMYLHESLQEYLAEITGKESQIDQKPKVKNLTAMADILLSIKEHIYYNMVDINDILADTKDNERGKKIALNLIMEYEKTLRSQNIFDFAMLETEFLNRLSSGKLDSFLDDVKVILVDEYQDTNLLQESIYFRIAESAIKNGGNITVVGDDDQSLYRFRGASVDLFTNFIERVSRIGIEAKEINLKTNYRSTENIIDLCNDFVELDDEYQDARVKEKPKIVFPNLDSSEDTSENESPEDLPNEDEIETQKIPVLGMFRSSEEKLAMDLTNFLDELNRKGKVKRKVKRVLNKDINKKLNSDSEDALESYKKSGFELAQSEGEIIIELDEETGSIDDVAFLTYSPKEVTHNSRKFPFILKKRLEHLRTPIRVFNPRGQDLQDIESVAVFCGLMLECIDPNSYYQNSNKKLPRLARRNMSVWRRKAQSFIKDVNPEPHSPISLEDFIIHWQVRQPFNTNGSKDLKWPKEAGLMELAYKLVTWIEEFQDDDEGLVYLKAITQTINQTSFFNKYSSNIVFTSHEAEEESINEALMNIFVPIAVGGVKIDENLFEVIPPNRFNIMSIHQSKGLEFPLVIVDVGSRFKKNTVRESNLRFPKKADKSSIIQDRIRKYSSLGESERDSKDRAFDDLTRLYFVAFSRAKDVLLLVGLNPNIDGYKQKDKLQKIPNVALGWNRDEEFIGFDDIYLI

SEQ ID NO: 5545 - protein, 469 aa, Methanobrevibacter ruminantium
MKLSTRSKEYIIPEYSLTGDLLSFLTCNLQYRYQNKGNLPPSMPIQLWFGEFIHGVMEEAYLKWNNLSDEEKKDFKWDWERDIKPIEDIITKRLKVKGLNPPINYTENYGPKENMYSARVDRSIKIWGPHLFPLIEDAEVLIKGIRDMPKDNEGHSRSEYYSINGVIDVLSSVKLDEIYSIENDFNGDNEKSKNTFKQTTLDSFFVIDSCDIDNVRDKSSKKSGNKILEYLANNEEFKTILENLEDDEYEIIIDYKGMRRPSAPNKNDIDKNNIHLLNEDSNDENSLEDYKTWIQHEWQILTYAWLRSMQEDAKPVICGIIFYLNELVPSTEDLLLIREDLENNKTDIPRQSIPKDWEILKNWDENGPKAIHDDLSKKFKMDRSIRIINIKEDLIDDSLLEFDEVVNQIESSMIRELNGSKIKEAWNANAEQRTCNACDFSTFCNKKDLEENTNENSNEEDNKPVFSVP

SEQ ID NO: 5546 - protein, 226 aa, Methanobrevibacter ruminantium
MDYDINENANYSKIFIDELKLSRLPVAVKFINDESEVPEGIEKIDESLRHCEMITKAAKGESFYSTAEEQRCAGGASAMGLIDLPPKIASGELYYNLGRFESIETAKSVLDNIYRKDERSFGIVYAPLEKANFAPDVVVVIANPKNGMRITQAIVYNSGEMFNAKFAGIQSLCADAVSGPYVSGKPNATLACSGSRAYAGIEDEEIAYGMHRDNIKPIIEAFANMK

SEQ ID NO: 5547 - protein, 246 aa, Methanobrevibacter ruminantium
MSNLKIISWNVNGIRTRIKNKDINPVLEKEPDIILFQETKASYEQMDKKFLNKNPYDYYFLKGESARTGGLASFTNIVPKIIKRFFIKSQDAFHRACVLDFEDFTLIHIYAPAGTGKKANFNQKLDYFNSLLKYVEKNKDKNLIIAGDFNIAHNDIDISNKDTKVSFTDEERSVLDKLESFGFVDALRLFNEEESFSYWKNKEENDGARLDYFFVSESLKDKVKSSSILVDVEGSKHLPIELEIEI

SEQ ID NO: 5548 - protein, 218 aa, Methanobrevibacter ruminantium
MLSVSAVITAAGKNSRMRQDQEKRNLPLQNKLTLPFKSKTVIETTIDNVLNTKGIEECAIVLGHYSSEILPLIKDIDDERIKIVMNNPIDVGLSVSLLNGLNNINSDIALCVTADQPTVSSTTFNNILDSILNSSNPNKTISVLRRLDIGKLDTAKGLGMPFAASRCELIDYIKDKDDNLNPILREIFADGFEFYGVEENHPDELININYYSDYESLL

SEQ ID NO: 5549 - protein, 409 aa, Methanobrevibacter ruminantium
MPRLFKKTSFKIFIALIVIIILLIPISMAMTSHHNTQNMAEISKYENGSTVFNGDNIIDKNKINKYPIVSDIGALTDQILRGDIADAFFSISTGVVPTPASELVTGNITKSGEIQGIKGPAYIDIEKDQINIVEPGNFLYGFNTPYTQAVIVEGGIDIINNKTNETIKHINANDITNDTLPGDMVSEETIKYWYNTSQVGSKYNIEFCIDGLNDNRSYITPTELKEKFPEAYNYSIKYPGGSPVILYKDNVNSTVVSSTYTYLGSHPQYNDANREYNARQFVTAWNGTVIPANTSGCGREGVYFSAVKEANAQSGMATHGVCPPARALRNAVLALGFSLPVGMDYGEDAVLFGYSPSTGIRVTNTLDYPIQINMWTEGAGTGMAIYADVVEYIPNNVTTTNSTETGTTI

SEQ ID NO: 5550 - protein, 443 aa, Methanobrevibacter ruminantium
MKAAIIGLGVEGKKALNSLLKHNWDVYASDLNVNIKMDNLPISLAQVNVSPSKDKITFQKDNLTIDLGFNNQEIINSADAVVLSPSIWGSRIAEHYKNSGKLLCDVKTKHRDIFTIGVTGTNGKTTTVSMIKEILENAGKNVLVGGNGGGGFEGYYDLILEADEEEYDVLLIEVCDMTVGFCRYCFDFDIIALTNMGNDHMDVHGSMEGYKDSLKEFFKDKTIFLNKNPEFPESFKEEFIGISKNTIEYGETDYEIDLFGRFNRLNAGLSQSLSEYINENVFEIDEEIIKTSLENFKPVKGRLELLKLNDCTIYIGKSDNSDAIKVILDEVDFTAIFIGTPRHNENHRLDILNEVVNANPDAIILFPGLEDTLDQAIYRLGLLNYDGRIEIANNLDEIVAFVAEFSHDPAIFIGGNGQETIIKIQDRLREIADSINESDYECD

SEQ ID NO: 5551 - protein, 367 aa, Methanobrevibacter ruminantium
MKGEMMTSDEKIKLVEELCMTPGISGFEEKIAEIIKRELKDVADKIEVDKMGNLIATKKGSSKKGPTVMLASHMDEIGLMVSYIDDNGYLKFATIGGINDQMLMNQTVVIHSKNGDVTGVIGSKPPHVTKPEEKKKVVPYDEMFIDIGAKDKEQAEEMVSIGDPITFKTWFEAFPNNLVMCKALDNRLGCYVMMEVLKRVDSKATVYGVGTTQEEVGLKGAKVTSYKLNPDMAFALDVTLSGDHPGIKPEEAPVVIGKGPAVILIDASGRGIITPKYIRELLINTGEKEEIPYQLEVSSGGTTDGTAIHLTKEGIPTGVLSVPTRYIHTTVSVASMDDVENTIQLIVAAINSLEINFKYIFSILNTF

SEQ ID NO: 5552 - protein, 386 aa, Methanobrevibacter ruminantium
MFGVKKMKYKSKFGFGCMRLPLKDENNPQSIDQEYFNEMVDTYMEKGFNYFDTSYAYHNGMSEIAIKKALVERYPRESFLICDKMPTWALTSEEDNEKFVNTMLERLGIDYFDVFFVHNINIPWLELAEEHNTFEYVKNMKEKGIAKKIGISFHENSDLLEKFLNKYAKDIDIVQLELNYLDWEDPAIEAHKCYDLCVEHGLDVYVMEPLKGGVIVNQPEEINNDFKELSQDASIASFAMRFCASLEHVKIVLSGMSKMEDLIDNINTFENFKPLSEEEFDFLLKEADKLRENLAVPCSECGYCLKACPLEIPIPEYFRLYNHHKVQKESNIYRLYFDKLADEKVPASDCTQCETCIDYCTQKINIPKELEKLCEHFQEGFSPYGN

SEQ ID NO: 5553 - protein, 2632 aa, Methanobrevibacter ruminantium
MKFRTPSKKDTNKDIEKEFKNLRKELLDLTLRNPLLNFKARNRNLSIINQSPINIYRTLVLENKKMFFQANKKETKKSKAHAFIDEAKEFLSQESDKTLKADLSPSELQKRLFYIDQQSKTMVQEQGYNILYIAIGFIEWIDNKKPRQKNLAPLILIPVEMERKKVGNSFSLSWTGEDLQNNISIQAKLREIGIELPKFEQTSYVEGVNHYLENVRQAIRPFPKWDVKYDIALGFFSFTKFVMYNDLNPESWDENIDLTKNELIQAIFNPSKNVYEDTFEEDDVDEKLHYKTMYQVLDADSSQIAAIENVKAGHNLVVEGPPGTGKSQTIVNLIAELIAEGKTVLFVSEKMAALEVVKSRLDSVGLGKFVLELHSHKTRRKKFLKNLQKATNVRSTRDLKLDQTLRKLENLRDQLDQYAEIIHRPMANVKLSPFELYGMKESSEDYFSRQNRLLPLVRFDNPEDITMKDLDDIIISLENLSELYSTISKNNPWSYCNPKSLLPADLREIEQLIMDTLEALTDFRYEMDIINEVYGIKVPNTLQEYEDSITALSLLNSETVNLIDSSILLNREWYSNPEQAQILIKLLASYQQSSNLFDKFTDYLLIADLDTLIQDLNKDLNKKFRLFGGNSHKDELSRLYKGPVPSEKEALNDLIKVRKEIKVRQSYNDNEKLGIRYFGDLWGKNANVQELKEVSIWMRKFTHLLSNGTFNENTVKMLSNEIFHPSIDDGIDEYIEKGNRFYESLKKLESKLNPRSKIIFKKESEDVPFDKWEIQLNKWKGQLSSLHLWSQYSNTKRACMNTHASIFIKTVEKRNIKKDDVKPLVLGNFADSLLNIVFSENEILAGFIGELHENRIADFKDLDRKIINLNRKRIFNKLNSQIPKIFGGANDPEAKILAGEFTRKSGHLPVRTLLEKAGGTIKKIKPVFMMSPLSIAQYLDPTNPKLQFDVVIFDEASQVKPEDALGAFMRGKTAVVMGDTQQLPPTSFFDQMTDSEGGEEVATALDMESILHLCKMSFPVKMLKWHYRSRHESLINISNREFYDNELLVYPSPCHNDPELGLKFHYNPNTAYHRGEGSANPLEAKDVVKEIFRHFEKYGDKKSLGVGTFSVAQKNAILEELEIERKSHPEFEPLFSDKREERFFVKNLETIQGDERDVILISVGYGYDTEGKMSLNFGPLNQDGGERRLNVLITRAREKCVVFTNFRAHDIHLTANPPFGVKSLQSFLEYAENLSQNQFIDQEEDEEAPFEDAIYNFLADNGYRVDKRIGCAGFRVDLAIIDEENPGKYLLGIQCDGHNYASSKVARDRDRLREQVLNGLGWKIYHIWSTDWYRNRDLARARLLEHIENTIITTKVNDLKSKIHDAESMQINPVTTVVIDKKNKEKDSDDDSDSDKTDKNKESLINNYLKDLEDEFGDNSDKKDNNNEDDDSNNDDGGLVIDSTDDSIDNPDDGGLVIDSTDDSIDNPDDEGLVIDSDTNLGSEEFDIGSDSVLDDDSDDEEFGVDSDSDLDEEEIIEDSEIKLSDTLNTDLKDEDIYEPEIELDDNSDSDLDEEEIIYEREIQLKEGSDLDTEDEIIIEENNNNGSDIDLDSDDVTVFELSDEDSSSDSDDVTVFELSDDDSSSDSDDEELDNDSNIDLEDEESDDNFTLDLEDQSNNLMPKSTIDKSEFLKDLYGEDDDLSSTIDEEPKILNDNNEVINKSFDSKDKKSSKNISKSELKNQEKAKSKTKSKTKSKAKPKNRNQEIKNIENGKIKNDDSKKEQNKPKSKNRSILNRLKNIGGGLGLSRSEESEGKEFIKAEDKKSKEFVSDAKKSIKRKDRKAKDKDSNDKKEINKKLNKEQNIKNNKDNIVESDKKQEEIKEEIQKPVPKSKPNNTKELINQNNKTIEELEEYINNSSNNSDLEFDGASDIDLEKEIISEDKTKLDVESDIQMDDEYVIVDDSELEDEFEFIEELDDDSELEDEFEFIEELDDDSELEDEEFEFIDDLDDDFGSEDEYELVDDSELEDEFELIDDLEEKSNNYDNEDINLKEDSEYLEKEESEDIMRQKESVSKRKVEHEIIDDSLDVIVPISAERRADEYNNYSEDANVIIPIQDEEEFEEEYYNNDSQVDSEEGIDELEELISENINYSDDDAREEFLTNKESNQESEEDSYYYSAVGIENSLKKNAVQYPKSSNRNKKGIVGAVSSLKDEMLYINASIKEIENPTEREKIYVIDPSEEEYYNQPDDSIYYNDSLSENKERYAKSKQYEDEVEVISPVSDSDEGETGHIQSDYIERKAEDSSKSSSESLFSPKKHEYLDKIKEYAAESEYEEAAENPTISPVHTEIEESVESSVISPVHTEYVETVESSAISPVQQEYDKTEEPSTISAEDQETEFIDDILLEEDELSNIQDTDDSALAEEEPESIEIDDDEFESIITDVDQDYQELEKERIKEANVLSAVDNTRLTPTGKLEDYIVAYKEIDDVIIKSATEIYDDEKKVATAVMDIVSAEGPIHVDMVIRRIRESCNLSRAGTKFKEAIFKAIDRNESHMNLIREEDFLFIDYDQIAVRKRDKPNIDLISDLEIENAIDLVLSFEKSLKVKELARIVSRTLGFKSTSKKTSAKILEVIDVMIGKEILVNVNDKIEFR

SEQ ID NO: 5554 - protein, 95 aa, Methanobrevibacter ruminantium
MSITLIHTRRRLAHKKTYKSPNERKKKTLARLSHKERAQRNRDKKRARLDRQKNKNKPKSRKPKKSKMPYRFKYYQFQDYKFNSELDQLEKIDSD

SEQ ID NO: 5555 - protein, 59 aa, Methanobrevibacter ruminantium
MFYSTIMKIDSIDRLRDIRDALLVEQGINPTRNGEQAIRVVVDRIDEIQSTLDKKIEKL

SEQ ID NO: 5556 - protein, 689 aa, Methanobrevibacter ruminantium
MSNSNTDSSDNASDDASGSEIVSGINEELESNNLLTEDLSVDDVILQTSFYTSYAVKSAKSPTVLTFKNSTVVKGDKLYIYLKDSSNHGISGEKVIFKFSNSSYTRTTDSNGMAALDIKLNPNKYAFSAIYDGSDNYSASRKDFTLTVAKVNTKLTSSSSVVRGRNLYTYLKDKNNNALSNKKISITISGKTYTVTTDKNGRASLKLSLKTGTYSTKINFAGDKTYNSQSLSKKIKIYTLKTVMTIPSTSVVRGQYIYAYLKDSDGNALSGQKVVMKFDKIYFNLKTDKNGRVALKINTRLGKIPVKASFAGSTSYSASSKSVTITSYVEKTKITVENSTVKRGKYFYAYLKDSKDKGISNQKVKITLANINYTKTTDSNGKVALKIEENPGNYTIKLNFAKTNSYYASSKSLKINVLNNATAKIIAKDQTVLGEYSVRLTDMNSNPLANQTVEITAATVNRSVGSGLPITKKTVVINSDNIYNKATDSQFIKSIGEVLKSKGYKVIINSNIGPNAHCTDAMGAYSDVCIFCIFGGVDSGMFVDMAASWYQNLLKKYDNEVVLGFTHTQRNLATDTWLERAHDDDYSPKNFTGLSYPGTYLNDYDMDYVYGRTATEMANNFIKYAVNGLSIGLNNTVPCNVMEYNVTTGDNGYATITDLLPGDYAVISSYINKTAGYVADTVISIIEVK

SEQ ID NO: 5557 - protein, 283 aa, Methanobrevibacter ruminantium
MNFNLKDMILIFIRGFLMGSADTIPGVSGGTIALITGIYERLIHAISSIKFGFIKPLIKLDFAGFKEKLFEEIDFELFIPLVLGIGIAVLTLSKVIRYLLQNYTAYTFSFFLGLILASAYILYTKLDEINIKLIILTIIGIILSYIFVGLNPIAANHSLIVLFFSGMIAICAMILPGISGSFLLLLLGQYAYMLDSLNSLNFTEIIVFIAGAFIGILGFSKILNYLLENYESATMAFLIGIMIGTLRLPFNQITSNLTGSWLICLILAIIGVVLIVVLEKKLS

SEQ ID NO: 5558 - protein, 631 aa, Methanobrevibacter ruminantium
MGLFGFLKKDKKEKSNKKFDEESNKDLDEAIEESTDMIKKDSDSSKDKSESDDSKSKESKDSKEKESKSKEPNDSKSKKSKNKESKDSKEKEPKKSKSRLFRRSKKSEDSIDFDSIKHLSKEDMQEAKEKRLKKDSRTKEEKLKDETFRQIAMNHSNRNNRLAAVMEIKSQDILEDVCLDHKDRFVRTIAASRITDPNILEEIAYNAKYTDVRQIAFDQLGQVENVFAEIAKYDKKGKNRFAAINEIDDELILMDIVINAKDKKVRIKALEKINNAEILAEILKNTNDKKITNLIVEKESFDNEEVLSRIAEDESYDKFIRSEAIKKLNPDNEIIREIAINDSNEHVRLIAIEKLEDEDDLNEIALNSEYSSSRLQAVKKINNQEILSQIALNDEDKFVRMETLSKIDDEKILFEVYNKDSDEFVRSEAIKYINSPLNLADIAINDDNLIVSKNALNKIFSLYEEGDFEEDLDELLGKIAIKSNKDEISELSIKSIEKEDVLEHIVNESKNTNTLLLAVDKIKSEDILKNISESNENSKIRVKSVSKIKDKDNLEDIALNGNYNDARVEAIVNVHNQEILSNLALNDEDSKVREAACRNLNGLNTLKEVLAKDTDEYVRKIAKKRYDLISK

SEQ ID NO: 5559 - protein, 968 aa, Methanobrevibacter ruminantium
MMSSERKNIILKGGREHNLQNIDVSIPRDQFIVVTGLSGSGKSTLAFDTIYAEGQRRYVESLSAYARQFLGQMKKPEVDYIEGLSPAISIDQKTTKVNPRSTVGTITEIYDYLRLLYARIGIPHCPNCGKEVSHQTIGQITESIIEEGEGLKIHVLAPVIKDRKGEHKDILEDFRKNGFVRARIDGEIRGLDEEIELAKTFRHSIDLVVDRLVIREGTDFQRRLSDSVETACNFAEGIVTVMFNGRDSEGNETEYEKTYSEDFACTDCGISFQELTPRMFSFNAPQGACPECNGIGTKMEMNPDLIVPNKNLSLNEGAIVPWSKSNKKENYYYQMLQAVAEHFNFSMDTPFKDLSEEHQHILLYGSNEKVAFAFKRRNRSYRVNRKFEGVITRMERLYLETKSNYNRKYISKFMSDLKCPVCGGKRLRPEVLAVTVGDKSIIDVCDLSIKESYRFFQELELTERQMYIGKEILKEIKARLKFLVDVGLDYITMSRSSGTLSGGEAQRIRLATQIGSGLVGVLYILDEPSIGLHQRDNVKLIETLKHLRDIGNTLIVVEHDEETILSADYVIDIGPGAGEHGGKIIAEGSPEEIMESEESITGKYLSRREFIPIREDRRSGNGNFLTIKGARENNLKDIDVEIPLGLFTCITGVSGSGKSSLINQVLYKGLSTKINKKYMHPGKHDSIEGIENIDKIIRIDQTPIGRTPRSNPATYVGVFTPIRELFAETPEAKARGYKPGRFSFNVKGGRCESCFGDGIIQIEMHFLSDVYVPCEVCKGKRYNEETLDIRFKGKNIYEVLEMTVEEALEFFENIPRVARKLQTLYDVGLGYIKLGQPATTLSGGEAQRVKLAKELSKTSTGQTLYILDEPTTGLHFDDIKKLLNVLDRLTDAGNSVVVIEHNLDVIKTADYIIDLGPEGGDGGGEVIATGTPEEIAESGTYTGDFLKVVLNENRTALAKQLVEENSAK

SEQ ID NO: 5560 - protein, 322 aa, Methanobrevibacter ruminantium
MKGTWKLKLRLWLSMAVMFGLVYVLIMLAGNFLGYRGFYGFYAIAGLFVLFLQYIFGPKIVESSMGVHYLSESEAPELHQMVAELAQAANIPKPKVGISNTMVPNAFAYGRSKRSGHVCVTKGILGLLDHDELKAVLGHEISHIKHNDMAITTVVSAIPLICYYLGFSLIFSGGGGDNNNGGGALIGFLALIAYFLGQLIVLFISRVREYYADAGSVELGCQPEKLASALYKLVYGAARIPEQEIKDVEGTKAFFLTDISNARNEINDLSQLDFNRDGVISKEELDQLKNNNVKISGSNKIMEMLSTHPDMLKRIKRLADMN

SEQ ID NO: 5561 - protein, 530 aa, Methanobrevibacter ruminantium
MLWVDKYRPKTFKEVVGNNKQKKVIEDWLQSWQDGNPQKPLLLIGPAGTGKTTIAHIIANEFSEYIELNASDKRSQDVLMSTIGESATTKSLFGENKKLIIMDEVDGIHGTNDRGGTSALNKIIKNSKQPIVMMANDFYSNKLTTIKKNAQVIKMDKIRAPTINKFLRDVVLKNEGIEVDPDVLMKLSKRSSGDLRSAINTLQALVENGGELTEETLDTTGQKDNTATVIDTVTRVLKSTNAINVKRSLRENNEDPTLVMEYIAENIPREYEDNKEIKDAYEMISKADLFFGRARSSRNYGYWRYASDFMGPGVALSKKQTYKKFTRVTGPMAFTLMGRTRGQRALRDRIAAKMEEKMHVSLQVAYTIFPYFEIMFEDDVTAWQISDFLELEEDEIKRFRKKKIPKKVITAMEKVKAEMREEEKEEWRNSIKKGIFANVPSEADLADNNLNKNLIDEDYIEDITIKEDLNNISDDELDEIANEFSLKPSKSRLDKGKNDADNEEKKDKDEDKKEKTEEKLEKGQTTLFSF

SEQ ID NO: 5562 - protein, 314 aa, Methanobrevibacter ruminantium
MLGPWVEKYRPQTLDDIVGQKHIVESLKKYVDQGSMPNLMFTGPAGVGKTTSALALVKAILGDYWRQNFLELNASDARGIETVRTNIKNFCRLKPVGAPFRIIFLDEVDNMTKDAQHALRREMEMYTKTCSFILSCNYSSKIIDPIQSRCAIFRFAPIKAEEIADRLKYIAEAEGCEYEEKAIETIVLFGEGDMRKSVNMLQSAASTGNITEDHVYEVVTKARPQEIKEMVDAALRGKFMESRNILRDVMILQGTSGEDMVNQIYQDVAGRVMDGKMSGEVYMELIGAIADTDFRIREGANPRIQLEALLAKFL

SEQ ID NO: 5563 - protein, 493 aa, Methanobrevibacter ruminantium
MICPKCNTVNDDNEKFCKNCGLQLNTTRICPNCNTANKPNSKFCHKCGTTLSPVDTFKKGIIEENTSNSFFSTYKIPIICALVILLAIGAVTGVAIFGGDGNNGINSIIPLANDTYDDTNLNNYGVNHDNVSQTQSDNFTENQTDNLTDNQTVNQTVENKTKTATVQNQTDNNKTSNNDTNKTKVYSEKTNTTNSSAKVNTEKTNATNSSAKTYTEKTNTTNSSDKVYSEKTNSTNNSKVYTEKTNKTSDDNKKNDTSIDLKTDDNLTSIDSKINNTDDDNNSVIVIDNKQNDSDLNDSDDLNKNGLNDSDDLNKNDDLNDSDDLNNNSDSGKDTDNTLNDTTDDNKGDDTISDTIEMTDVPNLAQEAANNNYRFSSISYKGNVFTQAQCIDIFSEYILNVNNGVFSPIKINSVSSASSPSGEDQSQSISQSDYISIANRVHSWIDSNNQVPNYVGVSVKGQADLSPNKMLELFGQVVLNYAVTGDMPQSVDI

SEQ ID NO: 5564 - protein, 157 aa, Methanobrevibacter ruminantium
MKSIVFNIDCLLNFLKVRRSDLLERKFKRIIISNKVYNNLSNPSISQYIRDDLNTLIDKKFIKIEEINLNTAVFELYYEIINNYDNEILGESEASSIALAVKNKKTLAFNNPKSIEFYLEKYDIKCIGTKDILNDLLDKKIISTDEFYGILNELNQY

SEQ ID NO: 5565 - protein, 258 aa, Methanobrevibacter ruminantium
MRDRIKLNSFAVELRRDWELNPYSPIDLFSIVLSKLPDLTIIFYPMSENTSGMCIKNINLFNEKELEEECDSDDMVVCINSNMSKGRQRFTLAHELYHLLFEEDKEDIIICEDSNKDDSEIEANIFASYLIMPYEGLERYYKTNNIGKWTLEDTIRAEQFFQMSHHATLFRLKEQEFITKEECINFRKVFIGYEARINGFSDDLYVQSEESKKYYSLGKYIRSVEKAFSNKRISSGKRDELLLDAFRSDLTFNFNDGL

SEQ ID NO: 5566 - protein, 113 aa, Methanobrevibacter ruminantium
MKKIGQRLQGLRESKGLSQSDLANYLGISQPLLSQIEAGNRNLNLSLLDKLCALYGCTDSYILCKDDEYNAVNFSFRSKNAAREDLDCISSVHKIVLNMRFLNEIDEDDESEE

SEQ ID NO: 5567 - protein, 244 aa, Methanobrevibacter ruminantium
MAVPEINELFLPLLKTIKDKDEYKVKDITDEVIEIIEISEEDKNITLPNGETLIESRISTANTYLRKADLIESNRFLYYNITDEGLKVLEENPDELKEEDLMENSAFKELKDVYTHDDVTEEIPNPQDALKASLQKQMEDVRAEISNDVIKENEVKYFRPKNQKENDEIYEIRSRRANLKDDKDKSKRKCHDKHHGHKHHHKHKYIVYKEFSPADELLKYAELFERGYLTKEEFDKKKEELLKL

SEQ ID NO: 5568 - protein, 399 aa, Methanobrevibacter ruminantium
MSSKVDLEKAREYNKVKKYEESLSCYQSYLESGEELPEIDKERYAWDIYFARVKNASTIAELEEYVKELTKYAKQKNSSRREKPCSYTISILKLMKFYSDNITFNNNAYKLIAWADKLNPDYLSNNQAKRDDTHKYNSNKENWYLQITKGLFEIKKYDDVIRLSNEALEKIPEFNNFNDYWFKYKIAKSYKELGEYDKSLEYLDEIVKVKNDWFIYHEIAKNYYLKEDLDSSAKWAARAALSPDGKVESKLKLYLLIGDILKAKGYEDEYIMHKYLVYVIRNAKDWTQEEGWDEELASYELDLDNTDYKSIHKELSALWLSLKFIGQERQYGKITKVFENNNGFIKSGNKSYFFNAREFQDDKSFIYEGTEVSFFLEKAYNRKKDEVVDNAVNIYCEEF

SEQ ID NO: 5569 - protein, 398 aa, Methanobrevibacter ruminantium
MKFYNDTDIFVFLNEEYADFEGNEIESIESNIEDDFDYLFNFYEEKEEDYNHLVDFYDENLESFEFDSLIKDYEDYMNQIDSFIDDNQYREDNIESFIEDYEDEGEIFDLIIAKYEQERQEELDYYADEYKNQISPDDVEEKYYDHIESLDEMHYNNYEESIESKFEAYQSSPINNHIDYGNMHEVDNFSDYLDYKDMDTIDFALSQADSYNEIDRSPEWDIINSDGPEYDEPFFIEDFDDCDNIVVDYLENILPLDAELETLIEDDPYDSLENLISFDEEINSNIEGEIDFLISNKLEEMERYEYEVDSYLESLLEDKKAINNSIEAYLDREEYREYDEYYQFNDLELEEIENQGIDFDDLNNLDGTANIYFNRDEEDEEPFDLNEDIYYGDYQYDE

SEQ ID NO: 5570 - protein, 1546 aa, Methanobrevibacter ruminantium
METIAENQNTEFELNEYQEEAVTYYGEKPLLIEAGPGSGKTRVITERVRYLVEEKEMDPESFLIITFSNKAARELKERLMDYFDVDIINQMQISTVHSFCYKLLIENTNITYKILDDDYGTKKNMFIYKNRERLGFKRESTLTRGKVKDVVAAFDKYSTFDVDTEKLVEWIKENEPVSQDYIDFVNEEYRKTGKFPRKKIDLDKKKKNLKTATDYHAYADSWYNALHLQVAKAYPIYKKLLDEHNYLDFNILQVKALEYLKENPETQYTNILVDEFQDTDPVQIEIFEILMKNALNPIEKSKDDAEEDCPPISELELDEAEISDKKITSSFTAVGDMDQSIYGFRGALENYFEYFDNKYCCKKVGLNVNYRSTNEIIEFSEQYIKMQRGKKSRKNLREARKESRNIYYIENEEREMEAASIAKIIKGLKDEEKIKNYNDVAVLLRSVLTSSKDIINVFNDENIPFQVKGLQDLENKDEIKSILTLLHFIIEDDNPQETPIITFWEADWLNLRAFTNADFKQTFIKLSSETEEILIEKQKEFEENVFNYAKLIYNDITGNRFTKRSYKGVLELEDEVLDAVFKEYPKPVLTNKTLREYGITNEDDLEFFNQLNELKFEIFGDDKDFDERPTILNVYYRILEICGFLSEDYIFDPKNKQALDYIGLFTQIIYEYENIISNRDIRGLYWFLNSNIKNYSYDIENENGVNIMTIHKSKGLEFPVVILAGLNDSSFPREYEDLRETKYKNGSAVFYTPRECLRYKSLDKDDVTLHYEEEERNIYVAMTRAQDLLILSKNFKNPKKTTYSKTLEKEIKAIELKEKISSIKDELDELMKKEDVNDLSFLLKSLNDELKDIRAELKELKPLIKDHKKIKVLNKQLKELSIEIKWKIKDLKYEDKIMDDLIDLFNLDEDSGLTRDDLKNMFLNDFDIGENNEDSDESENSFEDIINDSTIDKELDNDNTSIDSLSSNNKPIEDYFEDKEALSDILVRTENEIAGLGEDIEKSLKRTKKLLSKLKELQDDDLNDSMSEIHFKYKMEIQSIIEGAIESNEDDSLSKNQIALNALYCMLQSIESEIMENKETMESNKEILKREKELNNKKSYLDYKIKLIKDTEEFDKKYDMGYSISSYEEYKIKEDLDELSKVLMDDSVNSIGDLALLREKVLEAGSPKLCEDFIINWELIESLFNDDKFAKLELLFKIMESEEIDNIRHMSILNDRTELKEKTKLFFMLFYYKNQEIEYKEKLSFINKKKDHLGNLINAYDGIIKIEPTEIDKVIDERKIPNVIVIEDDKKLTLSYSSIQTYESCPFQYHLAYNYKFKISDREAITEGNINHNSLEEINKTIIERKDEKEGELVGEIDNELLISRDEIIKIVKRIYMESPNIDRDETPIDYVLSNIFEYWDNYGRRFDIIGSEYQFDINREDYFVLIGSIDLLYKTDNGIVILDYKTTENISKKAQEKYKKQLYTYALALKDDPMYNDAVVDKLQIYAIKSLEMLDFELNEEERDEREEKIREIASNIRNEEFHSKGYDEFSECSFCRYSFICENN

SEQ ID NO: 5571 - protein, 402 aa, Methanobrevibacter ruminantium
MKYVIVIEDGASDYPIEEIDGKTPLKVAEKPALDRIAREGRTGLIQNVPESLPPGSDVANMSIFGYDPLLYYTGRGPLEAASMGVETKDGDVVFRCNTITERDGLMASSNAGHISSEEAAELMEYLNEYFNDKYPGFKGKFYPGVSYRHLFVYNDKENAEKLAKLDMVPPHDFVGETIADKIEFDSFADEVKSIMLESKEALENHPVNLKRIEEGKEPSNMVWFWGQGTMPAMPSMKEVYGLKGAVITGVDLIKGLGVCSGCTNLDVPGATAFFDTDYNAKGEYAIDALKDNDIVFVHIEAPDEAGHAKNLEEKVRGIENIDKHILAPLLEALPEYGDFKIAVLPDHPTPIDVGTHTRDMVPIAIYSTVDEPDDVQVYDEDSVKEGSLGELTGCNLLKLLLE

SEQ ID NO: 5572 - protein, 338 aa, Methanobrevibacter ruminantium
MDECKLVLIGFGAVGQGVARAISMKKEMINEKFGISLKVVAAGDSSSSAICQDGLDEELLLKTKEETGKLANYPEYGSDISGIDILDAVDYDVLIEATPTNIVDAEPAKSLTLKAFADGKDVVTSNKGHLALFYKEIIEAKEKAGVDFKFEASVGGAMPIINLCQETLASCGISSIKGILNGTTNYILSRMTTEGMTYENTLAESQQLGIAETDPTQDVEGIDAACKVVILANSVLGIDATYDDVEVRGISDVSLEAINLAKEEGYYVKLIGEVSRKQLKVSPRLVKKNSPFAIDGTLNLANITTDLADDITVMGKGAGSLETASAMLTDLINIIKNK

SEQ ID NO: 5573 - protein, 161 aa, Methanobrevibacter ruminantium
MRMNLILEILDVPGQLVSILGPIGELGANLVTIVHKREIRTEEGKVPVQIALEGERENLQAVVDKFKEMGVNLIEVDDTIKKEKLSTILYGHIIDTDLRDTVDKINAVEGLVVSDLQLKLDGELKSTALLTIELDLGKREIAYDKVMEIAKEKDFLVIDEV

SEQ ID NO: 5574 - protein, 71 aa, Methanobrevibacter ruminantium
MAIEKDAEKILEEFSKTLDQVPELEGTYYITDNLNLNREDESEEKDASKIVRNARTDKDGNVIVKRADWTG

SEQ ID NO: 5575 - protein, 603 aa, Methanobrevibacter ruminantium
MCGCIGLVGNFNKELLFSMMESTKHRGMDSSGYYLYNKGSSESLYENNFILDNRKSFNESSMEDNDSNQCSTIGLGHNLLSIFNLINEKREITDNINENRQPIILDNLVFIFNGEIYNFNKLESFLKENNENYVKSKSDSQLLANLIQYYYKETNSGNQENPLLESVKEVVGQLDGDYAFAIYDKDNDDLAISRDSIGVKPLFYAVTDNLKGFASERKALWKAGFEDSDIKDLKPGSILYNFEEIDLDDDLINEIINTDFKLLKSSFDDYKSYLDTKDTYDVYKELLADDIYEAVEKRVENIVDIGLIFSGGVDSTILAVILKSIAEKRQKQIDSVNNKSSDLDNVFLNGLGETSNPSNNSLENSKSSNDFSENVKPLNIRLYAVGLENSQDIEFSKRVAKDLDLDLKTIIIDEDTIRKSVPDVLTAIEDPNIMKLGVGMTIYLATKAIHEDNIKVALSGQGADELFGGYNRYLKHFDNHTLFDAYFDLDEEIYHDIANIYHVNLERDDAVAMANGVELRVPFLDKDVISLALDIPGKFKIKDGDDLLRKHILRDLAKDIGVAEYIADRPKKAAQYGSGINKILKKKVLRSFNIEEFVESLKH

SEQ ID NO: 5576 - protein, 88 aa, Methanobrevibacter ruminantium
MAKKNIYLAMILSFFIPGLGLAYDGVVKKFLGYFILGLIFIGLWFYFGMPLDAEISNTGFCCYLAYIIVWIFGLYDTLRTTIDINRGE

SEQ ID NO: 5577 - protein, 378 aa, Methanobrevibacter ruminantium
MAEFSLDVEEIKEEVEKSFQEEEKTIPNDKIKKQAEQNAIAIFEADFDDAAQREGIIKPLDDFGINAINRSSAKNSLLSTRFKEMSKGGSEADNVGDKLADLNRQVKALDPSKVDFTRTGFLGNLFHPVRKYFDRYEKAEVVIGNIIESLDNSSKVLQNDNTTLLSEETYLRELTKKLMTDIELAKEMDESIEVQIRNAEIQGVDQYKIDFVREEVLFPLRQRIMDMQQMIVVNQQGIVSLNVVRRNNKELIRGISRAKNVTVTALRTGVMVASALYNQKIAMDKIKVLNETTEDVIESTSKILREQGSQIQKTASETMISPEVLKTSFNEALAAIEDVSNYKQQALPKMQETIIAFNEMAQEGQKVIDKIEIGNNTQ

SEQ ID NO: 5578 - protein, 150 aa, Methanobrevibacter ruminantium
MTEEIKKKIKDMNFEGDFQSLDLYKEALFDLNQQFFSKKAKLSNLIEENYQYTNYNYDRLLNIVFHLEKMFNEEYKSILSIIQLSYKNNVVIDQLLQKKFKSLISIIDKTDSLYDDLVLNLSLSDSNENQRNISVLESMDSLIDSVKYYK

SEQ ID NO: 5579 - protein, 169 aa, Methanobrevibacter ruminantium
MKRYNHCIYCGYKLHSDDVFCPNCGVKIGYVDDQSVSLPLSKYKEQVLELRDEYEKKEKEVLSLVEKRFAPPQLTYHRFIGEIDNCRVLFFREAESILDIINLVTELSPKIETEIKKKIDLLKKIIDQMNDLINELIINMGDKEESENEVKIVLDDMKNLIDSVKDYDF

SEQ ID NO: 5580 - protein, 428 aa, Methanobrevibacter ruminantium
MTKKYGDRTLEVHAGQEEADPFTGARAAPIYQTSSYVFESAEYAANIFALKEPGNIYTRLNNPTNEVFEKRVAAIEGGVGALSQASGMAAITLAILNIAQCGDEIVSGNNLYGGTFNLFKNTLSKFGIKVNFVDSQDTKAFEDAINENTKALYCESIGNPKLDVPDFEVLADIAHRHGIPLMVDNTSAIGMVKPIEHGADIVVHSATKIIGGHGTSLGGTIVGFRVTFDWDQTASSPEFTEPDDSYHGLIYTEAFGNAAYITKARVQMMRDLGTCISPFNSFLLLQGLETMSLRVKQHTENALEVAKFLDNHELVSWVNYPGLEDNPNHEIAKKYLGDKFGCVLGFGIKGGIEEGKKFIESVELLSHLANICDAKTLVVHPASTTHSTLSPEEQIANGVTPDFIRMSVGIENVEDIIADIDQALKKSG

SEQ ID NO: 5581 - protein, 215 aa, Methanobrevibacter ruminantium
MTDNELKLETKCYDACEYGYLYGLNKKIPDEDWEKVKPYMRKWKRMDFVEGNIKVTGRPEGYRCLEEDVAKVEEILGITNTLAKRRANIEEKMSDPIKKVQFKDQCYNWLNMLFKSGTQPKQDLSRLAIHSTKIYDPADSFKNGAEDGYGELFIYTPHGMWYVINNGSDAANKSLNNLESKFGGAIGYRLMYADTVDTLIRVYTEENEYTGPQLY

SEQ ID NO: 5582 - protein, 744 aa, Methanobrevibacter ruminantium
MEDDNLEFNELLNDLEPHIFNFILDNLSEVPSDLSKKEQIEFITSNYSQDTIDDLIDEYNTFEIEATETLDSLEDDIFGLVAMGLDVPEDDKEEQISYIITNYSKDKIEYAIYEAELKREIIAELEELDDEYFNLIVCHFNLSDEIGERETLINCIFDNYSISQMKTAIEIADKKMVFYNDMLGFDDDVFSFICFNYSSLDYNNLKALENKESRKDKAYYLISNYSPTELHQKASEFFAKIDLFNSLDSLDEVLFRILIKNMNAYSFFLDRLDIIYNLMINYSDYIIYIEMDKARESFKTYDELRNLEDIKLLFLANYLNAPEEMIENWIKVSDFDNNIFKDYDVNPKNHIISFYIDDEEEEKEEEPKVKRNNLFGINYFDINPLELSPKEEIAYYIYKNKSEEDIIEGLNSFPNVIVDSDGNLVEGMNDSISNSNLNNPADSDINDIDDSDNKESDNISSNDDSTVKVNIEGADDGKSDEVEVKISDDEDSDSTENLDESDKDSNSSEDLEETQASQAPEKDSSRPEVSKEEFTKMLNELDGDVFKILTKKLAIVENNKVSIIDHIVSNYNYYEIEDRIKLISFKKDHYVRLDALDDATFNIFLKEFSTVPNSFNRFEKIDYIINNYSYGYIESRLEMVLDDIREIKRSLADDDVFFEIATYFKLPLHATKEEQIDHLLINYDLIRVRKRIAFYEGKLHVEGLIRGIVDKNKIECPYCGAKIRKDAKYCTNCGEKLSININID

SEQ ID NO: 5583 - protein, 248 aa, Methanobrevibacter ruminantium
MDLKDVYYSSKPYTQEEFESIIINAYKYVCEEIETKNKRFQACHDFEPCFICWNIELEGNEFTKWIEENSDLRVINKFNASMDVGVLGSFTEDTIKLENGIDLSKIPRCKGKCDREYFFNEECFFERRRLREKIGSIEDMELINPSSIFEFIDYKEEFIDLIIESVNLIKNHFPKAKIYLKYNWDHEYWDLTSICGNIYLKDGNNDENYSIYKYKLFPDFVKLRKSYGDFNYYIEMIDSDELDELLKN

SEQ ID NO: 5584 - protein, 264 aa, Methanobrevibacter ruminantium
MDIKTLQKRAIYYSESKYTRDEFESIIIGAFRYVCEEIIPNLSNFTRCGFDLNFERICFAKGVNGYLNKWIEENSDLRILRSTEISMDIGNPFSPKYDTYKLLDNIDYAKMPDCKLECPNNEDYEKIWRRKHCYWEREKVKERLNSIEGLILVNPNEIYRFVLKKDNFIDYIESTMDLIRKHFPMAVVILQFSPDPECETYDILSAVIYDADGDYDYSFLVQNEEFTEENWALIDYYDIHDLILKLTKSDEYYKSLIEKNLESE

SEQ ID NO: 5585 - protein, 148 aa, Methanobrevibacter ruminantium
MYKLKNFLKGHFAKSKVEDLNFHCKINENFLLINPNEIYDFIGENNSLIELINISFTLIKKYFPDSTIYLEFNQDPEYEGLNSIFANIYDGTNSYDCNMDLFEDLSLEFRELKKQYGKMDYFLDMVSVDEPFRNRLNDKFDGFLKIVR

SEQ ID NO: 5586 - protein, 119 aa, Methanobrevibacter ruminantium
MSFDWERFIDVAEHLRNYSNREEYQRTAVGRYYYTCFLIARDIYYDMAKVPEGTFVSHESVITFFEKSKKDIEKDLGTKLRNLRRRRNNADYDKEFRFADLNDIKKRYKDIITLLDKLK

SEQ ID NO: 5587 - protein, 143 aa, Methanobrevibacter ruminantium
MNNKTRMVVGRHSKRTGPEMDQIVEKYYFFEEGFAGLMMLFEEDWFVDKLLELKDLVLEHYDDVVFYFFNLTLKSDLESCCFLVTVIVKKDDGHEMSKSHIRSLISDRINDGSKLPFMINLVEVSDPLEFKRYTQGEIGPHKD

SEQ ID NO: 5588 - protein, 133 aa, Methanobrevibacter ruminantium
MQVAIAKKENGEILELDDISYQFVLWLNENNLTQLDPIYAKSVLKTTVGEFSKLTSQHEFEGEDEMLVPQLNYFVELSTWASWKDGKLMDEDEEITISFEICDVVFNRETMKEEYHPIEMTYMKSFIESFLEK

SEQ ID NO: 5589 - protein, 611 aa, Methanobrevibacter ruminantium
MTLTAEQQRIADDMCRELAPITFIQGKAGSGKTHLINELINLLEIDEILCPTNLAKQLYGRNARTIHSFFFHEFDKIEEGYQNPKAYDGVRNDYFLRNIAFTKIIVIDEVSMVRSDLMEMIHKILSTALKNDSPFGGIKMILVGDMFQLPPIVESEETYEYLKNEYGGLYFFDSHVIRNNLSQIKFYELNESVRHKDDSDWVNMLDMLREVPKFERVLPILEKINTRVVSPDEIPENITAITPSNAEANRINRRQLDKISGEEFSSRAHFRIKELDSKDYLEFYYSEDPMKIDMQKYYPIEVPSRFEAFLRYKIGARVMLTGSVMGGGKNGDFGTIVDREIIRDYDDSITEIIKVKLEKNNQVVSVTLDAFSAVDYKYEMEYDPTSHSLRRKTPYIQRVKQYPLKLGYAFTIHKSQGQSFPEMVLDLKSNIFASGQLYVALSRVKKLEGLYLTKPIAFSDIIIDERIIQFLDSLRNREFDVPEDGSSIGSQEVLISKKTPLNDLFEDFLHETESQAENEVNRTIHRLVDYAYALYQVDEYDMILLEIKKIAQIISNQFLIPQEDMEFIEKVKTMSDDKIDESICTSVLFNLYDVYKRVHDDPNPIVVDKIH

SEQ ID NO: 5590 - protein, 566 aa, Methanobrevibacter ruminantium
MLINIKIKNFRSLKDFEMNFNPGLNVIIGENDAGKTSLIDSLKILFGLKKIDINDYNEVGCPITIALDESNFHYCLESRIVEDTVVNTFYLKPTEDKINEMKTRLNGMDELKEAEARKMLKEYCSIFDISYRSNSIMENLKSKILESMESDEYTKVKSFSYPISFLGSREFENIDSFFENTFFKELKEEIWNIHIGDKTLNQHIDDYIEEFKNEQLSNQDAEELNAQLKEFMPDFKEINPIVNPSAKLSLDVDVEILNSSGQRIMIEKMGDGTNRRTTMAIFKHKKDKKDLVYVFDEIETHLHIKAQLDILKLLKDLTKENKQIIITTHSPFLINQVNLNEIHLMSIDKETGSKVSTLNSSEESQVALSNLGINNIDLFFTNKLLIVEGESEQNFIPIMYEKIYGYPISQNFIKIVKADGIRDIPNFIRVIKKSFSKTDIFVLMDNDADELTEERIEKMVEGDLIHRDNIFEIGDVEFEDTFSDDILRQALSQYMSDTLGYAVEASMRDIQNARHSDKFSKVLGEAFNRRTYKNFKKPLFAQYLAMFAEKEDIDEKIIKLFELISD

SEQ ID NO: 5591 - protein, 241 aa, Methanobrevibacter ruminantium
MYLEMNELACACRRQWKIDVNESIDIFSLAINKIKNLTIVFKVMDNDISGACLRLDKENIIFVNSRHSKGRQAFTIAHALYHLKYDENNFNICGIDSDDETEQKADLFASCLLMPHGALETYKLNNNIQKWDLDSIIDAEQYFQISHQALLWRLRHFLNEITYEQYRAFKEDINRNASIRGYDSSLYAPYLNKDYLTIGNYIQLTEKAFENELISLGKKEELLLDAFREDIVYNLNEEIIL

SEQ ID NO: 5592 - protein, 115 aa, Methanobrevibacter ruminantium
MGFKNMVETVGDRLKRIRLEHDFTQNQIAEYLGFKQGQIAKLESNKRILRSDSIIKLSNLYRCSPEYIILGIGEYSKTNMAFRSNNKNLSLDDIAEMNRIINNLEFLSRITDKQE

SEQ ID NO: 5593 - protein, 373 aa, Methanobrevibacter ruminantium
MIIQEIFYDCEKFLTIVHNGMDNDIKKRVIQKSIDVSRHEILLKERYIEKYQLENDNYEFFIKGFLDCENEKNPYTNYSTYFKQYVYPNKNDEIDNLSFKDFKKVYDFIYEYTNFKFTKLNINNIFLFFPTDILVKSIKSETTSYLIIKSSENISNISVKFKLNDIIKESINLTEIPNDNKIKSRENWNNYEIEIFDKDKIIYKSHTYVIMSINFNMGITTKIKKIKLNKFDKMVNSSNLKTEKFTISEENGLINISNYLLEESKNRNELNDVTKTECIFLRKNEREKAYEILEKLVKNDGELFIFDPYFLKQSEGKDVLKDLLNTILTHNDLVNIIFSKDIGESFENFKNSLTVDEKLFFKNIGGSAKKLFF

SEQ ID NO: 5594 - protein, 498 aa, Methanobrevibacter ruminantium; identical to SEQ ID NO: 4553

SEQ ID NO: 5595 - protein, 380 aa, Methanobrevibacter ruminantium
MNFYDLNKIRIKIAEDEIDIKENDFLYELYDLDNFDSLFDELDILINKIEYHQFEFTLIWYVGFFNIIKYEDIGNLPNISKLKSYNYLKGGLIKYFRGHFHLTNYTMEIKPYRNYYSFIEHYVLRPFQYRAITKLLNWIYIYDKKFFFELHYFDKSNFHFLRLFKLHEIKNFELEEKYIDFNCEDELKNYILFNYIITEYIHSVDKNLPKDIKTKIESDFKLIEKIEVNILIKIILDYIRFDETKKIPCYFLETIEENEETFFTIFESLEIYNINELNSLVNPLKEIHINQDRLFQQMITKLEKLLTEEIITIDNYEWEHFLNIIPEKYVLMINGLLRKTIGDLTFISELDREIRSKRYFSEKNKEKKLKELIDIAKNIN

SEQ ID NO: 5596 - protein, 456 aa, Methanobrevibacter ruminantium
MQTCSYCGNKIRNKAKYCDNCNSYLKLNNLEIQFDPKKYEKIRLLEKAIKEASNLIEEDNYGNLSAKTQIQIIYDTIYSYLVETTNFLKVLKKYDLNEKYFVYHSLEFINRVSKYPNGIISNEFLFEINRIFSDLKNKNNNNTRKYLFYTNINNREYIENTLLEILEYFDFKVFSYDDFKFPPEFPENFKTKFKSKYLILEYNSAENHISNKEEKALNQLYLLFGYLTFIHRFGRLNEKWHVNRFTLNHQISDLNASAMIELDKNNNFLDIHESLDILRTEIKLDKSDLIKFTNIPFKTNLYESIKNDVKNEVVLHNIEEYLRLYYIASTKSDLENSFIKFWTLAEKILKATFGQMNDESMVRYMKKILKYFGFANYIQDRIPFLRIKRNRLVHEIKDEITINDRNIIKLVVDYLILFLLNWSGELNNNEEYKFILDNFNKTDLNRRVELLSILNE

SEQ ID NO: 5597 - protein, 903 aa, Methanobrevibacter ruminantium
MVLSQSEMRRRAEKFIETYKEVSDERSYSQMFWRDFFDIFGISLNDVAVFEQAVKKFDGTQGFIDCFWKGKLVIEHKSEGKNLNSAFQQALGYLDTLSSLEKPRYIIVSDFKRIRLIDLFEDKKTEISLFDLKDNIQMFNFIYLDGVKHHEKQEELNIEAAELMGKLHDSLKESGYVGHELELLLIRLLFCVYAEDTGIFNTYQFFDYIGDEEDPISVGPKIQQLFRILNQPESQRQTNLPEELANFPYVNGKLFEEPIVPPYFDYEMYNQLKEICKFDWSTISPAIFGSIFQSIMNEDERRQLGAHYTSESNILKVINSLFMNDLWEEFRKAKKNSKKLEQLRDKMGKLKFFDPACGCGNFLIIAYRELRLLEYEILNILHNIKSERDTQVLFDSKELSNIKIENFYGIEIEEFPSLIAKVAMWFIEHQMDLKYEQLNIHKSNLPLISSANIIQGNALKIDWTQFLQPTNEVFVLGNPPFVGSREQTKEQKKEMKEVFKGVKRNGLLDYVSAWYLKAAQYIQNTNIKVCFVSTNSICQGDQVGILWEVLMKKYDIHINFAHQYFKWSNEARNAAKVYVVIIGFSTVDISPKHIYTYETLDSKPDLEIATQINQYLIDSEIVFIKSRNNPISNVSNIMKKGSKAYDYGNLTLSLEEKNELLDEFPEMEKWIKTFLNARDFLKSTERYCLWFADITPCELQQLPAPIKLRINNVKEKRENSSDSGINNIVNVPWLFENNQPKNDFLAIPVVSGEKRDYIPMKFLSKEIIVTNAIYTFESATLLDFAFLTSKMHMAWMKYVCGRLKGDYRYSKKIVYNNFPFPNELSEKDKNNIIKKAQKILDIRDEYKNESLEVLYGEYMPNSLQKAHIELDKAIDKAYSSKKFKDDNDRMKFLFNLYLEYTSD

SEQ ID NO: 5598 - protein, 305 aa, Methanobrevibacter ruminantium
MSKFYEAKSILKNLEVPDKQQSDICVYTFLSLLSVSEDTKWEDSTNEWIRIHDVIQFIKNNYGVVYAENSRETIRKTAMHPFRDAAFIEDNGVPTNSPRYKYRITDELLEVVISYNTSNWGSALSSFKENHETLIEIYSSKKEMRKMPVKINGQDLTFSPGKHNILQILIIKEFAPRFAPNSECLYVGDTTKKDLIKNTEKLQELGFEISLHDKMPDVVLYSEENDWIYFVEAVTSVGPMSQKRVNEIEKMTEEVESGKIFVTAFLDMKDFKKFSEEIAWETEIWVASFPDHMIHMNGDKFLGPR

SEQ ID NO: 5599 - protein, 490 aa, Methanobrevibacter ruminantium
MLNYVSNETNSFLNSISKEERKKIGQFFTDVDVAKFMAQLYVPTKKHLDILDPGAGSGILSAAIISQLENTDVDSINLTLYENDSRILPLLQNNLKFISENTSINLKYEIIEENYILNNSFSIESQEFCKKEYDFVIANPPYFKISRKAPEAQLMESICYGAPNIYFLFMAMSLHHLSKDSEMVFIVPRSWTSGAYFKKFREYLLSAGKINQVHLFVSRDNVFNKQNVLQETIIIHVIKSKKPLESIKISSSSNNDFSDIDEFEVPYDLAISNDENHFVYLPTNKGEVKVLNDVHKFDSSFLTEEIKLRTGLTVDFRNKSYLEEKPNKDNVPLIYPFHFNKNFITFPVEHDKKQYVNMAKKGLIQENKDYLFLKRFTSKEEKRRLQPAIYLKEDFPNYDYISTENKINFIESTNDDDLSKEQIYGLFVIFNSTMYDKYYRILNGSTQVNANEINSLNIPSRTSLENLGRILINKNDYSVESCDEILESIL

SEQ ID NO: 5600 - protein, 775 aa, Methanobrevibacter ruminantium
MIDRIDIGTVLGNEFIVIDKYGGEGKSGFGTVFIVYDDDLKKALALKTLQDKYLNDEETIGDFKKESLIWTELKHPNIVEALGLDIIDGRLFIIMEPIFSFMGKQSLDDYFFEGLSDYKILDWAIQFCYAMEYMEEQGIKYHGDIKPQNILVWDNEIKITDFGLTSFINESKIFKNKNVGNYYISNGKLCGTNAYMAPESFEGINNISTDIYSFGIVLYQMINKGNLPFEAENNFDNEWEELHKKAEIPYFDHILYDVVLKCLSKNPKDRYDSFKDLKRELISIFKETFDEEPYVPKEKDFEKDSNYYYFKGNSLANVGDIENFISNYDKAIELNPNSSDIRINYAINLIKYGYYDEALNHLNLAKKIFDENNKNFVSLDRLYFNFGHAYQSKGYLNKAIENYENAIEINENYLESYVNLGNIYKELELYEKALEKYQLALDINPNFFMALINMGEAYSFLGNYEDSENCFYKAKYQNINEDLYSLWGESLRRLNREPYALTKFFEILKINDESMYAYYNITISYLILDNLDQAKEYFGKALDLFGDNITYKLDLSKQFFKYGFQEESLEILDEIIETSEDNNKFFALFQKFNIFKDSDVKYSTSILDEIIYSSADDELKSEAYCDKALFLKDYEDFDLILEYFNEGLSLNPYNIRIYYLKGCFCHENEEYELAMQTFEEGLFIDKYNKELLYEKSRLHLLFGECEKCIGCCEKYLEIGYPSAEIYLSKALGFMGLEDYNESLNFLELAQSLVIDEETKEMILVTKVTIENFLER

SEQ ID NO: 5601 - protein, 458 aa, Methanobrevibacter ruminantium
MYQVSEKESSVYKYKALGTSNDREIKSKDVNDHYKVTEYNIDLIYNEIKEFIHYYLFSGEISTDFTIKVQDLFEMDDDDLRTLKTVHFLLSDEVRDLIQILPYLLRNLSHSTQKEKEEFNGIVRGRIDWNATLKTRYAKGFNDPSLFVCSPPSKFYDLEENQLLKFVLRKIISLKNNYLDFVDFIRNDEENPFDIESLSDERDWYEIVGNNYKMAKKTLKKVYFDDISDVRIIKAKHIRKAFKNRNVLYHRVARAYILYEDLFINEDIELLKELVEHRLIKATNPNKLYEIYIFYSLVRALPSPELRLLHSGNDYSTFDVLEDGTKVTVHYQYLPKPLQEVSEYAEILRNYNIQWAYRAPDIILEFEKEGKITYRIVEVKNSSSANYVRDSVYKVMGYYKDFERILYNEEATFTENCPIVLVTWGGIRIKDNYDPFKDSLIVLNRNEFLDSLEKLINL

SEQ ID NO: 5602 - protein, 952 aa, Methanobrevibacter ruminantium
MPNIEKYAYILDDFKEILDIYPIESKKPYKNNEFAAKMRNDIADDFNKFILDMVSNKEKYHSKISPGMMDWSKKPWAGFYHKDVTNTFKFGFYLIYLFEGDGSGFTLSLGQGVDDAEKKLVKRSEYLNYMITENELKIPDGFKHEANVGESIIRKFYKKEELDLEEFCNDLEKMIKIYESLIPHYNELRAGEEPSRKDVRPKNSGSKVWRISPGGSDIYDEAWEEFKQESYIGVGFYHGEIDYSTFKNKWSLDRYLDKDGVKDPSKAMLWKFVNWVEKGDIIVANKGKSKLAGIGVVTGDFIPLTKNKNRNKFGLDNIYPVKWIYTPDDLEISKNFFARHTLVEWQGDKWNQLLCVLARNDEVLKERILKKIYDESYKLLFEREDYHHMEGYKTESKEINDVWNDLLLKYENDEDIVDDVWDRLVNRKMKVHGDGSKNIKASIKGKLKISDEDLSKTAILLFETLKGLIGNRDEADQKRIIKEFNDSGYSKGFKSGRFSSILYYLDDYYYVINQKTIDTVKLLSLILGDEILLSNELDRYISNNAKYKEFIHNLRNAYYYDKYDVFEFRAFDAICHYLCSTPPIYFATNKAEKIPIEFYVDTDEILEGIDESEFDEMDLDDEEIEEITEVYIEETKYELLNINPPLLESKLQSFAIAETTVNQLCASLNAGKNIILDGTPGTGKTELAIKFATAASDNNFIDGYILTTATSDWSTFDTIGGLMPNEKGELFFYPGKFLDAIAENKWLIIDEINRADIDKAFGQLFTVLSKQDVELPYKENGKPIKIKLWDENYSKHDKEKSTYYIGNNWRIIGTMNVDDKDSLFDLSYAFMRRFMFIEVDLPEETQYKRLIKMWSNDLSEEYTNNLLRVYDVIKFRKLGPAIFKDMTEYIKFRDEISDDSTDLILAEAISSYIVPQFEGLNRNKVEQIRKLMGDIGLSQYLDEELKELIPKF

SEQ ID NO: 5603 - protein, 46 aa, Methanobrevibacter ruminantium
MEDELLKKYFNELRKEANNEDFINELEGSIETISREEIVELIKKHY

SEQ ID NO: 5604 - protein, 117 aa, Methanobrevibacter ruminantium
MGQKFNIKELEIRSFRGIKDLKYDFEGKSLVLCGPNGCGKSSITQAFEYLFTGQVASLKGIQGVKHDESLIHKGDSKEDLLVKAKIGGQYIERSFNEEFNPGRLKDIYEDSRMALFY

SEQ ID NO: 5605 - protein, 629 aa, Methanobrevibacter ruminantium
MNRKKLLSFIESKPRERYNQITGLISYEKYDEIETKLRQASKDINDEIKILNKRNDEKISELTQFYSCESDDLYEKINASLKKNNLKQIDENTNLTQYIDENKLSKPHKLLNKNIEELNHDYLRLLDNYENITLTELKTTNSLVSLLEKSREYLLLENPDKCPICQKYIDSEEIINDLSPKIDKINENLKLFKDWKNDCNIIIKQLSDLDYEIKDFNGENHNSLDYDLNDLIESLNDLSNFDKGLSEMDREILGSLNKDIISIKGKMQANTDEINRNLDHLQILKNIRENEKYLEKIQKQYDVSKKSHELFKKIKEEELANILKQIEEYTIEFYNYIHYDEDINSPKMKIKGSNSLTLALFFEDDESEPRSFSSEGHIDTLGLCLFLAFVKEFNKYDFIILDDIISTVDLEHKEQVINLLFEYFGNYKFIITTHNKLWFEQLARLADYYQQGRFQFVEITDWDREIGPSLSRKKDEKERIEQYINDNDTFAAGNAIRRQLEYELDKICKVNEIPLPLKKHYTVGDYYTPTKKFAKEMFKDTDVEEYYKNVFKELDLSLYKANLTSHNNEMNYDLNINEIKKLRDAVYGLETAFKCKNHSGNYVLKFDMDKCLGLCSHKRCIDFFTFNRI

SEQ ID NO: 5606 - protein, 334 aa, Methanobrevibacter ruminantium
MKLVVDGFGKSVAKRDNQIVIKENGKEINYYLAKDISQILLTGKGSITFDALTLLAENDVDCVSINWKGHVDYRLSAPDRKNAIVKKEQYFALTDSRSGYLAKAFVRAKIENQKAVLGTLAKSREEKDYIIEQREKVSEHIGKIEKLSNINSDNIRNNILGIEGQASHEYWSAFASVLDEKWEFFGRSGRGAKDPVNSLLNYGYAVIESEIWKSIYLAGLDPYCGFLHSERYGRASLVYDLIEEFRQQIVDKTVLSIVNRNQITPDDFEEDGNYIKIHERARRLLIAKILDKLNSKIMFHSKNISYSDIILYQGKLMADYLTNGVPYEGFSLRW

SEQ ID NO: 5607 - protein, 41 aa, Methanobrevibacter ruminantium
MIERYIISGDDEISYCSQCRNYETCDGDDCDPYFDDDLYDL

SEQ ID NO: 5608 - protein, 92 aa, Methanobrevibacter ruminantium
MLVFVMYDIVDTPTRTSLVKKLKHYGLHRIQKSIFCGFLSIDERLNLASEFDFFMSSERDSIILIPTCESCVDSILIEGNLDLPKKSLYEFL

SEQ ID NO: 5609 - protein, 254 aa, Methanobrevibacter ruminantium
MWVKRIYYVSLIRFKILKKRLIKSLLFRCTMKINTCHLVLKTNKKVKQNPSKFRGYIGREFDKYPILHNHYGNNKFLYSYPLVQYQIIDGQPSILGIEEGADILVDISSKIKALKMGDSYYRVEDHYLYYKEYDVRATRKYHQYKFLSPWLALNTKNYQSFKNIKDWKEKKSFLNNIMVGNILSMSKGLGIIVNKRLHVSSLLDDEIAEYKNVQMNAFTGEFKVNFNIPDFFGFGKGVSQGFGTVIKVTDQEED

SEQ ID NO: 5610 - protein, 455 aa, Methanobrevibacter ruminantium
MSKKEQILILSLGGSPEPLIYSIKEFKPDKVVFLCSPQTLKECDGILEETAFNEENVEIYEIPDAESLDDSFSTSKKVLSKFADDGFEVRVDFTGGTKPMVSGLVLAVIEGNYSNFKFSYVGQKDSQSRTKNGVGVVKDGSEITKMQINPYKKYAITEFKRGKNFFNTYQFEAALENFQSAKSRFIKGTEQRRISEIYERIVILYQKWDLFEDKVSKNTDLFKYLGFIINDIEKDEFILNEFENIDFFIQMKRNYEFLSFKIRGVSYDSEDPSIKGHLKFRISYYLSDLFNNAYRRIEEGKYDDAVARLYRINELIAQVQLTQKGLIDDDQLQTQKEFKVNISSTKSKAHARDNYDEILDFIDYNSSLKEKNKGYFGIANDKSYELLDLFGIKQSPKFDKLNSKLKERNGSILAHGLKPMNKKKAEELYDKTLDYAKDYFSFLDEDMDLAKFPKF

SEQ ID NO: 5611 - protein, 400 aa, Methanobrevibacter ruminantium
MMVRLQLETISPVYIGNTGNEYSRSEFAFAKFSGKKKLVRLNLDLVAKELYQRDEKLFKEFLKVLSDTKSFKNIKTKKDNSQFNKNERIAIKGMQKFLYDTIRPYDKDLFKKILSSCSSYKVSLQYAPESIKEKNGKKVSVTRKGESTADIGLIKENLKTNNEPYISGSSIKGAVRNALLYSRLNLSSKSNRDVAREINNKNNRDIKNIMTYVQFSDTFNTIEEPSLYGVESIGTKRNTFSFFETIDRGNVFEFEYRNTFNSKVHNPRMLNNFDLSVESIFKHIYEFSNDILDEEIRFIEDTVNFDYVYSDVDSGKLYKYFDDLKDKNTEESPLLRLGQGSGALGVSQLLEVKNSRSPTEFTTFRKFNRLGHKNHYDFPKTRKLIVNSFEPLGWVKLSKI

SEQ ID NO: 5612 - protein, 331 aa, Methanobrevibacter ruminantium
MYVCDKMKIVYLKPKSTFPFLSSDSIFGALTYGMAELFPEKLDSFIESFKNKNDIPFLISSAFPFIKNENNYFRFYPKPITKFQSKDMKLSKKFKKIKFIEEDIFLELVSGNISNDGIFDNFKDDLFLVNEFNESFLVKKENSEIIDGSLFSKEISPHNVIDRVKNNSINIFYSEDYRFRENKGLFFLVDFKDSSFEEIFISLLRFLRDKGFGHDISSGKGQFDFEIDDFDKFDNLNKSQYFLSLSRFIPDEKDISFIEELSDDDALYEIGDKRSRDSFGLRKKTRFFKEGSVFPDYTVKYDVNCGCLVETSDRSIEYGYSFNIPYNVEEL

SEQ ID NO: 5613 - protein, 255 aa, Methanobrevibacter ruminantium
MENLEFQGNVIIKGKIVCDTGLHIGESNETLEIGGIDNMVMRDKKSNLPYIPGSSLKGKLRHQMELFNKDSVRYILDNPKGRNREYAPCNCGKCSVCKIFGFTNDEDGTYVGPTRIIVRDAFPDDETKEFWESSEGVSRGAELKTENVIDRVKSTAMHPRPTERIPKDSKFDFEIVFGIYHDDDKENFKEIFTALKLLENNYLGGNGSRGYGKIHFEDLSYLIRNRSFYTDNAEEKVIELGVLSNLEDENLKIEL

SEQ ID NO: 5614 - protein, 143 aa, Methanobrevibacter ruminantium
MPNDLKDVENKIKGLKSLKYYEIEEFVKFDGDADKITKQLRNDDIKTSQLRKFFAAVKEIEMYVKDKRVWDDKAKVDFYLLMPKLAYAKGRKVISERFFNLMKITMEKVGSGNKEDTLDDFLRFVQFLEAIVAFFKVNNPGSL

SEQ ID NO: 5615 - protein, 885 aa, Methanobrevibacter ruminantium
MDRKNLEFASLLHDIGKFSYRAENNFSSEYKNLDKDDFGYHGAHSKWSASFIKHYWNSDITNLALYHHNPKSGINEEIGLIIQKADHHSSGERIDSIKNDPFKTPLLSIFSDILIKPEKNKKCDELYVPLEEFDLNRKWKNSIPTSIDNAKKGHNSLKKCYSALWEKFESEVKHLENTDDFNTILALLKKYTSCMPSATWGSKPDISLYDHSKTTAAIAVCRYLFNEETELKHTSSTQEVYSVISGDISGIQNFIFKISSPQKAQSAMSKRLRGRSLYLTLLTDAIANKIVQDLDLTQANILFCGGGRFTILAPNTEKAKKSLNEIQKEINAFFIEKFNAELYLAIASEECSGNGLENFSDITSILSYKIAQDKKHKFIDNLDDLFDFEEDLDGKSTCAVCGNLFKPKDEEDKFCDDCEEHIKLGSKVTNASYMIKCFFNEEFKNIYDKNKFKKVSFYEKPLNIAYIFTSNTSKKSVDKTFKEIKDILSEYDEFVDRFEIIKLNDTDFLEIENKFSLEELDKISFSFSFLGNTIPKYHNRNPLYFEHLAQISKGANKLGVLKMDVDDLGMIFGEGFNHAFKDSDESISSISRISTLSSQLDLFFSGFINKIASEFCVYDDGIKEYFKNDPSFFELNFKEVELKLQNDDGSKNEDESIIVYKEKYGMELDDEIKESIKEYSIPTIHINYSGGDDLLVLGPYDDIIEFSQELRTRFKQWTCNNDSINLSGGINIVSSKFPIGKAVIMAENYLEASKSCGKDKLTVFNEVVPWDAKGSKFKDFNQLHEFGLKLEEYNSQNKLSKSIVYSMLYLWKDNFEEHSGIFFNEEKWEKENFAKCNNNRFVPKFAYRLRGMNQNSKEYDVVLKEGIKYMPWIKIPVSWVSLRMR

SEQ ID NO: 5616 - protein, 1565 aa, Methanobrevibacter ruminantium
MSIDLNKNQKRAAYYNGDKYLVIEAGPGAGKTRVLIERIKFLINEEKVEPSSLLVITFTRKAAEELKERLYKDIDESVVSMMQISTIHAFCRVILSEIGEYNTRVLGDSVNEKQKMFLNKYKKDLGFVNECHIRQNEIFNLIDKYGEYATFKVDSKKLVDYIERNTKIDPEYIDFVNEYMKENDGRYPFDEVMANDAYKKSRTNALYLQIAKSYPKYLELLDEKGFSDFDQMQIKTLNYLKTNPNTIYKNVLVDEFQDTDPVQMKIFEILMKNADSFTVVGDIDQSIYGFRGANKNYFEYLYNNYDDRVYKVNLNVNYRSANQIIDISEDFIKSQRAEGAKQDKALGARDLDRNTYFLVNENSESEAKAIFEMIRYLHDSGKIENYNEIAILSRSIRFSNTAQDLIQLFIDNNIPYHVRGVPDLFDRPEIRSVITLIHHLIEDTNPHNHKFDLWELEWLNLKAYTGESFNQVLFNLSDETKNILNSIQEEFEENVLKEEKRAYLKVTGKKSHKYVFKRVFERDEKVLIELFKNIERPILSNENLIRYGVKNKQDLEFFRRLNDLKAYFNSEEYMDSEDTILDIYMKLLTDVCNYLTEDFINDPINRDELKNLAILSNTFHNYELIVDNKNLKGAYYFLRYNIAGYSTDNDESEGVQLMTVHKSKGLEFPVVILLSLNHKKFPSQYKDEYDRFYTPNSCLEYKNYDSKEEEIQDYLEEEDRIVYVAMTRAQDILVLSNLIKETPELEGLKAELNDNLSQIEKIEIIKDIPKGHIKIHDLINRNLSSCKFLEDDFSQLPKTVCEKPQVKKEDFLNLSFYSLENYVACPFKYKLMHDINFSESTMEFNKLRGLFVHNLLETINNRIRSNGNRYIGDDEVLAIFERFQDSFRFENLRLSKKEYDIIKNDVLYYYNTFGKDFNILNTELSFSIKKEYYGLSGIIDLIYKTKDGKMGILDYKNTERISRHYVQNYIKQVYTYMIALKDSFEIDELRIYAIKARKMISVDINQKSLDILLEELDNVSLNIKKEVFECNFGEGCLKCSFSKICVKANNDDVSVFDFNNEDTLSFRNKFYQNLPDYEIIDLKDRYWKDIDFDSDDETKFDVDISADDLASISAKEGVSVSANEGIPISAREGVSVSANEGIPISAKEGVSVSDKDNDLSVSANQIKNLNNSSDDKHLGADFKSKKDSFKSEMKSPSSKKDSSKSKKKSYKSKESSKSSKEPFISSYSKYLDLKSIPKKYKNFLKNDYSKDIDLFEYDDDLSLEENILRKYILKKKGLKLLKKELYDESEDYYKKLIHNSYFKEDYYPYKQLMKVYHKTKKYDKEADIIRDFFKSSVYANKYQFLYFKYKNRKLPKRARIKHNELKDLIKNYVNLLKDSDLSNNSIPNADRLKKDKNRLKILSDEEEFYNHKRSYYTNIADGLYEEKLNQEAFDLYAMAIYKYKEKSFRYYQRLASIYRRTNNYKHELLVIMEYFNKSNKIHRTKSSDKWFKQRLYSTKQLIGDENAIRQIENIVCKKGYNLKADYALNYLNHDLDEYYCLKNLDKELNYIISSNEDIFTLHKKK

SEQ ID NO: 5617 - protein, 398 aa, Methanobrevibacter ruminantium
MNETTSNELIHARRLYMKKNMKEAETNFLKVFNTNRELFNDLDEIYFIRAIQESHIDNCQSIGDLRHYADFVVENFNQEDCSNRNFEDPYADFILNLSTVLIKEEYYLDAIKYLIRLDESFLSDVSRHNSNGYYRFSHHEKYLSNMVKALIGIGKYDAALQYSIRLINDLPDTASEAKYWIKWSIAKIYNLTGDYELSIEYINELLLKRSENYFYKLLADNYLKLDDYDNALVSGVHYIILKKDIKSCVNYYTELGYILSQLGLTEESNKHYYLSYAIKKSYGNFIPDYLEEKIRDLGFDLENTNYNKIANELKPFWRECLYRNKKQFTGTISAIKQERGFGFIKPDDGGKNQFFLFKDFKDDHDYIWNNMRVSYYLGDSIDYSKNKESTRAVNVELI

SEQ ID NO: 5618 - protein, 564 aa, Methanobrevibacter ruminantium
MSSQLEELKKEFQIAEYNLDFDRLHTLCDKILEHDPNLIEYKQYIAISYFLSEDYENCIKEYSIYLDRREKDADDAYILAMSHLHLNNESEAMSIIEGFDEIDSLELKLKAYHDIKHYYKAIKAGNELLDIDSSNDEALQTMSEIYDELNNTEMSLFYEWELCKLKPAFKGFHLMRLYELGRYEEVIEIFERNPDDFKCDLLHYPFNFLIGSSYCEIGKHMDALKYLYRSNQLHECRDTGLQIARNYYILKDYEMAYKILKGVAVKEGLLDYDDSLSDDELLNDNSLLLLDEDGLEDDSLLLSDNETLNDDSLLLSEDKTLNNDSLFLREDKTLEQIMDKYCKGAPEEKADEKTCNEEEKETEVLSDIQILDQMLLELDIDESHYTQVEEEPSYFKETDEDSIDGDEDIDIVDANILRMMSEVCLYLKRYDECIMIANRLLSVSDRYDEIVNVISAYYLEMEDEWKADEWYLLLPIELAFNKPFVYTIARNLSLIGESDRALKIYSTIEKLIDESPYLLYERAGLYKRIGEKELAMKDLDKYNEIALKYLYENGEPEVKYEDLE

SEQ ID NO: 5619 - protein, 44 aa, Methanobrevibacter ruminantium
MKVEIMIIGILLLSNFLYHHEDGNPIVQYVAYIASLLVIILGFF

SEQ ID NO: 5620 - protein, 429 aa, Methanobrevibacter ruminantium
MKRKEVVLFMTVGTGINPDSNEAGYKKLAKKLYSTLNKIYPNYVIFFASNVSKHTIKYIDALFELDGDEFNEGEDYEIVELNNIDDFNYCFESFEAKIWEYDYLNEKKYQIIMDYTSGTKTMSAAMACCGMLYSRDLISVGGDRSKGEVSAGTEIINYQNLYKIYDKRAIMRIRYNFNTNRFQPCLDVLNYIVDMNIHKDSLVDLCKGYFAWDTMDFSHAYEHLKSIDLNYMEFAEIKNELKKNLNALGIIVNSKSQNLKNCYILACIINNAIRRAEEYKFDDAIARLYRSFELIAQIRLEKYNLMSSDIDIDLLKEKGLRQEFIDELENMREDGKIRIGLIKDYHLLNELDDELGKYFMENESKIKDLTFKRNNSILAHGLDSQSKEDFDKFLELVIGLAKKLDKDMNKFLEETRFAKFDLKLDINNA

SEQ ID NO: 5621 - protein, 112 aa, Methanobrevibacter ruminantium
MYKIINEDGSLVRGYPSDALYDLLTDKEKEHIQLFKNEIEKITEKEGLGKITVSVSYDEPIIEKAFQIQDKNGYSFDEFQEILDKIRLHMADFCKNNKELCEFKKFSYIISA

SEQ ID NO: 5622 - protein, 89 aa, Methanobrevibacter ruminantium
MMVSDKDLAKNNNVKGSRINVTPLMAAYFLGYMLSEKGEKISDEKIEDLYKGACFSMGIDPVEDISELFNELFSPKKKTKEDLENSFYC

SEQ ID NO: 5623 - protein, 468 aa, Methanobrevibacter ruminantium
MIHLGAIMSNIVDRIGMEKSVILLAAVVSFVTAFLANISVALPLIARELAMSNIIQNWVATIYLLPIAMLSIPLGKLTSKHGLNKSLLAGIILTIIGVIIACFSINSELLLLSRVIQGIGTALINVASMALIVSAVNPETRGQALGLNIAGVYIGLSSAPVIGGLVIYHLGWQSIFYIMLIPLIFSAYLSWSLKDEWTMYDGPIDITGSIIFSIGILLVIYGFTIVNTWLGIVLLIIGLLLLIAFAYFELRVNNPVFDVRLFKNSRFSSSNIASLISYTATFVITYILTYHFQYIMGFDSKFSGMLLIVTPVMMAILAPLSGRLSDRIDPQKLAAIGMGFVTVALTILCFLNESTPLYMILLAMFLQGIGYGLFSSPNTNAIMSSVPKEETSSASASLAAVRVIGQTLSLGMLTVIFAYIMGNVAIVPEYYPLLMESSRLSCIISAVLCVIAVVASLVGLRSDDEYET

SEQ ID NO: 5624 - protein, 594 aa, Methanobrevibacter ruminantium
MNSKQKTLIILSLSLILLASIAAVSAVDYTLTNADMDYVVKSNGLLHVHEAITYDFDSSPNGVYRDIPLKSGQSIENLEVYVDGAYAEYQIIPKGSGERIKVYLYTDSSKSHKLSSDSVITVHYVYDMPKVVKIYNDIGELQYKVWGDEWDEDLENLQSTITFPDDEELQFWINPYFSNAKARWAEDHLKIHSDFVGDGKYVEARALIPLSEFDSNAEYAQHINKNGKDEIIKIQDDDKKSQEGFKSLFSILNKVLVVLCFIPGLIYLKFGREPKTTYDAIYEHEPPTDDPPAYVNGMIGSGLKDVGSLNQEAFQATIMDLINRGKMGVSSEEDTEFTKTTFLTIKDTSGLKRFEADVINILKRYELNGNISLSYMQDCLRGESEARYFQGRFESWKENFENEYFSEDSFSRLFDKKGNDYLNYFAFLLIILGIIAFVASIFFDFAVTGSTIFVGVLLVIVGVVCLMLPSGIAGKYTDEGKLYEEKWMKFKKYLQDYSLIKEHPPESIVIWNKYLVYATALGVADEVYKAMKMEVYSGSDDYYRTNDLYMFYYLGGHRFINDSFNTASSTISAADNSSVGGIGGGSGGGGGGAF

SEQ ID NO: 5625 - protein, 249 aa, Methanobrevibacter ruminantium
MNSKQKALMVLALSIILLSSIAAASAEDYSLTNAKIDMVIQDDGLVFVDEAITYHFYKTMNGVYRYIPINNFNMEDFAVDVDGAYYELEGNDDDSQIEAKVYLYKDKDKTEKIDPGTDVTVHYKYYMSDLLDVKGDNAVLNYYLLGEDWEVDLEEIEANVHFPEKKELDYELVPSGSAEGKWSGDTLTITGENINAGDGLALIVEIPLDEFASGFSNAVHNDTDDDDDIDNDIDNDKDDLKDLTKAKQI

SEQ ID NO: 5626 - protein, 186 aa, Methanobrevibacter ruminantium
MSTFILVIIILGIILIIAGIIVALYNGLVTARNKVKNAWAQIDVQLNRRADLIPNLVETVKGYAGHEKSVFEDVTAARAGLMNANGVKEIGEANNQLTNTLKTLFAVAENYPELKANENFKELQAQLAESEDKIAYSRQFYNDTVLMYNNKCQTFPSNLIAGLFGFKEADFFEAAGEARSVPKVEF

SEQ ID NO: 5627 - protein, 596 aa, Methanobrevibacter ruminantium
MNNKQKTLAILILLAIVLTSISAASAVDYKITNADVHLDVEDNGILHVSENITYLFKSDGHGVYRVIPLKADEKMSYLTVDVDGSYFEYNIINRSGEKEVRVYLYKDKDLTDYGVSEGSTVTLKLDYYMENVVKLFRDTGLLEYKLWGEEWDQGVEHLNAKVTFPNDEEIEYWINDDSGKTESSFSGDTLYVKGSDIPKGDYVEARVLIPLGEFDFDADYALHYNHDASDEVKKQQEDFQKKQQYFNTIGNLLNVIYGILILTPLGIYLKYGREPKVSSDAIYEHEPPTDDSPAFVNAMMSGLSKDVGKVDKKGFQATIMDLINRDKLGMEIAYTNKKRPVSLLTVKSTDGLKDFEMELIDILRRYEQNGKINFLYMQQQLSNRNEAYHFNRAFNRWVSNFKVDYLPDDVLSRYFNTKGSDLIGKFKWIALVAGFTGIIGLLLTGSWIPLVLGLILIFVGVICFYLPSSIGGQYTKEGREYQQKWKRFEKYLKDFSLIKEHPPESVAIWNEYLVYATALGVADKVYKSMKMEVYDGLADGSNFSSNDLFVFYHIGGIRSLDNSFVTVNNIISADSSSSGGIGGIGGGSGGGGGGAF

SEQ ID NO: 5628 - protein, 584 aa, Methanobrevibacter ruminantium
MNLKQKAIIMLILSILLMSAISASDYKGSYMDYVHMNVNENGLVHVNESFTYQMVSPESEISLPLYHGTNASIENIHIRVNDLLVAYDLKKGDTLDELVIHPKSSDYDYDSESTGTYLLDVEVEYDIENAVKVYNDVGAFTYQINKTDFNGVSLGMAHIRIKFPGTQEHEYFIIPKEGESSAQWDEDHFHMTNSQPAKATVIIPLDELDADAKYAQHIDSDGLEAIKNDSFDLKYSLIQIVNILIKIFVIIAFILPVAIYLKYGREPKVTLDSIYEHEPPTDDPPFFVNAIMGGTFRDVGLVDTKAFQATIMDLINRGKLSVETEINEKNKQRTYLVAKSTDGLADYESDLISILRRYEEDGRIDLKHMELSLYSKSEARYFRGRFNSWGHLLYSNYLTDDIKAEYFEDKGSKLFKFFAYGGLILSVILFLYCLMFNQMEPLPWVIALFILSSVLICIPSAFAGHYTKKGKIFKERWNNFKKYLKDFSMMEEYPPESVAVWNKYLVYATALGVADKVSNTMKINFYDGLNDETYRDNDVFVFCDGNGLDLIGDSFSAVSTTLDSDSGGSDGVGGGSGGGGGGAF

SEQ ID NO: 5629 - protein, 162 aa, Methanobrevibacter ruminantium
MKLKYFAVCLFVLILAAGISAAYATDVDFEGGHSFTMPDGYEIVEGQNTTEDIIMEKNGDNRIVFQYWIDEYEDLKNIEENYNFGDIIKAVMEDAVIGNEENYTFEDYDVTQIDYKVQGIQCYSYILDNGKEGYVIHHIAKEDLKDLNDPDNVIGDLVKSIK

SEQ ID NO: 5630 - protein, 168 aa, Methanobrevibacter ruminantium
MDNKKIFVIVALALLAIVAVGSVSALDLGFLGGNDDQDTAAEDSDAKTTTIKGIEFNIPDGYVKAENYTLDGETRSSGSIDYKVYQEGYEKGATDAILFLIGDYPTDLTDDMLEQMNLGEPKTINGHDGYITTSNEGGDTFTVFFYAEDGDLVTVTVTDDTLLEEIIK

SEQ ID NO: 5631 - protein, 154 aa, Methanobrevibacter ruminantium
MNNKKIFAIAALAIIAIVAVGSVSAFDLNFFGGDDKQTTTLGGIEFNIPEGYEIVDNYTIVNETLHDGDDEYIVNSQYYENDDGDSLELYTSDYQDDMEDYILKILTKGDEKTINGRKGYINSEDGFTMFSFVDDGNLGFVTVSDESILEEVVK

SEQ ID NO: 5632 - protein, 155 aa, Methanobrevibacter ruminantium
MNAKKLTILAALAILAIVAVGSVSAFDLNFLGGDDSSTTTVGGIEFNIPEGYEINDTYTIENQTRTSSGGNEYIVNQEGYGNSDGEELLFLVGHYDTDITNEMLSAMKVGDEKTINGQEGFITSDDVYTVFSFAKDGELVTVTVSDESALESIIK

SEQ ID NO: 5633 - protein, 418 aa, Methanobrevibacter ruminantium
MNITENQSDNDEKILTKSFCLIFGALLFTALVMYALMSTVTEYASSMGSTATIAGLVSGIYVFGGLCSRIYSANALEKKDWKTLALIFLSIHFLACILYFFVDNVELLILVRFIHGLGFGASANAIVTIASSILPKKRFGEAFGYFMLGTTIAVGLGPYISGFFYDIWGSFGSFLLATVFSFIALVCVFFLDIERYHPDEKINNEDILSDAESVGTESIDANPIKKQKEKRSFIEKIFEIDAIPVSLFTALTALGYVSILSFYRLYAVELDLVGPFSIFFLIYSVILVASRPIAGKIQDKNGDKIICVIGIVAQSIGLFLIAYAPSDITIYICAVCAALGFGTLNSACTTIVTRNCSIDRRPYAISTFFIFCDSTIGFGPALLGCFVSATSGYAPIYYISAFITLMALPICLYSLRNK

SEQ ID NO: 5634 - protein, 489 aa, Methanobrevibacter ruminantium
MGEKAQWDSSLSFIFAMIGAAVGLGNIWRFSYVLYSNGGGSFFIPYFVAIAIMGIPFLILEYGVGFSFKDSFTNILKKIDGRLEIVAWILILFVFIVVIYYMVILSWDMVYLLTSFTFGWGVDTAAYFTNTVGGSADLAKGGIFLIPTTICVVLMWIVLWFISHRDVDKGIGKVSKVLIPSLFVIMGIIVFYSITLPGHMIGIDALLRPNWRMLLDVNIWLAAFAQIIFSLSMGQAIALTYASYLPESSRLTDNVLIVVASNSLFEIFTAFGVFSILGYMSLNSGMALNKLVTEGTGLVFIVFPMIFNVMGTVGRVLAPLLFLAILFAGITSALGFFEPMLSSASSKFNLSRKRTATILSIIGCAFSILLTTGISSYLVGVIDSFVNQFGILLLIGVQCIIFAWVYGIDHFIPVLNENGILKVGKIWKFIIKYLLPVVLFVIWAYGIFTLFTTAKTFEIMVDIIIIVAVLILSFILSHLNPRGSNEDNA

SEQ ID NO: 5635 - protein, 70 aa, Methanobrevibacter ruminantium
MTYNCCLKTSREYTEEGLLNLIAETFDTDVSGLKVENIDSYEDDRGENFIITCSKEEGNMKTIKVFHAYG

SEQ ID NO: 5636 - protein, 69 aa, Methanobrevibacter ruminantium
MKDMEYPNEEAKEKFEEIMLRRLRLLYGIDVSEMEIINISLGESSVEPTIRIVLIDSTEEDCIRVFEIA

SEQ ID NO: 5637 - protein, 490 aa, Methanobrevibacter ruminantium
MKQHSVGRVETKTFAINDKLKLSSGKTLENVELAYETYGELNTAKTNAILVCHALTGDAHAAGWHKNATKPGWWEIVIGPGKALDTDKYFVICSNVLGGCKGSTGPASINPKTNEEYALDFPIITIEDMVHAQKKLIEHLGIEKLHAVVGGSMGGMQALQWTVSYPNMMKKASIIATTARSSPQQIAFNEVGRQSIISDPFWNNGQYYGKNRTPRSGLAVARMIGHITYLSDESMYIKFGRELQDKDQLSYDFTLDFQVESYLHHQGESFVKRFDANSYLYITKAVDYFDLSVDGSLPDGLKNVKAKFQIIAVDSDWLYPVDQSKDLLTALQTLGVEVSYNEVKSDYGHDAFLLENGQMNFLLNNFLSENVVDDLMKTDVPTIDINSTIKDAANIMFDNQVTHLPVVDENDKLLGIVTAWDLSKSIAKDCKLLEDVMTKDVRYCKSTDSIEYISRQMKKFDISCLPVVNDDLCLEGIITTDQISHLISSY

SEQ ID NO: 5638 - protein, 255 aa, Methanobrevibacter ruminantium
MKENKEMNWKIKFAIIMFVLAVLIFLARYLICGDGEEIIAYLWKHIGFIPIDILIVALVLEEIMGRKEHEAILEKIDMLMGTFFSEIGNDLIAELSKANVNKANTDDLKAIKSWNDKDYDNKLKELKNNPVDFKANIAPEEREDFLNRIQSLLVENREFLVNLINNPNLLEKDEFSSLLLALLHLDEELARRGELTDIKDADFNHLNGDMKRVYSKLVYEWVYYLKYLNKHYPYMISLAIRTNPFDSEADVHVTE

SEQ ID NO: 5639 - protein, 66 aa, Methanobrevibacter ruminantium
MTHLTITEYREMVKDIIEFKNENGKMPDFASVNNQEISHENYSAMINDVNNYILQHGRSPEFVQIK

SEQ ID NO: 5640 - protein, 497 aa, Methanobrevibacter ruminantium
MSFSDKIYNAKPGYTYDDFLLVPNASWIEAKDVDTKINLTKDIKLNIPIMSAAMDTVTEADLAIALAQEGGIGVIHRNINQEAQVAEVRKVKSAEDITVRDVVTISPDSSIETVQDIMENESVSGLPVMEGDRIVGIISKRDVRPFLKNDSKRLVKEIMTSDVVTIKENISQEEALDIAYENKVERLPVVNEDGALVGILTIKDILNQDQHPNAAVDKNGKYLVAAACGPFDLDRAMALDEAGADIISIDCAHAHNMNVVKFAETIKDNIDADLCMGNIATKEAAEDLIAHGADGLKVGIGPGSICTTRIVAGIGVPQLTAIADVADVAGEAGIPVIADGGLRYSGDIAKAIGAGADVVMLGNLLAGTLEAPGDVVTMNGRKFKQYRGMGSMGAMTGGSGGGADRYFQELEKGSHMKHSKLVPEGVEGVVPYKGTVAEVVFQLVGGLKSSMGYCGAKDIQTMKEVARFVRITTSGIKESHPHDFLITNESPNYPTLD

SEQ ID NO: 5641 - protein, 239 aa, Methanobrevibacter ruminantium
MLLLISPINHEEAVESIEGGADIVDVKNPKEGSLGANFPWVIKDIRELTPKDMLVSATLGDVPYKPGTVSLAAMGALVSGADYIKVGLYGPSNYEEGVEVMKGVVKAVKDTNPDATVVASGYADAHRVGAVSPWDIPKVAKDSGADIAMLDTAVKDGHTLFDYLDIDDCRKFTEEAHSYGLKVALAGSVKKDQLKPLYDVGCDVVGVRGAACVGGDRNTGHIDRTAVAELKELVQSFEE

SEQ ID NO: 5642 - protein, 2416 aa, Methanobrevibacter ruminantium
MKLKLIYLICMICCVLLTFSTVSAIDMDGNLTASVNHLDGSHSDQSAFISQSESSKTNLNANNNLRVSSGDYDCVETMNELSNLDSKDSKDNNLSKDKTSLKSDLNSIDSDEYSLKSSLSSINSSKKSSYEDGDNEYENLEDSLDSKNKNSLSSNALGAGTSTFGDLQTMINNAQEGSTINLDGKTFIGNGSFITIKKAITINGGSATNLARFDARNLSYIFKISASNVHIKNCYFSYSTNCSVYFFGNGSSIDNCHFDYNYKHLWVAVNIKYFSLTNCNFTNGKTDMGSTAYVVADNATVKNCNFINNEASGTEQCYGAALQIGASSSGINEGYVVNCTFINNRVITTHSYSHAGALCFRPGIKVYNSTFINNYCNRMGGATTLHSDGEIMNCTFINNSAGEYGGAISTGLMADNISVNITGCTFINNYAPMGGAILIKGNNVKVTNSTFKENKARENDGGAVYILGNDALILNSTFQSNYAKNVGAGILINGSYVTVLNSSFARNNASYGAGIYVIGSNANLFSSNFTNHNVKNGSVYIKGIGAYVYNCNFASNTGENGAALYIEGSNTTLILSNFTNNNVTKDGGAIYVVGSNAKLMASNFLYNNAIPSESDIKSGLGGAVYIKGNSNTIDSSSFKYNTARNGSAIYTDGKNMNLSNDNFDRNQAWSYVLDSVIKPSSSYFNRSDILINLTLIGGNNIANAIYNTASVNDIYFYNVSYISSKGKKVTTSNEIHPVNGASNSQNGALLYQDDREDNQLVNVIVYKDPNSKSTSLSAINKNDIILNKTFTTGILGNVSLNLSSSVGKAIAPGNYLLYAKHTEDDYYKEIDEDNQFEILPLVDVAVDIVSSKDIVEYNRTNKFTVKVINNGPNNATDVQVSAVLPKGLILVSSSPSVGTYNSSTGIWTIGNLNSGVNQTLAINTRANTTGAVNYPVSVSSYEKDTNEANNKDNQSIKIPECDLLIDIASSNHSPKYSDIVNWTVTVKNNGPDDASKVVVSLGNLSGNELIYQKSTNANFNISTQTLELSKLASGSNVSFVITTKVNASNKKITVNSSVSSDTFEYNLNNNQDNDYVNVAPLCDVGITVKVSNRTANRNDLVKWTITVKNYGPDKASNVNVALSDLASLGLGLVNKSDANYASNEWNVGDLNKDASKELVISTKVNTENKNIVLKGTVNTSTYETNKANNLANDTLSVNPYCDVLIEVTASDNSANKNDVITWTVNVKNNGPNQAKDVKVSLTNMEKLGLIVQNRSFTFKDIAVLENSTFNFNKSSNIWSIGSMASGDISSMTVKTKVNCSDKVLSVEGNVSTSTYELNKANNHDDDLLTVEELCDLAVEVNASKKTANKGDIVNWTIKIKNNGPDTASDVFLTVSDLESLGMVFVNSSSKDFDSESFAWEIGELASGKGLTLILATQVDTSDETIMVEADVDTSTYELNKANNADNDSLNVNPCCDIVIDISVSDSPVNKEDIVNWTIVVTNDGPDDAKAVVVNLTDLEPLALIIMNVSESSYDNGQWTIGDLPDGESQSLIITTKANCSNDTIKLDGIVDTSTFELDKSNNHNDDILEIDPLCDLSIEISVSDSPVNNGDIVNWTIVVANDGPDGASDVIVSLSDLESLNLEILNVSEDNFNPETYEWIIGDLDNNENASLIISAKVNTSDDILDVESTVDSKTFELNKDNNYDNESLIVNPLCDLIIDISVSDSPVNTEDLVDWTITVTNDGPDMAENVKVYLNDLDALNLILVNASEDSFDGDAYQWIIGNLDNGDAVELLITTRVNASNKTIEVESAVLSDTFELNKENNYDNDTVTVNPLCDLIVVVDVSNSTINKDEVVNWTITVTNDGPDTAENVILDLSDLEDLGLIVLNVSDDSYNPESGKWIIGDLAPGETVDLIVTTQANVSNASLPVEAIVQGDTYELNKDNNHDDKLLDVNPLCDLVIEITVSNSSVNKGGTVEWTIVVYNDGPDDASDVIVTLDDLKTLGLILSNVTYGTTSMDISYDGSRLFVKDISSEDSENSDSIDESDSSSPNMLKASSKLDGVGSDLDNGELKSLKSGSYLSDDSSNDSDKASNTFDEETNLWYIGDLAKGNSISLKLLTEVNRSNDNITLPSNVDTSTYEVVKSNNFDSAIVEVLPLADNGDNESVNSSDSNGDNPLDGDGNSTSDGSNPDGDNSSDGDGNSTSDGSDPNGGNGDEPLDGDGNNSSNGSGNPDGSDSNGDNPLDGDGNSTSDGSDNSDGDNKSGDNSGNPDGSDSNGDNPLDGDGNSTSDGSGNPDGSGSSDGDNSGNSDAGEKSDDGSSDTDGSGNTDGNGSLDEDGDNDSGSGSGNYGSDLYDMYPWDDYMDNKTNDGSNKNNQGDNNSHAGKKVKNPTKKNLSNHVQAKQQKGVPMKNTGHPLALLVLTIFALFTLSYRKFKF

SEQ ID NO: 5643 - protein, 409 aa, Methanobrevibacter ruminantium
MKEEEIESMRKIFSQLKDKIEPLSQSPAIQALQKRVMEIRKEAIKNNSQLLETVQNSFKENDIDCFLASNDIEAQKIILDLINEEIESNPNIDSNDVYICKSKSNTLREIGFLELMEENNYNVIETDLGDRILQLKKEDNDPVHPTGPASHLTVSDIADIVNQSMDLNLNPVPKEIMEAVRSDVLNLMHKSYIGISGSNSIAAEDGAILMVHNEGNISFVQSKKLHIIVAGIDKLVPHLEDSVSIAKLETAYATGKPLTSYMNIVSGPSKTADIEKKLLKNMYGAERVAVILLDNGRSKAIDECLWCIGCGNCIVSCPVYNIIGNKFGYSSYLGGRGIALSRYLKDNEVSVDSGLYMCTLCGMCTENCPVLTPTYEIIENLRCDSQKEGLFRNQHKSIRDNIKNKGSPY

SEQ ID NO: 5644 - protein, 252 aa, Methanobrevibacter ruminantium
MLLYFRGCTAREKLDSISEATQSLLKLFNIEYEILDNEQCCGSVLLRTGFKEDGIEQMNKTYSDIKGKTILTSCAGCYKTLKEDYKTYLDADLEVIHISQLLNELINENSINKLDKDLLITYHDPCHLGRHAGEYEAPRSVIKTFSNLTEMKNIKEKSRCCGSGGGVKSAYGDLSNSIAKLRIAEANETGADLLVSACPFCKLNLSQNSDDLEVLDLSEFVLKMLKESDLDLSNLKMLEEDNLELSKNKKME

SEQ ID NO: 5645 - protein, 105 aa, Methanobrevibacter ruminantium
MIIAIIFMYNRVRNKRSTPATFALWVVVWMVVLFFAFAPKISDPLAGFFGFSRGLDLLIIAGFAVIAYAGFRFYIKIDNLNQNMTDLVREIAIRNEIQLDEENDE

SEQ ID NO: 5646 - protein, 235 aa, Methanobrevibacter ruminantium
MSNEISQNTEGIFLVVPAYNEERTVSQIIECIAERGYNVVLVNDGSADSTLELATESKRKYPDKIFVVSHVINRGLGAALKTGMMVALNKGAKYIITFDADGQHEISDIPNVCKPLQDGEADAVIGSRPFEDMPLSKSFANLVMNALTFIFYGRNVKDSQSGLRAFTAEAAEKIDVVSTGYGVSSEFIKEISDKNLRLAEVTITTIYTPETQHKGTDAIVGLKILGKMVIDLFRI

SEQ ID NO: 5647 - protein, 152 aa, Methanobrevibacter ruminantium
MRIGIADTTFARYDMGAAAIDELKKNASDLKIIRRTVPGVKDLPVASKKLIEEEGCEIVMALGMPGPMEKDKMCAHEASTGLIRAQLMTNTHILEVFVHEDEEEDPKELKKLADNRAREHAQNLIKMMFHPRLMEKEAGKGMREGKEDVGPL

SEQ ID NO: 5648 - protein, 396 aa, Methanobrevibacter ruminantium
MPKEEIDKIKRNLSGNPDLDRDYLVSQLEYYKGHEYSYEIIKEISHLILQSLDFYLIEDIGSKKTMASRILDEVMQYIETRDKRTAKEKLDKYMESFVDKYENKEDHKESDFNSNRSIREIQYIRYRENKLADSPKSFRVSPKKDRQVNWRKDVKIKKMESNSIEEIHEKEYHSFLNPLEEILFYHYIGLKKELAYIPFNEPLFDLYYLYGTLLFESDEYGKSEEYLLKALRINPVSSKTILALADIYKSKTRTYNRFFLYNVDALKFAYRNEDIARAYRNFGFFYVEENQLDVAAAFYDFSLNYDYNKHVVKELEYLKSRGVDTQIETEEAVGIIESKNIQVGVNDFVLDALKFICFDLDSRKHTSQALYFYRILYDLTKDNQVLGRINALSNKI

SEQ ID NO: 5649 - protein, 253 aa, Methanobrevibacter ruminantium
MEKGEMVSLLGRNGAGKSTLFLHFNGIHQPKSGEIYIDGEKLSYGKEELMLARQKVGIVFQNPDNQLFAPTVEEDVAFGPMNLGLPIEEVEKRVKDSLEKVGMGGFEKKSPHHLSGGQKKRIAIAGILAMEPEIMILDEPTSGLDPKGASHILKLLYSLNEEGMTIVISTHDVGLVPVYSSKIFLISDGEIIKSGTPKEVFSDVETIRKADLRLPRVTHLAEILEKNNDIDFGGEYPLTIGEARQKILDLLGK

SEQ ID NO: 5650 - protein, 367 aa, Methanobrevibacter ruminantium
MTNDDKTQEFKLISKTIDGDEIFLNHDSIVVKFAGKRNAIVTSWLNGGYSEDLSAVFNHQLSQENIDEYGDGGILGFLEMLSYDFYNKLDLKGNKLSGLVTSAQIDEYSIAVERYKDIEVLAITTAGVRVNAVSAGDVASYYELNGEYDFDLENEDPNPNKPGTINNIILINCRLDESSLLLAEMIAVEAKAVALRDLMTSSNYSSEIATGTGTDGIAICSNLQSDNFIENVSKHAKIGELIANAVIRSIKEALANLQWLTPSYQLNALVRLDRFKMNLDEFYDKSLNLDEMEKKEFIMSLIKVSKNPELVGYVSLIIHIIDQYRIGLLDKKPALKVLNSILNSNFNRKEWNSMKLLLEYVIEKQIE

SEQ ID NO: 5651 - protein, 233 aa, Methanobrevibacter ruminantium
MIEELVTNMSITESGASASSPIFTITILVFTILLLIGIIYFVFKMYEQSKPTVESIVLIAVLTAIATVGRLILMSIPAVNLASFVIIMVGVVFGKEEGFLVGALTAFVSGIFMGMGYWVIFQMLAWGLMGASAGYLASRFDSLPFRFIFGLLWGFLYGWITDISAIFYSGTALQITPIIALYINGFTYDLTHGVTNAVLLVVLYDWFKKMFTRAKIKYLSNPSSSDESIDLTN

SEQ ID NO: 5652 - protein, 645 aa, Methanobrevibacter ruminantium
MALIEFKNFSFSYLNSDGTESLEKSLDNISLNINFGDFVLLCGPSGCGKTTLLTNLKKELMPNGRREGSIKYNGTEIAQLDDFTSACDIGYLFQNPDSQIVTDTVIQEIAFPLENIGLPTEEIRNRISEIVAFFGINDILHKNVNELSGGQKQLINLCSLLVLRPKVLLLDEPMSQLDPIASYEFLSIIRRLNEEFSITVIMSEHKADSIFPFIDNAVFLKDGKIEFNDNAHDICEEVINDDIFENYLPAVTKIYNGLSQNYLENEEYISEYEEFTKLNTPLSIREGRRYLNIISDELIKINEDVQKNNNFENDYAYDSLEKDNSNQNSTSSKKEHDYYQKSSLTTKKYNSNKLGLRDRLPFSNDKNTLIRMNGIYFAYEKNNLILKNVDFKLNKGDFLSLVGGNGVGKSTFLQILVGILKPIKGKVRYSKNLKIAYVHQNPMIHFSKDTVKEEFLESILSSNAFSASEFNMETYDGLLKLNGNEFLESDLLNNLKFKNIDYRFKELIGFFDIENLLDKHPYDCSGGEQEKIVIVKALIQNTDVLVLDEPTKGLDPISSKNLAYILNSLVDNGLTIVMTSHDLDFVANNCKRCLMLFDKDIQIDDDPKVIFAENNFYTTFVNRMVKDYIPQAVTLDDVKEIWDLK

SEQ ID NO: 5653 - protein, 334 aa, Methanobrevibacter ruminantium
MVLLAFIFSDPYFVLSFLALILILIALQGVSSELKNIMKFFIPLSVLIIILNPLLNRTGAHRIYLFNGFFITYEAIAYGILMSLALLIVILVFSSYNRSVSYQEMLYIFSKKLPIISMIIVMALRFIPLINSRAIEVQKLNNLKANGVESDEEDDLNDDSLEDNLSEENNLSDENNSKEDSDSLDLEQFDSNISSLDIGSDSRVFKKIKSSKRFQSIAKEAKVLGKIMGITVSWSLEESMFTAKSMKARGYNSNERTSYLSYKFGLADIIFLAIIIVTVSIIVIGLIQGYGMINIYPSIDFSFSDLPFNIYYFAFIVFLLPLIYLEIKERFLWR

SEQ ID NO: 5654 - protein, 1351 aa, Methanobrevibacter ruminantium
MNKVQLSSILALVLILFLSLAVVSANDDILNINVTDTQDSVIDNSNGISDYFSSDNGIINDDGLSSDDETAGSQLLNDSEDLDSSDDLAKDSDLEDSKETSKTQDNSQKNEDSKTRLSDSSIIRITDSSYSSYFDLSKDGAIREGTIKDGDTLLIGNVSGKIFSITKNINILPISDGDTMSNCLIRLIEGSSGTSLSNLRIVNRNEKVGSFYLCGIHIINSAGHDIVNLTINNSQMKCYGIIMSNASNNRIINSTIITGQATAIPMTGSSNNLFYGNYIETYNTNMIYYCMYGNGDFYPREDLEKSHDNIIANNYFTSRNGTYDSYCYSVCLMAEAGGSGTVIANNTFNNTFRPITVSTPDTLVINNTILNVGGEAGIIVDGNNVTIMNNNISTKRLEGFQWNKEGDVVGIFTYGSNTRIIGNSIDTVGTNGIRSSGDATFISGNTINTESSACINLTKSNAVVEDNALNGIGSSAVRIYTSKLVENTTIRNNNISSDSEGIVLKGKIDYSLVCGNIIEISNPEDAIIVGKYTNRNPLVPQHYAIFNNTINGIVVNLTDISEIERNDTDSGLNNTNTSDSGNNGTGNTGNGTNITDVNGTDINGTDVNGTNITDINGTDVNGTNVTDVNGTDVNGTDVNGTDINGTGNATIPVNITKLSTSITVYNTTVLRGDYLDAYLKDQYGNPISGVSIDFHFKDKVYAKTTDSEGKASLHFDAIPDNYTMNISFTGNNYYLSSNITIDISVIPVSYYLNESNFYEYFGEDGYLKGDYEYADLIFQGDFRNKRIVLNQPLRIISDSAVLYDSIIKIESDKVVVDGFTIVNRNPGNKQDNHRFAILLDYVRDVSVINNKIKLDSYDSGYGIYLSETQDSTVSNNSIDVKADKLTFGIILYDSKDNLIQDNIIKVNGTDDPHQYESTIQVDTSISVDDYEAEGMIIPEVYKTYGIILFYSSSNDIGYNVINATSGLKKYYTAVKESTNSIVGVDLYYDSNYNKVHHNNVVVSAKDPYLYGLGVLGAETGKRDQFATNNSFTDNIVFVNGTYYAAGIIAGYNSINTTILRNYIICFSNNVSYGVILEGALNSVVDSNYVISRSRINYVLEGYDTDYNLISNNTLNAFGQYVGDVSLYNSKHNYIAGNKLSPIFREGRLKDASELPGGVDFDAIFSELGVSNPLHDYSDKDWSELLRTDLTDHADVIPPHTGAFYDDGGEGNIFVDNEVPAPPSGGNGQTNRTGSGETNSNGNGNSSNGSQNSNSNSTVVNNNNGNSGSQSDMDGSGNNPETDTLKGNTVGTSSSAAVTESARAYNLDVDEDAASSRSLSFGGMNIPVLCILFLLIFACASELVKRSKRNIR

SEQ ID NO: 5655 - protein, 615 aa, Methanobrevibacter ruminantium
MSTKVHSPDELPQKPGIYIMKDINEEIIYVGKSKSLRNRVKSYFQKNLDSPKTKVLMSHFNSLEYIVTNTEKEALILEANLIKKHRPRYNIRLKDDKRYPYVKITDEDFPKIVITRTISKTGTYYGPFTDVTAVRQTVKFLKQLFRIRTCKRMDGPCLNSQIDLCYAPCDGQISKEEYKEHIKKIDLFFQGKYNKIIKDLEIEMKQAAERQEYEKAAVIRDQISSIDEVMKKQFVEFENDLDQDIIAIAYTIHNAVAVVMNIRNGKIMGKDDFTMDGSENTTSDEVISAFIKQYYGINRHIPKEVLLEEDIPDKELIEEWLSDLRGNKVSLKVPQKGNKLRLVRMAGKNAEIIKNQRQKMENSMMELKRYLNLKKLPRVIEGYDISNISGKLAVGSKVSFLDGKPNKKQYKKFKMNTPGPNDFAMMKELLERRLKPLKEHYEKVRINEEHTKHNEAETEKIEPLKLGEEPNLIVIDGGKGQLGMAVDVLKEYNLTHIPIIGLAKEFEEIYIPNSSFPIIIPQDNEALHLLQQVRDESHRFAVTYHRKLRSKKIEESPLDEIEGIGKKRKLELLRHFGDFDSIKKASVEELKGVDGMNEKVALNVYNYFHEGEKEQ

SEQ ID NO: 5656 - protein, 180 aa, Methanobrevibacter ruminantium
MKVIGVTGLPGSGKSILFDTAEEKGALVVCMGDLVREKAAERGEDSGTTARKLREEFGQYIVAELTIERIKEILEKDKDAKIILVDGIRSPYEIELFKESFDNFISVSIYASPQTRFERLVLRNREDDPEVYEDFLVRDNREIGFGIAEVVATADYMLNNECSLEEFKQSVADFIEKEMD

SEQ ID NO: 5657 - protein, 248 aa, Methanobrevibacter ruminantium
MIPKTHPRYESLLLRDKVKNAFKEGYLADSGMIAHGRGETFDYLIGERTTEPARKACEAAVAYILLAENPVLSVNGNTTALAIDEIIELAKATDSKIEINLFYRTPERVEIIERMFKERGWEDILGGNDEKLEYIDNLNSPRATASKEGSYIADVMLVPLEDGDRAEVLVQNGKKIICIDLNPLSRTSKMSTVSIVDNIVRAVPLMTSMALDFKEKGKDKDKEFLENIIKNFSNEQNLKDSLAEIKLK

SEQ ID NO: 5658 - protein, 192 aa, Methanobrevibacter ruminantium
MKRFIAIDGLDGSGKDTQARKIKEKYEQEGTVVIRSHPTSDNFFGRHSKSALEKKGKLNKIIATLCYGADAIRSVIKYYGKYDTVIFVRYTLAVSYLSKAISVPVYKLVCVLLPISEYFFYLDVSPKELVRRVKSRNEKEEMFENYDAFVKVRKMAEPVLYNWNVIPADDSPDEIFSRIEAILDELDKKLLE

SEQ ID NO: 5659 - protein, 175 aa, Methanobrevibacter ruminantium
MDEKIENPELKAIMAIDPEEMDEDQLNKFVEAFMEATLIVPAEMETDIDIEGMSDEEIALNEEIEITIIKLEDDEGHEFIPAYTDDEEVEKLDFDVYGLIFKTEDLANLLYESEDELEAVVLNPFTEYSAEIPLDSLFELFDLEECDDPNCDNPHHHHHDHEHNHEHHHDHEHEH

SEQ ID NO: 5660 - protein, 285 aa, Methanobrevibacter ruminantium
MRKEIISILVIAIIAISVIPTAFSATDNGIVITYGETTYNNQNYKSIVDNYFASKGYGSSNVQGEVITAADVNAISSGISGKTYNSNQIVSCALVDMTQNNEITVEVDNSITTITPQMYASALKSAGITSGHVYVSTPVTATGESALAGIMNCYEEVTDVEIPENVKQAANDQIYTEAAIVENNDDVSSEELSKLVDDVKEEVQEKNITDHDTIVTIINDYSTTYNINISDSDIENLADTIQQLQEVQDDANSYKEQLDDAVNNTTSGFSIDGILNAILSIFNFS

SEQ ID NO: 5661 - protein, 188 aa, Methanobrevibacter ruminantium
MKSSITKEDYLRIYEMTDDVFTLDFDCGKLCNNICCTIEKEAKDDEYLEMVLYLLPGEEELFFENQWFEMYYETTDEYEYPDSWKGKVYYVKCSDPPYCDRKRRPIQCRSFPVSPHLDKDNKLHLIYDEDDFSYDCPIVSQKMELSDNFKEKILKMWSILIEDELIFDLIKMESVQRENNEKEYDFVF

SEQ ID NO: 5662 - protein, 199 aa, Methanobrevibacter ruminantium
MNKKRFKLLLTIFIAFALINTCFILNDNLSAADNAPKGYSNYYIRGVCFNVPDSYKLVDEGWDDVNRLSYAHFKKGNNFLNISLDKHSTKFNKNLLDGFSSFTINGINLNKKTISHVTGFYAKKNGVKHFVFATEDDFVYIAAKGPKLKDVLSSTNQRDYKPYHDSEYDFDDDAYYESDVYDDSFDDSFDDGAYYGYDW

SEQ ID NO: 5663 - protein, 227 aa, Methanobrevibacter ruminantium
MKSAVLFSGGKDSAMALNYAINNGDDVRYLLSMKSQNDESYMFHVPNIHMTDLISQAVEIPLMEVETDGVKEEELKDLRRGFIQLKEEGIEAIYTGALFSTYQKSRIENLADETGIKAISPYWHKDPKEYMELVLETGFKVIISGVFAEGLDEKWLGRLIDAQALQELEKISEKTYLNLAFEGGEAETLVIDGPIFKKRIEIVDAETDWHLDNGTYNVIEARLVEKE

SEQ ID NO: 5664 - protein, 261 aa, Methanobrevibacter ruminantium
MMDLISGIIYLILFIIIMVFAFSMGILSPYVGRREIISIIAIGFVLGAIGGYFFIYPMYQDSPYVLGNLQGLFTMESEIINLNIPSTSNISDVTEKILNQNGVNSVSTNGFELTTSSINNETKTYIDSYLKNDSQIERYSIGTNNISVDLKNDASSTATLGSLVTWLSNTVGVSSEFAFVHIKVNVNANQVLDIKEYLRDNHYTIVSVEGPVQDTIHYFYDHLAPDYVVMCITGIIGVLVAIAGIYVEPLTKFVRAFRRGG

SEQ ID NO: 5665 - protein, 193 aa, Methanobrevibacter ruminantium
MFDKSIAKKSSLPFKSINNNSLFKFISINKCLFKFISINNKGLFKFISIDNKGQLSLEYILSAMMVILLITLLSVPILSLTIDYSNDVINSISTKNELSKITDSIDFCYYSGKGSKKVVLLDFNQDFSVRFTNNGQKGIAYADLELSDNNHKEISSEYDYIGLNTNIQFSKGFNKILVEWDEDTGLIRLSKLN

SEQ ID NO: 5666 - protein, 302 aa, Methanobrevibacter ruminantium
MNIYILFWNIFNNIDFYLMSGFIMVFFTLLLANYYDLKYGIIPNKLSVFLMTFGILINVLILIVLNNRLYAIFYVSYLIIIFIISFVLWKISFWGGGDLKLFCSIGFSLPFIDILNHFYTGSILNSFSFNSQIILYPKIFSILINSILLSFPVILLLLVYKLLRENKLNLILFAFSNMKLLIKELSTKTVFINDLKEGMIVEDYYFNSLELFNLMEELTGNEECYNLKASQFKENSYVLKSSSMAGLTRDDIKLINFAYMETLINFPNFKIKMGVPFVPSLTVGYLVFLAFGDLVFLISTII

SEQ ID NO: 5667 - protein, 71 aa, Methanobrevibacter ruminantium
MMASILRNQVNFTFSYNFHMMASILRNQVNFTFSYNFHTMKSIYYLEVNFTKSSKFYEMTSILRDDINFTF

SEQ ID NO: 5668 - protein, 199 aa, Methanobrevibacter ruminantium
MNDLDNNLANAKGIGKTIATKVPMNVHDELVHLVDCGAYLSISDFLREAIREQLKNYKIADMRKINYQDAKREVISYFKKYKVCFLDEIAINLELEFELVNTILNDLVMEERIKMISKADQVFKDYLEENDLDESQHFSNKGNNFIKFKGKRIIVESSSKDVDFISLRPSPKNKSVLKSHGMVLNNGTVILSECYIFLK

SEQ ID NO: 5669 - protein, 558 aa, Methanobrevibacter ruminantium
MDFYKDSRFFQNFKEWIYLTKYIIITGGVVSSIGKGITSASIGRILRSYGLKVAAIKIDPYLNWDSGTLNPYQHGEVFVTYDGMETDLDLGHYERFLDVELPGISNITTGKVYQSVITKERNGDFLGACVQIIPHITNEIKEMVREISAKDDYDVVLVELGGTVGDIESQPFLEALRQLRNEEGSENVMFVHVTFVPYLNAAGEFKTKPTQHSSKELRSMGINPNMIVLRSQEPIDDDLKRKIAHFCDVDVKAVVNTPDAQSIYEVPLVLDRENAGQYISDRINLGIDFENDKNTLNEWEEIVNSLKIQDPVVTIGIVGKYVELEDAYISIRESLHHAAAKIGAKMNIEYLSSDVDVEDVDELKAFKEELSKLDGILIPGGFGDRGVEGKFQAVDYAIENDVPIFGICLGMQCMVIQFARRIGMEGANSSEFNTETPYPVIDMMEEQKKIKKMGGTMRLGAYDCKLIDGTRTMEAYGEENIQERHRHRFEYNNEYRDVLTENGLVIAGTTPDNFLVEIVELPDHPWFIGCQFHPEFKSRPNNAHPLFASFVQAAFDNK

SEQ ID NO: 5670 - protein, 126 aa, Methanobrevibacter ruminantium
MDTKTITAELNEEQYKKYQIMQENNLSVGEAIDLIFNLREEFELQANDYLEERLAELNDKKESLSKEMSSIDDELNVLKKIVDSPMDFKQKRDIIEKEYASFDETYDIKVIRAKHQVSWVTDFFKF

SEQ ID NO: 5671 - protein, 150 aa, Methanobrevibacter ruminantium
MNKDNSSLNKNNLNLEKENSSLEKILKPESKLNSSLDLVSNMISDLDSDIESRLNSDLESSSSSFSDLYRNYLIEDNEIYLEMSISKDEFFKMMKFLYVLIDSYRLELNNIEVLDTGDGLLNICSSILMEDESNIKIIEAFLINNDFGND

SEQ ID NO: 5672 - protein, 247 aa, Methanobrevibacter ruminantium
MLLKIIENKKIKANQKEFDRFLERFHNNKKTFTVDCDHINLDYFNSESYVTIRHRKPNKESIYYTSFFKERDEVTYLFGLARENVVCTSSYMDMGAQIRPTLVAVLNLEDSSKSTIVFAEDSEEYNNVILLRIDCSQLNNDELTVLKNKNKITKLKDGKGFINFGAIGDFTTLKNIRNFISNVTFEYDNGLYAKIINVSIPINNSFSKPDSDVLKDRFYNFDKLDSDLVVIDPNEDDDSNKRILKIN

SEQ ID NO: 5673 - protein, 1562 aa, Methanobrevibacter ruminantium
MKNHSFMFLDSDFQDISNFCMRMEKNIVEGDGVDAVIWAGKIAERVTHYITKFVGIDLNELDQNKKLNTLYSKGIIPEDKYNKLDSIRQYRNIATHHELRDEMNIAKKTHKDVFNILSWFYGTYKGDEAYYKLKYPGVTYRHDESFLNQLKENINNNVKTIDNNKATTAIKSANDHIYQHDVDYNVHSYFNQNNVEFNPELNAYTAFFIFDDKKVTIGHFKTREVAVRKGYRFVLNEDFRMFQYFNGCLLPERLEDGSYSDSKGIDFDMEEKLWKASFDDKDLGYFISENSAIIARKEYIDTLPLPESKNGSYSDYKEISFDLNHKLWYIKKEGKILDYYDSEREAIHNLSNVYRLDIDLEDLGIVQDKNDSRWKIFYKNKYVTTCDTKEEAIKKRLSHISSFAPPKRNKDGEYSIHKGIYYDDKNLIWVLTIKGETLGFFDSEEDAFNYKKEFLKSKGFDVSDLIFHQEELFDDSFDFKVRLNSEENAVDYDKDNDEWVIYFRGNEIGRKASEDEARKFRRAYLKEMPYPPRKSNGNYSFIDGIDYDINSHLWLAKNGEELIGHFDSEEDAFYGLKEALVKEGFDVRDMHFINSDIKSNDENDGNLSNIVNPSKDYLIKDNSTKDYLSDGSVSNEDSSAEASNQKDGSDKLISFYDVFRTNTGNYILSDSEESLSDSEESLSDSVESLSDSVESINKPVESADEDFKNNSESIANDSAFETDNGRGVIDQEFLADGDKQFNMGAIIQEDNSKNINEYKKSSFYGIANQNQDDRLSDDLSIPYLESEDNYEYMEDLNLEQLNLDENNGFLNISENLFKSSNRKELKEIKLNSYDSNNFRREMVLSYNDSYLCVSLQGMVNKDELKDIIFLDILDNMVKLNYSKVDEEYFSIFINVQYKLSTIDLVTLINLLSDLGWEFDLLDKLAISNDINLNSLVQSKIGKIRDKRKAHSNELIKSSHNEDSLISKSKINDSIVSNESDSNKGSSKFKENLSLYDKFSLSSNDAEDSDAQKAKDKSLKSKDYLDANPISKRKSYPKQESISSKNKKSNSKSEKAIIRGGVRVSLEEAHEIDNAEENKVIKSKIIDKKPEMVKDFKTTSLDSLLEANRIKEEERLNSTSDDIGDDLSIEDNSDTFKDDLNSNGLETLENGLNLIKEGLNSAENDLDYAEDVLNSEEDDLDSAEDVLNPEEDDLGSVEDVLNPEEDDLGSVEDVLNPEEDNYVSESSLNDDFDSLDYSDSLEDSTDSSFDYGDVLGEDNSNSNSIEDIFNDEDDLDSEGLLDEDSDDVDFLEKVSSDLSSTNLFDESADLSANDLFDGYNDSSSSDLFDDESETSFEDELDNIGSSNQEDLSTESNDSDSNLEEIGSLKETAEQTESESDSTASKVSKPKVKKAKKPKKVPADAFDEKYANSTEIEYDEESDKWLAFLGGDLIRSFNTPKEAYIERKKLLRRKVKRPKRGMNGRYSEFEGIDFNTQEGLWTSSVNDIIVCYSITEKEAHKKRTMFVDLILDKFDVSEEEFTEDLLEEIKSTNLEDLFADLSDEDLNDSSNLSLKEVKKELNKF

SEQ ID NO: 5674 - protein, 99 aa, Methanobrevibacter ruminantium
MEEIRKELIKFQMERDWKRYHTPENLAKSISIEAAELLEHFQWQKEYDKDEVVDELADVFNYCFLMADALDVDVKEIVFNKMKKNAIKYPPKVSSDDLK

SEQ ID NO: 5675 - protein, 257 aa, Methanobrevibacter ruminantium
MDDFLSNFVLKEEETSLSDSKKDVLKFLKQIGVDTRFVSFFEKDNEKRIYIENLRFSRFSRKRTSIFNNEYPDIEVVRSSLFQKICLRASKTLSNSLDPKDRVIIPKMDNEYNELLFIVLESYSRKYGIIFIEYDENENINLKDFNAIVSPLNLNQEVNHILNDIFDGKGIEWDRKFDLSSLYGFNASDIKDKKIIFPFINVPQEWIYDFLGIEKEYVIDYDNDDIGDSFMGFLSEINPQFKENVLAASSFLETHQK

SEQ ID NO: 5676 - protein, 298 aa, Methanobrevibacter ruminantium
MVDGKTKILGVIGDPIEHTFSPAMQNAGLEALNLNYIYLPFHVKSDNLNSAIEGAKTLGIRGLNVTIPHKREVITCLDEVDPIANMIGAVNTIKFDYDENEGISTKGYNTDAYGCLRAIEEKASVKDKKITIVGAGGASRAIAFQMASSDIGELSILNRNFNKAESLANDIKSNLKQLNDNFNLNINAYDMDSLKREIQESEILIDTTPIGMYPNINDKPIASADMMHDDLIVNDIVYTPMETSLIKEAKKANAEVVYGYKMLLYQGIRSFEIWLGEEAPVKEMENALLKVFRHLNGF

SEQ ID NO: 5677 - protein, 179 aa, Methanobrevibacter ruminantium
MNLCMTTLRMSLAEKRQHLSKLFLEVLKEHSGTISVYDLMSVTAELREDTKYVQDKYREETNAVYVKYFLGRIKNIRDDNNQYDGSIDKDDFIESVATLKSYQEGESKTSKTKFPLIYAIVSLYTTYILEEPIHPVGTPFPGSLKVTQKNGVFYCPVKEANLESPNAVCKMCIAEQLEF

SEQ ID NO: 5678 - protein, 1539 aa, Methanobrevibacter ruminantium
MSKTNKKKLFLSILIILSVLISLSSVSAINTNDSSIQDNGDLSIQDSIDEISQFDESEQLNKINKDSPESNFNQELSNDSKDISADSNQDLMGFENYDFKYNTKSSYSNALKDSNVINVTGSTFQDIQDAIDRANDGDILYLKSYKFHGNGTAISINKPLTIIGSYEANNKSHYLDAYLKSRILYIDSDDVTLINIHFDYGGNIDNNGNGGAIYLDGTNCAIVNCSFKGNHAWLGGAIFQSNNSNDLYVGGCKFVENNAQIGAGITTCGFNCLVSNCSFENNSAVTAGAIMTDTQKNGDMTFFRLENSTFINNNATGGGGAINFDGYYQSVYNCKFIDNYAKNSGGAIYGSLKPFDVSLCQFYNNYANTGGAIRGTANYNVSDCRFINNSAHHAGAVFLHSYSNVIDSYFENNYAEANGGAICTDSNTVGVIIKGSTLIGNNATTGSAIMMVSSRSIIENCNFSGNIGKSEGAIYSIHDCNISHCIFDSNQAEKGGAFYIYRGNNSNIDNCRFINNSANSSGGAIYWYVNKGKISNSYFEENQARYGSAIYCSNVEADSGFIITDCDFINNHPKEDGSNTKGGAIYLYDQLKCIIVANSTFEYNYASRGGAIYVEGDVNLIANSTFKYNKADIFSLSAYNDNANLIVTLRGYENYMNAIYAEKTVDFHNVTYWDGEFVTGDYPIKRNLEAGINIILDCRGNGHSLNVTKMTNSMGEVIFDEMRTLPSGTYAYQVSVPDNSYYTAKKLKPDIFNVPYLCENILGIDVADISYDQYPVVNITANYTGNYTVYIANSSYDVTFTDQDVERGRVLGYNITITDEDVVKGEKLIVIPHLFDIKDGYGAYVQLRAIDQENVELVYIQNRTSFNVYKAASALEAEGAVAVNGSDIELNYMAQNGTVTIESIKKDGSLLENGTDYNFTVNDDKIIITGLDAGHYIANLTLIVDDYHNSSSIDVSIDVLIKTSIDVADSISIAETESSLINATLSPEEAGLLNYQSDNETVAVIDNDGRITGILKGNATIFVSYAGNEDYSPSNATVKINVYPLVDLKINKTANVSKAFVDNMIKFTVSVVNDGPSNASGVYVDETLSSILDLISNSSTKGSYDGNKWLVGNLNNGESASLTIVAKINRAGIISNDVTVKANEADSNQSNNNCSISIEGLMIETVLTVPNVTSSYNMDKNFTISLKDINGNPIGDANITVDLNGKKSYITDSNGQIKLSTTGLAVDTHVLNVTFAGNYKYNGSSSSSKIVIIKDSSKLNATDIISTYNDDDYLIVSLTNSQNNPIAGANVFVDLAGKRNYTTDSNGQIKVSLKNLIPDNYNASIAFGGNENYTESSTSAMVTVKRAKTSFNYTDMNTVAFDSKLEGRVGEYFKFKLLDNNGKPIAGRQVFIGFNGVKYNRTTNETGEAQLQINLKYANHYTFAIAFLGDDCYSGSFNVALISVTEQTPVLTTSPKTYKSSAKTKVLTATLKSSRESALPGKKVTFTINGKVYSANTNEDGIATVKVSLSKKGTYSFTVQFGGDSTYKKITKSSKLTIK

SEQ ID NO: 5679 - protein, 1686 aa, Methanobrevibacter ruminantium
MDKKVSKTNKKKLLLSILILFSILVSLSSVSAASDLIQDYEDLTIQNSYDDLIIQDSFNEDLIQDSSNTELKTQDSSIDNLKETINQTESIDDTLTNQDLSSLQDSSKENIKDSNLKSSRLGKSITVKGNTFQSIQSAIDGAEAGDTIILSENMFKGDNYYGLGEQIYINKSLTIMGSSQFGSQYIILNALHSSRIFNITADNVTISNIQFTNGYVVGEPGGAIYWFGNNGKIINSYFSLNCANSSMEWDIEGGAIYFGLKFKNQYIENCLFKYNSAYDGGALYTCSQNTTISKCTFDSNFGISNNAGGMANGAALSFSAKDVYVIDSTFLNNDAPEGWGGAVYIYKHGYEPYFFNCSFKNNSAAFGGAICWLTDGGTFLNCTFENNHATGGDAIPHGGAIYKIGRNGGNIINSTFTRNYATTGSAIYLNAYLNIDNCTFTDNQADSEGAIYIITDNVTIRNCLFDKNYAYNYGAAIFSWDHDNIKVENSRFIENHARNEGGAIYFLGKNCQIYGCLFEGNRVSNFYSFGGAVFMEISGEDTSILDCSFKNNSALYKGGALYISYGSSEKIAIINSSFEDNSASNGGAIQADWNLSLIANSSFEDNSASYGGAIQVFGSVDLIANSSFEDNSASYGGAIHVFRSIGLIANSTFKNNYANSLEINQSKESYGRVFTFKGKENYINAIYTEDYSLNFENVTYWDGSFVTSGSPIKSDCEAGIKIRIVLRQGVSAGPVVLNITKITNIKGEVVFNEYNGLSPGIYYYEAYHPKDSYYSESEKLSGMITVPKKATDNTLAISLDDSIYGEDLKVNVNTDVSGEYRIYIANSNYDAIFTDDDVAKGNVLAYDITVNENELKGNKWTILKNSLNVKNGYGAYIQFADLEDGENYINIHNRTSFNVYKAESSIDANETIAIEGDGAEVNYTIENGTASIDNIRRGSAILEEGTDYNFTVTPDKIIITGLDMGNYTVKLKTIVDSNYNPSTKEVFICILGRTAIDVQESVAIEKDKSYLLSPTLIPEDAGTLRYISNDESIVKVDSKGNLTAISEGNTTIMVLFDGNDIYAPSNATVKVSVYSGSMPTSIKVNKSFELYMDESIDMGAVLDPANAGNLTYKSSNEKIVKVDNYGKITGLGQGKANITVSFSGNEKFLASNATALVTVYPLVDLKIAKSANVSGEVYIGDKIKFVITVSNNGPSNATGVYVNEALNSNLVLASNSTTKGNYDGSKWTIGNLNKGETVNLTIIANVKSVGNIDNKVIANSTERDSNYTNNIASISTIKALPIVDLSINVTSNKKSLNVGDTFTYTINLINLGPSKATNIIVDELLSQFIELVNVNLSIGNYDNSTSVWSVDQLDPNSPVSLNLTVKAIRAGKIENSVTAYSNEKDSNESNNNFTLSINCVKINTQLTANNITTSYNLNKDLIIGLNDSKGNPLSGFIVSVDLNGKKNYTTDSNGQIKIPTKSLIPDTYNATIRFEGNEKYYSSHASAIIVVKRASTSLNYTNMNTVAFDSNIEGRVGEYFQFQLLDNDGKPIAGKQVFIGFNGVKYNRTTNQTGEARLQINLKYANHYTFAIAFLGDNNYSGDFQVALINVTEQTPVLTTSPKTYKSTAKTKALTATLKSSRGQALAGKKITFTLNGKVYSGNTNSDGIATVNVSLSKKGTYSFTAQYGGDSTYKKVTKSSKLTIK

SEQ ID NO: 5680 - protein, 433 aa, Methanobrevibacter ruminantium
MEFERPRGTRDFLFEEMRERKMAEDTLRNVFENYGFGEVQTPLFEDLKLFTTKSGEEIVDQLYNFKDKGDRDLALRPEITAPIARLYLNELQKTSKPIKIYYYGSCFRYERPQKGRFRQFWQFGCELIGAKTPEGEAEVIAMCNNAIEELGITTAEFNVNHLGIIRGLFAHFDIDTATQREIMVVIDKGDKDLLKDSLVGENPIIKDKPELNEVLFKLMDMVGDSSIIKDIEELVAPYEETQEALEEFKELVKTLESFQVFNYKLNLGVARGLDYYTGIVFEVYVEGLGAQKQVCGGGTYNLVKLFGGEDVVSTGFALGFDRLMNAIEELNGKVELEPIVNTYVAAISDSTRHNAFSIAQDLRKANIPTEVDLSRKKFKKILAYANKIDVKYTVLVGERDLEEGKVTIKDMLTGEQELVAIDEVVDYIKGKLY

SEQ ID NO: 5681 - protein, 137 aa, Methanobrevibacter ruminantium
MELNFRLNMGGEDLVIAVAQDYETNDVLMVAFMNKEAVEQTLKTKKAHYYSTSRQKQWLKGESSGNVQTVKEMYIDCDADAIIMKVDQIGAACHEGYRSCFFRQLDIDKENIDLDSLTDEDISIISERLFDPKEMYG

SEQ ID NO: 5682 - protein, 720 aa, Methanobrevibacter ruminantium
MDFNDYDYDSEYNNDEEEYNDEIKRIVPDTSAIIEGNVEKIIKEKGLNYPEIIIPEAVIAELEHQANNQRPTGLRGLENLKKLQEMAEIGELSIRITGRRPTKFEKDNAKLGEIDGLIRDVAKDELALLITSDKIQAKTAEAQGIPVIYYAQEYKGSIDLKIAKFFDEETMSVHLKENVPPMAKKGKPGHIKLVKLADEKFTFKQLEFIAEEILEKERYDPKTYLEVDRQGAIVVQSRDLRISIARPPFAEALEITAVRPVAEVSLDEYHLSSQLIDRLTNSARGILISGSPGAGKSTFAQAIAKFYDEDLNKVVKTMESPRDLQVADTITQYAPLEGDMEKTADILLLVRPDFTIYDELRKNHDFSIFADMRLAGVGMIGVVHATKPIDAISRIANRVDLGTIPSIVDTTIYIENGEISAIYENKLTVKVPTGMEERDLARPVIEVRDFETGTLVNEIYTYGEQTIVMDIGMVEESKKAKDKEEKTPVQIIAEREILRTMKRIVPKAAMEVSMENDRRVNIYMSEKYIPKVIGKGGKRIAELEEDIGISMNIEPLDKAPDSFSERLSKRSKKKKSKKEKKKKSKKSGLKEYNGVEDGELSEDGLKDYNKDNYFDFTDDNEDYYEDYEDYDDSDILEDDYEELFYDTFEVFPKVRKSRVELPIGKKYVGKSFDIFIEDEFLFNATVSKKGNVKVHRKLKSYGKIVSALDAGDRIIAKVRK

SEQ ID NO: 5683 - protein, 255 aa, Methanobrevibacter ruminantium
MKLGASIFPRKIIPIEKSLDYFESNRYIEYMEIFHDYPNRDIDVEKDLIDKFNSYDLKYTVHAPFIEVNPASVNPALAKASVDEIKRSVDLANLLDSDIVVIHPGRAIFTNDMEYMASVYRIAEENLKVIGEYAKDNGVMTCIENLPRLRGFMYQDINQLNETLERTGLPMTLDIGHAYTAGFDVDDVSFDCISHIHIHDNDGIRDSHLPLGEGIIDFKRFFEIFDKYDGIYNFELGSKEYIEKSIDYLKGLKLI

SEQ ID NO: 5684 - protein, 257 aa, Methanobrevibacter ruminantium
MKIGASMLATEDKTMKESLDYFDSNKYIEYVEILHDYPYRELNDDKELIDLINSYDLKYTIHSPFIDLNIASLNSALAKLSVEEIKRSIDLANMIDSDIVVAHPGFVSFNGRGKEDIIYEIGREGLVEIGDYAKDNGVNACIENLPKIEGFMYQDVNQLNDTLVELELPMTLDIGHAHTAGFSPDEIYFDSVKHIHVHDNPGDDDTHLALGDGTFDVNGFFDVFTKNGYDGIYMLELNHIDFIQKTLDYMKNLGLID

SEQ ID NO: 5685 - protein, 433 aa, Methanobrevibacter ruminantium
MWNEEIETMPREDIYELQLKKLQSTVKRAFDKIPYYNKKYSEANVFPEDIETLEDIEKLPFLTKDDLRACYPFGMFAVDKKEIIEVHSSSGTTGKPVVSGYTQNDIDNWGEIVARGLTMMGLDSDDIIQNTHGYGLFTGGFGVHYGAHRLGATIIPISTGQTRRQVEIMADFGTTCLIFTPSYGIYLGEVAKEEGIDFDKLGLKAIGFGAEMWTAEMRDRIEETFKTKAYNIYGLTELMGPGVGIECSAQNGLHIAEDFFYPEIINPKTGETLAEGKHGELVLTNLERESMPIIRFRTKDLTALHYDTCKCGRTLARMERITGRSDDMIKVKGVAIFPSQIEKALLKVSNIEPHYQIIVTRPDIMDEIEIKVEASASLFSDDIKEMMAVKRKIGEYIQNETGIAVNVSLVAPKSIPRSTKGKIQRVIDKRNLH

SEQ ID NO: 5686 - protein, 144 aa, Methanobrevibacter ruminantium
MYKITQLSIFLENRRGKLYNTLNLLAKNDINIRALFLADTTEFGILRLVVQDPIKAKDILEENDHIVKMTPIIGAELDDTPGGLSTVLKIIKDEEIDLEYLYAFTHEKTEKAILLLQADDLDNLIGILTAYKVPLVPAEEVYNL

SEQ ID NO: 5687 - protein, 316 aa, Methanobrevibacter ruminantium
MVKVCIIGVTGVIGKNVAFKLARADTVDEIVFFTREKSLSKAKGEIYDMYDALAAEDIDCKLTPTSDYKDMAGSQIILITAGAPRKEGMERSDLAHTNAQIVYNYAKQIAIHAPDSIILIATNPVDVMTAVALEASGFNKKRVIGLGNHLDSLRLKTYFARRLDINSSEVHTRVVGEHGERMVPLLSSTTIGGIPLKYFIKDVKLDLPDIVKTLRNAGNTIISKKGATEYGPAYAISNLITTIITNIHKILTVSMYLEGEIADVEGVCLGVPVVLSKKGAAMIVPIHMNDYEVNKFQIAANHVRELTNEVLERLEK

SEQ ID NO: 5688 - protein, 834 aa, Methanobrevibacter ruminantium
MYKDAILVRGAKVHNLKNIDVDIPLGKIVAIAGVSGSGKSSLALGVLYAEGSRRYLEALSTYTRRRITQSEKANVESVQYVPAALALHQRPNVPNIRSTFGTSTELLNSLRLLYSRCGSYICPNGHILKPSLNVAREIELECDVCGERFYGLGAEEYAFNSDGACPNCSGTGIERVIDDSTLVPNENKTLEEGAVESWNMFGINWMYHVAGELGVRVDVPFKDLSDKEKEIVYKGPSVKRYINIPSKNGKLFELNAEYRNAHRAVEEALKNAKTEKGLTRINKYLKIRECSQCHGTRLNKRANSTLLGGINISQACQMTLEDIVKWIPNVINNLPKEMQDMANNIAEEFMDNAKILLDLGLSYISLDRPSNTLSTGELQRVQLARTLRNPTTGVLYVLDEPSIGLHPANVEGLIKVMNRLIEDGNSIILVDHDVRILRIADYLIELGPSAGSNGGKIIAEGTIDEINKNKESLISGFLSNEEKIIIRKKSDKNSIFKNGSIDISTCQIHNVKPMDISFPKGKLTVVSGVSGSGKTTLLLESLYPAVKSLINDENIPNNIKSIDAKNINKIELIDSVPIGKNVRSTVSTYSGVLDDLRKIFAKLDSSIERNLKASDFSYNTGSLRCPSCNGTGTISMDVQFLPDVEITCPDCNGLRYSDEAGEIMLGHLSISDIMALTIDEAIDELSNIEDESIDPLLKRAINKLAKLSNLGLGYLTIGESTPSLSGGEAQRLKLASEIGKSQRNSIFIFDEPSIGLHPLDVKVLLNVFQTLIDDGATIIVIEHDLDIIANADYIIDIGIDDKHMGGEILAKGTLEDILNSKDSLTANYLNEINL

SEQ ID NO: 5689 - protein, 165 aa, Methanobrevibacter ruminantium
MVNEKMEAALNAQLNAEVYSGYLYLSMAAYFEDVDLAGFANWMRVQAAEELEHGMKFYDYLIRRGASVTLTAIDAPQTEWESPLAAFEHVLEHEKMVTGLINDLVDLAIEEKDHATNNFLQWFVEEQVEEEENAMENLAKLKLAGDDNSLLYKLNEEFAGRGAAE

SEQ ID NO: 5690 - protein, 51 aa, Methanobrevibacter ruminantium
MVFVCDICGYEYNPEAGDPDNGIEPGTAFADLPDDWTCPLCGAEKADFVEE

SEQ ID NO: 5691 - protein, 52 aa, Methanobrevibacter ruminantium
MAQHRCTICGYVYDSETGEERRDLAAGTEWEDVPDDFTCPLCGAVKTMFRAQ

SEQ ID NO: 5692 - protein, 205 aa, Methanobrevibacter ruminantium
MISLKTIVINAGPKKRGFNAEMAKSALRGAQSVGAEVEFIDLYRLKFTGCLSCLICMRDDFESCKCFLRDDLSPLIDRILDADCLLIAAPIFFSNPSSHYMALLERLIFCIVSNKGENLFKGKVNVGLIYTFHYDKGYFEESVRPHFKHSEDILKMLNGEVEIYSAEYDSKKTYSTSFDGEISSEDECFTLNLEKTYEIGAKLSN

SEQ ID NO: 5693 - protein, 136 aa, Methanobrevibacter ruminantium
MFKNILVASDGSKCGDKAVDIAIDLASKYDARVAALYIMDFGLDLSYDDMDDAGGAVLDDITAKGKEKDVVVVEHIITADPIQDMETMIRKINPDIAIFGAFGKSTDKEDKIRYDKIGRVALNALKVAKVPVLLVK

SEQ ID NO: 5694 - protein, 573 aa, Methanobrevibacter ruminantium
MISIKNLSKSYKLENGEELPALKNINLEVEDGEILGIIGTSGSGKTTLLRILRGVEKFDEGEFTIGRYTIKPDSSQFYYNQVKKETAIHLQRSFGIWPESVLDNVVRKLYGAKYGDESGTDFEIAHDQFDKEAMEIIELVGLEHKADHLASVLSGGEKQRLIMARQLAKKPAVMLLDEPATMACPKTKQEILDAIKKINDELGITVILVSHLPEIHKFLADRVVLMEDGEIVKDGDVNEVVDEFLKDIEEPVDIDIESTDETIIKAIDIDKRFYLLKGKNVLHMKDVNLEVNRGNVLSLVGPSGAGKTVLLRMLGGLDYPDSGDVLFKLVNKEDGEEEIRWVNIENASLDRMEIRRNLGFMHQEFALMYYATIQSQLAVKLGYKRWDMVEEAKKRAKENGLPDILLDALYQLTDLPEREAKARLEQIGLDPTILDELFPKFPETQIKEEVKDLFEALDLPLDILPRRSYELSGGQKVRAMLALVLVSKPDILLLDEPFGDLDPKTLRIVANSLKRICKEFGTTLVMVSHNTDFIKELSNRAVFIDQGHLKDDSEDVDKLVDDFIGFCKADYLM

SEQ ID NO: 5695 - protein, 861 aa, Methanobrevibacter ruminantium
MNINLKKITFLCLVLVLIGLISFNSISANDLGTVLEDNDNNGLNDLNNDDFINSDVNSDSINKEAISNLKSLNSQDESTSSDSNNSASSNSNSSVASSSNSSASSNSANSNSSTSSNSANSNSSVSSNSTNSNSSASSNSTNSNSSASSNSTNSNANTNNSSSDASKTQTIKLSSQEESALNEFLNAIKTTTKGTIVLKNDLVLNQTISLNNNITIDGRNHSISSLDVTNMFKTFAKITLKNIVFTNYHEIENLRAILNSGELTVLNCQFNGFSYLTNGSAIYNSKKLTVQGTKFNNNYVNNSGGAIYSTGTLTINNSSFNKNHAGKNGGAIYSTLNLILNQSVFSNNSANESGGALYSKGSGLNIKYSRFNNNSASLNGGALYSSSNSTVISYSNFVSNFVEAYDKASNGGAAFIYYGSKIAYSNFTSNHCKTTLTNSSQKKSIQSMGGALFYYGGNHTLSFSNFNKNSVENDGGAVRIAKNVGKFTLNKCNFTNNNASYEDGGAISLATPNITISNSIFKNNFANEDGGAIDTFSLGSYKVNVLIKNCLFNSNTAFKAAGAIYLGVNTVQSIVNSNFTSNKATVAGAFYIESISVSISNCIFSSNKADNVSKKTIYNKQGKVVSHSGGAVFVKNGSTVTIKNSLFKSNKATSGGAITNHGKMVIDKCNFTSNSATNGGALYGGGKTSTIRNSIFYKNSATKTGGALFINEGNVNMKSSMIVSNTAKSYSVYSTVSITLNNNWWGNTLSIKDKSPKTLGLTNVKVSTWLHLKIRAKTTKLAKGKTTTLTIDLRYNNNDKLVSTAFNNPLTLTVSEGTLSSKKVNLKNGKATVKFKKTNSKTAVVKVKLLGKTARCTIKTK

SEQ ID NO: 5696 - protein, 351 aa, Methanobrevibacter ruminantium
MGMKNLILSKSDQFNHYKDKANQLKKENKELKLKNEELEFKNNELSPELEEGISLIIPSYKGENHIQPLLESLEKQTISKDLFEVIFIVNGEMDSTIDILTDFAKSNPDMNIIISYTSEGGVSNARNIGIRIAKREYIGFLDDDDFISDNYLKALYDHIAPNRVVLSNFIDIDEETGEEIGSRLVPYSMNREGIFNDVVVKLTNLSIITTAKIIPALAVKGTDFNPNLNNGVDVSYYARLYPKNHFEFYFVSKEEGAVYYRIRRSGSISRQETSYQFNVLDRLKVIDDINESYKQVDKSDELYVHFLKILFDAQTYFIGLYLDEYPQDREKVIEEVRKHNFEYFSYEKLEG

SEQ ID NO: 5697 - protein, 213 aa, Methanobrevibacter ruminantium
MSFSLESIGIKAGGRYETIYTTMNKAGEMDAAPIGLKYIGDYDVAARIFEGSKTLKNIQETGIFVVNITNDPSVFARSLYDNLKEEEFVKDDDIVYLKNADAYFIALVKSIEEMKPEHDHVNEGAKNYIIKAEPLKIIINRQGAKALNRGLFAFLESLVDYTRVDIIDDEKKEEYKKRFIENERVIQRVAEDDVKENMAILKEKMIEKGLDLE

SEQ ID NO: 5698 - protein, 372 aa, Methanobrevibacter ruminantium
MYNENVASKTKKILDSALDGPISVEDGNYLMNLKGSEIFPLLATADAIREKVVGDNVTFINNCNINFTNICKVRCGFCAFGKDADDPDAYHLSDEEILKKAEGAVRTGAREFTLMGGVLEDADIEYYEHLLKLLKSEYPDIEIHGFSPMMIKDAALKSEMPIEEAFKILKKAGLGTLPGTAAEILTDRSREIICPKKVTTQEWIDIIKTAHNAGITGSATMMYGHIETMEERVEHLDILRNIQLETGGFNEFIPMTFMHEYSPIFLEGQENLGATGTQDLKLYAVSRLMFHDIIPNIQVSWVKMGFRFAQVSLLAGANDLGGTLGGDELSEASGAPDGVDASIKDLSRLVRDLGRVPLERNSEYTEFYPIEL

SEQ ID NO: 5699 - protein, 178 aa, Methanobrevibacter ruminantium
MKRKNRGLLIGRMQPVHNGHIEVIKETLEEVDEIIIGIGSAQLSHELKDPFTAGERVLMMRNALIEEGIDLNKTYIIPIEDINRNKLWVSQVEMVSPPFKKVYSGNSLVQVLFSEEGYEVIAPELFDRKVLSGTEIRKRILMDEDWQSLVPKATVEIIEEINGVDRIKHLNKKEISEL

SEQ ID NO: 5700 - protein, 145 aa, Methanobrevibacter ruminantium
MVIKIVEKDDEYFTIGDLIEEIKKSDRVDEAGAIYSFEGIVRGEEENLTVDKLTLTLPDKEKGLEQIESIVETAKVKHGVFEISVIHFIGEFYTGDQLFLVVVLGPHRGETLEALTEVVERVKHEIDFKKEELSNQGTKIIMAGG

SEQ ID NO: 5701 - protein, 68 aa, Methanobrevibacter ruminantium
MAISARNGIKGTVESVKLGKVMASIKIKVEDPALITAVITKESAEDLDLAVGDDVSAIIKSTQVMVAK

SEQ ID NO: 5702 - protein, 68 aa, Methanobrevibacter ruminantium
MAISARNGLKGKIEDVKLGEVMASIKIAVDEPAVITAVITRESAEELSLAEGDEVSAVIKSTEIMVEK

SEQ ID NO: 5703 - protein, 68 aa, Methanobrevibacter ruminantium
MAISARNGIKGTVESVKLGEVMASIKIKVEDPALITAAITAESAEELELAVGDEVKAIIKSTEIMVAK

SEQ ID NO: 5704 - protein, 68 aa, Methanobrevibacter ruminantium
MAISARNGLKGKIEDVKLGAVMASIKIAVDEPAVITAVITRESAEELALAEGDEVSAVIKSTEIMVEK

SEQ ID NO: 5705 - protein, 68 aa, Methanobrevibacter ruminantium
MVISARNGLTGKIDSIKLGEVMASIKIAVDEPAIITAIITKESAEDLGLAEGDKVKAIIKSTNIMVEK

SEQ ID NO: 5706 - protein, 407 aa, Methanobrevibacter ruminantium
MSANKKFIRDSIHGNLPLNSFELEILDYPQLQRLRRVKQLGFIYLIYPGANHSRFEHSIGTMHLASKLADQLELNDDDKDLVRIAGLLHDAGHGPFSHVSEAVFDVPHEELTAFVVKNTSLADKLSEKFNTSEIIDIINGKGKLGPIISGELDMDRMDYLIRDSHYTGVAYGVIDTERIISNLKLERELILDIKGVQAAEAALVARYLMYPSVYQHHTTRIVNAMFRRCLRHMIHQDILNPKEMYKYDDADMISMCRNSEGFSRDIMERIDNRRLLKVAKSIPVNRFENPDKIFKISKEELLKAEEEISQDFNIDRNYLIINLPEYPRFDEMKTWVSFGDKLYHLNEISSIVGALSSARFNSPDICLYVPKEDLEKTKRIKLENYLDLPEEVRRYDTIHFNQSKLFD

SEQ ID NO: 5707 - protein, 184 aa, Methanobrevibacter ruminantium
MIIIAITGASGVIYGVELLKALKQLKIETGLLISNPAKIVIEYELEESVEEIKSLADHYFESEEIDSSVNSGSFKFDSAVIIPCSMKTVSAIANGYASNSITRLADVALKERRTLVLVPRETPLRDVHLENMLRISKEGGIILPAMPAFYHDPKDISDMTNFIVGKVLDVLKIDNDMFKRWEKE

SEQ ID NO: 5708 - protein, 187 aa, Methanobrevibacter ruminantium
MIKDFDFINTCDISGFIKEEIRAIALYKSDVSKEDIVLDINCGIGEISTEFSKLSKEVYCIDEDNTAIEFSKTNIEKHGDIDKVKFINQDPLSAIRSIIDFDIAIIKANDDNIGEIIEEIHNRINSKGRIIILTNILDFALMSVNKLDELLYNPTISQIDVSKGQQLNKGVKLISDNPMTMIYVKKR

SEQ ID NO: 5709 - protein, 243 aa, Methanobrevibacter ruminantium
MNNQNKYSCIVLAGGMSRRMGQDKGSMIIYNKPMILHILERLNHKINDAVIVLNNAERISIYRNLLNQYADNDIEENFDYELSFIEDEVKSKGPISGVMTGLKNIKTDYALVLPCDSPFISGEYIESMFGILDENPLADAIIPFHIKSNKDKFKDNEEFNFKNADEMSLEMKIQNSEPLHSIYKKDNLNNIKSLLDDDSLYVKSFIRSLKSPVFIEVDNKVLFDDDFKNLNKQEDIDNLKFKK

SEQ ID NO: 5710 - protein, 232 aa, Methanobrevibacter ruminantium
MDILNKFDIVPNDMELYETAFTHSSYASKHHLNDYERLEFLGDSVLNMLTSEFLQNMHPDFGEGKLTKLRANYVCQNALIVYSHEFGLDKCVKLNLEDNALTDNEVISITADVFESFLGAIYLDQGISKCKEFLTITVFPYIENEQIFFHDYKSTIKEYGDAIDKEITYELIEEHGAPHDKTFVMKILIDGVDFGHGVGKSKKEAEQVAACNAIKTLRLDHGQDVAYMRLYK

SEQ ID NO: 5711 - protein, 152 aa, Methanobrevibacter ruminantium
MLLNWCEEITNIDPSINFRATGGWLKTVTGLDKSVLNGYSLVGEFVKSGDYKHEYSDGLYLDCNKEGKKSKPKQDFRLFRLKNGKLTLIDQVYDGKKNWACEFWESVSEELNPNFRESEADKIISLILDKTGKDKKLLREVQSQLDLVISEI

SEQ ID NO: 5712 - protein, 170 aa, Methanobrevibacter ruminantium
MTKSLILYFSRAGENYTSQGIKNIEIGNTEVIANYIKEFTEADMFKMEPLNDYPEDYMQCTEVAQKELNDDARPELKEYIEDISEYDMIYLGFPNWWNTMPMPVWTQLEKLDFDGKTIKPFVTHEGSGFGKSEKDIKNLCPGVKLAKGLSIRGSSVEDSKKKVKHWVKKG

SEQ ID NO: 5713 - protein, 61 aa, Methanobrevibacter ruminantium
MKGTPSMGKKNKKTHIRCRRCGKNSYHVRKKVCASCGFGRSSRLRSYSWQNKKSTTRQRLV

SEQ ID NO: 5714 - protein, 77 aa, Methanobrevibacter ruminantium
MSGQQNVQRPLDALGKAVNSPVLIKLKGEREFRGILKSFDLHMNLVLDDAEELEKGEVLRRLGTVLIRGDNIVYISP

SEQ ID NO: 5715 - protein, 234 aa, Methanobrevibacter ruminantium
MVELRVNAGNVKNPNVHKIGIIALGSHLENHGPALPIDTDAKIASHIAFQASLESGAKFLGVIYPAHELKEINHGIHVSLEDLTDEIVKVLKSAKKFLRISSVIIVNGHGGNLPIVTTLYDIEERTGLLITLNSKIIESEGPHGGSGELSMAKALGIIDESQVENQTNLEEYGEVGLYMFGEARRNDPNIEEGALDVEENGVYVDDVYGQELLKLAINSVLLDVEKQLDSHYGY

SEQ ID NO: 5716 - protein, 181 aa, Methanobrevibacter ruminantium
MIKLIKIIDFFNLNLLNGFKVLILKIKKRYFLKKKKVKEIKSELGDYGSFINNKDTLEMLEAEDYNFILVNGEPYIIIINDKPYPTLKAALNMELDSKVVVVDMGAVRFVTKGADIMSPGIVDADESIVPDDIVIIVEETHNKPLAIGISLITGPEMVENSEGKAIKSIHYVGDAIWNLEV

SEQ ID NO: 5717 - protein, 495 aa, Methanobrevibacter ruminantium
MSDKNEWGSNLSFVLAMVGSAVGLGNIWRYPYVLYSNGGGAFYIPYIVAILLMGIPFLILEYGVGYNFKSSFPKAIRKISSKAEYLGWLLPTSVFIIMIYYSCILGWDGIYVILSFFKGWGADPNTFFASTLLQSSESVSGITNFIPVIAIVMLISWGIVWYISHKDLEEGLGRVSKILVPLLFIIMIVIVLFSLTLPGAMIGLNELFSPDWNLLLDFNIWMAAFGQIIFSLSLGMSIAFTYASYTGKEGDIITNTLAITFANCAFENFCALGVFSILGYMSLQSGTAVADLVTQGTGLVFVAYPTVLNVLGQYAYVIGPLFFITVYLAGLTSILSTIEPLSFSIQNKFTWSRKKTMTVLCLIGAVLSMMYATAYGGTLLGYVDAYINQIAILFGVILECIVFAWIFKCENIIPILNERSKTIKLGKWWVVIVKYILPLFITIVWIGGVLDTINDGSTDQLIVFGILTVILLGLTALFTHLPATNEEWDETEYRL

SEQ ID NO: 5718 - protein, 149 aa, Methanobrevibacter ruminantium
MVNDEKSLSRMSKTDYYLAIAFAVSKRSTCLKRHYGAVIVNNDEIISTGYNGNPRGEENCCDRGSCKRMDVPSNSGDYSDCFSVHAEQNAMISASRNEMIGATIYLAGEMFKDDSWFEIEDAEPCPICFRMIKNSGVKKIVSKGVVIDL
